United States Patent Application Publication US 2006/0048240 A1 - sequence listing, part 2

SEQ ID NO: 4588 - DNA, 1455 bp, Glycine max
  misc_feature (1)..(1455): Ceres Seq. ID no. 13639636
tcctaatcgaaaaaaaacctaatagtaatagtagcaagtttctttcttttttgctctctctctctccatggacttccatctgaagcaatggagaaaccagcacgagtcagaggaacaacattctacaaagatgccaaaacttctccctgaatcccatcaacaacaacagccatcagcctctgcactccctttgtttgtacctgaacccaacagcagcaaagtcagcaccctgtcagattcaacattagcttctgctacaatgacttctaccaccactaacagattatttcccaggatggggagctacttcagcttgtctcagtggcaggagcttgagttgcaggctttgatattcaggtacatgttggctggtgctgctgttcctcctgaactccttcaaccaatcaagaaaagccttcttcattctccacactattacctccatcaccctctccaacattaccaaccttctgctttgttgcaatcagggtattggggtagaggagcgatggatccggagccagggcggtgccggagaaccgacggcaagaagtggcgctgttcgagggacgtggtggctgggcaaaagtactgtgagcgccacatgcaccgtggaagaaaccgttcaagaaagcctgtggaactacccacaccaactagtgctattaacaattgtggtgtaactggagttggatccctaggaccaggtgcttcatcatcttccatttgttcaccacccttagcttctgcttcattcaaatctccttttgatcttcatcttgatgaacgttcctctgggaccaagaatgaagacgaagatcatgtgggtggggatggcagatcaggtggaggtggtggccatatgctgaggcatttcttcgatgattggccacgatcactccaagactctgacaacgttgaaaacaatgctgctgctggccgtagcctctctatttcaatgcccggtgcttcctcggatgtgtcattgaaattgtccacgggctatggagaggactcgggcccaggaaatgagaatgtaagcctcgagccagagcagctgcagttgaattgggccggaggatgggcctcgtctaatcaagtggcttcgatgggaggtccacttgctgaggcactcagatcatctacttcaacctcatctcccactagtgttttgcatcgtcacttgcctcgtggatctgagaccagctttattagcacctgaatttagttatagtgggtgccccgattatttttctgtttcttgtttcgaggtttaagttccacttttggagcattcttggaccacggttatgttcttttcaaactgtgtagactacttttgtttctaagtgggcgatgaaaggatatggtcggtccctggttggattaattcgaagtaatactaaattgtcaattaacaatcacattttctttatgaaagtactttagttcctc

SEQ ID NO: 4589 - protein, 384 aa, Glycine max
  misc_feature (1)..(384): Ceres Seq. ID no. 13639637
MDFHLKQWRNQHESEEQHSTKMPKLLPESHQQQQPSASALPLFVPEPNSSKVSTLSDSTLASATMTSTTTNRLFPRMGSYFSLSQWQELELQALIFRYMLAGAAVPPELLQPIKKSLLHSPHYYLHHPLQHYQPSALLQSGYWGRGAMDPEPGRCRRTDGKKWRCSRDVVAGQKYCERHMHRGRNRSRKPVELPTPTSAINNCGVTGVGSLGPGASSSSICSPPLASASFKSPFDLHLDERSSGTKNEDEDHVGGDGRSGGGGGHMLRHFFDDWPRSLQDSDNVENNAAAGRSLSISMPGASSDVSLKLSTGYGEDSGPGNENVSLEPEQLQLNWAGGWASSNQVASMGGPLAEALRSSTSTSSPTSVLHRHLPRGSETSFIST

SEQ ID NO: 4590 - protein, 363 aa, Glycine max
  misc_feature (1)..(363): Ceres Seq. ID no. 13639638
MPKLLPESHQQQQPSASALPLFVPEPNSSKVSTLSDSTLASATMTSTTTNRLFPRMGSYFSLSQWQELELQALIFRYMLAGAAVPPELLQPIKKSLLHSPHYYLHHPLQHYQPSALLQSGYWGRGAMDPEPGRCRRTDGKKWRCSRDVVAGQKYCERHMHRGRNRSRKPVELPTPTSAINNCGVTGVGSLGPGASSSSICSPPLASASFKSPFDLHLDERSSGTKNEDEDHVGGDGRSGGGGGHMLRHFFDDWPRSLQDSDNVENNAAAGRSLSISMPGASSDVSLKLSTGYGEDSGPGNENVSLEPEQLQLNWAGGWASSNQVASMGGPLAEALRSSTSTSSPTSVLHRHLPRGSETSFIST

SEQ ID NO: 4591 - protein, 320 aa, Glycine max
  misc_feature (1)..(320): Ceres Seq. ID no. 13639639
MTSTTTNRLFPRMGSYFSLSQWQELELQALIFRYMLAGAAVPPELLQPIKKSLLHSPHYYLHHPLQHYQPSALLQSGYWGRGAMDPEPGRCRRTDGKKWRCSRDVVAGQKYCERHMHRGRNRSRKPVELPTPTSAINNCGVTGVGSLGPGASSSSICSPPLASASFKSPFDLHLDERSSGTKNEDEDHVGGDGRSGGGGGHMLRHFFDDWPRSLQDSDNVENNAAAGRSLSISMPGASSDVSLKLSTGYGEDSGPGNENVSLEPEQLQLNWAGGWASSNQVASMGGPLAEALRSSTSTSSPTSVLHRHLPRGSETSFIST

SEQ ID NO: 4592 - DNA, 1586 bp, Glycine max
  misc_feature (1)..(1586): Ceres Seq. ID no. 13639645
agaacatcctaatcgaaaaaggaagtaacacaagccttcttcaagtgtttaattctcctctttaatttctctttagaatactcaacctttctcaagattctaatcaaaaggagagaaaaataaaatggccaccgaaaagcttagaggttgtgcaaatgtttttgcaagctctaaaccctacttggccatgatctctttacaatttggctatgcaggcatgaacattatcactaaggtttctctcaaccaaggcatgagccactatgtccttgtggtctatcgccacgcttttgccaccgctgtcatagctccttttgccattatttttgaaaggaaaggtcaaccgaagataacattcccagttttcatgcaaatttttattcttgctcttcttgggcctgtgattgatcaaaatttctactatgctgggttgaagctcacatccccaaccttctcatgtgcaatgagcaacatgcttccagccatgacttttgtgatggcagtgttttgccggatggagaagatagaaataaagaaggtgagatgcatggcaaagatagtgggaacattagtcacagtggcaggggctatgctgatgaccttatatagaggtcctatagtggagatggtatgggccaaacatccacacaataaaaccaatgcaacaaccacgacagaatcatttgacaaagattggttcttaggatgcacctttcttatcattgccaccctagcttgggcatccctatttgttttacaagccaaagctattcagacgtacaagaatcatcagttaagtctaacttcacttgtgtgctttattggcactcttcaagctattgctgttacttttgttgttgaacacaatccttctgtatggagaattggctgggatgtgagcttacttgctgctgcatatgctgggattgtgacatcaagcatatcatactatgtacaaggactggtaattaagatgaaaggacctgtctttgcaactgcctttagccctttaatgatgatcattgtggccatcatgggatccttcatccttgcggaacaaatttatcttggaggtgtaattggtgccatcttaatcgttatagggttatactcagttctgtggggaaagcacaaagaacaaatagagagcaaagtggcagatgaaattcccttgcctgtaaaagatgctcaaattgctgtaattgcagggccaatgattgatgccacagataattttactgaagaaaaatatggtcagaaaggagaagccaacaacaacaagctctcttcacacataataactatgcctattccagagcttcccactaaagctaaccaagagagaaagacttgagtaatttggaatgtgaataggaattaatgttttttaaatgtatgttccatcaaccccatttttccctttttagcaattattcctttctcctttctcttttttttttcttttttctttgctaccaaaagggtcttgtttgttgcatttaagcaatatataacatatataaatatgtaaaaaattccaacttgctagtcaaagtagaatagagaatcataaagcttatctctcc

SEQ ID NO: 4593 - protein, 409 aa, Glycine max
  misc_feature (1)..(409): Ceres Seq. ID no. 15220462
MATEKLRGCANVFASSKPYLAMISLQFGYAGMNIITKVSLNQGMSHYVLVVYRHAFATAVIAPFAIIFERKGQPKITFPVFMQIFILALLGPVIDQNFYYAGLKLTSPTFSCAMSNMLPAMTFVMAVFCRMEKIEIKKVRCMAKIVGTLVTVAGAMLMTLYRGPIVEMVWAKHPHNKTNATTTTESFDKDWFLGCTFLIIATLAWASLFVLQAKAIQTYKNHQLSLTSLVCFIGTLQAIAVTFVVEHNPSVWRIGWDVSLLAAAYAGIVTSSISYYVQGLVIKMKGPVFATAFSPLMMIIVAIMGSFILAEQIYLGGVIGAILIVIGLYSVLWGKHKEQIESKVADEIPLPVKDAQIAVIAGPMIDATDNFTEEKYGQKGEANNNKLSSHIITMPIPELPTKANQERKT

SEQ ID NO: 4594 - protein, 388 aa, Glycine max
  misc_feature (1)..(388): Ceres Seq. ID no. 15220463
MISLQFGYAGMNIITKVSLNQGMSHYVLVVYRHAFATAVIAPFAIIFERKGQPKITFPVFMQIFILALLGPVIDQNFYYAGLKLTSPTFSCAMSNMLPAMTFVMAVFCRMEKIEIKKVRCMAKIVGTLVTVAGAMLMTLYRGPIVEMVWAKHPHNKTNATTTTESFDKDWFLGCTFLIIATLAWASLFVLQAKAIQTYKNHQLSLTSLVCFIGTLQAIAVTFVVEHNPSVWRIGWDVSLLAAAYAGIVTSSISYYVQGLVIKMKGPVFATAFSPLMMIIVAIMGSFILAEQIYLGGVIGAILIVIGLYSVLWGKHKEQIESKVADEIPLPVKDAQIAVIAGPMIDATDNFTEEKYGQKGEANNNKLSSHIITMPIPELPTKANQERKT

SEQ ID NO: 4595 - protein, 378 aa, Glycine max
  misc_feature (1)..(378): Ceres Seq. ID no. 15220464
MNIITKVSLNQGMSHYVLVVYRHAFATAVIAPFAIIFERKGQPKITFPVFMQIFILALLGPVIDQNFYYAGLKLTSPTFSCAMSNMLPAMTFVMAVFCRMEKIEIKKVRCMAKIVGTLVTVAGAMLMTLYRGPIVEMVWAKHPHNKTNATTTTESFDKDWFLGCTFLIIATLAWASLFVLQAKAIQTYKNHQLSLTSLVCFIGTLQAIAVTFVVEHNPSVWRIGWDVSLLAAAYAGIVTSSISYYVQGLVIKMKGPVFATAFSPLMMIIVAIMGSFILAEQIYLGGVIGAILIVIGLYSVLWGKHKEQIESKVADEIPLPVKDAQIAVIAGPMIDATDNFTEEKYGQKGEANNNKLSSHIITMPIPELPTKANQERKT

SEQ ID NO: 4596 - DNA, 757 bp, Glycine max
  misc_feature (1)..(757): Ceres Seq. ID no. 13639656
aacaaacatgggaagcaagaaaacctacgaggaagaagaaagcacggctctattttcccattcccaaacacaaacagacttgctgttacccttcaacgagaacgacccacaggacatggtcatataccaagtcctccacgaagccaatgctctcaccaacacattcctccctcagcccaccagaaacataacaaagaagcactacagaggagtccgccgccgtccttggggaaaatacgccgctgagattcgcgactcggcgcgccacggcgccaggatatggctcggcaccttccaaaccgctgaagaggctgccatggcttatgaccgagccgcgttcaagatgaggggctccaaggctttgctcaatttcccagctgaaattgttgctgctgctactgcaacagagttatctttcaaaagtagtagtaataataataataataataataataacaatcccgatgctgtttctgattccagtgctggtagctcttgcacgaacaattccacttgggtaaataggaatcagtcagaaatcacaagtggcacaggttagctaaatggtgttgaagttgaacaattaattgtagaaatctttttttgtttctttttctcaatcgttttggtttgttataactattataattatttgtatctgtctgtccaactggacaacaaaaattaattaattgaatgtgataccatgatcatgcatgggttaaaattataatggttagtgatttttcttcttctt

SEQ ID NO: 4597 - protein, 185 aa, Glycine max
  misc_feature (1)..(185): Ceres Seq. ID no. 13639657
TNMGSKKTYEEEESTALFSHSQTQTDLLLPFNENDPQDMVIYQVLHEANALTNTFLPQPTRNITKKHYRGVRRRPWGKYAAEIRDSARHGARIWLGTFQTAEEAAMAYDRAAFKMRGSKALLNFPAEIVAAATATELSFKSSSNNNNNNNNNNPDAVSDSSAGSSCTNNSTWVNRNQSEITSGTG

SEQ ID NO: 4598 - protein, 183 aa, Glycine max
  misc_feature (1)..(183): Ceres Seq. ID no. 13639658
MGSKKTYEEEESTALFSHSQTQTDLLLPFNENDPQDMVIYQVLHEANALTNTFLPQPTRNITKKHYRGVRRRPWGKYAAEIRDSARHGARIWLGTFQTAEEAAMAYDRAAFKMRGSKALLNFPAEIVAAATATELSFKSSSNNNNNNNNNNPDAVSDSSAGSSCTNNSTWVNRNQSEITSGTG

SEQ ID NO: 4599 - protein, 147 aa, Glycine max
  misc_feature (1)..(147): Ceres Seq. ID no. 13639659
MVIYQVLHEANALTNTFLPQPTRNITKKHYRGVRRRPWGKYAAEIRDSARHGARIWLGTFQTAEEAAMAYDRAAFKMRGSKALLNFPAEIVAAATATELSFKSSSNNNNNNNNNNPDAVSDSSAGSSCTNNSTWVNRNQSEITSGTG

SEQ ID NO: 4600 - DNA, 1285 bp, Glycine max
  misc_feature (1)..(1285): Ceres Seq. ID no. 13639756
ctccttccacaaatggagaattccccatctcatccttcttctcttcaatgtcctccttcaaccctttctcccctccaccacccaccccttacctcaccaacctcggcttcggctactccatcgccatcgccctcggcgtcctcttcctcctctccaccctcatcctctcctcctacctctgctgccgcaccctccgccaccgcaacaacaaccgccacaccccccgtaacaacacctccgatggcatcgtcctcccgcgcgtgatcttcgtcgccgaggacgacgacgatgacgccacccgccagaacgacgccgtcaccggcctcgaccaggccgtaataaactcctaccccaagtttccttacgttaaggaaggtaattacgacagcacctgctcgatctgtctgtgcgagtacaaggattcggagatgctgaggatgatgccagagtgtcgacactactttcacttgtgttgtctcgacccgtggctcaagcttaacgggtcatgccccgtttgccggaactctcccatgccaacgccgctgtcgacgccgctgcaggaggtcgtgccgctctcacagtacgccgatgccagggcgaggaggtgaattcgaattttcttctccggtgtggctcgggttgctgggttcagtgggaaaagcataaaggacaaaacttagatcagttatttacatgtttttgcatgctgttattatcccatcaaaattggagttttacctttaatagttactggttagttttactcagattatccaagtaaaacttcagtttttgacgagagaacagcggtaaaaacacttgaataattgtatttaagttctttgtaagtgtaaatcttctcccgtgatggtagatgatggggagtttttgttttttgattatgtggttgtatggtgtcagcaagcgtgttgctggttactgaattattattggtaatgcactgaaagtctgaaactatgcagaatgtcacttttaggggaaattgtccgcgacttcgttttgttagtaccatgatttgacattggatataatggatagtagtactattatttttatttttgttctagttttgttggtttgacccactgtggagtctcttggtgagacttgagagcattagactctgttgtttttcgggggatttttttatattttatttttaactttctctaagaaattggttgtggtacctttttgtttcccgtttttcaattcatggacccattgggttgtcgtcattagtagacagcttgcatttggtgct

SEQ ID NO: 4601 - protein, 201 aa, Glycine max
  misc_feature (1)..(201): Ceres Seq. ID no. 13639757
PSTNGEFPISSFFSSMSSFNPFSPPPPTPYLTNLGFGYSIAIALGVLFLLSTLILSSYLCCRTLRHRNNNRHTPRNNTSDGIVLPRVIFVAEDDDDDATRQNDAVTGLDQAVINSYPKFPYVKEGNYDSTCSICLCEYKDSEMLRMMPECRHYFHLCCLDPWLKLNGSCPVCRNSPMPTPLSTPLQEVVPLSQYADARARR

SEQ ID NO: 4602 - protein, 186 aa, Glycine max
  misc_feature (1)..(186): Ceres Seq. ID no. 13639758
MSSFNPFSPPPPTPYLTNLGFGYSIAIALGVLFLLSTLILSSYLCCRTLRHRNNNRHTPRNNTSDGIVLPRVIFVAEDDDDDATRQNDAVTGLDQAVINSYPKFPYVKEGNYDSTCSICLCEYKDSEMLRMMPECRHYFHLCCLDPWLKLNGSCPVCRNSPMPTPLSTPLQEVVPLSQYADARARR

SEQ ID NO: 4603 - DNA, 750 bp, Glycine max
  misc_feature (1)..(750): Ceres Seq. ID no. 13639786
accggtaaagtaactagtggcaagtggtactgtaaaacatcacatcgtcgcaccgtgacggtgttcggccgagccggtcgatcgacacggcagccagcatgaaggcgtcctgcttactggtcgtgcttctgctcgccgtcgccacggggagcaggctctcgctcgccgcccgcgagggcagcaccctgggcggcgagctcggcgagctcatcgccaaggccggcagcttcctcacgtcggcgcgccgcgcgggagcagacggctggcactccgccacggccgcggaggtggacgcctcggcgaagaaggggcacggccatccggcggggccgaggaagcgtctgaagaagtcgtcggtgaactgcatcccggccgacatgtgccggaagaagaaggtgctgtgcggcaagcggtgctacaagacgtcgcacgctgccggcgccggcctcgaccacgtcccctccaaccggtgcgtcgtcaggtgcaagaagtgcgtgcccacctgctagatcgatcgttggttgctcctacccttccctcttctgggttacgtgtcgtgtcgtgtcgtggtgctcgatccgtgcatgctagctacatttgcttttccttccatagggttcatgcatcagttgaataagcaggcgggcttcccgccatcatgcatgcagtataggtagtggatgggttctactctaaaagaaatgcaccacggttgtgtgctaagtttgaacgtgatctcatctcatcttt

SEQ ID NO: 4604 - protein, 136 aa, Glycine max
  misc_feature (1)..(136): Ceres Seq. ID no. 13639787
MKASCLLVVLLLAVATGSRLSLAAREGSTLGGELGELIAKAGSFLTSARRAGADGWHSATAAEVDASAKKGHGHPAGPRKRLKKSSVNCIPADMCRKKKVLCGKRCYKTSHAAGAGLDHVPSNRCVVRCKKCVPTC

SEQ ID NO: 4605 - DNA, 642 bp, Glycine max
  misc_feature (1)..(642): Ceres Seq. ID no. 13643037
gaacatcctaatcgaaaaacacagtcacatacatagaaacccattattcccaatttcccaatttccattaggcagagcaaagtaatcgcaaaatctagggtttgttcgttcgctcgttcgcaacaatggcgctgaggagattctacaacgagatcaaggggaagagggtgagcgaggtccctgagcacgtgaagccgatgctgtccctgagctacatcaagaaagcgattcagagaggcttcgacaattaccatgccaagtacattgaaaccagttcccctgatcccatcttccatgtctgctacggcggcatgatcttctcctacctcgtcgctctcccccacgagcgccgccacctcctccacgcccaggagcacgctcagcagcatcactgattccatccaccttcaggatcctggttgaattggaggtggttggcttgcttgatctttgttttaaaatctgaaaaatcaaggcagaaagatactgtcagcttctgtgtatttcatcatttggatgataaaataagttctatttgatacaattctcaattttcttgcagttaaatgtttaattgaatgtgtgaaaaatgagcatactttttcaaaaaaaaaaaaaaaaaagcttatcgataccgtcgac

SEQ ID NO: 4606 - protein, 89 aa, Glycine max
  misc_feature (1)..(89): Ceres Seq. ID no. 15220476
MALRRFYNEIKGKRVSEVPEHVKPMLSLSYIKKAIQRGFDNYHAKYIETSSPDPIFHVCYGGMIFSYLVALPHERRHLLHAQEHAQQHH

SEQ ID NO: 4607 - protein, 65 aa, Glycine max
  misc_feature (1)..(65): Ceres Seq. ID no. 15220477
MLSLSYIKKAIQRGFDNYHAKYIETSSPDPIFHVCYGGMIFSYLVALPHERRHLLHAQEHAQQHH

SEQ ID NO: 4608 - DNA, 529 bp, Glycine max
  misc_feature (1)..(529): Ceres Seq. ID no. 13644527
tccttcgttcgcattttaggcattgaaaactaattgaaggagttgcagtccagcgttgatcagaatcagagcatggacgggcatgattcagaagacccaaagcaaagcactgctgatatgacagcttttgtgcaaaatcttcttcagcagatgcaacttaggttccagacaatgtctgactccatcatttctaagattgatgagatgggagaccgtataaatgagttggagcaaagcatcaatgatttaagatcagagatgggagtggagagcactccatcacctgtggcccctgctaagccaaaggaagaagagtcaaacaaagaagagggttctgcttgagtaatgttacgtgttcaactgccttgtcttttatttttgggtctcgtgtgattcattcaggattttgttactgtatatctagtgaactctctttgctagctaaaacatactgttcaaactatgtaaaaatcacagcactgttggtttattgtgtttttccaattgaagatgggctagattgggtgcc

SEQ ID NO: 4609 - protein, 89 aa, Glycine max
  misc_feature (1)..(89): Ceres Seq. ID no. 13644528
MDGHDSEDPKQSTADMTAFVQNLLQQMQLRFQTMSDSIISKIDEMGDRINELEQSINDLRSEMGVESTPSPVAPAKPKEEESNKEEGSA

SEQ ID NO: 4610 - protein, 74 aa, Glycine max
  misc_feature (1)..(74): Ceres Seq. ID no. 13644529
MTAFVQNLLQQMQLRFQTMSDSIISKIDEMGDRINELEQSINDLRSEMGVESTPSPVAPAKPKEEESNKEEGSA

SEQ ID NO: 4611 - protein, 63 aa, Glycine max
  misc_feature (1)..(63): Ceres Seq. ID no. 13644530
MQLRFQTMSDSIISKIDEMGDRINELEQSINDLRSEMGVESTPSPVAPAKPKEEESNKEEGSA

SEQ ID NO: 4612 - DNA, 1147 bp, Glycine max
  misc_feature (1)..(1147): Ceres Seq. ID no. 14301423
acacacgctccgcctccacctccgcttcccatttcccgccgcctcctttcctaaaaatctacacaaagattcgtaggaaaatcctgcccaaatcccccacctcccgtttctgctcccgttcccaccccaatcccctccaagaaaccctcgcccccctcgcctcgccgccatgggcagcgccgcctcgccgccgcgggccctcgacgcggcgacgcaggaggacctcaagcgcgtctccgcgcaccgcgccgtcgacatggtggagtccggcatgacgctggggctcggcaccggctccacggccgcgcacgcgctcgaccgcctcggggccctcctccgcaccggcgcgctgcgcgcggtcgccggggtgcccacctccctcaagacggaggcgcacgccgcgcgcgtcgggatccccatgctcgcgctcgccgacgccgccgagatccacctctccatcgacggcgccgacgaggtcgacccggacctcaacctcgtcaagggccgcggcggctcgctcctccgcgagaagatgatcgagggcgccggcgcccgcttcgtcgtcatcgtcgacgagtccaagctcgtcccccgcctcggctgcacgggctccgtgcccgtcgaggtcgtccccttcggcagcgcctacacgctcggcctcatccgcatggtgttcgacaaattgccgggcttccacgccaggctcaggaccgtcaagtccaaggccggcgacggccaggaggagctctttctcaccgacaacggcaaccacatcgtcgagatgttcttcgaggacggcatacacggcaacctgcgcgacataagcgacagcctgctgcgcatcacgggcgtcgtcgagcacggcatgttcctcggcatggccaccaaggtgatcgtcgccaagaaggacggcaccgtggcggtcctcagcaagaagtagcctggccgcctggggaagagtctgcagaggagatgacaataagcccagattcaagctgttcttgctcctgcggtgaacttgctctacgttactgttacagcgttttctcctattcatgggtaatgcgatggtgcccagcttaatgtggtgaagctaataaattttggacttcgctccataatgttatcaagtcagttttgtacttcc

SEQ ID NO: 4613 - protein, 256 aa, Glycine max
  misc_feature (1)..(256): Ceres Seq. ID no. 14301424
MGSAASPPRALDAATQEDLKRVSAHRAVDMVESGMTLGLGTGSTAAHALDRLGALLRTGALRAVAGVPTSLKTEAHAARVGIPMLALADAAEIHLSIDGADEVDPDLNLVKGRGGSLLREKMIEGAGARFVVIVDESKLVPRLGCTGSVPVEVVPFGSAYTLGLIRMVFDKLPGFHARLRTVKSKAGDGQEELFLTDNGNHIVEMFFEDGIHGNLRDISDSLLRITGVVEHGMFLGMATKVIVAKKDGTVAVLSKK

SEQ ID NO: 4614 - protein, 227 aa, Glycine max
  misc_feature (1)..(227): Ceres Seq. ID no. 14301425
MVESGMTLGLGTGSTAAHALDRLGALLRTGALRAVAGVPTSLKTEAHAARVGIPMLALADAAEIHLSIDGADEVDPDLNLVKGRGGSLLREKMIEGAGARFVVIVDESKLVPRLGCTGSVPVEVVPFGSAYTLGLIRMVFDKLPGFHARLRTVKSKAGDGQEELFLTDNGNHIVEMFFEDGIHGNLRDISDSLLRITGVVEHGMFLGMATKVIVAKKDGTVAVLSKK

SEQ ID NO: 4615 - protein, 222 aa, Glycine max
  misc_feature (1)..(222): Ceres Seq. ID no. 14301426
MTLGLGTGSTAAHALDRLGALLRTGALRAVAGVPTSLKTEAHAARVGIPMLALADAAEIHLSIDGADEVDPDLNLVKGRGGSLLREKMIEGAGARFVVIVDESKLVPRLGCTGSVPVEVVPFGSAYTLGLIRMVFDKLPGFHARLRTVKSKAGDGQEELFLTDNGNHIVEMFFEDGIHGNLRDISDSLLRITGVVEHGMFLGMATKVIVAKKDGTVAVLSKK

SEQ ID NO: 4616 - DNA, 1309 bp, Glycine max
  misc_feature (1)..(1309): Ceres Seq. ID no. 14301430
atcacatcgtctcaccaagcagcagctagctaagctaagcctagccaaagcttctctagcttcggtagtccaggaaacatgaggctcgcggtggttctcctctgcgccctggtggccgtccaggtcgcgctcctcgccgccccggcggaggccggcgagctggtggtcgggtactacgacaagaaatgcaggggcgtggagaacgtcgtccagtggcacgtcaggagggcgctcaagaccaaccgccgcgccggtgccgccctcgtccgcctcctcttccacgactgcttcgtcaggggttgcgatgcctctgtgctccttgacgcgtcccccgagaaccctcacccggagaaggaggcgccggtgaacatcgggctggccgccttcgacctcctggaggagatcaaggcggccgtcgaggacaggtgccccggcgtggtgtcctgctctgacatcctcatttacgcagcccgtgacgcggcccacgccctcagcaatggcaacatccacttcgacgtccctgccgggcgcctcgacggcctcgtctcctcggccgccgaggcccaggcggagctcccggactccaccttcaccgtgcagcagctcatcgacaacttcgcacgcaaggacttcgacgtggaggagctggtcatcctgtccggcgcgcactccatcggcgtcggccactgctcctccttcaccggccgcctcaccgcgccgccggagcagatcaacccggcctaccgcaaccttctcaaccacaagtgccaccagggcgccaacccggccgtcgtcaacaacgtccgcgatgaggactacgagacggtgtccaagttcatgcccgggttcaccagccgggtgcgcaagatcagcgacttcctcgacaacaccttctaccacaacaacctcgccaggatcgtcagcttcaactccgactggcagctcatgacccacaccgaggccaggggccacgtccacgagtacgccgacaacgccacgctctgggacggcgacttcgcggaatccctgctcaagctcagcaagctgtccatgcccgccgggagcaagggcggcatcaggaagaagtgcagcatcgccacccaccctctctactaaacaagtcgtatgcatgcatgaacaaggtcgatccaacgaagaagagaacctttgcccctggcggtgtgcggatttcttcaataatcatgtgatttttctggttcaatccattcttttgattcccattggttgtgtattttatttatggcaacatatatgtatcacggaaataaagttacggtctttcaaatgt

SEQ ID NO: 4617 - protein, 345 aa, Glycine max
  misc_feature (1)..(345): Ceres Seq. ID no. 14301431
MRLAVVLLCALVAVQVALLAAPAEAGELVVGYYDKKCRGVENVVQWHVRRALKTNRRAGAALVRLLFHDCFVRGCDASVLLDASPENPHPEKEAPVNIGLAAFDLLEEIKAAVEDRCPGVVSCSDILIYAARDAAHALSNGNIHFDVPAGRLDGLVSSAAEAQAELPDSTFTVQQLIDNFARKDFDVEELVILSGAHSIGVGHCSSFTGRLTAPPEQINPAYRNLLNHKCHQGANPAVVNNVRDEDYETVSKFMPGFTSRVRKISDFLDNTFYHNNLARIVSFNSDWQLMTHTEARGHVHEYADNATLWDGDFAESLLKLSKLSMPAGSKGGIRKKCSIATHPLY

SEQ ID NO: 4618 - DNA, 823 bp, Glycine max
  misc_feature (1)..(823): Ceres Seq. ID no. 14301432
tcactcccttccttcgtcctttgcactcccactcctacgcttcccaacctcgccattccgtcgagcacatcccgggcgacgcaggcggccatggaggacggcggcgcgagagcggcggcggtgcagaagctgatggcggccaaggccaagtccggcaagagcttctccgacatcggggccgagacggggctcaccaacgtgtacgtcgcgcagctgctgcgccgccaggcgcagctcaagcccgacacggcggccgcgctgcgggcggccatcccggcgctcaccgaagagctcgtggaactcatgatgcagccgcccttccgctcgtacaaccctgaaatggtccacgagcccgccatatacagactgaatgaagctatcatgcattttggagagagcatcaaggcaatcatcaatgaggactttggtgatggaatcatgtcagctatagacttctactgtaccgtcgacaaagttaaaggggctgatggaaaagaccgtgtggtgctcacatttgatgggaagtatctgcctcacactgaacagaaagccgcgaatatgatgtcgaagttgccctgcaaggcaccttgagataatgagatggctggtactgggagaaggggggtatgtagcttcactaatgtctgcttatacttcggacaaaaaaattgagcgtcccttttctagtctgaatgatcgaccaaataaagagtggtcatatagtatgtaatgtctgcttgtactttggacctggaacagcattcgacatgcttttcctcgtctgaatgatcgactaaataaagtggcaatatagtttgtaaat

SEQ ID NO: 4619 - protein, 196 aa, Glycine max
  misc_feature (1)..(196): Ceres Seq. ID no. 14301433
SLPSFVLCTPTPTLPNLAIPSSTSRATQAAMEDGGARAAAVQKLMAAKAKSGKSFSDIGAETGLTNVYVAQLLRRQAQLKPDTAAALRAAIPALTEELVELMMQPPFRSYNPEMVHEPAIYRLNEAIMHFGESIKAIINEDFGDGIMSAIDFYCTVDKVKGADGKDRVVLTFDGKYLPHTEQKAANMMSKLPCKAP

SEQ ID NO: 4620 - protein, 166 aa, Glycine max
  misc_feature (1)..(166): Ceres Seq. ID no. 14301434
MEDGGARAAAVQKLMAAKAKSGKSFSDIGAETGLTNVYVAQLLRRQAQLKPDTAAALRAAIPALTEELVELMMQPPFRSYNPEMVHEPAIYRLNEAIMHFGESIKAIINEDFGDGIMSAIDFYCTVDKVKGADGKDRVVLTFDGKYLPHTEQKAANMMSKLPCKAP

SEQ ID NO: 4621 - protein, 152 aa, Glycine max
  misc_feature (1)..(152): Ceres Seq. ID no. 14301435
MAAKAKSGKSFSDIGAETGLTNVYVAQLLRRQAQLKPDTAAALRAAIPALTEELVELMMQPPFRSYNPEMVHEPAIYRLNEAIMHFGESIKAIINEDFGDGIMSAIDFYCTVDKVKGADGKDRVVLTFDGKYLPHTEQKAANMMSKLPCKAP

SEQ ID NO: 4622 - DNA, 924 bp, Glycine max
  misc_feature (1)..(924): Ceres Seq. ID no. 14302025
aaccagtcaccgctctctttttcatttacagagatagccctaacttagtcactctctctcacacacactccagttcaaagttcaaacaatggctcctccacagaagctctttctcgccgccattgtcgctgccgtcattgtagccgccaccaccggatatgcacctaatagtgctgcggaagatattgtgcattcctcatgcgtgcacgcgagctatccatcgctatgcgtccgtacactctctacctactctggtccaaccatcacaaaccgtcgcgagctagctcaagccgccgtcaagataagcctctcccacgctcgagcagccgctaagaaactcgcggctgtgagagaaaccgtgggaaagaaacgggtgaaagcggcggttgtggactgcgtggagatgattggagactcggtggacgagctgagccgcacgctaggcgttttaaagcatctacacgtttcgggcgtttcggcgaacgagttcaggtggcagatgagcaacgcgcagacgtgggctagtgcggcgttgacggatgacgacacgtgtctcgatgggtttaaaggggtcgagggtaaggttaaaacggaggtgaagcattggatgacgaaagtggcgagggttacaagcaacgcgctttacatgatcaaccagctagatgaatcacgtggctagccccacgtagtacgttcttgatgttatgatgtgcttgtcctaatggacagttatgatttggtgttagtttttttcgtgtttgcttaattgcgagttatctactatttaaaaatgagaggcattgtccttttaagtagttctgataatggtatactaaataaatggtttatctcttttttcggacggtatgtcattgtatcgtattgtgttgttcccttcggattcgatagcatgtgattttgtct

SEQ ID NO: 4623 - protein, 196 aa, Glycine max
  misc_feature (1)..(196): Ceres Seq. ID no. 14302026
MAPPQKLFLAAIVAAVIVAATTGYAPNSAAEDIVHSSCVHASYPSLCVRTLSTYSGPTITNRRELAQAAVKISLSHARAAAKKLAAVRETVGKKRVKAAVVDCVEMIGDSVDELSRTLGVLKHLHVSGVSANEFRWQMSNAQTWASAALTDDDTCLDGFKGVEGKVKTEVKHWMTKVARVTSNALYMINQLDESRG

SEQ ID NO: 4624 - DNA, 728 bp, Glycine max
  misc_feature (1)..(728): Ceres Seq. ID no. 14302027
gttctcttctcttcaggaacaacacaaaacaaggatgatgtcgcagcaatggggctctccatgtggaagccaatgcaccaataaatacgctgccctcggcaaaatcccatggcgaatattctgcaaaaagggttgcgactcagatggagagacatgggaagaatgtttggaggactgcaatcaaatatgctacaaggatcccgtactaaaggaccagcagtggagtgcttatattgatcgttcccctggagctgccagttattcggaggaatgctttcatgcgtgtgtatctggctgcggttacaagtttgaggttaaatcagaggaagctgataaagtctgtcctaacaggcaaccaaagcctgaaaccaagcctactaagaagccaaagccacaacctgtacgccccatcgatctgcctggtgatatacctgacacttctgcatagtgaaaaacatcagcatatttgacaaaaatccagcatgtatgtatacttgatactttgttggttatattctctcaggaatttttttttctttctttttctttttttttctttttaccttgaaacatgctaattgttatcagcatgagttacttacattttgtggacaacaccatgagtggttgtgcctatttttgccttgagaatttggaggcatcgtgttgcctttaaactgggagcattgatagttggataattacagggcttccatgatttattaagg

SEQ ID NO: 4625 - protein, 148 aa, Glycine max
  misc_feature (1)..(148): Ceres Seq. ID no. 14302028
FSSLQEQHKTRMMSQQWGSPCGSQCTNKYAALGKIPWRIFCKKGCDSDGETWEECLEDCNQICYKDPVLKDQQWSAYIDRSPGAASYSEECFHACVSGCGYKFEVKSEEADKVCPNRQPKPETKPTKKPKPQPVRPIDLPGDIPDTSA

SEQ ID NO: 4626 - protein, 137 aa, Glycine max
  misc_feature (1)..(137): Ceres Seq. ID no. 14302029
MMSQQWGSPCGSQCTNKYAALGKIPWRIFCKKGCDSDGETWEECLEDCNQICYKDPVLKDQQWSAYIDRSPGAASYSEECFHACVSGCGYKFEVKSEEADKVCPNRQPKPETKPTKKPKPQPVRPIDLPGDIPDTSA

SEQ ID NO: 4627 - protein, 136 aa, Glycine max
  misc_feature (1)..(136): Ceres Seq. ID no. 14302030
MSQQWGSPCGSQCTNKYAALGKIPWRIFCKKGCDSDGETWEECLEDCNQICYKDPVLKDQQWSAYIDRSPGAASYSEECFHACVSGCGYKFEVKSEEADKVCPNRQPKPETKPTKKPKPQPVRPIDLPGDIPDTSA

SEQ ID NO: 4628 - DNA, 729 bp, Glycine max
  misc_feature (1)..(729): Ceres Seq. ID no. 14302039
agctatattctgaaacagaagctatgaagctggtcaaagccactccttttgattatgggagtggacacgttaatcccagagctgccttggaccctggcctcatctttgatgcaggatacgaggattatctagggttcttgtgcacaacacctggcattgatgttcatgagataaagaactacacaaactccccatgtaacaacaccatgggccacccatcaaatctaaacactccctccattacaatttcccatctagtaagaagtcaaattgtcacacgcactgtgacaaatgttgctgatgaggaagaaacctacgtgatcacagccaggatgcaaccagcagttgccattgacgtgaaccctccagcaatgaccatcaaagccagtgcatcgcgtaggtttactgtgacactcactgttcgctcagtgacaggaacctatagttttggagaggtgctaatgaagggaagcagagggcacaaggtgaggatccctgttctggccaatggatactcaagatagctttagtttggtctgcaaagaaaagttatgcctgtaatattctttgtaatttgtggaaataaggaaggtacggcgttagatttattcatgaaaatataatatatggtgttgaatagatgtaaaggtaagcaggtgtaaggaggagactcctggtttattttattccacatataaagttttgctaataacatcttgttatttattg

SEQ ID NO: 4629 - protein, 173 aa, Glycine max
  misc_feature (1)..(173): Ceres Seq. ID no. 14302040
LYSETEAMKLVKATPFDYGSGHVNPRAALDPGLIFDAGYEDYLGFLCTTPGIDVHEIKNYTNSPCNNTMGHPSNLNTPSITISHLVRSQIVTRTVTNVADEEETYVITARMQPAVAIDVNPPAMTIKASASRRFTVTLTVRSVTGTYSFGEVLMKGSRGHKVRIPVLANGYSR

SEQ ID NO: 4630 - protein, 166 aa, Glycine max
  misc_feature (1)..(166): Ceres Seq. ID no. 14302041
MKLVKATPFDYGSGHVNPRAALDPGLIFDAGYEDYLGFLCTTPGIDVHEIKNYTNSPCNNTMGHPSNLNTPSITISHLVRSQIVTRTVTNVADEEETYVITARMQPAVAIDVNPPAMTIKASASRRFTVTLTVRSVTGTYSFGEVLMKGSRGHKVRIPVLANGYSR

SEQ ID NO: 4631 - protein, 105 aa, Glycine max
  misc_feature (1)..(105): Ceres Seq. ID no. 14302042
MGHPSNLNTPSITISHLVRSQIVTRTVTNVADEEETYVITARMQPAVAIDVNPPAMTIKASASRRFTVTLTVRSVTGTYSFGEVLMKGSRGHKVRIPVLANGYSR

SEQ ID NO: 4632 - DNA, 1159 bp, Glycine max
  misc_feature (1)..(1159): Ceres Seq. ID no. 14302051
gacttctccatggaccatggttggtgtgctgtgatgaagaaactcttggacattatatttgagggtggtgttgatgcaggagagcatgcctccattgagcttgcattgttgaacatgggtcttctacacagagctgtaaagagaaactgtaggcctatggtagaactactgttaagatttgttccagttaaaacctcagatggtgcagacagtgaaatgaagcaagttgccgaagcccctgacagattcttatttagacctgatactgtcgggccagctgggttgactcctcttcatgttgcagcaagtatgagtggctcagagaatgtgttggatgcattaaccaatgatccacgaatggtgggaattgaagcatggaaaagtgcccgggacagtacaggtttgacccctaacgaccatgcttgccttaggggctattactcttacattcaactagtccagaacaagaccaacaaaaaaggtgaaagacaacatttggttgatatccctggaactgttgtagatagtaacacaacgcagaagcaatcagatggaaataggacatgtagagttccaagcttaaagactgagaagattgaaaccacagcaatgccccgtcaatgtagggcatgccagcagaaggtggcttatggtggcatgaaaacagcaatggtttataggccagtcatgctctccatggtgaccatagcagttgtgtgtgtctgtgtagctttgctcttcaaaagctcacctagagtttattatgtcttccagcccttcaactgggaatcattagagtatggggcaatgtaatgttgtatatcaggtgttttctgctgtaagcttccaccttttcttaatatattattttagaaactgggtaagtcttagattttgggtttagagtatagacatgttatacatccatagtaatagtagctgtcatcaatatatatggggaaaacccgaggttgacacttcacctgttcagaacagaatcttgattatgaaacctgtgaacctgttaaatatggggtcaatgctattaggccattatatatgtgataatagggataacgccataacagttttaagcaatttgaggaaattgccttgtattaattaatcaataaatacaagatatttacggttcagtttc

SEQ ID NO: 4633 - protein, 270 aa, Glycine max
  misc_feature (1)..(270): Ceres Seq. ID no. 14302052
DFSMDHGWCAVMKKLLDIIFEGGVDAGEHASIELALLNMGLLHRAVKRNCRPMVELLLRFVPVKTSDGADSEMKQVAEAPDRFLFRPDTVGPAGLTPLHVAASMSGSENVLDALTNDPRMVGIEAWKSARDSTGLTPNDHACLRGYYSYIQLVQNKTNKKGERQHLVDIPGTVVDSNTTQKQSDGNRTCRVPSLKTEKIETTAMPRQCRACQQKVAYGGMKTAMVYRPVMLSMVTIAVVCVCVALLFKSSPRVYYVFQPFNWESLEYGAM

SEQ ID NO: 4634 - protein, 267 aa, Glycine max
  misc_feature (1)..(267): Ceres Seq. ID no. 14302053
MDHGWCAVMKKLLDIIFEGGVDAGEHASIELALLNMGLLHRAVKRNCRPMVELLLRFVPVKTSDGADSEMKQVAEAPDRFLFRPDTVGPAGLTPLHVAASMSGSENVLDALTNDPRMVGIEAWKSARDSTGLTPNDHACLRGYYSYIQLVQNKTNKKGERQHLVDIPGTVVDSNTTQKQSDGNRTCRVPSLKTEKIETTAMPRQCRACQQKVAYGGMKTAMVYRPVMLSMVTIAVVCVCVALLFKSSPRVYYVFQPFNWESLEYGAM

SEQ ID NO: 4635 - protein, 259 aa, Glycine max
  misc_feature (1)..(259): Ceres Seq. ID no. 14302054
MKKLLDIIFEGGVDAGEHASIELALLNMGLLHRAVKRNCRPMVELLLRFVPVKTSDGADSEMKQVAEAPDRFLFRPDTVGPAGLTPLHVAASMSGSENVLDALTNDPRMVGIEAWKSARDSTGLTPNDHACLRGYYSYIQLVQNKTNKKGERQHLVDIPGTVVDSNTTQKQSDGNRTCRVPSLKTEKIETTAMPRQCRACQQKVAYGGMKTAMVYRPVMLSMVTIAVVCVCVALLFKSSPRVYYVFQPFNWESLEYGAM

SEQ ID NO: 4636 - DNA, 1268 bp, Glycine max
  misc_feature (1)..(1268): Ceres Seq. ID no. 14302757
agaaaagagttgtttcagtttcgagcgcaaacaagaatgaagggagattggttggaattggagttggagaaggaaataggagacgccatttcccgaacccgattcgcgccccactctaacaccctcctcatctcttcttgggactccagtcttcgcctcttcgacgtcgacgcctctctcctcagactccaagctccctcgcaagctcccctcctcgattgctgcttccaggacgacgctgtggccttcgccgccgcctctgatggactaatccgaaggtatgacttgcattcaggacttgttgatacactgggtagtcacgatgatatggcaacatgtattggatattccaatgaaacatgtcagttggtcacatccggatttgacaaaaagttactgttatgggacatgcatatgaagaagacttctttatgtttgagaagtctagatgcagaggtggactccatgtctgtctctggatttaatgttaccgtagccattggagcatcaatgcttgtttatgatttacgttactttgaccaaccagttgagtcaaaagaggcattcaatggaacacacttaagatgtgtcagttcaattccagatgcagaaggattcgcagttgggtctgtagacggacgagtatcactgcagatttccaatccattcagttcaaacgacattagatatatattccggtgtcatccaaaatcaaaggatggacggcattatttggtatcagtgaacgacattgcattcagtccacttgtatctggtgcctttgccactggtgacaatgaaggttatgttaccatatgggatgctggaagtaggagaagactagttgagttgcccaggtatccaaatagtgttgcatccttatcatacaaccacacaggtcagcttctggctgtagcatcaagccatacttaccaagaagcaaaggaaatagaaaaaccacctcgtatattcatccatagagtggacaacattgatattggatcaatttctgctagtaagagaagttgaagcacttatgctatgcttgctgacgaagatttgtgtcatcagagacacaagtggaggcaccggtgaagaaaatagatgctctttaaaaagggatactgggagatcaagaaaaatattggaggaaaatattaaaagagtttgattgataaagtattatcattaagagtttgatttttggcggtgtttaataaaatcatgtactgtatttttatgtataaaaaattaagttatcatttttt

SEQ ID NO: 4637 - protein, 342 aa, Glycine max
  misc_feature (1)..(342): Ceres Seq. ID no. 14302758
RKELFQFRAQTRMKGDWLELELEKEIGDAISRTRFAPHSNTLLISSWDSSLRLFDVDASLLRLQAPSQAPLLDCCFQDDAVAFAAASDGLIRRYDLHSGLVDTLGSHDDMATCIGYSNETCQLVTSGFDKKLLLWDMHMKKTSLCLRSLDAEVDSMSVSGFNVTVAIGASMLVYDLRYFDQPVESKEAFNGTHLRCVSSIPDAEGFAVGSVDGRVSLQISNPFSSNDIRYIFRCHPKSKDGRHYLVSVNDIAFSPLVSGAFATGDNEGYVTIWDAGSRRRLVELPRYPNSVASLSYNHTGQLLAVASSHTYQEAKEIEKPPRIFIHRVDNIDIGSISASKRS

SEQ ID NO: 4638 - protein, 330 aa, Glycine max
  misc_feature (1)..(330): Ceres Seq. ID no. 14302759
MKGDWLELELEKEIGDAISRTRFAPHSNTLLISSWDSSLRLFDVDASLLRLQAPSQAPLLDCCFQDDAVAFAAASDGLIRRYDLHSGLVDTLGSHDDMATCIGYSNETCQLVTSGFDKKLLLWDMHMKKTSLCLRSLDAEVDSMSVSGFNVTVAIGASMLVYDLRYFDQPVESKEAFNGTHLRCVSSIPDAEGFAVGSVDGRVSLQISNPFSSNDIRYIFRCHPKSKDGRHYLVSVNDIAFSPLVSGAFATGDNEGYVTIWDAGSRRRLVELPRYPNSVASLSYNHTGQLLAVASSHTYQEAKEIEKPPRIFIHRVDNIDIGSISASKRS

SEQ ID NO: 4639 - protein, 233 aa, Glycine max
  misc_feature (1)..(233): Ceres Seq. ID no. 14302760
MATCIGYSNETCQLVTSGFDKKLLLWDMHMKKTSLCLRSLDAEVDSMSVSGFNVTVAIGASMLVYDLRYFDQPVESKEAFNGTHLRCVSSIPDAEGFAVGSVDGRVSLQISNPFSSNDIRYIFRCHPKSKDGRHYLVSVNDIAFSPLVSGAFATGDNEGYVTIWDAGSRRRLVELPRYPNSVASLSYNHTGQLLAVASSHTYQEAKEIEKPPRIFIHRVDNIDIGSISASKRS

SEQ ID NO: 4640 - DNA, 1418 bp, Glycine max
  misc_feature (1)..(1418): Ceres Seq. ID no. 14303113
taattgttatttttatataccagtgactgtccctgtaactcttgacatgctcttgcacatggaccgcagtagtaaatcatgcacgaccttgtacgtgttgtagaggttcctggtgtatcgatggaactttgtggtgggactcatgtccgtaatacttctgaaattcgtggttttaaaattatctcagaacagggtattgcatctggaatcagacgtatcgaagctgtagctggggaagctttcattgaatatatcaatgcccgagacttttatctgaagcagctatgttccactctcaaagttaaaccagaagaagtgacaacaaggatagaaaacctattagaggagttacgggtagtgagaaatgaaaattctgctgtgcgtgcaaaagcagcaatctacaaagcctcggtcattgcaagcaaagcattgttggtgggaaattcaaaacagtacagggtactagttgagtgctttgatgatgttgatgctgagtcacttaaaagtgccgcagaatatttactggaaacactaacagatccagcagctgtgatactaggctcatgtccaggtgaagggaaggttagtctagttgctgcttttactccaggggtggttgatcaggggattcaggcaggaaagtttattggacaaatagcaaaattatgtggtggtggaggaggtggaaggccaaattttgctcaggctggtgggaggaagcctgaaaatttggcaagtgcccttgataaggctcggtcagagcttatagccactctatgtgaaaaagggaattgaatttaagtacacttagcagatagatctttttatgctaaagcagcagaaaatattgattctctgttgtcgaagaattcatcacaaaacaattcacaagcaaaaggggcggaagctgctgaagttttaacgagttttcttgcaattccagggggcatgtaattgaagtttcaaaatagtatagagcatttgttcgtgtgactttattctcctgacaacctggcctgcattcacacattccaacttgtaaattttgacatgcgcatctcagattggttgcaggatgtaagtgcaaacactatatatatacacctgaaagatagttgagagtgaatgacggcggtggattcactcctttctcttttgattgccttggaggaagttgggaccccatagaattaaaagtgatagaactgaaggttaaactgtttggtgaaagtaagtgaatgatgttatgtctagcaacttgacggtcaagaaaattgtcaattgttgtgggtgaaacgctacttaaaaagaaagaaaaaatccatgattatcccggatgtgaaattgtgttatagaattatgtcactaaacggtagatgagaaattgtcacgtcccaaaatatggcctattttatgtc

SEQ ID NO: 4641 - protein, 238 aa, Glycine max
  misc_feature (1)..(238): Ceres Seq. ID no. 14303114
MHDLVRVVEVPGVSMELCGGTHVRNTSEIRGFKIISEQGIASGIRRIEAVAGEAFIEYINARDFYLKQLCSTLKVKPEEVTTRIENLLEELRVVRNENSAVRAKAAIYKASVIASKALLVGNSKQYRVLVECFDDVDAESLKSAAEYLLETLTDPAAVILGSCPGEGKVSLVAAFTPGVVDQGIQAGKFIGQIAKLCGGGGGGRPNFAQAGGRKPENLASALDKARSELIATLCEKGN

SEQ ID NO: 4642 - protein, 224 aa, Glycine max
  misc_feature (1)..(224): Ceres Seq. ID no. 14303115
MELCGGTHVRNTSEIRGFKIISEQGIASGIRRIEAVAGEAFIEYINARDFYLKQLCSTLKVKPEEVTTRIENLLEELRVVRNENSAVRAKAAIYKASVIASKALLVGNSKQYRVLVECFDDVDAESLKSAAEYLLETLTDPAAVILGSCPGEGKVSLVAAFTPGVVDQGIQAGKFIGQIAKLCGGGGGGRPNFAQAGGRKPENLASALDKARSELIATLCEKGN

SEQ ID NO: 4643 - DNA, 1269 bp, Glycine max
  misc_feature (1)..(1269): Ceres Seq. ID no. 14303116
gtttataaacttgaaagaaaaaaaagaaaaagctaccctcaagcggaaagaatcaaccttcttccctttcatttctcactttcagtgttcactcactcatctccactgtgcttcttcttcatcatcattcatcttcttcttctccctctccctctcttcccttcccaatgtcctctctccaccttcttcccggcgccaccaccgcccccaactccgcattcctcctccgcccccattctcccctcttcccctccaaaaccctaacccccaaaaaacccaaacctccctccgccctcctccagtggaatcgcaagcccgagctctccggctccaccccccgcgtcgccgtcatcacctccggcaagggtggcgtgggcaagaccaccaccaccgccaacatcggcctctccctcgcccgtctcggcttctccgtggtcgccatcgacgccgacgtcggcctccgcaacctcgacctcctcctcggcctcgagaaccgcgtcaactacaccgtgatcgaggtcctgaatggcgaatgccgcctcgaccaagccctcgtccgcgacaagcgctggtccaacttcgaactcctctgcatctccaaaccccgatccaaactccccctcggattcggcggcaaggccctcacctggctcgtggacgcgctgaaagcacgttcacagggctgccccgacttcatcctcatcgactgccccgccggcattgacgccggcttcatcaccgccatcacgcccgccaacgaggccgtcctcatcactacccccgacatcaccagcctccgcgacgccgaccgcgtcaccggcctcctcgaatgcgacggaattcgggacatcaagatgatcgtcaaccgggttcggaccgacatgatcaaaggggaggacatgatgtcggtgttggacgtgcaagagatgttagggttgcctttgctcggggttattcctgaggatagtgaggttattagaagcaccaatagaggtttccctcttgtgctcaacaagcctcccactttggccggattggcgttcgaacaagccgcgtggaggctcgtggagcaagatagcatgcaggccgtggtggtggaagaacaacccaaacgtgggtttttctccttttttggtgggtaggatttaaacaaggttatgcgtaatggtgtgtatagttagttggttgggttagagcatgtttggatgagtgttgacaaaattgattttgaattgaattgatttgatttatgtttgaatggtttttatt

SEQ ID NO: 4644 - protein, 324 aa, Glycine max
  misc_feature (1)..(324): Ceres Seq. ID no. 14303117
MSSLHLLPGATTAPNSAFLLRPHSPLFPSKTLTPKKPKPPSALLQWNRKPELSGSTPRVAVITSGKGGVGKTTTTANIGLSLARLGFSVVAIDADVGLRNLDLLLGLENRVNYTVIEVLNGECRLDQALVRDKRWSNFELLCISKPRSKLPLGFGGKALTWLVDALKARSQGCPDFILIDCPAGIDAGFITAITPANEAVLITTPDITSLRDADRVTGLLECDGIRDIKMIVNRVRTDMIKGEDMMSVLDVQEMLGLPLLGVIPEDSEVIRSTNRGFPLVLNKPPTLAGLAFEQAAWRLVEQDSMQAVVVEEQPKRGFFSFFGG

SEQ ID NO: 4645 - protein, 240 aa, Glycine max
  misc_feature (1)..(240): Ceres Seq. ID no. 14303118
FINLKEKKEKATLKRKESTFFPFISHFQCSLTHLHCASSSSSFIFFFSLSLSSLPNVLSPPSSRRHHRPQLRIPPPPPFSPLPLQNPNPQKTQTSLRPPPVESQARALRLHPPRRRHHLRQGWRGQDHHHRQHRPLPRPSRLLRGRHRRRRRPPQPRPPPRPREPRQLHRDRGPEWRMPPRPSPRPRQALVQLRTPLHLQTPIQTPPRIRRQGPHLARGRAESTFTGLPRLHPHRLPRRH

SEQ ID NO: 4646 - DNA, 1651 bp, Glycine max
  misc_feature (1)..(1651): Ceres Seq. ID no. 14303137
aatgcatctagagctagagacttggacaattttggttgctattgtgtgcatcttggtctttgttctgaaggagattgttatgggagggaagagctcaaaagggagtggtaggaggtatgattttggtgcttcttcatcttcacgggataataactatggtggataccatccacaatcaccatacccttcttatcaaacacctcagcacccgcgtgcatcagctccattttatgactatggacagccaaaaaggaagttggataagaagtattccaggatagctgataattaccgttctttggatgaggttacagctgcacttgcaaatgctgggctggaatcttctaatctcattgttggcattgatttcaccaagagcaatgagtggacagggaagaggtcattcaatcgaaaaagtttacatgacattagaagtggtcaaaacccttatgaacaagcaatttctattatcgggaaaactttatctgctttcgatgaagataacttgattccttgttttggatttggagatgcatctacacacgatcaagatgtatttagtttctattcagaagagaggttctgcaatgggtttgaggaagttctgacacgatacagacaaattattccttccctaaaactcgcaggacccacttcgtttgcccctattattgaaatggctatgactattgttgagcaaagtggtggccaatatcatgtcttgctaataattgcagatggacaggtgactagaagcgttgatacacaaaatggcaacttaagtccgcaagagcagaacacaatagatgcaatagtaaaagccagtgagtatccactgtcaatagttttggtgggagttggagatggaccatgggaaatgatgagggaatttgatgataacatcccttctcgggcatttgacaattttcagtttgtgaattttactgaaataatgacaaggaatgtagattcaaccagaaaagagacagattttgccctttcagctttgatggagataccttctcaatacaaggcaaccctagagcttggcatattgggttcacggagggggcattcaccagatagggttgctctacccccacctctttatagtagaacctcttccagcatcagcacaaaatctacaaggtctaacagttttcagcagaggacacctacacatactagctatgatagcagtgttcacacagagacatcatcaagttctttatatgataataaggtttgccccatttgtcttaccaatgcaaaggatatggcctttggttgtgggcatcagacttgttgcgagtgtggagaggacctccaattctgtcccatttgccggagcacaatccatactagaataaggctttactagttagctttgatgcagaagtcctgtcaatgaaaatttcgtcatttccagaataaggggctgcaaaaggatgtgcagagttggtctggctcttttcacagatggtttcttgtccataaaaactgcatttgcaatttcgaggcgaaacttgtattcccagttacacttaggaagagctctttacagaaagaattggccttccccgttgtatatatgtagttcatgtgtctcggaaggcgtcatgtttttaaatgaactgcttgcattaaaatt

SEQ ID NO: 4647 - protein, 459 aa, Glycine max
  misc_feature (1)..(459): Ceres Seq. ID no. 14303138
MHLELETWTILVAIVCILVFVLKEIVMGGKSSKGSGRRYDFGASSSSRDNNYGGYHPQSPYPSYQTPQHPRASAPFYDYGQPKRKLDKKYSRIADNYRSLDEVTAALANAGLESSNLIVGIDFTKSNEWTGKRSFNRKSLHDIRSGQNPYEQAISIIGKTLSAFDEDNLIPCFGFGDASTHDQDVFSFYSEERFCNGFEEVLTRYRQIIPSLKLAGPTSFAPIIEMAMTIVEQSGGQYHVLLIIADGQVTRSVDTQNGNLSPQEQNTIDAIVKASEYPLSIVLVGVGDGPWEMMREFDDNIPSRAFDNFQFVNFTEIMTRNVDSTRKETDFALSALMEIPSQYKATLELGILGSRRGHSPDRVALPPPLYSRTSSSISTKSTRSNSFQQRTPTHTSYDSSVHTETSSSSLYDNKVCPICLTNAKDMAFGCGHQTCCECGEDLQFCPICRSTIHTRIRLY

SEQ ID NO: 4648 - protein, 433 aa, Glycine max
  misc_feature (1)..(433): Ceres Seq. ID no. 14303139
MGGKSSKGSGRRYDFGASSSSRDNNYGGYHPQSPYPSYQTPQHPRASAPFYDYGQPKRKLDKKYSRIADNYRSLDEVTAALANAGLESSNLIVGIDFTKSNEWTGKRSFNRKSLHDIRSGQNPYEQAISIIGKTLSAFDEDNLIPCFGFGDASTHDQDVFSFYSEERFCNGFEEVLTRYRQIIPSLKLAGPTSFAPIIEMAMTIVEQSGGQYHVLLIIADGQVTRSVDTQNGNLSPQEQNTIDAIVKASEYPLSIVLVGVGDGPWEMMREFDDNIPSRAFDNFQFVNFTEIMTRNVDSTRKETDFALSALMEIPSQYKATLELGILGSRRGHSPDRVALPPPLYSRTSSSISTKSTRSNSFQQRTPTHTSYDSSVHTETSSSSLYDNKVCPICLTNAKDMAFGCGHQTCCECGEDLQFCPICRSTIHTRIRLY

SEQ ID NO: 4649 - protein, 234 aa, Glycine max
  misc_feature (1)..(234): Ceres Seq. ID no. 14303140
MAMTIVEQSGGQYHVLLIIADGQVTRSVDTQNGNLSPQEQNTIDAIVKASEYPLSIVLVGVGDGPWEMMREFDDNIPSRAFDNFQFVNFTEIMTRNVDSTRKETDFALSALMEIPSQYKATLELGILGSRRGHSPDRVALPPPLYSRTSSSISTKSTRSNSFQQRTPTHTSYDSSVHTETSSSSLYDNKVCPICLTNAKDMAFGCGHQTCCECGEDLQFCPICRSTIHTRIRLY

SEQ ID NO: 4650 - DNA, 1212 bp, Glycine max
  misc_feature (1)..(1212): Ceres Seq. ID no. 14303340
gaaacaatggaaaagaaatcacctgaaccacccgaagaagcatcacagtcacgagactcatcgcgagataaccagacctggataactgcacaaaacattctgagagaaaaactgatcacagaggactgtttcgcatggaaattacaagctggttccaaagaggaagaagcattgagatacgttggtggggttgacataagcttctcaaaggatgacccatcaagggcatgtggcacccttgtagtcttggacttccacactcttcaagttctctatcaagatttctctttggtcactcttcaagtcccttatgtgcctggctttctagcatttagagaggccccagttcttctgcagcttctagagaaaatgaaaaggagcaataatcctttctaccctcagctattaatggttgatggaaacggaatacttcatccccgaggttttgggctggcctgtcatattggagttgaggccaatctcccaacaattgggattggaaagaatttgcatcatgtggatggtcttactcattctagagtgagagaacttcttggagctgaagaaaactgttctgaagattttattaatttggtgggttgttctgggcatatatggggagtggccatgagatctacccagggttccataaaaccaatatttatatcaattggtcacaagatatcacttcagactgccattatgattgttcaaatgacatgcaagtaccgtgtgcctgagccaattaggcaggctgacataagatctagagactacattcggaaacttgaagcaaatgccaaagtaaagtaatttcactcatatggtttaagtttttatcctgttaaattatgaaatagctagccatgtgagatgacaataacaagtttggctgcaaggggctcaaatgaacttgatagaaccatcacaattcgtcaagtggttagaaacaatgccagtgccagtggatttgcttatagcttcattgaatgatccatttcacctcacaggattacataaggactcagcattccatccattagcataattatatctaaaccactcatgtaaaagagtgatgatatatgcacaaccaaatcactctcaaaatagaactatttgcgagctagcattctgtgtagtgtagaagcagaatttttatttctggttgctttgattgtctgatgagaagtgctagcaacattctttaat

SEQ ID NO: 4651 - protein, 270 aa, Glycine max
  misc_feature (1)..(270): Ceres Seq. ID no. 14303341
ETMEKKSPEPPEEASQSRDSSRDNQTWITAQNILREKLITEDCFAWKLQAGSKEEEALRYVGGVDISFSKDDPSRACGTLVVLDFHTLQVLYQDFSLVTLQVPYVPGFLAFREAPVLLQLLEKMKRSNNPFYPQLLMVDGNGILHPRGFGLACHIGVEANLPTIGIGKNLHHVDGLTHSRVRELLGAEENCSEDFINLVGCSGHIWGVAMRSTQGSIKPIFISIGHKISLQTAIMIVQMTCKYRVPEPIRQADIRSRDYIRKLEANAKVK

SEQ ID NO: 4652 - protein, 268 aa, Glycine max
  misc_feature (1)..(268): Ceres Seq. ID no. 14303342
MEKKSPEPPEEASQSRDSSRDNQTWITAQNILREKLITEDCFAWKLQAGSKEEEALRYVGGVDISFSKDDPSRACGTLVVLDFHTLQVLYQDFSLVTLQVPYVPGFLAFREAPVLLQLLEKMKRSNNPFYPQLLMVDGNGILHPRGFGLACHIGVEANLPTIGIGKNLHHVDGLTHSRVRELLGAEENCSEDFINLVGCSGHIWGVAMRSTQGSIKPIFISIGHKISLQTAIMIVQMTCKYRVPEPIRQADIRSRDYIRKLEANAKVK

SEQ ID NO: 4653 - protein, 147 aa, Glycine max
  misc_feature (1)..(147): Ceres Seq. ID no. 14303343
MKRSNNPFYPQLLMVDGNGILHPRGFGLACHIGVEANLPTIGIGKNLHHVDGLTHSRVRELLGAEENCSEDFINLVGCSGHIWGVAMRSTQGSIKPIFISIGHKISLQTAIMIVQMTCKYRVPEPIRQADIRSRDYIRKLEANAKVK

SEQ ID NO: 4654 - DNA, 1243 bp, Glycine max
  misc_feature (1)..(1243): Ceres Seq. ID no. 14303355
gaggcaattatacatttaagttcatttcctcctctcctctctcttcattttatttttcttccatctgctaggaaaatgtctgtcagcgttgagggctctgcctttggggcactatttgaagaaaaaaatgtccattctgaagacagcaacgagcttgtgttgcatggtgcatttccattggctaaacatgagagacagaatggatttaatgccacagacatgaatgcatttggaaactccttcaggaactatgatgcagaaagtgaaaggcaaagaatggtggaggaattatataggatgcaacacatcaaccagacatatgactatgggaagagaatgagggaggagtatgggaaattggacaaattagaaatgggtatatgggagtgttgtgagctgctcaatgaagtgacggatgatagcgatcctgatttggatgaaccacaaatacaacatttgttgcagtccgctgaagccattagaaaagactatcctaatgaagattggttacatttaactgctcttattcatgatcttggaaagatccttatgcttccaagctttggtggccttcctcaatggtctgttgttggagatacatttcccctcggatgtgcttttgatgagtcaaatgttcaccacaagcatttcaaggacaatccggataacacaaatcctacttataacacgaaaaatggaatctacaaagaaggaattggactagacaatgttgtgatgtcatggggacatgatgagtatatgtatttggttgcaaaggaaaacggcaccactttgcctccagtagcattgttcattatcaaataccattctttttacgctttacatagggcaggagcatatacacatttgatgaatgaagaagatattgagaatttgaagtggctcaaaatatttagcaaatatgacctctacagcaagagtaaagttctagtagacatagaaaaagttaagccatactatatgtcgctcatcgagaagtatttcccagcaaagcttaggtggtgaaactcaaagacatacacatcgatatggaatcaaagtcatgggcaagctaaggatttaagtttatacttatgaattatgatcgttatgccgaacgtttaaggaattgtttttttcttttatcagattgaagttgttgcctaactttaaattattcttattaagctgtaccgaacgtttaccgtactagaagttgatgtatttacggtttggttgttcc

SEQ ID NO: 4655 - protein, 341 aa, Glycine max
  misc_feature (1)..(341): Ceres Seq. ID no. 14303356
EAIIHLSSFPPLLSLHFIFLPSARKMSVSVEGSAFGALFEEKNVHSEDSNELVLHGAFPLAKHERQNGFNATDMNAFGNSFRNYDAESERQRMVEELYRMQHINQTYDYGKRMREEYGKLDKLEMGIWECCELLNEVTDDSDPDLDEPQIQHLLQSAEAIRKDYPNEDWLHLTALIHDLGKILMLPSFGGLPQWSVVGDTFPLGCAFDESNVHHKHFKDNPDNTNPTYNTKNGIYKEGIGLDNVVMSWGHDEYMYLVAKENGTTLPPVALFIIKYHSFYALHRAGAYTHLMNEEDIENLKWLKIFSKYDLYSKSKVLVDIEKVKPYYMSLIEKYFPAKLRW

SEQ ID NO: 4656 - protein, 316 aa, Glycine max
  misc_feature (1)..(316): Ceres Seq. ID no. 14303357
MSVSVEGSAFGALFEEKNVHSEDSNELVLHGAFPLAKHERQNGFNATDMNAFGNSFRNYDAESERQRMVEELYRMQHINQTYDYGKRMREEYGKLDKLEMGIWECCELLNEVTDDSDPDLDEPQIQHLLQSAEAIRKDYPNEDWLHLTALIHDLGKILMLPSFGGLPQWSVVGDTFPLGCAFDESNVHHKHFKDNPDNTNPTYNTKNGIYKEGIGLDNVVMSWGHDEYMYLVAKENGTTLPPVALFIIKYHSFYALHRAGAYTHLMNEEDIENLKWLKIFSKYDLYSKSKVLVDIEKVKPYYMSLIEKYFPAKLRW

SEQ ID NO: 4657 - protein, 268 aa, Glycine max
  misc_feature (1)..(268): Ceres Seq. ID no. 14303358
MNAFGNSFRNYDAESERQRMVEELYRMQHINQTYDYGKRMREEYGKLDKLEMGIWECCELLNEVTDDSDPDLDEPQIQHLLQSAEAIRKDYPNEDWLHLTALIHDLGKILMLPSFGGLPQWSVVGDTFPLGCAFDESNVHHKHFKDNPDNTNPTYNTKNGIYKEGIGLDNVVMSWGHDEYMYLVAKENGTTLPPVALFIIKYHSFYALHRAGAYTHLMNEEDIENLKWLKIFSKYDLYSKSKVLVDIEKVKPYYMSLIEKYFPAKLRW

SEQ ID NO: 4658 - DNA, 1107 bp, Glycine max
  misc_feature (1)..(1107): Ceres Seq. ID no. 14303359
ttttctctctctctctccccactttcatctgtaacaagttgtcaagggcgtgtgtttttgccccacttgggagttgggacactattctatttaatttaatttcacttctggtgagagggcctcaactcttctctacttctgtgctccaatttcctgttgcttcatgcatggctccctaagggaagaaagcttgtcatttgactcttattacgttatcctgtttgcaaatttatttgctctacaatctgcttcacaggtttctctctctgtttctgctggagttgttcaaatgggagaaagagttttattctctacgtagagtttggtagacaaagataatattttgagataatgctagttccacttgccccgtaccctccaccccctccaccagctccatatacgcctccaccaaatggtgcacagagtcaactagtctgttctgggtgtagaaaccttctgctctatccagttggagccacctctgtgtgctgtgctgtttgcaatgcagtcacaacagtgccacctcctggcacagaaatggcccagttagtttgtggaggctgtcacactttcctcatgtacatccgtggagccacaagtgtgcaatgctcttgctgtcacacggtcaatctagctttggaagcaaatctggtggcgcatgtcaactgtgggaactgtaagatgctactcaggtaccaatatggagcaagatccgtgaaatgtgccgtttgcagttttgtaacgtcagttggggcctcgacaagcaccactgagcagaaattcagcacctaaatcttactgtaaaattggtgacagacaccacgaccttggttttaatcaaatatcgcccttgaggaataacgagtgcatatgagatagctgaggaaattttcttaacatgtatagagctatttttcccttgagtgaaataattaaataaattttgtattattggtgtaccatgtaatgctttatttgtaagcagtgtaagcctctaaaggaatgagtagtggagtttatagttctccaatttcaattgcagtgtgccaaaaagctatttggaataactatatatgataagattattgattctgagtgcttttg

SEQ ID NO: 4659 - protein, 147 aa, Glycine max
  misc_feature (1)..(147): Ceres Seq. ID no. 14303360
MLVPLAPYPPPPPPAPYTPPPNGAQSQLVCSGCRNLLLYPVGATSVCCAVCNAVTTVPPPGTEMAQLVCGGCHTFLMYIRGATSVQCSCCHTVNLALEANLVAHVNCGNCKMLLRYQYGARSVKCAVCSFVTSVGASTSTTEQKFST

SEQ ID NO: 4660 - protein, 84 aa, Glycine max
  misc_feature (1)..(84): Ceres Seq. ID no. 14303361
MAQLVCGGCHTFLMYIRGATSVQCSCCHTVNLALEANLVAHVNCGNCKMLLRYQYGARSVKCAVCSFVTSVGASTSTTEQKFST

SEQ ID NO: 4661 - DNA, 1210 bp, Glycine max
  misc_feature (1)..(1210): Ceres Seq. ID no. 14303397
aaaaaataagaagatatacataaaaataaaacacaccctctacgtgtccacactctctgatcacaacacacccgcttaattaaatctctatatataaaccccttcaggcactccactatgacgggcaaagaaatttttcataagatgaaggaaaaagttttgggatcatctgatcccgattcaggtaaaggaaagagcaagatgaagaagcacataactcatggctttcacttggtaaagggaagatcaggtcatgccatggaagactatcttgttgctcaatttaagcaagttgacaacaaagagttgggtttatttgcaatatttgatggccactctggtcacagtgtacctgattacttgaagtctcatttgtttgataatatcttgaaagagcctaacttctggacagaacctgctgaggctgttaagagagcatatagtataactgattctactattttagacaaatcaggtgaattgggtagagggggttcaactgcggttacagcaatattgatcaactgttacaagctactagtggccaatattggggattcccgggctgtcttatgtaagaatggcgtagccaaacaactatcggtggatcatgaaccaagcatagaaagtgaagatataaaaaacagaggtggttttgtgtcaaacttcccaggggatgtgccacgtgtcgatggtcagttggcagtgtcaagggcatttggtgacaaaagcctgaagatacatttgagctcagaaccatatgtaactgtggagatgatagaagatgatgcagagtttcttatactagccagtgatgggttatggaaggtaatgtcaaatcaagaagcagttagtgctatcagagatgttaaggatgctagatctgcagcaaaggtgcttactgaagaagcaaagaacaggaaaagctcagatgatatctcttgcgttgttgtgaaatttcagtgatcagtaaactcacatagtatatttttatctacgaacttgaaagtgtaacatatactttagtgtaatgttgataccttttaggtgttattatgtcatgccattcagtgtgtgatatttaatcttctttaatttcatacaaatgaaactgctgagaacgtgttgtttgatgtaccaatgttcaaaaggatttagttttggattgtgtagaccaaaataattcgtatgaatgcaaggaagtttggtc

SEQ ID NO: 4662 - protein, 282 aa, Glycine max
  misc_feature (1)..(282): Ceres Seq. ID no. 14303398
MTGKEIFHKMKEKVLGSSDPDSGKGKSKMKKHITHGFHLVKGRSGHAMEDYLVAQFKQVDNKELGLFAIFDGHSGHSVPDYLKSHLFDNILKEPNFWTEPAEAVKRAYSITDSTILDKSGELGRGGSTAVTAILINCYKLLVANIGDSRAVLCKNGVAKQLSVDHEPSIESEDIKNRGGFVSNFPGDVPRVDGQLAVSRAFGDKSLKIHLSSEPYVTVEMIEDDAEFLILASDGLWKVMSNQEAVSAIRDVKDARSAAKVLTEEAKNRKSSDDISCVVVKFQ

SEQ ID NO: 4663 - protein, 273 aa, Glycine max
  misc_feature (1)..(273): Ceres Seq. ID no. 14303399
MKEKVLGSSDPDSGKGKSKMKKHITHGFHLVKGRSGHAMEDYLVAQFKQVDNKELGLFAIFDGHSGHSVPDYLKSHLFDNILKEPNFWTEPAEAVKRAYSITDSTILDKSGELGRGGSTAVTAILINCYKLLVANIGDSRAVLCKNGVAKQLSVDHEPSIESEDIKNRGGFVSNFPGDVPRVDGQLAVSRAFGDKSLKIHLSSEPYVTVEMIEDDAEFLILASDGLWKVMSNQEAVSAIRDVKDARSAAKVLTEEAKNRKSSDDISCVVVKFQ

SEQ ID NO: 4664 - protein, 254 aa, Glycine max
  misc_feature (1)..(254): Ceres Seq. ID no. 14303400
MKKHITHGFHLVKGRSGHAMEDYLVAQFKQVDNKELGLFAIFDGHSGHSVPDYLKSHLFDNILKEPNFWTEPAEAVKRAYSITDSTILDKSGELGRGGSTAVTAILINCYKLLVANIGDSRAVLCKNGVAKQLSVDHEPSIESEDIKNRGGFVSNFPGDVPRVDGQLAVSRAFGDKSLKIHLSSEPYVTVEMIEDDAEFLILASDGLWKVMSNQEAVSAIRDVKDARSAAKVLTEEAKNRKSSDDISCVVVKFQ

SEQ ID NO: 4665 - DNA, 1251 bp, Glycine max
  misc_feature (1)..(1251): Ceres Seq. ID no. 14303401
tgtgcaagtaatgtttttcatttctgcaagcaaaaactttggagaaaacacagcttatattacagcaactaaaacatcagatacgtaaaggaattcctataataggagctggtgcttggactggtatatctgctaagtttgaagaagctggaggagttgatctaatagtattgtacaattcagggcgcttccgaatggctggaagaggttcattagctggattattacctttttccgatgctaatgctgtcgttcttgacatggccaatgaagttttgccagtggtggtaagtggagaaactaaacaatgaaatgtcaccaaatttgattggtagtctttaaggaagaaacctttttcaaaacaatgtacatcagtaggggggtgttgaagaggtgaagggaacagtaggatgttcagggtaaaggtccaatggctaaagcagaaagcaatttgggtctgggtcatcatcacaacttactggtagtaaagaaggttccagttcttgctggtgtatgtgcaactggtctcttccgtagaatggattatttccttaaacaggtggagtctactggattctctgggttacaaaattttcctacagttggattatttgatggaaattttagactaaatcttgaagaaacgggaatgggatatagcttggaagttgagatgatccagaaagcccataaaatgggtctctttacaaccccatatgctttcaatcaatatgaagctattgaaatggctaaagttggcgccgatattatagtggcccatatgggtctaactacaacaggctccataggtgcaaaaacatctgtttcacttaaagaaagtgtagttcatgtacaagctattgcagatgcagcacataggatcaatcctggtgtcatcgtgttgtgccatggaggtccaatatctggtccaaaagaggcagcatttgtattgaagagaaccaaaggagttcatgggttttatggggcttcaagtatggaaagacttccagtggagcaggctattacaaatacagtcaaacagtacaagtcaatttctattcattaaggtttaacatgtttgtacttttcatgccagtgtgctgtacgctacattgctaatatgactgtttttatttgtgattagtacctaccaaatttgtgaacattatagaatttactgatatacaattttggaaataatggattaaaagtaatgttcaagacattatgttttgatcctctaaaaaaaac

SEQ ID NO: 4666 - protein, 211 aa, Glycine max
  misc_feature (1)..(211): Ceres Seq. ID no. 14303402
MAKAESNLGLGHHHNLLVVKKVPVLAGVCATGLFRRMDYFLKQVESTGFSGLQNFPTVGLFDGNFRLNLEETGMGYSLEVEMIQKAHKMGLFTTPYAFNQYEAIEMAKVGADIIVAHMGLTTTGSIGAKTSVSLKESVVHVQAIADAAHRINPGVIVLCHGGPISGPKEAAFVLKRTKGVHGFYGASSMERLPVEQAITNTVKQYKSISIH

SEQ ID NO: 4667 - protein, 175 aa, Glycine max
  misc_feature (1)..(175): Ceres Seq. ID no. 14303403
MDYFLKQVESTGFSGLQNFPTVGLFDGNFRLNLEETGMGYSLEVEMIQKAHKMGLFTTPYAFNQYEAIEMAKVGADIIVAHMGLTTTGSIGAKTSVSLKESVVHVQAIADAAHRINPGVIVLCHGGPISGPKEAAFVLKRTKGVHGFYGASSMERLPVEQAITNTVKQYKSISIH

SEQ ID NO: 4668 - protein, 138 aa, Glycine max
  misc_feature (1)..(138): Ceres Seq. ID no. 14303404
MGYSLEVEMIQKAHKMGLFTTPYAFNQYEAIEMAKVGADIIVAHMGLTTTGSIGAKTSVSLKESVVHVQAIADAAHRINPGVIVLCHGGPISGPKEAAFVLKRTKGVHGFYGASSMERLPVEQAITNTVKQYKSISIH

SEQ ID NO: 4669 - DNA, 1325 bp, Glycine max
  misc_feature (1)..(1325): Ceres Seq. ID no. 14303413
agggcaaaaacagaacagaaacagagatgggttgcaatagctccaaggctgagccaccaccgttggaaaacaccatgcatcatcatcatcatgcagacgttgcagagttccaaaaacccaaaaccctaaaagaagaagtagtgctacagattccaggatgcaaagttcatctgatggaccaaggcgaggccctcgaactcgcacaaggtcacttcacgatcatgaagatcatggagcagaacgtggcactagcaaccattataaaagttggaaacagtgttcaatggcctctaacgaaagacgagccggtggtgaaggtggatgctcttcactacctgttctctctgcctgtgaaagatggtggggagcctcttagctatggtgtcacctttccagaacagtgctatgggaacatggagatgttggattcttttctcaaggatcactcttgcttttctggtttggaaaggaataagaagagtgatcttaaatgggaggagtttgctccaagggttgaagattacaatcattttctggcaagggcaattgcaggagggactggccagattgttaagggtatcttcttgtgcagcaatgcttacaccaaccaggtccaaaaaggaggggaaacgatcctaaatactgctgcagaaaagaacaatggtggcatggtcacagaaagtatgaaccacaggagtgatgccacaaagaataatgcaacgaacgataacctcaaacgtgtgagaaagctgacaaatatgacagaaaggttaaccaaatctttgcttgatggtgttggaataatgagtggatcagtgatgactcctgtgctgaaatcccaaccaggacaggcattcctaaatatgctccctggagaggtgctgttggcttcccttgatgccgtcaatagagtttttgaagcagctgaagctgctgaaaaacaaaccttttctgccacctctcaagctgcaaccagaatggtttctaacaggtttggggaagaagcaggagaggctactgagcatgtgtttgcaactgcaggacatgctgttaacactgcttggaatgtctctaagatacggaaggccatcaatccagcctcttcagcaaatgctgcaggagcactgagaaattctgccaaaaatagaaatgttatatattaaattcctatcatgtactgctttatgtttgacaatggtgaaggcataaaattttgcctatacatattgcaatatcattttggttgttatatgtaagtattaatgtgtgtattggtcatcccaaagcagaccttagaagaaacaaactataaaaagtgtccacat

SEQ ID NO: 4670 - protein, 386 aa, Glycine max
  misc_feature (1)..(386): Ceres Seq. ID no. 14303414
GKNRTETEMGCNSSKAEPPPLENTMHHHHHADVAEFQKPKTLKEEVVLQIPGCKVHLMDQGEALELAQGHFTIMKIMEQNVALATIIKVGNSVQWPLTKDEPVVKVDALHYLFSLPVKDGGEPLSYGVTFPEQCYGNMEMLDSFLKDHSCFSGLERNKKSDLKWEEFAPRVEDYNHFLARAIAGGTGQIVKGIFLCSNAYTNQVQKGGETILNTAAEKNNGGMVTESMNHRSDATKNNATNDNLKRVRKLTNMTERLTKSLLDGVGIMSGSVMTPVLKSQPGQAFLNMLPGEVLLASLDAVNRVFEAAEAAEKQTFSATSQAATRMVSNRFGEEAGEATEHVFATAGHAVNTAWNVSKIRKAINPASSANAAGALRNSAKNRNVIY

SEQ ID NO: 4671 - protein, 378 aa, Glycine max
  misc_feature (1)..(378): Ceres Seq. ID no. 14303415
MGCNSSKAEPPPLENTMHHHHHADVAEFQKPKTLKEEVVLQIPGCKVHLMDQGEALELAQGHFTIMKIMEQNVALATIIKVGNSVQWPLTKDEPVVKVDALHYLFSLPVKDGGEPLSYGVTFPEQCYGNMEMLDSFLKDHSCFSGLERNKKSDLKWEEFAPRVEDYNHFLARAIAGGTGQIVKGIFLCSNAYTNQVQKGGETILNTAAEKNNGGMVTESMNHRSDATKNNATNDNLKRVRKLTNMTERLTKSLLDGVGIMSGSVMTPVLKSQPGQAFLNMLPGEVLLASLDAVNRVFEAAEAAEKQTFSATSQAATRMVSNRFGEEAGEATEHVFATAGHAVNTAWNVSKIRKAINPASSANAAGALRNSAKNRNVIY

SEQ ID NO: 4672 - protein, 362 aa, Glycine max
  misc_feature (1)..(362): Ceres Seq. ID no. 14303416
MHHHHHADVAEFQKPKTLKEEVVLQIPGCKVHLMDQGEALELAQGHFTIMKIMEQNVALATIIKVGNSVQWPLTKDEPVVKVDALHYLFSLPVKDGGEPLSYGVTFPEQCYGNMEMLDSFLKDHSCFSGLERNKKSDLKWEEFAPRVEDYNHFLARAIAGGTGQIVKGIFLCSNAYTNQVQKGGETILNTAAEKNNGGMVTESMNHRSDATKNNATNDNLKRVRKLTNMTERLTKSLLDGVGIMSGSVMTPVLKSQPGQAFLNMLPGEVLLASLDAVNRVFEAAEAAEKQTFSATSQAATRMVSNRFGEEAGEATEHVFATAGHAVNTAWNVSKIRKAINPASSANAAGALRNSAKNRNVIY

SEQ ID NO: 4673 - DNA, 1296 bp, Glycine max
  misc_feature (1)..(1296): Ceres Seq. ID no. 14303417
ggtgccattcccttcacaccattctcacaaaacaactttcaaactctgagaaagaatggctgccaacacattgatgagtactgctatctcagccttcccatctctcctttcttcctcaaaatccagatttgccaccgcagttcctctttctagctttggtgtcaccaatgcctcttcttctcgcttttctatgagtgctgactggatgccaggccagcctagacctccttaccttgatggttcagcacctggtgactttggattcgaccctcttcgtcttggtgaagtaccagagaatcttgagaggttcaaagagtcagaactcattcactgcagatgggccatgcttgctgttccagggattttggttccagaggcattgggcttaggcaactgggtaaaggctcaggaatgggcagcagttcctgggggccaagcaacctacctaggcaatccagttccatggggcaccctacccaccattctggccattgaattccttgctatttcctttgtggagcaccaaaggagcatggagaaggacccagagaagaagaaataccctggtggtgcttttgatcctttgggatactctaaggaccctaaaacattccatgaatacaaagtcaaagaacttaagaatggacgtcttgttttgttggcttttgtgggattctgtgttcaacaatcagcttatcccggcactggacctttggagaacttggctgctcacttggctgacccatggcacaacaacattggaaacatcattattccacaatcgattttgccttgaaaaaaaaaaatcaaatatttgtttcaatagctacctgtataattccatgtaacattttgtaacgaatcgggttgctacgttggtatctctgtgttgtaattaaacttcgaattcaaactcatactctggcaactcgttggtatgacagaaaagcttgaaacaaacttccaagtccaagtttaaaacttgcattacatgattacatccatatctaatgatgaataaaacatgttttggaccaactgcagcctgcaaagtgccaatttccttgaatgcttcctaaagtattaggcatccggtgtattccagcaaatattatgtcagctaacgacttttcaacaacatttggttttgttaaaactgattttcctgcaaaataataagtcagctaaacttatatacatgtctcaaattcagcattcagaactaagggagtctaacttgagtagggtgcatgagtttttaaaccccttggtacctgtgtttgattcctacaagtc

SEQ ID NO: 4674 - protein, 246 aa, Glycine max
  misc_feature (1)..(246): Ceres Seq. ID no. 14303418
MAANTLMSTAISAFPSLLSSSKSRFATAVPLSSFGVTNASSSRFSMSADWMPGQPRPPYLDGSAPGDFGFDPLRLGEVPENLERFKESELIHCRWAMLAVPGILVPEALGLGNWVKAQEWAAVPGGQATYLGNPVPWGTLPTILAIEFLAISFVEHQRSMEKDPEKKKYPGGAFDPLGYSKDPKTFHEYKVKELKNGRLVLLAFVGFCVQQSAYPGTGPLENLAAHLADPWHNNIGNIIIPQSILP

SEQ ID NO: 4675 - protein, 240 aa, Glycine max
  misc_feature (1)..(240): Ceres Seq. ID no. 14303419
MSTAISAFPSLLSSSKSRFATAVPLSSFGVTNASSSRFSMSADWMPGQPRPPYLDGSAPGDFGFDPLRLGEVPENLERFKESELIHCRWAMLAVPGILVPEALGLGNWVKAQEWAAVPGGQATYLGNPVPWGTLPTILAIEFLAISFVEHQRSMEKDPEKKKYPGGAFDPLGYSKDPKTFHEYKVKELKNGRLVLLAFVGFCVQQSAYPGTGPLENLAAHLADPWHNNIGNIIIPQSILP

SEQ ID NO: 4676 - protein, 201 aa, Glycine max
  misc_feature (1)..(201): Ceres Seq. ID no. 14303420
MSADWMPGQPRPPYLDGSAPGDFGFDPLRLGEVPENLERFKESELIHCRWAMLAVPGILVPEALGLGNWVKAQEWAAVPGGQATYLGNPVPWGTLPTILAIEFLAISFVEHQRSMEKDPEKKKYPGGAFDPLGYSKDPKTFHEYKVKELKNGRLVLLAFVGFCVQQSAYPGTGPLENLAAHLADPWHNNIGNIIIPQSILP

SEQ ID NO: 4677 - DNA, 1390 bp, Glycine max
  misc_feature (1)..(1390): Ceres Seq. ID no. 14303423
tggtcgatactaactggacaggaataatgcatcgcaattcacttaaaagatcaaatgatagtacccggattatcatcacagctattatgggaattgcctttggattttttattggtatttcaatttcatctgtgcatttgactaagcctgtagggaattcttttgatgtacctgtagctgaatctgaaatagacagattttcagctgaagtaaacagatctcctgctgttattgacgagtcttctggaaccaaaaatcttgaaaccctagggtcaattagattaccaaagatatttgttgcatcaaatcctcgtggagctgaatcactaccccctggaatcgttgtatcagaatcagatttttatttacgaagactatggggtgaacctagtgaggatctgaagaaaaagccgaagtatttagttacattcactgttggttatgaacaaaggcataatatcaatgctacagtgaaaaagttttctgatgattttgcaattttgctctttcattatgatggtcggactagtgaatgggatcaatttgagtggtcaaggaatgcaatccatgttagtgcaaggaaacaaactaaatggtggtatgctaaaagatttttgcaccctgatatagtatcagcttatgaatatatttttatttgggatgaagatcttggagtagaacacttcaatgcagacaagtatattcatttagtgaaaaaatatggtttggagatctctcaacctggtcttgagcctaataatggattgacatgggagatgacaaaaagaaggggtgacaaagaagttcacatggtgacagaagagaaaccaggctggtgtagtgatccacatttgcctccttgtgctgcatttgtggaaattatggcacctgtcttttctcgtgaagcttggcgttgtgtgtggcacatgattcagaatgatctagtgcatggatggggattggactttgctctcagaagatgtgtagagccagcacatgaaaaaattggtgtaattgattcacaatggattgttcatcaagtaattccttctcttgggaaccagggagagtctgacaaaggaaaaatgccatgggattcggtccgagccagatgcaaaagtgaatgggcccagtttcaacttcgcgtaaccaatgctgataagtcttatcttgaaggacataaacgtaatgggaaggattgatatgtggatccatctacctattgtatatgttttacgtacacactcggtggtagtatttgttttgcattgtttcctcccctcaggtgccatgcgaatttttgagccatatttttgaggaattaatctatagccatgtaaatcaatcacttttatgttattgaataacttttttatcagccgttagattg

SEQ ID NO: 4678 - protein, 399 aa, Glycine max
  misc_feature (1)..(399): Ceres Seq. ID no. 14303424
VDTNWTGIMHRNSLKRSNDSTRIIITAIMGIAFGFFIGISISSVHLTKPVGNSFDVPVAESEIDRFSAEVNRSPAVIDESSGTKNLETLGSIRLPKIFVASNPRGAESLPPGIVVSESDFYLRRLWGEPSEDLKKKPKYLVTFTVGYEQRHNINATVKKFSDDFAILLFHYDGRTSEWDQFEWSRNAIHVSARKQTKWWYAKRFLHPDIVSAYEYIFIWDEDLGVEHFNADKYIHLVKKYGLEISQPGLEPNNGLTWEMTKRRGDKEVHMVTEEKPGWCSDPHLPPCAAFVEIMAPVFSREAWRCVWHMIQNDLVHGWGLDFALRRCVEPAHEKIGVIDSQWIVHQVIPSLGNQGESDKGKMPWDSVRARCKSEWAQFQLRVTNADKSYLEGHKRNGKD

SEQ ID NO: 4679 - protein, 391 aa, Glycine max
  misc_feature (1)..(391): Ceres Seq. ID no. 14303425
MHRNSLKRSNDSTRIIITAIMGIAFGFFIGISISSVHLTKPVGNSFDVPVAESEIDRFSAEVNRSPAVIDESSGTKNLETLGSIRLPKIFVASNPRGAESLPPGIVVSESDFYLRRLWGEPSEDLKKKPKYLVTFTVGYEQRHNINATVKKFSDDFAILLFHYDGRTSEWDQFEWSRNAIHVSARKQTKWWYAKRFLHPDIVSAYEYIFIWDEDLGVEHFNADKYIHLVKKYGLEISQPGLEPNNGLTWEMTKRRGDKEVHMVTEEKPGWCSDPHLPPCAAFVEIMAPVFSREAWRCVWHMIQNDLVHGWGLDFALRRCVEPAHEKIGVIDSQWIVHQVIPSLGNQGESDKGKMPWDSVRARCKSEWAQFQLRVTNADKSYLEGHKRNGKD

SEQ ID NO: 4680 - protein, 371 aa, Glycine max
  misc_feature (1)..(371): Ceres Seq. ID no. 14303426
MGIAFGFFIGISISSVHLTKPVGNSFDVPVAESEIDRFSAEVNRSPAVIDESSGTKNLETLGSIRLPKIFVASNPRGAESLPPGIVVSESDFYLRRLWGEPSEDLKKKPKYLVTFTVGYEQRHNINATVKKFSDDFAILLFHYDGRTSEWDQFEWSRNAIHVSARKQTKWWYAKRFLHPDIVSAYEYIFIWDEDLGVEHFNADKYIHLVKKYGLEISQPGLEPNNGLTWEMTKRRGDKEVHMVTEEKPGWCSDPHLPPCAAFVEIMAPVFSREAWRCVWHMIQNDLVHGWGLDFALRRCVEPAHEKIGVIDSQWIVHQVIPSLGNQGESDKGKMPWDSVRARCKSEWAQFQLRVTNADKSYLEGHKRNGKD

SEQ ID NO: 4681 - DNA, 1303 bp, Glycine max
  misc_feature (1)..(1303): Ceres Seq. ID no. 14303434
aggagtcagccagacaagcaagccaccctctgctaccgcttctcatccatcatgtcgaatgaactaaaaaactatgatgtttttctcaattttcatggcaaagattccggttacaccttcactggtactctctataatgctttgcgcagcaagagaatcaagacctttttcacaaaacatgaatatggtcgtaaactacacactgatgacagccacattccaccctttactcttaaagcaattaaggaatcaaggatttcggtggttgttttgtcggaaaactatgcatcctcctcaagatgtcttgatgaacttgtggccatccttgagtgtaaaaggacgataaaccaactggtgtggcccatcttttacaaagtggatccgtcgcaagtaaggcaccagaaaggtagctatggagaacacatttgtaattttaaaaaaatttttagagattacaacgattccaatgagagggtgaagcaatggagagcagctttatctgaagtcagcaaattgagtggatggctttacaatgatcggaggtcccagtacgaatatgaattcatcgaaaggatcgtggaatcaaccgtgcaagccttgcccggatatgatgtttttctgagttttaccggagaggatacccgctacactttcacaggttttctctataatgcctttcgccgagagggattcaaaatcttcatggatgatgaggaattggagagtgggaaccaaatttcacagaagcttatgagagcaattgagagttcaaagatttcaattgttgtgctctctgaaaactatgcatattccacctggtgtcttgatgaacttgccaagatcattgagtgtatgaagaccaacaatcaaatggtttggccaatattttacaatgtgcaaaagtcggatgtatgcaatcaaacaaaaagttatggtgaagccatgactgaacatgaaaaaagatttggaaaggactctgagaaggtgcagaaatggaggtctgctttgtctgaaatcaaaaacttggaaggagaccatgtcaaacaaaatgagtaccaacatgaattaatcgaaaggattgtggaaaaggtcattaaaattgaaggtagcaagcatacagcaaatcctttccttttatccaatgacagctacgaggaagaatgagtgaaagagggtcaaatatatgctgtggagctgtgaaactaactgattgtaacctctataactgcccttgaattcatttgttcctatcaatgttgtttttacatccagttcaattcctaaggtttattgtattccttct

SEQ ID NO: 4682 - protein, 387 aa, Glycine max
  misc_feature (1)..(387): Ceres Seq. ID no. 14303435
RSQPDKQATLCYRFSSIMSNELKNYDVFLNFHGKDSGYTFTGTLYNALRSKRIKTFFTKHEYGRKLHTDDSHIPPFTLKAIKESRISVVVLSENYASSSRCLDELVAILECKRTINQLVWPIFYKVDPSQVRHQKGSYGEHICNFKKIFRDYNDSNERVKQWRAALSEVSKLSGWLYNDRRSQYEYEFIERIVESTVQALPGYDVFLSFTGEDTRYTFTGFLYNAFRREGFKIFMDDEELESGNQISQKLMRAIESSKISIVVLSENYAYSTWCLDELAKIIECMKTNNQMVWPIFYNVQKSDVCNQTKSYGEAMTEHEKRFGKDSEKVQKWRSALSEIKNLEGDHVKQNEYQHELIERIVEKVIKIEGSKHTANPFLLSNDSYEEE

SEQ ID NO: 4683 - protein, 370 aa, Glycine max
  misc_feature (1)..(370): Ceres Seq. ID no. 14303436
MSNELKNYDVFLNFHGKDSGYTFTGTLYNALRSKRIKTFFTKHEYGRKLHTDDSHIPPFTLKAIKESRISVVVLSENYASSSRCLDELVAILECKRTINQLVWPIFYKVDPSQVRHQKGSYGEHICNFKKIFRDYNDSNERVKQWRAALSEVSKLSGWLYNDRRSQYEYEFIERIVESTVQALPGYDVFLSFTGEDTRYTFTGFLYNAFRREGFKIFMDDEELESGNQISQKLMRAIESSKISIVVLSENYAYSTWCLDELAKIIECMKTNNQMVWPIFYNVQKSDVCNQTKSYGEAMTEHEKRFGKDSEKVQKWRSALSEIKNLEGDHVKQNEYQHELIERIVEKVIKIEGSKHTANPFLLSNDSYEEE

SEQ ID NO: 4684 - DNA, 816 bp, Glycine max
  misc_feature (1)..(816): Ceres Seq. ID no. 14303437
aagggaaaaatgacagaggagcaattaaaaaaggtggctcagactgagagtatttcccctaatcctgcacctgaacctgaacctgaacctgctgttccaaaagaggaagtggctgaggagaaatctgtaattccacaaccctcttcctctccttctgatgagtccaaagctcttgtcatagttgagaagactagtgaagttgctcaagagaaaccaattgaggggtctgtgaaccgagatgctgtccttgcgagagttgcaactgagaagaggctgtcactaatcaaagcatgggaagaaagtgaaaagtcaaaatcagagaacaagtctcacaaaaagctttcagtcatttcagcatgggagaacagtatgaaagctgcagcggaggcagaattgagaaagattgaagaacaactggagaagaaaaaagcagaatatggagagaaattgaaaaacaaaatagctacaatccaccgagaagctgaagaaaagagggcatttattgaggcccaaaaaggggaagatttcttgaaggcagaggagacagctgcaaagtacagggcaactggaacagccccaacgaaactctttggttgtttctaacaaccctgatcattaaaaaatgctgtattattattatggttattattattattatgtattttctttgatagttcatgtaacatgtgtggtttggttgtcttttgctgagttgtgttcatgttcatttattacgtgtgcatagtgatatgttggttcgaatataacaatttatctttgtgtatacacaagaaattgaattattcaatttggggt

SEQ ID NO: 4685 - protein, 200 aa, Glycine max
  misc_feature (1)..(200): Ceres Seq. ID no. 14303438
KGKMTEEQLKKVAQTESISPNPAPEPEPEPAVPKEEVAEEKSVIPQPSSSPSDESKALVIVEKTSEVAQEKPIEGSVNRDAVLARVATEKRLSLIKAWEESEKSKSENKSHKKLSVISAWENSMKAAAEAELRKIEEQLEKKKAEYGEKLKNKIATIHREAEEKRAFIEAQKGEDFLKAEETAAKYRATGTAPTKLFGCF

SEQ ID NO: 4686 - protein, 197 aa, Glycine max
  misc_feature (1)..(197): Ceres Seq. ID no. 14303439
MTEEQLKKVAQTESISPNPAPEPEPEPAVPKEEVAEEKSVIPQPSSSPSDESKALVIVEKTSEVAQEKPIEGSVNRDAVLARVATEKRLSLIKAWEESEKSKSENKSHKKLSVISAWENSMKAAAEAELRKIEEQLEKKKAEYGEKLKNKIATIHREAEEKRAFIEAQKGEDFLKAEETAAKYRATGTAPTKLFGCF

SEQ ID NO: 4687 - DNA, 1431 bp, Glycine max
  misc_feature (1)..(1431): Ceres Seq. ID no. 14303446
gcgcagtgaagaagaagaagaagaagaagaagaagaagaagaagagatgagcgtggaagatcttcctgggaaagaggtaaacgtgctgaagggtcacgagggtggcgtgttagccgcgaggttcaacggcgatggcaattatgttctgagttgcggcaaagaccgtaccatacgcctttggaatcctcaccgtggcatccatatcaagacctataaatcccacgctcgcgaagtccgcgatgtccacgtcacacaggacaactccaagctatgttcctgtggtggagatcgacaaatattttattgggacgttgcaactggacgtgtaattaggaaatttcgtggccatgatggtgaggtaaatggtgtcaaattcaatgagtattcatctgttgtagtctctgctggctatgatcaatcattgcgtgcttgggactgcagatcccacagcacagagccaattcagattattgacacatttgcggatagtgtgatgtctgtttgtttaacaaaaactgaaattattggaggaagtgttgatggaactgttcgaacatttgacattcgtattggcagagaaacatctgataatttagggcaacctgtcaactgtgtatcaatgtcaaatgatggtaactgcattctagccggttgcttagactctacattgcgtcttttggacaggtcgacaggtgaactgttacaagaatataaaggacacactaataagtcttacaaattggattgctgccttaccaatacggatgctcatgtaactggtgtctctgaggatggcttcatttatttctgggatcttgtagatgcatctgttgtttcaagattcaaggctcatacctcagtggtaacaagtgttagttatcatccaaaggaaaactgcatggtaacttcttctgtggatggcaccattagagtatggaagacataagaacgaaatgcaaacactaagcttctatggtgtgtccacgcggtccatagcaataccaattaggataatgatgattacatgtccgattgcgtttggagttcacggacacgatgttacttccaagttatttataattcttcggcagattttgacctataatatgtgcttttcatgtggaagatggtaaacgcaaggtgagttagttggttgcagcatctatacggtcaaatctcacacattttttgactttttgtctccaaaagggatagggtattgtattattcacttgtgtccataaaaggaaaatgatttgtatactatccgttattttgtgaaaatgaggttgtattgtatccgttttggagtttttgatcttgggttttttttactggtatagttggaaaactagtggctgcgatgctcttatgtagttacaaatctatgctgtgattcaatccatggctggtgtttttccagtgatctag

SEQ ID NO: 4688 - protein, 314 aa, Glycine max
  misc_feature (1)..(314): Ceres Seq. ID no. 14303447
RSEEEEEEEEEEEEEMSVEDLPGKEVNVLKGHEGGVLAARFNGDGNYVLSCGKDRTIRLWNPHRGIHIKTYKSHAREVRDVHVTQDNSKLCSCGGDRQIFYWDVATGRVIRKFRGHDGEVNGVKFNEYSSVVVSAGYDQSLRAWDCRSHSTEPIQIIDTFADSVMSVCLTKTEIIGGSVDGTVRTFDIRIGRETSDNLGQPVNCVSMSNDGNCILAGCLDSTLRLLDRSTGELLQEYKGHTNKSYKLDCCLTNTDAHVTGVSEDGFIYFWDLVDASVVSRFKAHTSVVTSVSYHPKENCMVTSSVDGTIRVWKT

SEQ ID NO: 4689 - protein, 299 aa, Glycine max
  misc_feature (1)..(299): Ceres Seq. ID no. 14303448
MSVEDLPGKEVNVLKGHEGGVLAARFNGDGNYVLSCGKDRTIRLWNPHRGIHIKTYKSHAREVRDVHVTQDNSKLCSCGGDRQIFYWDVATGRVIRKFRGHDGEVNGVKFNEYSSVVVSAGYDQSLRAWDCRSHSTEPIQIIDTFADSVMSVCLTKTEIIGGSVDGTVRTFDIRIGRETSDNLGQPVNCVSMSNDGNCILAGCLDSTLRLLDRSTGELLQEYKGHTNKSYKLDCCLTNTDAHVTGVSEDGFIYFWDLVDASVVSRFKAHTSVVTSVSYHPKENCMVTSSVDGTIRVWKT

SEQ ID NO: 4690 - DNA, 887 bp, Glycine max
  misc_feature (1)..(887): Ceres Seq. ID no. 14303453
aattaacactcacacccttttcagtttataccaaacaaatgatgttacagccttctttcttgtgcttctctttcatgtttctcatcacactccctcttggaaaaagctctaccaccttgaatgtacccaaggacataatcaatcaaacatgccaaaaatgtgccaaccaatccatcatcttgagctacaacctatgctccacttctcttccggcggttccggtgagtcactccgcgaatctcgaagggttggcgttggttgcaatggagctagcactagagaatgtgactagcactttggccaccatagagaagctattagacagcacaagccttgataactttgcgctggggtgcttggcagattgcttggagctgtactctgatgcagcatggacaatagtgaattctgtaggggttttcctctctgggaactatgatgtaactaggatttggatgagttcggttatggaagcagcatcaacgtgccaacaaggttttactgggagaggtgaagcttctcctttgacacaggagaactataatctctttcagttgtgtggtattgcactttgcattattcatttggccacacctggagtaccttctcaattaatccacagataaatttgccagtatatgctgtctttctcatcaataaagtgagagacattgtattagtatctcaaaatggacaatattagtgagtggtggaaacgttgtatcttaatagagatggaaattaagggaggaagacagagtagagatgctagtgctagacattaatagatatagaaattagaatgatctatgttttctttattttagtttttagtagagcgaaattttttgtagtagtgaaaaagaaagaaaggtgtattattatag

SEQ ID NO: 4691 - protein, 207 aa, Glycine max
  misc_feature (1)..(207): Ceres Seq. ID no. 14303454
LTLTPFSVYTKQMMLQPSFLCFSFMFLITLPLGKSSTTLNVPKDIINQTCQKCANQSIILSYNLCSTSLPAVPVSHSANLEGLALVAMELALENVTSTLATIEKLLDSTSLDNFALGCLADCLELYSDAAWTIVNSVGVFLSGNYDVTRIWMSSVMEAASTCQQGFTGRGEASPLTQENYNLFQLCGIALCIIHLATPGVPSQLIHR

SEQ ID NO: 4692 - protein, 195 aa, Glycine max
  misc_feature (1)..(195): Ceres Seq. ID no. 14303455
MMLQPSFLCFSFMFLITLPLGKSSTTLNVPKDIINQTCQKCANQSIILSYNLCSTSLPAVPVSHSANLEGLALVAMELALENVTSTLATIEKLLDSTSLDNFALGCLADCLELYSDAAWTIVNSVGVFLSGNYDVTRIWMSSVMEAASTCQQGFTGRGEASPLTQENYNLFQLCGIALCIIHLATPGVPSQLIHR

SEQ ID NO: 4693 - protein, 194 aa, Glycine max
  misc_feature (1)..(194): Ceres Seq. ID no. 14303456
MLQPSFLCFSFMFLITLPLGKSSTTLNVPKDIINQTCQKCANQSIILSYNLCSTSLPAVPVSHSANLEGLALVAMELALENVTSTLATIEKLLDSTSLDNFALGCLADCLELYSDAAWTIVNSVGVFLSGNYDVTRIWMSSVMEAASTCQQGFTGRGEASPLTQENYNLFQLCGIALCIIHLATPGVPSQLIHR

SEQ ID NO: 4694 - DNA, 813 bp, Glycine max
  misc_feature (1)..(813): Ceres Seq. ID no. 14303465
aaccctaaaccctcacagtcctgacggtgccacaccgccactgtctttgttctttctcagctttcactgattattcgtcgaaggttccaacccaatttgttatctctctgcgatttctagaaaaagatgcctctgggactcatcttaggaataggaagggcatttcgaaggaagcggccatcttcactcgatattctatcatcaaaacgtgctcctcgtggttattataagggaaagaattgcaagcctactggtttccacactcgcaaaggtgggtatgtggtgatgcaagaaaaattgccaaattatgtagttcctgatttgactgatttcaagctcaaaccatacgtatctcagtgtcctatagaagcgaatacctctgaagcttcccaaacggctaaataaccaaattgagtagtgtaagatactttctttgtaactacagatgtttttccatgaagaggagttggcatgcccttcgttttgttgtttgttctctccttttgaactacgccttgagtaattattgaccggcacaaatatttgatagttcaataggatattaacctatcaatcaatatcattaacatatgtagtgcgctgaatgatttggactatcaaaactatcaataattttcatctgttgttccccgattagtttggttatgtttggatggatggagttgttaataatcgagtggaattgtaaaagctgaaaagaccttgagccattgtctgggtttttttattaatgaaaagagatgatcaaaggtggattcaaaccactttaaattactcaaaaaaaaaaaaaat

SEQ ID NO: 4695 - protein, 92 aa, Glycine max
  misc_feature (1)..(92): Ceres Seq. ID no. 14303466
MPLGLILGIGRAFRRKRPSSLDILSSKRAPRGYYKGKNCKPTGFHTRKGGYVVMQEKLPNYVVPDLTDFKLKPYVSQCPIEANTSEASQTAK

SEQ ID NO: 4696 - DNA, 1461 bp, Glycine max
  misc_feature (1)..(1461): Ceres Seq. ID no. 14303471
tatggtaaaacaagggaaaatatggagcagtgctttgaggaacttgctctaaaggtttaacttagactcttaaagtctcataaccgaacagttcaatgcagaaaagttctggaaatattataggccatttccttggaggtttatattgttatctaagaagatgcatgtttgccattttatccgtgggtcctgtgccaagtcatattgctttcatcatggatgggaatcgaaggtatgcaaagaagagaaacatggaagaaggtgatggccataaggctggatttactgctctcatgtccatccttagatactgttatgaattgggagtgaagtatgtcactgtctatgcattcagcattgataacttcaaaaggaagcctaatgaggttcagtccttgatggaattgatgcgggaaaagattgaagagttgcttcaacaagaaagtcttatcaatgaatatggtgttagattacatttcattggagacttgcaactattgactgagcctgtcatagcttctgtggaaaaggcaatgagagttactgctcacaacaaccagagagttcttttggtttgcatagcctatacttctcgtcacgagatggtgcatgctgttcaagaatgctgcaaggaaaaatggaatgaagttcaagcatcaaaagaagcaaaacttacaaatggtgcatttgcaagaattgatcagggcctgaaaggaaatggttttgatttgctttttcaagatttatgtaaagactatcaaaatgcaaccaaagcttgtaatagtgtacctaaacgagtggaacctgctgtagagaaagatggcatgttggagcatactgttgaaaaaggtaacgatagtgaagctgaaatcacatcatgcaatgagctggttgaaatgactgaagagagaaagtataaccagggtgatgttcctttaataaaactggtggatattgagaagcacatgtacatggcagtggcacctgatccagacatcttgatccgaacttctggagaggctcgactcagcaattttcttctttggcagactagtacctgccctttgtatgcaccaactgcactttggcctgaaataggcctaagacacttggtctgggcagtattgaactttcagagacaccatttttatttggaaaagaaaaggaagcagttttaactgtatccttattgtcaaaaattcatagtgtagttcatgtgatggcagtttcctttttataaagactagtttttgttttttttattttattttatttataagaattgttgaaattataagagtttaagtagcccaaggggataagaaagagaaaaaactttggatagtagaatgtaatattgatatgtgctgtgcaatgatgtcttatcaaatacaatgaacaagaacttatttatttcaagaattactataaatatgaaaattatggttgatcatttaaaat

SEQ ID NO: 4697 - protein, 360 aa, Glycine max
  misc_feature (1)..(360): Ceres Seq. ID no. 14303472
MQKSSGNIIGHFLGGLYCYLRRCMFAILSVGPVPSHIAFIMDGNRRYAKKRNMEEGDGHKAGFTALMSILRYCYELGVKYVTVYAFSIDNFKRKPNEVQSLMELMREKIEELLQQESLINEYGVRLHFIGDLQLLTEPVIASVEKAMRVTAHNNQRVLLVCIAYTSRHEMVHAVQECCKEKWNEVQASKEAKLTNGAFARIDQGLKGNGFDLLFQDLCKDYQNATKACNSVPKRVEPAVEKDGMLEHTVEKGNDSEAEITSCNELVEMTEERKYNQGDVPLIKLVDIEKHMYMAVAPDPDILIRTSGEARLSNFLLWQTSTCPLYAPTALWPEIGLRHLVWAVLNFQRHHFYLEKKRKQF

SEQ ID NO: 4698 - protein, 337 aa, Glycine max
  misc_feature (1)..(337): Ceres Seq. ID no. 14303473
MFAILSVGPVPSHIAFIMDGNRRYAKKRNMEEGDGHKAGFTALMSILRYCYELGVKYVTVYAFSIDNFKRKPNEVQSLMELMREKIEELLQQESLINEYGVRLHFIGDLQLLTEPVIASVEKAMRVTAHNNQRVLLVCIAYTSRHEMVHAVQECCKEKWNEVQASKEAKLTNGAFARIDQGLKGNGFDLLFQDLCKDYQNATKACNSVPKRVEPAVEKDGMLEHTVEKGNDSEAEITSCNELVEMTEERKYNQGDVPLIKLVDIEKHMYMAVAPDPDILIRTSGEARLSNFLLWQTSTCPLYAPTALWPEIGLRHLVWAVLNFQRHHFYLEKKRKQF

SEQ ID NO: 4699 - protein, 320 aa, Glycine max
  misc_feature (1)..(320): Ceres Seq. ID no. 14303474
MDGNRRYAKKRNMEEGDGHKAGFTALMSILRYCYELGVKYVTVYAFSIDNFKRKPNEVQSLMELMREKIEELLQQESLINEYGVRLHFIGDLQLLTEPVIASVEKAMRVTAHNNQRVLLVCIAYTSRHEMVHAVQECCKEKWNEVQASKEAKLTNGAFARIDQGLKGNGFDLLFQDLCKDYQNATKACNSVPKRVEPAVEKDGMLEHTVEKGNDSEAEITSCNELVEMTEERKYNQGDVPLIKLVDIEKHMYMAVAPDPDILIRTSGEARLSNFLLWQTSTCPLYAPTALWPEIGLRHLVWAVLNFQRHHFYLEKKRKQF

SEQ ID NO: 4700 - DNA, 1191 bp, Glycine max
  misc_feature (1)..(1191): Ceres Seq. ID no. 14303479
aagtttcaaacgccgcaaccaccacacaattcctacacatttctactctttagtttctccaattttctttctcaattctcaacaatggccactacaacacaacttcacttaccccctggattcagattccatccaacagatgaagaactcgtcatccactacctttgtcgcaaatgcgcttcgcaacatatcgcggttcccataatcgccgaaattgatctgtacaagtacgacccttgggaccttccaggaatggctttgtacggagagaaagagtggtattttttcacgccgagggaccgcaagtacccgaacggttcgcggccgaaccggtccgcgggaaccgggtactggaaggcaaccggagcggataaaccagttggtaaaccgaaaccggttgggatcaagaaagcgttggttttttacgctggaaaagcgcccaagggagagaaaactaactggatcatgcacgagtatcgtcttgcagacgtggatcgttccgttcgcaaaaagaacagcttaaggctggatgactgggtgctgtgccgaatttacaacaagaaaggtgcaattgaaaagcaacaactaccaccaccgagtggggtccgcaaaattgaatgttccgaaatggaggacgagaagccggagattctgccgccagatccgccgtatacggcggcgacggtggcggattgcctgtacttcgaggcttccgactcggtgccccggctgcacacgacggactcgagctgctccgagcaggtggtgtcggcggagtttgcgagcgaggtgcagagcgagccgaagaggggcagcaacaacaacaacgagtttgcatataattacgtggatgccactctcgggaataatcagatgtcgccgctgcaggatattttcatgtacctctccaagtccttctgcaattaacacgcaccaccaccacgacgagacgacgtcgttctgtgttgtgtgtatgcattatgcatttttgcagtagctgctccactgcaccatttgcacggaagcacgagactgagtgaagatccgtgagtgtgtccgtgctggttcgtgtagacgattattacaaaaaaaaacaaaaaagcaccaagatgaagaagaagaaagattcttatatgaacatgatgaattatgagtatattaaattaatgaagtattaatacatcattgagc

SEQ ID NO: 4701 - protein, 308 aa, Glycine max
  misc_feature (1)..(308): Ceres Seq. ID no. 14303480
KFQTPQPPHNSYTFLLFSFSNFLSQFSTMATTTQLHLPPGFRFHPTDEELVIHYLCRKCASQHIAVPIIAEIDLYKYDPWDLPGMALYGEKEWYFFTPRDRKYPNGSRPNRSAGTGYWKATGADKPVGKPKPVGIKKALVFYAGKAPKGEKTNWIMHEYRLADVDRSVRKKNSLRLDDWVLCRIYNKKGAIEKQQLPPPSGVRKIECSEMEDEKPEILPPDPPYTAATVADCLYFEASDSVPRLHTTDSSCSEQVVSAEFASEVQSEPKRGSNNNNEFAYNYVDATLGNNQMSPLQDIFMYLSKSFCN

SEQ ID NO: 4702 - protein, 280 aa, Glycine max
  misc_feature (1)..(280): Ceres Seq. ID no. 14303481
MATTTQLHLPPGFRFHPTDEELVIHYLCRKCASQHIAVPIIAEIDLYKYDPWDLPGMALYGEKEWYFFTPRDRKYPNGSRPNRSAGTGYWKATGADKPVGKPKPVGIKKALVFYAGKAPKGEKTNWIMHEYRLADVDRSVRKKNSLRLDDWVLCRIYNKKGAIEKQQLPPPSGVRKIECSEMEDEKPEILPPDPPYTAATVADCLYFEASDSVPRLHTTDSSCSEQVVSAEFASEVQSEPKRGSNNNNEFAYNYVDATLGNNQMSPLQDIFMYLSKSFCN

SEQ ID NO: 4703 - protein, 224 aa, Glycine max
  misc_feature (1)..(224): Ceres Seq. ID no. 14303482
MALYGEKEWYFFTPRDRKYPNGSRPNRSAGTGYWKATGADKPVGKPKPVGIKKALVFYAGKAPKGEKTNWIMHEYRLADVDRSVRKKNSLRLDDWVLCRIYNKKGAIEKQQLPPPSGVRKIECSEMEDEKPEILPPDPPYTAATVADCLYFEASDSVPRLHTTDSSCSEQVVSAEFASEVQSEPKRGSNNNNEFAYNYVDATLGNNQMSPLQDIFMYLSKSFCN

SEQ ID NO: 4704 - DNA, 1896 bp, Glycine max
  misc_feature (1)..(1896): Ceres Seq. ID no. 14303500
gtacaatcccacatcctcaagatatatattggcttgttccggcgtgcagagaatctcacaggtgcggaatatgaagccatagacatgatactactgaagaaacacgaaatggtcttcaattttgtctctgcactaataacaacaatattgctctccggagccatagttgaagttaagggtcttccacttcacacggattcacgatggatcgtcaacgaagatgggcagagggtcaagctggcatgtgtgaattgggtgtcccatttggaagctgtggtggccgaagggctcagcaaaaagcccgtggatgtcatttcaaatggaataaagtccatgggcttcaactgtgtcaggctcacttggcctatagttttggtcactaatgactctcttgcttctctcaccgttagaagctcctttcagaaccttgccctccttgaatccattgctggtgtccaaaccaacaacccctccattatcgatcttcccctcatccaagcttttcaggcagtggtgaaaagtctcggtgacaacgatgtgatggtgatattggacaaccacataacccagccagggtggtgctgcagtaactccgacggcaatggcttcttcggtgacaaattttttgacccaaaccagtggatattgggcctcaccaagatggcctccctcttcaatggagtcactaatgtggtgggcatgagcttgaggaatgagctccgagggcccaaacagaatgtcaacgattggtacaagtacatggtgaaaggagcagaagcgattcatgcagcaaatccggatgttcttgttattttatccggcctgaattttgataaagacttatctttcattcaaaatcggccagtgagcctcacatttaaggggaaattagtatatgaggcacactggtatgccttcactgatggtcaagcttgggttaatgggaatccaaaccaagtatgtggacaagtggcaggaaatatgatgagaacctcaggctttttagtgaaccaaggatggccattgtttattagtgagtttggtggagacttgagaggtaccaacgtgaatgacaaccgctaccttaactgcttcttggcagtggcagctgagcttgacttggattgggccttgtggacacttgttggtagctactactttagacaaggagttataggaatggaagagttttatgggattcttagttgggactggacccaagttagaaataccactttcttaaacagaatctctgccctccaacttccatttcgaggtccaggaataacaagaggcaatccatacaaattgatattccatcctttgaccggtttgtgtgtcataagaaagtcattactagacccattgacattgggtccttgctatttatctgatggctggaaatacacaccccagaaaattctatcaataaaaggaacttacttctgcatacaagcagagaatgaagggatgcctgcaaaacttgggataatatgctcagatcctaactctagatgggaaatgatctcagattcgaagttgcatctctcatctaaactcagcgatgattctaatgtatgcttagatgtagacgataacaacaacattgtgaccaatgcttgcaaatgcttgagcagagatcgtacatgtgaccctagtagccaatggttcaaacttattgacagcggaaggagatcaatgttgacaacctcaacatcatccatgctaaattcatcagacctttatggaaaccattaagctcagcataagttgttttaagaatattactgtaaatttctctaaccatgtacttatgttttaatggcaggaaagtgatgcattaaacatgtccatatgtatgactattgaattcaatacataatataccactattag

SEQ ID NO: 4705 - protein, 585 aa, Glycine max
  misc_feature (1)..(585): Ceres Seq. ID no. 14303501
VQSHILKIYIGLFRRAENLTGAEYEAIDMILLKKHEMVFNFVSALITTILLSGAIVEVKGLPLHTDSRWIVNEDGQRVKLACVNWVSHLEAVVAEGLSKKPVDVISNGIKSMGFNCVRLTWPIVLVTNDSLASLTVRSSFQNLALLESIAGVQTNNPSIIDLPLIQAFQAVVKSLGDNDVMVILDNHITQPGWCCSNSDGNGFFGDKFFDPNQWILGLTKMASLFNGVTNVVGMSLRNELRGPKQNVNDWYKYMVKGAEAIHAANPDVLVILSGLNFDKDLSFIQNRPVSLTFKGKLVYEAHWYAFTDGQAWVNGNPNQVCGQVAGNMMRTSGFLVNQGWPLFISEFGGDLRGTNVNDNRYLNCFLAVAAELDLDWALWTLVGSYYFRQGVIGMEEFYGILSWDWTQVRNTTFLNRISALQLPFRGPGITRGNPYKLIFHPLTGLCVIRKSLLDPLTLGPCYLSDGWKYTPQKILSIKGTYFCIQAENEGMPAKLGIICSDPNSRWEMISDSKLHLSSKLSDDSNVCLDVDDNNNIVTNACKCLSRDRTCDPSSQWFKLIDSGRRSMLTTSTSSMLNSSDLYGNH

SEQ ID NO: 4706 - protein, 557 aa, Glycine max
  misc_feature (1)..(557): Ceres Seq. ID no. 14303502
MILLKKHEMVFNFVSALITTILLSGAIVEVKGLPLHTDSRWIVNEDGQRVKLACVNWVSHLEAVVAEGLSKKPVDVISNGIKSMGFNCVRLTWPIVLVTNDSLASLTVRSSFQNLALLESIAGVQTNNPSIIDLPLIQAFQAVVKSLGDNDVMVILDNHITQPGWCCSNSDGNGFFGDKFFDPNQWILGLTKMASLFNGVTNVVGMSLRNELRGPKQNVNDWYKYMVKGAEAIHAANPDVLVILSGLNFDKDLSFIQNRPVSLTFKGKLVYEAHWYAFTDGQAWVNGNPNQVCGQVAGNMMRTSGFLVNQGWPLFISEFGGDLRGTNVNDNRYLNCFLAVAAELDLDWALWTLVGSYYFRQGVIGMEEFYGILSWDWTQVRNTTFLNRISALQLPFRGPGITRGNPYKLIFHPLTGLCVIRKSLLDPLTLGPCYLSDGWKYTPQKILSIKGTYFCIQAENEGMPAKLGIICSDPNSRWEMISDSKLHLSSKLSDDSNVCLDVDDNNNIVTNACKCLSRDRTCDPSSQWFKLIDSGRRSMLTTSTSSMLNSSDLYGNH

SEQ ID NO: 4707 - protein, 549 aa, Glycine max
  misc_feature (1)..(549): Ceres Seq. ID no. 14303503
MVFNFVSALITTILLSGAIVEVKGLPLHTDSRWIVNEDGQRVKLACVNWVSHLEAVVAEGLSKKPVDVISNGIKSMGFNCVRLTWPIVLVTNDSLASLTVRSSFQNLALLESIAGVQTNNPSIIDLPLIQAFQAVVKSLGDNDVMVILDNHITQPGWCCSNSDGNGFFGDKFFDPNQWILGLTKMASLFNGVTNVVGMSLRNELRGPKQNVNDWYKYMVKGAEAIHAANPDVLVILSGLNFDKDLSFIQNRPVSLTFKGKLVYEAHWYAFTDGQAWVNGNPNQVCGQVAGNMMRTSGFLVNQGWPLFISEFGGDLRGTNVNDNRYLNCFLAVAAELDLDWALWTLVGSYYFRQGVIGMEEFYGILSWDWTQVRNTTFLNRISALQLPFRGPGITRGNPYKLIFHPLTGLCVIRKSLLDPLTLGPCYLSDGWKYTPQKILSIKGTYFCIQAENEGMPAKLGIICSDPNSRWEMISDSKLHLSSKLSDDSNVCLDVDDNNNIVTNACKCLSRDRTCDPSSQWFKLIDSGRRSMLTTSTSSMLNSSDLYGNH

SEQ ID NO: 4708 - DNA, 1541 bp, Glycine max
  misc_feature (1)..(1541): Ceres Seq. ID no. 14303504
tagtgttctctctgttcatgttcgaggaacggatttgaagaccaacacactgttgcgtggatgccttcatcttgtagatcttgcaggaagtgaaagagtggatcgttctgaagcaactggagacaggcttaaggaggctcaacatataaataaatcactatctgcactaggagatgtaatatttgctctatcacagaagagttcacacgtgccatatagaaatagtaaattgacccaacttcttcagagttcgttaggtaattgttgccattattggtatcaatttacagtattgttatatttggtttcatttgtttgcattttgatttaagcatattgcagtcatggcttactaaattgcaatagctttgtccgttgtatatgataggtggtcaagcgaaaacccttatgtttgtacagcttaatcctgatgttgcttcatattctgaaactgtaagcaccttgaagtttgctgaacgggtttctggcgtggagttaggcgctgctcgtagcaacaaagaggggagggatgtgagagaacttatggagcagttggcatctctcaaggatgcaattgcaaggaaggatgaagagattgaacggttacagtcactcaaggctaaccataatggtgcaaagcttggtatgatctcagtaagacatgggtcatcatctccaaggagacattccatagggactccccgaattagcacgagacttgcaggagcaaggagctttggagtcaatggaaaggcagcttctgacatggataactgctcagagtatagtgataagcattcagaaactggttctcatcaatcaatggatgatttcaggaacaagtccagttcccttcggttgaagttaaccagagatcatatcagtcaaaatgtcaatgaagacattgacctcttaagatttggagatgcggattcagaggagagattaagtgacatatctgatggtggtctttcaatgggaaccgaaactgaaggttcaatcagcagtattgtggagtacactcttttccctgaacttgagaaggcagctgaaattacaccaatgaaggacaccacaaccgacaaccttccagctgagagcacagaaaagcctattatgccatccaaaattcccaaagcttctcaagtcccacaaaaagtgcagtcaaaacattctaggcattcaatgaacaaaacctcctcgaaggttctgtcaagtgttagaaaacccgcagccagtagctcttcttcggtgaagccccctaaacgatggcaatagttaggatgccagttggatgcagtagagtgcttatttatagctatagccggtaggaacttttttatttatgttaggtgatcattctaattacactttactcaaggctcaagggtcagctcagttcagcttcaatctgttatggaatgaggcgaattgcaaattgtaaccagtctgtatgtaagcatcatggccttttatgtcatatcaccgaatctgctgtatttacaactttccattcagtaatgttatctacgatgttgtac

SEQ ID NO: 4709 - protein, 298 aa, Glycine max
  misc_feature (1)..(298): Ceres Seq. ID no. 14303505
MIGGQAKTLMFVQLNPDVASYSETVSTLKFAERVSGVELGAARSNKEGRDVRELMEQLASLKDAIARKDEEIERLQSLKANHNGAKLGMISVRHGSSSPRRHSIGTPRISTRLAGARSFGVNGKAASDMDNCSEYSDKHSETGSHQSMDDFRNKSSSLRLKLTRDHISQNVNEDIDLLRFGDADSEERLSDISDGGLSMGTETEGSISSIVEYTLFPELEKAAEITPMKDTTTDNLPAESTEKPIMPSKIPKASQVPQKVQSKHSRHSMNKTSSKVLSSVRKPAASSSSSVKPPKRWQ

SEQ ID NO: 4710 - protein, 289 aa, Glycine max
  misc_feature (1)..(289): Ceres Seq. ID no. 14303506
MFVQLNPDVASYSETVSTLKFAERVSGVELGAARSNKEGRDVRELMEQLASLKDAIARKDEEIERLQSLKANHNGAKLGMISVRHGSSSPRRHSIGTPRISTRLAGARSFGVNGKAASDMDNCSEYSDKHSETGSHQSMDDFRNKSSSLRLKLTRDHISQNVNEDIDLLRFGDADSEERLSDISDGGLSMGTETEGSISSIVEYTLFPELEKAAEITPMKDTTTDNLPAESTEKPIMPSKIPKASQVPQKVQSKHSRHSMNKTSSKVLSSVRKPAASSSSSVKPPKRWQ

SEQ ID NO: 4711 - protein, 244 aa, Glycine max
  misc_feature (1)..(244): Ceres Seq. ID no. 14303507
MEQLASLKDAIARKDEEIERLQSLKANHNGAKLGMISVRHGSSSPRRHSIGTPRISTRLAGARSFGVNGKAASDMDNCSEYSDKHSETGSHQSMDDFRNKSSSLRLKLTRDHISQNVNEDIDLLRFGDADSEERLSDISDGGLSMGTETEGSISSIVEYTLFPELEKAAEITPMKDTTTDNLPAESTEKPIMPSKIPKASQVPQKVQSKHSRHSMNKTSSKVLSSVRKPAASSSSSVKPPKRWQ

SEQ ID NO: 4712 - DNA, 1837 bp, Glycine max
  misc_feature (1)..(1837): Ceres Seq. ID no. 14303520
aaatagcattgattctgtagaatcaaattgattcaaaactattgtatatatacacacttgagactatgaaataaacaagccaaatattctctattattgttattcatcatggtatcagtaagtttggtactgatctctcattccaaacctaatctctagcgccgccctcattctcgttactgaatcccaaaaactcttgaatcaaattcaactttcctcatccatggctggctcgaatcctccctctccaccatcttctgttacacatcctgcactcacagtccccaacattaccaattttatcaaaattaagttagatatagaaaagagtcagtacaacacttggtcagaattgttcaaaatccatgcaagagcctaccaagttattgatcacattattccctcctctgctgatgatacacgtgatatatctttccaacaaacagaccccaagctttggtcacgccttgatgctgttgttctccaatggatctacggaactatttccgatgatttgctgaacacaatcattgaacgtgacacgacggcagaaatggcgtggaaccgcttgtttgaaatcttctttgataataagcattccagagcactctatctcgaacaagaattttcgcgagtgcagatggaacaattccctaatgcttcatcatactgtcaacatttgaaaacactatctgatcaattgtcaaatgttggtgcgccagtatcaaatgaaagattggtgttgcaacttatttctggactaacagatgcctatgccgccgtcggatcacagattcgacatggagaaactctcccgcccttctacaaagcccgttcaatgattgttttagaggaaacagcaaaggcgaaaaaggctgcaaccgttacagacaattctgcgtttctcgcttctcaagatgtcagcactgttaataattcttctcaacagaattataacaatacaccaaacagcaccaatcatggaggtcgtggcagcgacaatacagcctctaaccgcggtcgtggtagcaaccgtggtggccgtggtaatcgtggtaggggtcgcaacggaggtcgcaataatcggtcacaatattaccaatatccgcaacaacaacagtgggctgttccaccttgggctgcaccgtggcaaccatgggccacgccaccatgtccgtacccaactacgccaaattggcaacatcagtccactcctcgccagcaaggaattcttggaccaaagcctccacaagctcatatggcagccacatcagcaaataatgctcaaccatcatatgcatcaaccgacattcaagctgcgatgcatactctttctatggctcctcctgatgatcagtggtacatggataccggggccacctctcacatgactgcaaatggaggattttcagacagggattattttaatgagatgtgatagctcaggcgatctatatccactcacctcaagaccaaccactacctacccatccaattttgtcgctttatccaaagaattatggcacaatcgtttaggacatccaggcattccagtttttaattctctacaaagaaacaattttattttatgtaataagcttccaaagcattctttttgtcattcctgtcctcttggaaaacacacaaaattacctttttatgaatcttcttcttatactatgatgccttttgatattgttcacagtgatatttggacgtcccctgtgctcagctcaggtggacatcgttattatgctttgttcctagatgacttcacgaattttttgtggacttttccaattgcaaataaatctcaagtccattccatctttattcg

SEQ ID NO: 4713 - protein, 404 aa, Glycine max
  misc_feature (1)..(404): Ceres Seq. ID no. 14303521
MAGSNPPSPPSSVTHPALTVPNITNFIKIKLDIEKSQYNTWSELFKIHARAYQVIDHIIPSSADDTRDISFQQTDPKLWSRLDAVVLQWIYGTISDDLLNTIIERDTTAEMAWNRLFEIFFDNKHSRALYLEQEFSRVQMEQFPNASSYCQHLKTLSDQLSNVGAPVSNERLVLQLISGLTDAYAAVGSQIRHGETLPPFYKARSMIVLEETAKAKKAATVTDNSAFLASQDVSTVNNSSQQNYNNTPNSTNHGGRGSDNTASNRGRGSNRGGRGNRGRGRNGGRNNRSQYYQYPQQQQWAVPPWAAPWQPWATPPCPYPTTPNWQHQSTPRQQGILGPKPPQAHMAATSANNAQPSYASTDIQAAMHTLSMAPPDDQWYMDTGATSHMTANGGFSDRDYFNEM

SEQ ID NO: 4714 - protein, 294 aa, Glycine max
  misc_feature (1)..(294): Ceres Seq. ID no. 14303522
MAWNRLFEIFFDNKHSRALYLEQEFSRVQMEQFPNASSYCQHLKTLSDQLSNVGAPVSNERLVLQLISGLTDAYAAVGSQIRHGETLPPFYKARSMIVLEETAKAKKAATVTDNSAFLASQDVSTVNNSSQQNYNNTPNSTNHGGRGSDNTASNRGRGSNRGGRGNRGRGRNGGRNNRSQYYQYPQQQQWAVPPWAAPWQPWATPPCPYPTTPNWQHQSTPRQQGILGPKPPQAHMAATSANNAQPSYASTDIQAAMHTLSMAPPDDQWYMDTGATSHMTANGGFSDRDYFNEM

SEQ ID NO: 4715 - protein, 265 aa, Glycine max
  misc_feature (1)..(265): Ceres Seq. ID no. 14303523
MEQFPNASSYCQHLKTLSDQLSNVGAPVSNERLVLQLISGLTDAYAAVGSQIRHGETLPPFYKARSMIVLEETAKAKKAATVTDNSAFLASQDVSTVNNSSQQNYNNTPNSTNHGGRGSDNTASNRGRGSNRGGRGNRGRGRNGGRNNRSQYYQYPQQQQWAVPPWAAPWQPWATPPCPYPTTPNWQHQSTPRQQGILGPKPPQAHMAATSANNAQPSYASTDIQAAMHTLSMAPPDDQWYMDTGATSHMTANGGFSDRDYFNEM

SEQ ID NO: 4716 - DNA, 1472 bp, Glycine max
  misc_feature (1)..(1472): Ceres Seq. ID no. 14303619
aattccgttgacgcgtttttcctccatttccttcttcgctagattacccagatctacgacgagtctctgctatgaattaattctcatatctcaaaatcattcaccgttttcatttcattctaactaatctttccagaaccctcgaatctcttctttcgaacgtgcaaagatttttgacttgaccgaatgctgttgcggttgaaatcggtgtgagaaatagggtttcgacgatgccttcgcttccctttggactccttctacgccatttggtcccttccttggccctattccacggtggatcctcctctcatcgtctcaaacatcttgaaaaaagtgatcggcgttgtagtcttagttaacattacgagcttttctttcttctgtttttttttcccggcgttcgtggttatgttgttttgaaaacaaatacctgtttcggtttcatctatttttggctgacgaatttgaggatcgaggtgtttttgtttcacttggtgtttgcgttgacttcaaggaacgtgcaaattttgcagctggaaacgccgtcgtttaagtgcctttatacaattgatggacacgcgctctccagttaatgctgtgcatgacaacatcataagtaagctggaagttacttttagtgagtcattacatatacatgatgctcagaattcggaacatgcatctgaaggggatcatattggtaattgtgatgtgggagagcggaacttacgcgaaggttttgaactgcaagaaaccaaactagagataaagtgcttgaaagagtgttcgacttttccttatcctgatatgatgctgccttcaagctcttctgacgaggaggctgatgcatcgtcaccctctaagcagtctccacgccaaaactactcgtgctcagtatctttgccagcacctcccaagcttgtatctgccatgaaaggtagccgtgagaaagagcggggatcacaaatgaaattgacagtgaagtgggcccctgatgtatatgatccggtacctacattgttatcacatactgttaaaaacaagaaacagcaaaaacccaggatcaagaagagtgaaaagaaaaatggaaagaagggccagaaggtcagttactctaaaagaggcagcagcaaagataaacagtatcgaaataggtggttttattctcacgatgaagtgtttgaagcttcctctgataatgctgctaaccatgattcctactgtggaactagctactacttggaaacatcactcacaaaggttcactggtctattggagaagcgctgtaacatgcttggttgtgttgtatacagtgactgcataaatagataattttctgttatgttgtaatatcaatagattgatcaaggctgttagaacatccaatgtgccactaaaagcagcctaataatgtacggatacataccccttttttgtcaaataatcttaaaggcttctaggttgcagtgct

SEQ ID NO: 4717 - protein, 239 aa, Glycine max
  misc_feature (1)..(239): Ceres Seq. ID no. 14303620
MDTRSPVNAVHDNIISKLEVTFSESLHIHDAQNSEHASEGDHIGNCDVGERNLREGFELQETKLEIKCLKECSTFPYPDMMLPSSSSDEEADASSPSKQSPRQNYSCSVSLPAPPKLVSAMKGSREKERGSQMKLTVKWAPDVYDPVPTLLSHTVKNKKQQKPRIKKSEKKNGKKGQKVSYSKRGSSKDKQYRNRWFYSHDEVFEASSDNAANHDSYCGTSYYLETSLTKVHWSIGEAL

SEQ ID NO: 4718 - protein, 160 aa, Glycine max
  misc_feature (1)..(160): Ceres Seq. ID no. 14303621
MMLPSSSSDEEADASSPSKQSPRQNYSCSVSLPAPPKLVSAMKGSREKERGSQMKLTVKWAPDVYDPVPTLLSHTVKNKKQQKPRIKKSEKKNGKKGQKVSYSKRGSSKDKQYRNRWFYSHDEVFEASSDNAANHDSYCGTSYYLETSLTKVHWSIGEAL

SEQ ID NO: 4719 - protein, 159 aa, Glycine max
  misc_feature (1)..(159): Ceres Seq. ID no. 14303622
MLPSSSSDEEADASSPSKQSPRQNYSCSVSLPAPPKLVSAMKGSREKERGSQMKLTVKWAPDVYDPVPTLLSHTVKNKKQQKPRIKKSEKKNGKKGQKVSYSKRGSSKDKQYRNRWFYSHDEVFEASSDNAANHDSYCGTSYYLETSLTKVHWSIGEAL

SEQ ID NO: 4720 - DNA, 1232 bp, Glycine max
  misc_feature (1)..(1232): Ceres Seq. ID no. 14303786
gagtgaagtgcgaaggacaatgagtgttcggtccaaaaacttgaactctgtattctatgcagattcgtaccatcccattcaagctggcagcatcgacggcaccgatgttgttcctcacgataacgccgtttatcgcgctcaactctgttcctccatcggcctctatgacccatttggtgatcccaaggccactggagacccttattgcactctctttgtcgctcgtctctctcgcctcaccaccgaagatgatctccgcaaggtcatgagtaagtatggtcgagtgaagaacttacgcttggttagggacattgtgacgggagcttctcgtggttatgcttttgttgaatacgagactgaaagggagatgcgacgagcatatatggatgctcatcatttgattgttgatgattctgaaatcatagttgattacaacagacagcaattgatgcctggatggattcctagaaggttaggtggtggtcttagtggtaagaaggaatcgggacaacttcgttttggggggagagaaaagccatttcgtgcacccctgaaaccaattccatatgaggagttgaagaagcttggcatcccccctcctcccgagggaagatacatgtcacgctttcaggtgccatcgcctcctagaagtgaaaggagcctttcagacagggaagaagactctcatagccacagaaggggatctaatgacaggaacaggaacaagacggaagatggactcagaagttcagtggacattgaggaagggcattataggagttcaagtcatcgtgataaccactcacgtggaaggagctctatggagaggagtggtcgttaccatgaccggagttcatctgagaaagaacatcgacacgggagttctactgacaaagacaaacattctcagaagagaaaagaaagtgacaggagttcacttgagaaagaacgtcgacacaggagttctactgacaaagacaaacattctcggaagagaaaagaaagagatgaacggtctcaaaggcgggaaaaatatagtcaccattcccctcacaaggactaagctgtacaactcattattatcacccttctgttgtgcttttgtgctttgtgtatggtatatgcatgggagaaatgggaatgcaaagtggaaatcctcaaagatttctcaataaacgcgagactggtgcatgtataggttcaatgataatcatgcttcggtttatattttt

SEQ ID NO: 4721 - protein, 353 aa, Glycine max
  misc_feature (1)..(353): Ceres Seq. ID no. 14303787
SEVRRTMSVRSKNLNSVFYADSYHPIQAGSIDGTDVVPHDNAVYRAQLCSSIGLYDPFGDPKATGDPYCTLFVARLSRLTTEDDLRKVMSKYGRVKNLRLVRDIVTGASRGYAFVEYETEREMRRAYMDAHHLIVDDSEIIVDYNRQQLMPGWIPRRLGGGLSGKKESGQLRFGGREKPFRAPLKPIPYEELKKLGIPPPPEGRYMSRFQVPSPPRSERSLSDREEDSHSHRRGSNDRNRNKTEDGLRSSVDIEEGHYRSSSHRDNHSRGRSSMERSGRYHDRSSSEKEHRHGSSTDKDKHSQKRKESDRSSLEKERRHRSSTDKDKHSRKRKERDERSQRREKYSHHSPHKD

SEQ ID NO: 4722 - protein, 347 aa, Glycine max
  misc_feature (1)..(347): Ceres Seq. ID no. 14303788
MSVRSKNLNSVFYADSYHPIQAGSIDGTDVVPHDNAVYRAQLCSSIGLYDPFGDPKATGDPYCTLFVARLSRLTTEDDLRKVMSKYGRVKNLRLVRDIVTGASRGYAFVEYETEREMRRAYMDAHHLIVDDSEIIVDYNRQQLMPGWIPRRLGGGLSGKKESGQLRFGGREKPFRAPLKPIPYEELKKLGIPPPPEGRYMSRFQVPSPPRSERSLSDREEDSHSHRRGSNDRNRNKTEDGLRSSVDIEEGHYRSSSHRDNHSRGRSSMERSGRYHDRSSSEKEHRHGSSTDKDKHSQKRKESDRSSLEKERRHRSSTDKDKHSRKRKERDERSQRREKYSHHSPHKD

SEQ ID NO: 4723 - protein, 265 aa, Glycine max
  misc_feature (1)..(265): Ceres Seq. ID no. 14303789
MSKYGRVKNLRLVRDIVTGASRGYAFVEYETEREMRRAYMDAHHLIVDDSEIIVDYNRQQLMPGWIPRRLGGGLSGKKESGQLRFGGREKPFRAPLKPIPYEELKKLGIPPPPEGRYMSRFQVPSPPRSERSLSDREEDSHSHRRGSNDRNRNKTEDGLRSSVDIEEGHYRSSSHRDNHSRGRSSMERSGRYHDRSSSEKEHRHGSSTDKDKHSQKRKESDRSSLEKERRHRSSTDKDKHSRKRKERDERSQRREKYSHHSPHKD

SEQ ID NO: 4724 - DNA, 1473 bp, Glycine max
  misc_feature (1)..(1473): Ceres Seq. ID no. 14303804
aatgtttttaccttgcaggcatgtgatcaagaaaaagagcaaggaagcctttattgcatttaaagaagccttgaaattcaagttcatatttatccctttaattaaatttcctttgcatcataaatatgggcatatgcttacataatgctcacatatattcaataatgtagtgtgtgtgtacgagttgggggaatagcaattggcgttaaaaagaaaagtttccctcacatagcttttgtttttttcccttggaaagccaaatttccccgttgaatgtggtttggaagtgtttccaaacacacccgtattggttcataatcatttgatgaagccttgaaattcaagtttcttattcatccttctattaaacttcctttgcgagtttgcgtcataaatatgggcataagcttgcatccgcagatgcatacatacatacatacatacattgcaaattcaacggtcttagaataaatagtaagttagtaacacaatgatatttggtaagacggacgaaacagctggcaactatgggagaactacagccatgctgctgttgacattggcaatatcagtcaggcactggaaggtgtccagatgattttgaatatgagcaataataagagagttgattgcgaattattggaaagaatcactaaggaggtggaaaagcggctttcaacaagtaacgtgccccctttgataactgacaataagcctaaaacagatcaattctgcattgttgatcctggatcagaaaatcaagagcaagtatctggagcatctgttacaggaagatcacgtgaaactgaacaattattgttattacttggaaaagttttacagcagataattaaaactgggagtggatgtggaccagaaatctggggcttatatgccaaatggcacagaattaatggagatctcatgatgtgttctgaagccctcttaaagcaagttaggtcactccagggatctgatacatggaaggaccgagaccggttcaaaaagtttgcaaaagtttctttggaactttgccaggtgtacgtggaatttttttcatctactggtagtattaaacaattgtctacagctgagatgcacttgaagaatgtcatcagacaggctcagagcttcaccgatacagaagagttcagggatcttcaggcttgctatgatgaagtgaaaattaaactccaatcgaactcaatgcctagctaaaatcttgttgaaggtattattcgatttatcatgcaagttctaacctgctgaggcatctattaagagtctctgtgcatgtagcttcctaattttcatcaacagggaatgtcaagaggttgctttcagaatcttgaatgtggcaaatatttaatatcactgattggagttaaaggacgtgcttcgtatcatatgatatcgtatgtattgcatattaaattaaacattctcaaatgaaagcgcaattttgtcatggcc

SEQ ID NO: 4725 - protein, 207 aa, Glycine max
  misc_feature (1)..(207): Ceres Seq. ID no. 14303805
MILNMSNNKRVDCELLERITKEVEKRLSTSNVPPLITDNKPKTDQFCIVDPGSENQEQVSGASVTGRSRETEQLLLLLGKVLQQIIKTGSGCGPEIWGLYAKWHRINGDLMMCSEALLKQVRSLQGSDTWKDRDRFKKFAKVSLELCQVYVEFFSSTGSIKQLSTAEMHLKNVIRQAQSFTDTEEFRDLQACYDEVKIKLQSNSMPS

SEQ ID NO: 4726 - protein, 203 aa, Glycine max
  misc_feature (1)..(203): Ceres Seq. ID no. 14303806
MSNNKRVDCELLERITKEVEKRLSTSNVPPLITDNKPKTDQFCIVDPGSENQEQVSGASVTGRSRETEQLLLLLGKVLQQIIKTGSGCGPEIWGLYAKWHRINGDLMMCSEALLKQVRSLQGSDTWKDRDRFKKFAKVSLELCQVYVEFFSSTGSIKQLSTAEMHLKNVIRQAQSFTDTEEFRDLQACYDEVKIKLQSNSMPS

SEQ ID NO: 4727 - DNA, 1676 bp, Glycine max
  misc_feature (1)..(1676): Ceres Seq. ID no. 14303835
agaattgtacccggtgttggagtcaatacaaaaatatctctggcctcgactgtgcaagctagatcaggaaacactatatgagctacattaccagatgattacatttggaaaggtcttctgtacaaaaagcaaaccaaattgtaatgcatgcccaatgagagcagaatgtagacactttgctagtgcatttgcaagtgcaaggtttgcactgcctggaccagagcagaagagtatagttagcacaactggaaatagtgtgattaaccagaacccatctgaaatcatcagtcagttgcacttgcctccacctgagaacacagcccaagaagatgaaattcaactaacagaagtgagcagacaattggaatcaaaatttgaaataaatatttgccaacctatcattgaagagcccagaactccagagccagaatgcttgcaagaatcacaaactgatatagaggatgctttctatgaggattcaagtgaaattccaaccatcaatcttaacatagaagagttcactctgaatttacaaaattacatgcaagaaaatatggaacttcaaggaggtgaaatgtcaaaggcattggttgctttgaatccacaagctgcttccattcctatgcccaagctaaagaatgtgggccgattacgaacagagcattgtgtttatgaactcccagatacgcatcctcttctacaagggtgggacacacgagagcctgatgatccaggcaaatatcttcttgctatatggactccaggtgagaccgcaaattctatacagccaccagaaagcaattgcagctctcaagaagaatgtggccaactctgtaatgagaaggaatgtttctcatgcaacagtttccgtgaagcaaattctcagatagttagagggacactcctgataccttgtcgaacagctatgcgggggagctttccactgaatggcacctatttccaattcaatgaggtatttgctgaccatgactcaagtctcaacccaattagtgtgccccgaagttggatctggaacctcaacaggcgaacagtatattttgggacctccgtaacaacaatatttaaaggtttaacaacacaagaaactcaacaatgcttttggagagggtatatctgtgtgcgggggtttgacagggaagcacgagcaccccgccctctgatggctagactacatttcccagctagcaagttggccgccaagaccaaagagaaagcaaaaaaggagtcgaattcagcaaaatcacgagcatccaaaccaaatccagaacagccggaattgattgccaacagagacaaatgagcatttttcatcatcccatgctgtgttgcccagttgcatgcataaaatgacaaagtcattatttcattttactttttatcgtgctcagagactgagcagtttttccagattaggacccccaataatgtactattggtagaacttaggctttagtttcttgtttccaaaaaggaagattatgtgaaggggagtgtgagccatatgagaggccaagtactttctcccccaatccctgctgatgtacacttagaatgttttagaattaaattatgcctccccacttcaccaacaacatctacatcaatcatgcgtcttcatcataattttaaagacaatataacaaagattaaaatgc

SEQ ID NO: 4728 - protein, 439 aa, Glycine max
  misc_feature (1)..(439): Ceres Seq. ID no. 14303836
ELYPVLESIQKYLWPRLCKLDQETLYELHYQMITFGKVFCTKSKPNCNACPMRAECRHFASAFASARFALPGPEQKSIVSTTGNSVINQNPSEIISQLHLPPPENTAQEDEIQLTEVSRQLESKFEINICQPIIEEPRTPEPECLQESQTDIEDAFYEDSSEIPTINLNIEEFTLNLQNYMQENMELQGGEMSKALVALNPQAASIPMPKLKNVGRLRTEHCVYELPDTHPLLQGWDTREPDDPGKYLLAIWTPGETANSIQPPESNCSSQEECGQLCNEKECFSCNSFREANSQIVRGTLLIPCRTAMRGSFPLNGTYFQFNEVFADHDSSLNPISVPRSWIWNLNRRTVYFGTSVTTIFKGLTTQETQQCFWRGYICVRGFDREARAPRPLMARLHFPASKLAAKTKEKAKKESNSAKSRASKPNPEQPELIANRDK

SEQ ID NO: 4729 - protein, 408 aa, Glycine max
  misc_feature (1)..(408): Ceres Seq. ID no. 14303837
MITFGKVFCTKSKPNCNACPMRAECRHFASAFASARFALPGPEQKSIVSTTGNSVINQNPSEIISQLHLPPPENTAQEDEIQLTEVSRQLESKFEINICQPIIEEPRTPEPECLQESQTDIEDAFYEDSSEIPTINLNIEEFTLNLQNYMQENMELQGGEMSKALVALNPQAASIPMPKLKNVGRLRTEHCVYELPDTHPLLQGWDTREPDDPGKYLLAIWTPGETANSIQPPESNCSSQEECGQLCNEKECFSCNSFREANSQIVRGTLLIPCRTAMRGSFPLNGTYFQFNEVFADHDSSLNPISVPRSWIWNLNRRTVYFGTSVTTIFKGLTTQETQQCFWRGYICVRGFDREARAPRPLMARLHFPASKLAAKTKEKAKKESNSAKSRASKPNPEQPELIANRDK

SEQ ID NO: 4730 - protein, 388 aa, Glycine max
  misc_feature (1)..(388): Ceres Seq. ID no. 14303838
MRAECRHFASAFASARFALPGPEQKSIVSTTGNSVINQNPSEIISQLHLPPPENTAQEDEIQLTEVSRQLESKFEINICQPIIEEPRTPEPECLQESQTDIEDAFYEDSSEIPTINLNIEEFTLNLQNYMQENMELQGGEMSKALVALNPQAASIPMPKLKNVGRLRTEHCVYELPDTHPLLQGWDTREPDDPGKYLLAIWTPGETANSIQPPESNCSSQEECGQLCNEKECFSCNSFREANSQIVRGTLLIPCRTAMRGSFPLNGTYFQFNEVFADHDSSLNPISVPRSWIWNLNRRTVYFGTSVTTIFKGLTTQETQQCFWRGYICVRGFDREARAPRPLMARLHFPASKLAAKTKEKAKKESNSAKSRASKPNPEQPELIANRDK

SEQ ID NO: 4731 - DNA, 1257 bp, Glycine max
  misc_feature (1)..(1257): Ceres Seq. ID no. 14303858
tattgggtcgtggttttcctgtcaggccgaaaaagaaatggagtgcgtggaggcagcgttgaagagcaattataggaaagaaatgaccttaaaactgagcccacaaaccttcacggaagaggttagtgtccaaaacggcacaacctgcgacgactttttcgttaacgacctccttgacttctctcacgtcgaagaagaacccgaacaacaagaagacactccttgtgtctcccttcagcatgaaaacccaagccacgagccctgtactttcaaagacgattatgcctctgtgcccactagcgagcttagcgtcttggtaccttttttttccactcaatttgtattttaattgttctgtgttagtggttgacgaagaaagttgcgatttttacaggcggatgacttggcggacttggagtggctgtctcatttcgtggaggattccttctcggaattctctgcggccttccccaccgtaacggagaacccaacagcatgccttaaagaggcagagcctgaaccggaaatcccggttttctctttcaaaaccccggttcagaccaaagcaagaagcaagcgaaccagaaacggtcttcgtgtttggccattcggttcaccttccttcaccgattcttcctcaagctccaccacctcttcctcttcctcttcttcaccctctagccccttgctaatttacacccaaagcctcgaccacctgtgctccgagccaaataccaaaaaaatgaagaaaaaaccctcttccgataccctggcgccgcgaaggtgcagtcattgcggcgtgcagaaaacccctcagtggagaactgggccgctaggcccaaaaacactatgcaacgcgtgtggggtccgcttcaagtcgggccggctcttacccgaatacaggcctgcttgtagcccaacattttcaagtgaattacactcgaaccatcatcgtaaagtgctcgagatgcggcaaaagaaggagacagtttctgtggatgagactggttttgcccctgctcatgttgttcccagtttttgattctttttattacataagaaaagaaaagaaaaaaaaaaactaggtgctgtagtgattgattactcagattagagaaggtagcgcagactttagacccggttcaatgggacccgagttagtgtacatttttttcccttgtattgagtgcggtatgtgttagcttttgtaacccattaggagactttgatatgtaatgcaagtccttttaccttttg

SEQ ID NO: 4732 - protein, 115 aa, Glycine max
  misc_feature (1)..(115): Ceres Seq. ID no. 14303859
IGSWFSCQAEKEMECVEAALKSNYRKEMTLKLSPQTFTEEVSVQNGTTCDDFFVNDLLDFSHVEEEPEQQEDTPCVSLQHENPSHEPCTFKDDYASVPTSELSVLVPFFSTQFVF

SEQ ID NO: 4733 - protein, 103 aa, Glycine max
  misc_feature (1)..(103): Ceres Seq. ID no. 14303860
MECVEAALKSNYRKEMTLKLSPQTFTEEVSVQNGTTCDDFFVNDLLDFSHVEEEPEQQEDTPCVSLQHENPSHEPCTFKDDYASVPTSELSVLVPFFSTQFVF

SEQ ID NO: 4734 - protein, 99 aa, Glycine max
  misc_feature (1)..(99): Ceres Seq. ID no. 14303861
MKKKPSSDTLAPRRCSHCGVQKTPQWRTGPLGPKTLCNACGVRFKSGRLLPEYRPACSPTFSSELHSNHHRKVLEMRQKKETVSVDETGFAPAHVVPSF

SEQ ID NO: 4735 - DNA, 1516 bp, Glycine max
  misc_feature (1)..(1516): Ceres Seq. ID no. 14303862
ggagttcttgctggggaaagataagtttccacccgcagagagtaacaagaagtctaaattgaatgggaagaagcatgtcgagggtgagatgggacatggaatgggttccaagcttttaaagagttgtagtgcgttgcttgagaagttgatgaagcacaaacatggttgggtgtttaatgctccggttgacgtggagggtcttggtttgcatgattactttagtatcatcacacatccaatggacttgggaactgtgaagtcaaggctgaacaagaattggtacaaatcacccaaggagtttgctgaggatgtgagacttacatttcataatgccatgacttataatcccaaagggcaagacgttcatataatggcatagcagctacttaacatatttgaagaaagatgggctataatagaatcaaattactaccgtgagattagatatggcctggattatggagcaccttcacctgtgtctagaaaggctcctccctttcggccaccaccaattgatatgaggcggattttggataggtcagaatcaatgacacaacctccaaaaatcatgggcatcactccttcgtctcgaacccctgctcccaaaaagcccaaggccaaagatcctcataagagagacatgacatatgaggaaaagcagaaactcagcacacatcttcagagtctaccttctgagaagctagatgcaattgtacagatcattaagaagagaaactcagcactttcacaacacgatgatgaaattgaagtggacattgatagtgtggatactgagactctctgggagcttgatagatttgtgaccaactataagaaaagtttgagcaaaaacaagaggaaggctgagcttgctattctagctagagaacgagctgagcagaatgcccagcagaagagtcaggcaccagttgcagtagagattccgaaagaaacacaagcagatgaaagaaatgttcccccatccttgcccgagcaaggacaaattccagtggataatgggagtaagaccagtagttcaagcagctccagcagtgattcaggctcttcgtcaagtgattctgatagtgatagttcctcagcctctgggtctgatgcagggtcaccaaaaacctgaattctttctgtcagatctcagatatttaagattagatagtgatgcaatgcttggctagttggtttttttcccgcatccagatttagctgttggtttgtaaaggaagcattctcaagaccacctatgatccctatggatgcagtatggggtccttttctcgcgtctgttggaactgttgcactactgctttaaggcattatatgtgataacacaaacccatgtaaaatatttggtagaatgtgatgataggtagatagttctccgtagcagtgtacattgctaactactgctactctcattaggtttccattgatgacttggtttgattttgtgctggtagattctagattcttgctgttatacaaagataatctgcaattc

SEQ ID NO: 4736 - protein, 205 aa, Glycine max
  misc_feature (1)..(205): Ceres Seq. ID no. 14303863
MRRILDRSESMTQPPKIMGITPSSRTPAPKKPKAKDPHKRDMTYEEKQKLSTHLQSLPSEKLDAIVQIIKKRNSALSQHDDEIEVDIDSVDTETLWELDRFVTNYKKSLSKNKRKAELAILARERAEQNAQQKSQAPVAVEIPKETQADERNVPPSLPEQGQIPVDNGSKTSSSSSSSSDSGSSSSDSDSDSSSASGSDAGSPKT

SEQ ID NO: 4737 - protein, 195 aa, Glycine max
  misc_feature (1)..(195): Ceres Seq. ID no. 14303864
MTQPPKIMGITPSSRTPAPKKPKAKDPHKRDMTYEEKQKLSTHLQSLPSEKLDAIVQIIKKRNSALSQHDDEIEVDIDSVDTETLWELDRFVTNYKKSLSKNKRKAELAILARERAEQNAQQKSQAPVAVEIPKETQADERNVPPSLPEQGQIPVDNGSKTSSSSSSSSDSGSSSSDSDSDSSSASGSDAGSPKT

SEQ ID NO: 4738 - protein, 188 aa, Glycine max
  misc_feature (1)..(188): Ceres Seq. ID no. 14303865
MGITPSSRTPAPKKPKAKDPHKRDMTYEEKQKLSTHLQSLPSEKLDAIVQIIKKRNSALSQHDDEIEVDIDSVDTETLWELDRFVTNYKKSLSKNKRKAELAILARERAEQNAQQKSQAPVAVEIPKETQADERNVPPSLPEQGQIPVDNGSKTSSSSSSSSDSGSSSSDSDSDSSSASGSDAGSPKT

SEQ ID NO: 4739 - DNA, 1056 bp, Glycine max
  misc_feature (1)..(1056): Ceres Seq. ID no. 14303877
tctcggaactttgaaaacgtggaagcacaccccagaccccacaccagtccccgtttgttccgctgcaaaacaaaaacaccgcgtcttccccgtgcggggaaaaagaaaagaaaagaaaagaaccctcaattttccgggaaaaccctccccacaatggtttcccgggaaaacaccaattggctcttcgattacggcttgatcgacgatattcccgttccggacgccaccttcggcgtcaattcctccgccttcacatggccccctaacgccttgaacgcttcctccaatgtcggcgttgaaattgatggctcgttgggggattctgacagtctcaaagagtctggctcaaagaaaagggttaggtctgagtcatgtgctgcttctggctccaaggcatgtcgggagaagttgagaagggataggcttaatgacaagtttgttgaattgggcgccattttggagcctggaaggcctgccaaaacagacaaggctgctatcctgattgatgctgtccgaatggtgacccagttacggggtgaagcccagaagttgaaagacactaatcagggtcttcaagaaaagattaaagagttaaaggctgagaagaacgaacttcgcgatgagaaacagaggctcaaggcagagaaggagaaactggagcagcagctgaaatctttgaatgcacagcctagtttcatgcctccccctgctgcaatgcctgctgcatttgcggcacaaggccaagcccatggcaacaagttggtaccttttattagttatcccggagttgcaatgtggcaattcatgccacctgctgcagtggatacctcacaggatcatgttctccgtccaccagttgcctaagctggcactgtacaattctctgggccagcattttggctcaaggttgtatccattttaccaataccttcttggctttgttagttctcttctaagtattctaactggacccagtggtgacttctgactatatctggcatatgatactattatgattaatgctggtagttgcatgtaaatcagtcaatgttaaat

SEQ ID NO: 4740 - protein, 287 aa, Glycine max
  misc_feature (1)..(287): Ceres Seq. ID no. 14303878
SRNFENVEAHPRPHTSPRLFRCKTKTPRLPRAGKKKRKEKNPQFSGKTLPTMVSRENTNWLFDYGLIDDIPVPDATFGVNSSAFTWPPNALNASSNVGVEIDGSLGDSDSLKESGSKKRVRSESCAASGSKACREKLRRDRLNDKFVELGAILEPGRPAKTDKAAILIDAVRMVTQLRGEAQKLKDTNQGLQEKIKELKAEKNELRDEKQRLKAEKEKLEQQLKSLNAQPSFMPPPAAMPAAFAAQGQAHGNKLVPFISYPGVAMWQFMPPAAVDTSQDHVLRPPVA

SEQ ID NO: 4741 - protein, 236 aa, Glycine max
  misc_feature (1)..(236): Ceres Seq. ID no. 14303879
MVSRENTNWLFDYGLIDDIPVPDATFGVNSSAFTWPPNALNASSNVGVEIDGSLGDSDSLKESGSKKRVRSESCAASGSKACREKLRRDRLNDKFVELGAILEPGRPAKTDKAAILIDAVRMVTQLRGEAQKLKDTNQGLQEKIKELKAEKNELRDEKQRLKAEKEKLEQQLKSLNAQPSFMPPPAAMPAAFAAQGQAHGNKLVPFISYPGVAMWQFMPPAAVDTSQDHVLRPPVA

SEQ ID NO: 4742 - DNA, 1429 bp, Glycine max
  misc_feature (1)..(1429): Ceres Seq. ID no. 14303884
ctacgtaggccccccccccccccaaacaaacactatccctggcagtaccaatccatctctttcctctctggcccatgacgacgtcgtccggttccgtgaagaacgcgatgcccccaggcctccaagaacccaacatcaatgccgaaccctcttcctccgccgacgattgctccaactccaacacgaagcccatcgtgttggtcaccaacagtgacggcattgagtctccgggcctcgttcacctcgtcgaagccctcgtgctccagggcctctgcgacgtccatgtctgcgttcctcaatcggacaaatcggcttcggcccactctgtcactcgcggagtaaccgttgaagctttttcggcacaaattaatggcgccaccgcctttgaagtttcaggaactcctgtggattgtgtttcactagcgttatctggggccttgttttcatggtcaaaacctatgctggttattagtggaattaaccggggatcaagctgtggtcatcacatgttctactcaggtgttgttgctggagcaagagaggcgttgttatgtggtgtaccttcattgtcaatatcattaaattggaagaaggatgaaagtcaagagactgatttcaaggatgcagtagtactctgtttacctttaataattgctgctatcagggatgttgtaaacggaactttcaccaaaagttgctttctgaatatagaaattcctacatcgcctttaacctgtaagggcttcaaattaaccaagcaaagtatgtggagatccactctaaactggcaggcagtttcaactagccggtatcctcctggtcatttcttggccagtaaacaaggctttggtcttcagtttgcacagattggccgagatgcctctgctgctggtgcagctcgcagattaactacacagaaaaagaatttggagattgttgaatcaattggagctgctggaaaacctgattccaacagggtgaagaagtacttcaggctagagttttcggagaagcagctggaagatatagatgacgatctagattacagggcacttgaaagtggatttgttgcagttactcctctctctctatctcctcatactgagaccaatattcaaatggcagcttctgattggatttcatctgtgtttcctggtgaacaatagcctcaaacagagttcagcttcagcgtgattatgtacatttgagatttctgattcttttctattttcttcttgaaagcaaaggtggagcagaagcgtctgtcacacccattctatagttgatatcatcaatctgtactctatgtttgtatgtgtgtgtaagatattttgtattcccctcttcattgtttcatttcttttggtcgctagttatttctgatgttatttgcttcctgtaatctcctaggcatattttaaaaatgcca

SEQ ID NO: 4743 - protein, 363 aa, Glycine max
  misc_feature (1)..(363): Ceres Seq. ID no. 14303885
MTTSSGSVKNAMPPGLQEPNINAEPSSSADDCSNSNTKPIVLVTNSDGIESPGLVHLVEALVLQGLCDVHVCVPQSDKSASAHSVTRGVTVEAFSAQINGATAFEVSGTPVDCVSLALSGALFSWSKPMLVISGINRGSSCGHHMFYSGVVAGAREALLCGVPSLSISLNWKKDESQETDFKDAVVLCLPLIIAAIRDVVNGTFTKSCFLNIEIPTSPLTCKGFKLTKQSMWRSTLNWQAVSTSRYPPGHFLASKQGFGLQFAQIGRDASAAGAARRLTTQKKNLEIVESIGAAGKPDSNRVKKYFRLEFSEKQLEDIDDDLDYRALESGFVAVTPLSLSPHTETNIQMAASDWISSVFPGEQ

SEQ ID NO: 4744 - protein, 352 aa, Glycine max
  misc_feature (1)..(352): Ceres Seq. ID no. 14303886
MPPGLQEPNINAEPSSSADDCSNSNTKPIVLVTNSDGIESPGLVHLVEALVLQGLCDVHVCVPQSDKSASAHSVTRGVTVEAFSAQINGATAFEVSGTPVDCVSLALSGALFSWSKPMLVISGINRGSSCGHHMFYSGVVAGAREALLCGVPSLSISLNWKKDESQETDFKDAVVLCLPLIIAAIRDVVNGTFTKSCFLNIEIPTSPLTCKGFKLTKQSMWRSTLNWQAVSTSRYPPGHFLASKQGFGLQFAQIGRDASAAGAARRLTTQKKNLEIVESIGAAGKPDSNRVKKYFRLEFSEKQLEDIDDDLDYRALESGFVAVTPLSLSPHTETNIQMAASDWISSVFPGEQ

SEQ ID NO: 4745 - protein, 235 aa, Glycine max
  misc_feature (1)..(235): Ceres Seq. ID no. 14303887
MLVISGINRGSSCGHHMFYSGVVAGAREALLCGVPSLSISLNWKKDESQETDFKDAVVLCLPLIIAAIRDVVNGTFTKSCFLNIEIPTSPLTCKGFKLTKQSMWRSTLNWQAVSTSRYPPGHFLASKQGFGLQFAQIGRDASAAGAARRLTTQKKNLEIVESIGAAGKPDSNRVKKYFRLEFSEKQLEDIDDDLDYRALESGFVAVTPLSLSPHTETNIQMAASDWISSVFPGEQ

SEQ ID NO: 4746 - DNA, 1708 bp, Glycine max
  misc_feature (1)..(1708): Ceres Seq. ID no. 14303888
gtatcgctttttggcggttttagcctttttcggtttcgaacattcggacgaatttctctctctctctcttcaattcaacacttggaggacatgagatggatcgggaagaatatttggggaagtgttccaatatgaaatgccaaagagtggatgaatcatatgtacatgctcttcaagatgaagtaatggaagttgagcatttgcttgcagaacctagaaatgatcatgcttccctggatggtagtttggattctcatacaactttgaatggaaaggatgatttggaactggaggcccttgatggattgctggatgatgttgaaatcaatgatcttgaaggaactgttggtttccctggtggtacatgtgaagaatattttttggattttggatttgctgacaaatttgaggaggtactaggctctggtccttttgtaggttcactcttgcaaaactcaagttctgaaagtcattcttccggattaagcggaagtagcattgttgatggggtattagaatcaacagaagtacctattgcacaatctgaatgcaaaaatgattctctagatgagacaataacctatgaatcacatggtgccttcaggaacaatccaagtcaaccatcaaaagtaaattgcagatacaacatttcacttgatatacaacatctgcaagatttggataacaaccgtcatttagctggtggtatattgacttgtaagaaggaaaagggtcctgttgaaaaaggccaacctgctgcacttagagagaagagattccgaaagcctactcagaggtacattgaagaattttcaaattcaaggtcaaaggaaaaggcaccaactgctggtacaaaaactaaatatttaagtgactcatcatgtgatgatgtacttcatataagaattaaagcattcaaaaagagtccaagtgaaaagtctagtattgaaaatagagatgtgatgcttcctgagttgcaagttcacaaagggcgtccgaagaaagagaaacttgagtatgacaacgagtcatttcccttggaatctgaggatgaatggttgacatcaaaaagatctagaaggaaagatcgaagaaagcatcagaagatgtggactctccctgaagtgttgaagttggttgaaggcatatctgaatatggagttggtcgatggactgacataaagaggtttctgttttcttctacaagctaccgaactcccatagatctcagagacaagtggcgaaaccttttgagagccagttctgcacagaaaagcacgagagaggctgaacaaaatgacgagcttgccctgcgtcccttgccatttaatgtggtacatcgtgtgcaagaattggctaaaattcacccatacccaagggaacgtggatcaaagaagttgcgtgttagccaagctggctcttctgtcattgctaaagattctcctccccttagtcttagcaaaagaaatgtacgtaggaagtttacttagaagtccatatggaaaacagtccatggaaatctatagtcaaaagaatcttgttgaaatttaggtaatcacattcgcacaattttatactgtgaagtaattttatgtttacaaaggcacagaaattttgaattgtaattatgaggaatcattagttgtcctacaatagtttgccatgcttaatgcctaatacttttatagtatgattttattagtgcact

SEQ ID NO: 4747 - protein, 464 aa, Glycine max
  misc_feature (1)..(464): Ceres Seq. ID no. 14303889
MDREEYLGKCSNMKCQRVDESYVHALQDEVMEVEHLLAEPRNDHASLDGSLDSHTTLNGKDDLELEALDGLLDDVEINDLEGTVGFPGGTCEEYFLDFGFADKFEEVLGSGPFVGSLLQNSSSESHSSGLSGSSIVDGVLESTEVPIAQSECKNDSLDETITYESHGAFRNNPSQPSKVNCRYNISLDIQHLQDLDNNRHLAGGILTCKKEKGPVEKGQPAALREKRFRKPTQRYIEEFSNSRSKEKAPTAGTKTKYLSDSSCDDVLHIRIKAFKKSPSEKSSIENRDVMLPELQVHKGRPKKEKLEYDNESFPLESEDEWLTSKRSRRKDRRKHQKMWTLPEVLKLVEGISEYGVGRWTDIKRFLFSSTSYRTPIDLRDKWRNLLRASSAQKSTREAEQNDELALRPLPFNVVHRVQELAKIHPYPRERGSKKLRVSQAGSSVIAKDSPPLSLSKRNVRRKFT

SEQ ID NO: 4748 - protein, 452 aa, Glycine max
  misc_feature (1)..(452): Ceres Seq. ID no. 14303890
MKCQRVDESYVHALQDEVMEVEHLLAEPRNDHASLDGSLDSHTTLNGKDDLELEALDGLLDDVEINDLEGTVGFPGGTCEEYFLDFGFADKFEEVLGSGPFVGSLLQNSSSESHSSGLSGSSIVDGVLESTEVPIAQSECKNDSLDETITYESHGAFRNNPSQPSKVNCRYNISLDIQHLQDLDNNRHLAGGILTCKKEKGPVEKGQPAALREKRFRKPTQRYIEEFSNSRSKEKAPTAGTKTKYLSDSSCDDVLHIRIKAFKKSPSEKSSIENRDVMLPELQVHKGRPKKEKLEYDNESFPLESEDEWLTSKRSRRKDRRKHQKMWTLPEVLKLVEGISEYGVGRWTDIKRFLFSSTSYRTPIDLRDKWRNLLRASSAQKSTREAEQNDELALRPLPFNVVHRVQELAKIHPYPRERGSKKLRVSQAGSSVIAKDSPPLSLSKRNVRRKFT

SEQ ID NO: 4749 - protein, 434 aa, Glycine max
  misc_feature (1)..(434): Ceres Seq. ID no. 14303891
MEVEHLLAEPRNDHASLDGSLDSHTTLNGKDDLELEALDGLLDDVEINDLEGTVGFPGGTCEEYFLDFGFADKFEEVLGSGPFVGSLLQNSSSESHSSGLSGSSIVDGVLESTEVPIAQSECKNDSLDETITYESHGAFRNNPSQPSKVNCRYNISLDIQHLQDLDNNRHLAGGILTCKKEKGPVEKGQPAALREKRFRKPTQRYIEEFSNSRSKEKAPTAGTKTKYLSDSSCDDVLHIRIKAFKKSPSEKSSIENRDVMLPELQVHKGRPKKEKLEYDNESFPLESEDEWLTSKRSRRKDRRKHQKMWTLPEVLKLVEGISEYGVGRWTDIKRFLFSSTSYRTPIDLRDKWRNLLRASSAQKSTREAEQNDELALRPLPFNVVHRVQELAKIHPYPRERGSKKLRVSQAGSSVIAKDSPPLSLSKRNVRRKFT

SEQ ID NO: 4750 - DNA, 1265 bp, Glycine max
  misc_feature (1)..(1265): Ceres Seq. ID no. 14303939
actagaaatgctgctttcttcttcttcttctcgcggttatcttcactaacaacttctctctctctctccgtctgtgcattttccattgttgaagaaggagaaaggtcttgaggtgtggggtcggtgatggacggtggagtgaactacaaccctcgcactgtggaagaggttttccgggacttcaagggtcgtagagccggcatgatcaaggctctcaccactgatgttgaagaatttttccagcagtgcgatcctgaaaaggataacctttgtttatacgggttccctaatgagcaatgggaagttaatttacctgcggaagaagttcctccggagcttcctgagcctgcattgggcataaactttgctagggatgggatgcaggataaggactggctgtctttggttgccgttcacagtgatgcatggttacttgcagtggctttctactttggggcacgatttggttttgataaagctgacaggaaacgcctgttcactatgattaatgatttaccaacaatattcgagattgtgactggaagtgcaaaaaaacagactaaggaaaagtcatccatttcaaaccactccagcaacaaatcaaaatctggttcaaaagggcgaggatctgaatcagggaagtattcaaagcaaacaaaggacgaggaggaagaggtaccggatgaagaagatgacgaggagcatggggaaactttgtgtggggcatgtggagagaactatgcgtctgatgagttctggatttgttgtgacatatgtgagaagtggttccatggcaagtgtgtgaagatcactccagccagagccgagcacatcaagcagtataagtgcccctcatgcagcaataagagagcacggccttgatatagttgagagtgggacagttctcaccccttgtaactaaatcatgttggacttctaacttgttagtggcttaggattcctgtgccatgccatgatgggcatatgtattcagtactttgggtcttgtgaacttcttagtggatatatttttttttaatatttatagtttgcaggttctggatatgtctccaatcttcatcctgactggtatacttatatttgtagcatatgatagtgcacgtgtgcacacatacatgtatgtttgaacatatgtcgtatttgctagcatgacgcattggattgatcagatttatggtctacccaatgtagcagtgtggcatctgtgttagctttggaagaacggcagagttggcttaaggtgt

SEQ ID NO: 4751 - protein, 251 aa, Glycine max
  misc_feature (1)..(251): Ceres Seq. ID no. 14303940
MDGGVNYNPRTVEEVFRDFKGRRAGMIKALTTDVEEFFQQCDPEKDNLCLYGFPNEQWEVNLPAEEVPPELPEPALGINFARDGMQDKDWLSLVAVHSDAWLLAVAFYFGARFGFDKADRKRLFTMINDLPTIFEIVTGSAKKQTKEKSSISNHSSNKSKSGSKGRGSESGKYSKQTKDEEEEVPDEEDDEEHGETLCGACGENYASDEFWICCDICEKWFHGKCVKITPARAEHIKQYKCPSCSNKRARP

SEQ ID NO: 4752 - protein, 226 aa, Glycine max
  misc_feature (1)..(226): Ceres Seq. ID no. 14303941
MIKALTTDVEEFFQQCDPEKDNLCLYGFPNEQWEVNLPAEEVPPELPEPALGINFARDGMQDKDWLSLVAVHSDAWLLAVAFYFGARFGFDKADRKRLFTMINDLPTIFEIVTGSAKKQTKEKSSISNHSSNKSKSGSKGRGSESGKYSKQTKDEEEEVPDEEDDEEHGETLCGACGENYASDEFWICCDICEKWFHGKCVKITPARAEHIKQYKCPSCSNKRARP

SEQ ID NO: 4753 - protein, 167 aa, Glycine max
  misc_feature (1)..(167): Ceres Seq. ID no. 14303942
MQDKDWLSLVAVHSDAWLLAVAFYFGARFGFDKADRKRLFTMINDLPTIFEIVTGSAKKQTKEKSSISNHSSNKSKSGSKGRGSESGKYSKQTKDEEEEVPDEEDDEEHGETLCGACGENYASDEFWICCDICEKWFHGKCVKITPARAEHIKQYKCPSCSNKRARP

SEQ ID NO: 4754 - DNA, 1715 bp, Glycine max
  misc_feature (1)..(1715): Ceres Seq. ID no. 14304000
ggttaaggaccgactcttcacttgggaggaagtgacgatcgaaatctggtaagaggctgtaatcaatcaaccaaagcaacgatgtcgtggtttacaaggacaatcgcaaactcactcaaactcgacgacgacgacaatggcggtgacctaaaatcccctccgaagaaacccgattcggaacccgttcaacccgattccgcatccacccccaatcccaccacgcgcggcgtcaaagaggatttttccgagctcaccaaatccttttcccgccagctctggggagtcgcctccttcctcgccccgccgcccgatccccaatccgaaaagcccgtcgccgattccaatcccaatcccactgacgacgacgaagaggaagatatcatcgcaggaatccgaaacgatttcgcggagattagtggcaagttcaagagcgggatctccaaaatttctggtaataagacggtatccgaattcactaagatagcttcgagtttccttcagcttggatccgaggaggaatacgatctcgaaggtgtcctcggagttaccgaggatgtggttgccttcgccagaagcgtagctttgcatccagaaacttggctcgattttccccttcccgatgatgaggattctgatgattttgatttgtccgatgcacaacaagaacatgctctagctgttgaacacctggcaccaagcttagctgctcttagaatggagctgtgccccggatacatgagtgatggtaacttttggaagatatactttgttctcgtgcaccctagacttagcaaaactgatgctgctattttatccactccacaaataatggaagctagagcaatgttaactctggctttagacaaaagaagtaaggaaaagaaagaatctgacttatctgcaggagggaatgttccctcaaaagaggaggaacagcatctctttgtgccaagcactgttcaacttgaatcagcacctctccagacatctgctgctgaagctgccccatctgtggttgtttctaatgttgagatggagaaacatgccactcaaagtattgttccagaggttattgacaagtctgtggttaaagaagcaacggtaaatccatctgcagaacaatcatcatctggttcaaccaatagatttttggatgaatcctatgaggatgatgctgatgattggttgaaagaagaggatacttctgaaatggttggtcccagtggaactcctgttcacactggtaatgacgaggatgtatcattcagtgatcttgaggaggatgatggtgatgtacatgaaagttataaaaaaactagatcaggctctgattcttcaacaaaagactctcgagattgggttcagttaggtagaagttcacctaactctgataaggatttaaactgtgtagaaggcaaacatgttggctctgagcattcaagtgctcgtaattctatgaccaaggattccaatgattggcttaatgttgatgacattgatgtaatatgactatgccttggaatatgtcccagaggtaagtttttttttatttttaaatatgattctcttatattttgtgaatatctgcatatagttgtgtactctacgattgacattctgaagaatgcgtttctgtaaataaaaccagtctccactgggcattgtgctatgtatggttatttattgcaccgtacataaactaaatcttctatttg

SEQ ID NO: 4755 - protein, 475 aa, Glycine max
  misc_feature (1)..(475): Ceres Seq. ID no. 14304001
MSWFTRTIANSLKLDDDDNGGDLKSPPKKPDSEPVQPDSASTPNPTTRGVKEDFSELTKSFSRQLWGVASFLAPPPDPQSEKPVADSNPNPTDDDEEEDIIAGIRNDFAEISGKFKSGISKISGNKTVSEFTKIASSFLQLGSEEEYDLEGVLGVTEDVVAFARSVALHPETWLDFPLPDDEDSDDFDLSDAQQEHALAVEHLAPSLAALRMELCPGYMSDGNFWKIYFVLVHPRLSKTDAAILSTPQIMEARAMLTLALDKRSKEKKESDLSAGGNVPSKEEEQHLFVPSTVQLESAPLQTSAAEAAPSVVVSNVEMEKHATQSIVPEVIDKSVVKEATVNPSAEQSSSGSTNRFLDESYEDDADDWLKEEDTSEMVGPSGTPVHTGNDEDVSFSDLEEDDGDVHESYKKTRSGSDSSTKDSRDWVQLGRSSPNSDKDLNCVEGKHVGSEHSSARNSMTKDSNDWLNVDDIDVI

SEQ ID NO: 4756 - protein, 264 aa, Glycine max
  misc_feature (1)..(264): Ceres Seq. ID no. 14304002
MELCPGYMSDGNFWKIYFVLVHPRLSKTDAAILSTPQIMEARAMLTLALDKRSKEKKESDLSAGGNVPSKEEEQHLFVPSTVQLESAPLQTSAAEAAPSVVVSNVEMEKHATQSIVPEVIDKSVVKEATVNPSAEQSSSGSTNRFLDESYEDDADDWLKEEDTSEMVGPSGTPVHTGNDEDVSFSDLEEDDGDVHESYKKTRSGSDSSTKDSRDWVQLGRSSPNSDKDLNCVEGKHVGSEHSSARNSMTKDSNDWLNVDDIDVI

SEQ ID NO: 4757 - protein, 257 aa, Glycine max
  misc_feature (1)..(257): Ceres Seq. ID no. 14304003
MSDGNFWKIYFVLVHPRLSKTDAAILSTPQIMEARAMLTLALDKRSKEKKESDLSAGGNVPSKEEEQHLFVPSTVQLESAPLQTSAAEAAPSVVVSNVEMEKHATQSIVPEVIDKSVVKEATVNPSAEQSSSGSTNRFLDESYEDDADDWLKEEDTSEMVGPSGTPVHTGNDEDVSFSDLEEDDGDVHESYKKTRSGSDSSTKDSRDWVQLGRSSPNSDKDLNCVEGKHVGSEHSSARNSMTKDSNDWLNVDDIDVI

SEQ ID NO: 4758 - DNA, 1581 bp, Glycine max
  misc_feature (1)..(1581): Ceres Seq. ID no. 14304053
gtgtcaaaccttcagattgctgaactcttggcagtcatggccaaaaatcgtgatctttcatattgtaaaatagtggaggcaattgcagagacaactgctccactgactcccatggaggaacttcttgcaaagataccttctcaacgtccttacatttcttcacccaagaaaccagatattgcagctgtcagtgttccagatccccctgctaatgttgtgactgtggaacctaaagttgccactcaacaagaaactgcacaacctaaaccagtggcaaaacaaccactttctccttatatcgtttatgatgatttgaagccaccatcatctccttctccatctcagcctggtggtgggaaaccaacaaagatcagtgagacagtgccaaaaccaagtgcttcagatactccaagtagtgtgccaggagtagatggcatctctcagacaacatcgtcatctaaagtggagaagcctctttctccttatgtagcatatcctgacttaaagcctcccacatcaccatctcctaatgcaccaactgtatcagtttccacacctgctgcagctggggtgccggagatagacacaatatcaagcaatggaccggcccaactttcagcagcagatgaaccaaaggaagaacatctccctgaacccaagtcaagaccactttcaccttataccatgtgagctgcttctgacttgcttttaaaattttcatgtttcttttccaaagactcttcattccttagtgttgaataatgactcactggcttgtataattgtgagttttattcactggttggaacttttaggaaatcttacatcgcctgccttaattctcagggtgcagtttatatatctattggacaacttcgcttagtatcaattggttttaaattgaaatctaacatgatatcagagtctatagcccatattggttctcgcctattctattaggctcgcctgttctgatagacatttgtgaaggagaggtgttacgaagttccacattgcctgtctcaattcttggactgtagcttacatatctattgagtaacttcacttagtatcaattggttttaagcaaatctaactacatttcttatttaatctatatttgtcttaggtttcttggaggcattgttaacattctgatttcattcaaatgaacatccaggtatgaagacttgaagcctcctgcatcaccatcaccttccttcagaaattcttaggaattgcctgcctattgattgaatcagacaaggttagaaatgcaaattattatatgtatacccttgattatattttactatggtttaagctctatttttactgccaaagttactggacacataattttaatagaactgttgaagagtctatgcggcactcatatggaggatcaggatggtcactcaaatatgaagagaagcatttctacgaattgaaattttcagcggtgtaatttatttctttatgaccatttggcgaaactcaacgaacactatttctccttttagtaatttattttcccaatgttgcaatttaaatttaaataaaggaaaaggtatcactttt

SEQ ID NO: 4759 - protein, 229 aa, Glycine max
  misc_feature (1)..(229): Ceres Seq. ID no. 14304054
VSNLQIAELLAVMAKNRDLSYCKIVEAIAETTAPLTPMEELLAKIPSQRPYISSPKKPDIAAVSVPDPPANVVTVEPKVATQQETAQPKPVAKQPLSPYIVYDDLKPPSSPSPSQPGGGKPTKISETVPKPSASDTPSSVPGVDGISQTTSSSKVEKPLSPYVAYPDLKPPTSPSPNAPTVSVSTPAAAGVPEIDTISSNGPAQLSAADEPKEEHLPEPKSRPLSPYTM

SEQ ID NO: 4760 - protein, 217 aa, Glycine max
  misc_feature (1)..(217): Ceres Seq. ID no. 14304055
MAKNRDLSYCKIVEAIAETTAPLTPMEELLAKIPSQRPYISSPKKPDIAAVSVPDPPANVVTVEPKVATQQETAQPKPVAKQPLSPYIVYDDLKPPSSPSPSQPGGGKPTKISETVPKPSASDTPSSVPGVDGISQTTSSSKVEKPLSPYVAYPDLKPPTSPSPNAPTVSVSTPAAAGVPEIDTISSNGPAQLSAADEPKEEHLPEPKSRPLSPYTM

SEQ ID NO: 4761 - protein, 192 aa, Glycine max
  misc_feature (1)..(192): Ceres Seq. ID no. 14304056
MEELLAKIPSQRPYISSPKKPDIAAVSVPDPPANVVTVEPKVATQQETAQPKPVAKQPLSPYIVYDDLKPPSSPSPSQPGGGKPTKISETVPKPSASDTPSSVPGVDGISQTTSSSKVEKPLSPYVAYPDLKPPTSPSPNAPTVSVSTPAAAGVPEIDTISSNGPAQLSAADEPKEEHLPEPKSRPLSPYTM

SEQ ID NO: 4762 - DNA, 1247 bp, Glycine max
  misc_feature (1)..(1247): Ceres Seq. ID no. 14304057
gacagtgagtggaacgcaatggttggtggtggcgtctctcgcatttcccaccattttcgagactgcgacttccatttccatttccacttcacttttacttactctgcttttcaaactttccacctttcgtctcccccactccctctcaaacctcgctggggaggcatttctcaaaccacagttccctcaaattaccgctgttttggcaccccacctaagtcccccggcgaaattcctctccttttcgattgtttcagccaacaagaagaggatcgtgaaattctctctgatggaacatctgccgtggcaggtggaattgtagcattgggaaagtttgatgctctacacataggtcatagagaacttgcaattcaagcatcaagggctggacctccatttcttttgtcatttgttggcatggcaaaagtacttggttgggaacctagggctcctatagttgctaaatgtgaccgaaagcgaattctttcatcttgggttccttattgctgtaacatggtcccagaagagtttgaggttgaattttcaagcgttcgacatctcaatccccgacaatttgttgaaaagttatcaaaagagcttagggtgcggggagttgttgcaggtgagaactaccgattcgggtataaagcagcaggtgatgccttggagttagttaagctttgtgaagagtacgggatggaagcttacataataaaatctgttatggacaagaatcgtttttctgctgatatgaattctgttaccaactccaaagagaggggacaggtctcatctacacgtgttcgtgaagcccttgccgtaggggacctgaagtatgtctcagagcttttggggaggcctcatcgtctcatattaatggccactgatcaagaaagattcagtactgggcagtataaagtgtctgctcctagatcctgcttattgaatctagcaccaaaggaaggattatatgagaagtgctcacttttacttgatcaggaaaatgttgtgcagtgtagtgtagttattgacagcaagtttgtccatatagaaacagattatggaggtctgagtgacattttttgttctcaaaatttgaagttcttgtttattgagtttggtgattcctgcacttgattcagtttagataattatttctatttaaatttttagtctactgaattgtagatgatttttatccatctcccaaagtagagtgatacaggtatatatgtacctttcttcct

SEQ ID NO: 4763 - protein, 378 aa, Glycine max
  misc_feature (1)..(378): Ceres Seq. ID no. 14304058
DSEWNAMVGGGVSRISHHFRDCDFHFHFHFTFTYSAFQTFHLSSPPLPLKPRWGGISQTTVPSNYRCFGTPPKSPGEIPLLFDCFSQQEEDREILSDGTSAVAGGIVALGKFDALHIGHRELAIQASRAGPPFLLSFVGMAKVLGWEPRAPIVAKCDRKRILSSWVPYCCNMVPEEFEVEFSSVRHLNPRQFVEKLSKELRVRGVVAGENYRFGYKAAGDALELVKLCEEYGMEAYIIKSVMDKNRFSADMNSVTNSKERGQVSSTRVREALAVGDLKYVSELLGRPHRLILMATDQERFSTGQYKVSAPRSCLLNLAPKEGLYEKCSLLLDQENVVQCSVVIDSKFVHIETDYGGLSDIFCSQNLKFLFIEFGDSCT

SEQ ID NO: 4764 - protein, 372 aa, Glycine max
  misc_feature (1)..(372): Ceres Seq. ID no. 14304059
MVGGGVSRISHHFRDCDFHFHFHFTFTYSAFQTFHLSSPPLPLKPRWGGISQTTVPSNYRCFGTPPKSPGEIPLLFDCFSQQEEDREILSDGTSAVAGGIVALGKFDALHIGHRELAIQASRAGPPFLLSFVGMAKVLGWEPRAPIVAKCDRKRILSSWVPYCCNMVPEEFEVEFSSVRHLNPRQFVEKLSKELRVRGVVAGENYRFGYKAAGDALELVKLCEEYGMEAYIIKSVMDKNRFSADMNSVTNSKERGQVSSTRVREALAVGDLKYVSELLGRPHRLILMATDQERFSTGQYKVSAPRSCLLNLAPKEGLYEKCSLLLDQENVVQCSVVIDSKFVHIETDYGGLSDIFCSQNLKFLFIEFGDSCT

SEQ ID NO: 4765 - protein, 239 aa, Glycine max
  misc_feature (1)..(239): Ceres Seq. ID no. 14304060
MAKVLGWEPRAPIVAKCDRKRILSSWVPYCCNMVPEEFEVEFSSVRHLNPRQFVEKLSKELRVRGVVAGENYRFGYKAAGDALELVKLCEEYGMEAYIIKSVMDKNRFSADMNSVTNSKERGQVSSTRVREALAVGDLKYVSELLGRPHRLILMATDQERFSTGQYKVSAPRSCLLNLAPKEGLYEKCSLLLDQENVVQCSVVIDSKFVHIETDYGGLSDIFCSQNLKFLFIEFGDSCT

SEQ ID NO: 4766 - DNA, 652 bp, Glycine max
  misc_feature (1)..(652): Ceres Seq. ID no. 14304098
aaccattatctctctgcaaagtgcaaaaaccaaacctcgtcaaaggttttagtttgagtttgattcatcgtagtatctaagcatgactctctcccaatcttgccggaaaacaagccttcgaaaacggtgctatctggttgcaaagcagcagaagacgcgcttctacatcttcggacgctgcatagccatgctcctctgctggcacgaccacactgtttccgattagatccttcactcgcgtttcagctatgaaaacattgaaatttcgatttttctccatatgggtacccaccctcggcgtcacgttattgcttttgccacacccgacaacaaagagggatgtaggaaagtggacgattgcaatacaatgaagatcaatcactgcaaatgcaaattgggttgtcttgtgtctcttgaggttgaattgaagaattcttggggcacaaggtggaaaaaattgggtctttgaaactggtggcttatagggttagttgatcagggaaaagataaggtcttgaaattaattggacccgtttgagttgagtacccaaaagtttggttcttgattggcttcgctgccgtgtaattactattgtaattatctgaccttgttttggacaacagttttattgagctgaaacaagtgttctcc

SEQ ID NO: 4767 - protein, 62 aa, Glycine max
  misc_feature (1)..(62): Ceres Seq. ID no. 14304099
MGTHPRRHVIAFATPDNKEGCRKVDDCNTMKINHCKCKLGCLVSLEVELKNSWGTRWKKLGL

SEQ ID NO: 4768 - protein, 47 aa, Glycine max
  misc_feature (1)..(47): Ceres Seq. ID no. 14304100
MTLSQSCRKTSLRKRCYLVAKQQKTRFYIFGRCIAMLLCWHDHTVSD

SEQ ID NO: 4769 - protein, 40 aa, Glycine max
  misc_feature (1)..(40): Ceres Seq. ID no. 14304101
MKTLKFRFFSIWVPTLGVTLLLLPHPTTKRDVGKWTIAIQ

SEQ ID NO: 4770 - DNA, 766 bp, Glycine max
  misc_feature (1)..(766): Ceres Seq. ID no. 14304110
atgatgctgctagtgctgagtgtgtgtatctgaggaaagaaagagaccattcttatttgtctggtttggttcttgagtaatttttttttcttcttttcttgagtaacttgattcatgtgtcaaagattctgatcattggtattattagctagacatagtgtagtgttgttgagtggggtttgtagacaatgaggagaggtagagggaaagggaagaagcagagtgcatctgctcgggaagatcatggaagcggtgaagaggatgaaaagattccagcttacaggagaagaggaaggccacagaagcctatgaaagatgattttgaagaggaggaagatgaagaagaagagttggtagagaagatggaggaagaagaagaagaggatgattcagtaacaagtaaaaaagaagaaaacgagaggaagaggaagatgattaatggaagcaatacggatgcaaatgaaaaagagaatgggttaggatcaaaatcaagtagagatggttccagttccaccaagtccacatctactggtttcagacagaatgggagcaggaggaaaagcaagcctagacgagctgctgaagctgttgtggaatgtaatggagtttgagaaaactttatgatcaagaactttccaagacacatgatgaaacattaatttgaggtttcttcttcgtttaggttatcttacaagtttctttgtaagttgagaactttggctatcttttggtgtatcaatctgcattgttttttttttcatctctc

SEQ ID NO: 4771 - protein, 140 aa, Glycine max
  misc_feature (1)..(140): Ceres Seq. ID no. 14304111
MRRGRGKGKKQSASAREDHGSGEEDEKIPAYRRRGRPQKPMKDDFEEEEDEEEELVEKMEEEEEEDDSVTSKKEENERKRKMINGSNTDANEKENGLGSKSSRDGSSSTKSTSTGFRQNGSRRKSKPRRAAEAVVECNGV

SEQ ID NO: 4772 - protein, 100 aa, Glycine max
  misc_feature (1)..(100): Ceres Seq. ID no. 14304112
MKDDFEEEEDEEEELVEKMEEEEEEDDSVTSKKEENERKRKMINGSNTDANEKENGLGSKSSRDGSSSTKSTSTGFRQNGSRRKSKPRRAAEAVVECNGV

SEQ ID NO: 4773 - protein, 82 aa, Glycine max
  misc_feature (1)..(82): Ceres Seq. ID no. 14304113
MEEEEEEDDSVTSKKEENERKRKMINGSNTDANEKENGLGSKSSRDGSSSTKSTSTGFRQNGSRRKSKPRRAAEAVVECNGV

SEQ ID NO: 4774 - DNA, 1093 bp, Glycine max
  misc_feature (1)..(1093): Ceres Seq. ID no. 14304124
acgattacgaagcgtgcccaactccatctgcttccttttcctcttccccccgtccccgacgacccccggccgaaaccctagcgaggcgcgatgttcgggtaccggaaggcgccggacctcgacctcgaggcgggcggctcggcggcgctctacccggggatgacggaggacgtggagctgcgctgggccttcatccgcaagatctacgtcatcctctcggtccagctcgccatgaccgccgccgtcgcggggttcgtcgtcaaggtccccgccgtctccgagttcttcgtctcctccaacgctggcctgggcctctacatcttcctcctcgtcctgcccctcatcgtgctctgccccctgcgctactaccaccagaagcaccccgtcaacctcatcctgctcggcgtcttcaccgtctccatcagcttcgccgtcggcatgacgtgcgccttcaccagcggaaaaatcatcttggaagctgcaattctgacagcagtggtggtgatcagcttgactgcctacactttctgggctgcaaagataggccatgatttcaacttcctgggcccgttcctgtttggagctcttatggtgctgctggtgttctcacttatccagatctttttcccactgggcaagatctccaccatgatatatggggccgtggcgtcgatcatcttctgtggctacatcatcttcgacacggacaacatcatcaagcgccacacgtatgacgagtacatctgggctgccgtgtccctctacctcgacatcatcaacctgttcctgaatctgatgcaaattctgcgggcagctgatagctgagcgcaccttgcccaacatcgcatgatttaagtccactagcttgtgcatatcagaaaattcatgaatgcccgcagatacctgtaggcatgtacaatcgttatcagtaaattctgccgtcctagactccatcacatgtcttgtttcctagcttcctggagtatgcaatgtgtgattgaaccaagctgcacgatgaaaatatactcactggtgctttgtgattgcaaggcacgtgaatttaattccctgctacgaaatgttccattttaat

SEQ ID NO: 4775 - protein, 244 aa, Glycine max
  misc_feature (1)..(244): Ceres Seq. ID no. 14304125
MFGYRKAPDLDLEAGGSAALYPGMTEDVELRWAFIRKIYVILSVQLAMTAAVAGFVVKVPAVSEFFVSSNAGLGLYIFLLVLPLIVLCPLRYYHQKHPVNLILLGVFTVSISFAVGMTCAFTSGKIILEAAILTAVVVISLTAYTFWAAKIGHDFNFLGPFLFGALMVLLVFSLIQIFFPLGKISTMIYGAVASIIFCGYIIFDTDNIIKRHTYDEYIWAAVSLYLDIINLFLNLMQILRAADS

SEQ ID NO: 4776 - protein, 221 aa, Glycine max
  misc_feature (1)..(221): Ceres Seq. ID no. 14304126
MTEDVELRWAFIRKIYVILSVQLAMTAAVAGFVVKVPAVSEFFVSSNAGLGLYIFLLVLPLIVLCPLRYYHQKHPVNLILLGVFTVSISFAVGMTCAFTSGKIILEAAILTAVVVISLTAYTFWAAKIGHDFNFLGPFLFGALMVLLVFSLIQIFFPLGKISTMIYGAVASIIFCGYIIFDTDNIIKRHTYDEYIWAAVSLYLDIINLFLNLMQILRAADS

SEQ ID NO: 4777 - protein, 197 aa, Glycine max
  misc_feature (1)..(197): Ceres Seq. ID no. 14304127
MTAAVAGFVVKVPAVSEFFVSSNAGLGLYIFLLVLPLIVLCPLRYYHQKHPVNLILLGVFTVSISFAVGMTCAFTSGKIILEAAILTAVVVISLTAYTFWAAKIGHDFNFLGPFLFGALMVLLVFSLIQIFFPLGKISTMIYGAVASIIFCGYIIFDTDNIIKRHTYDEYIWAAVSLYLDIINLFLNLMQILRAADS

SEQ ID NO: 4778 - DNA, 1157 bp, Glycine max
  misc_feature (1)..(1157): Ceres Seq. ID no. 14304136
attcacattcatcacaactcacctcacccagctagctagcttcataaggttaattagatttttttcgtggaaacaaagatctcaatacttgtgatatcatgacgatgatgagcagcaacaacaacaacaacaacaacaacgttggagaatttggagacaccactctgactaaggtttttgttgggggcttagcttgggagactccgaaggatgccctcaaagaccactttgagaagtatggtgagatccttgaagctgtcatcatttccgataagcacactgccaaatccaaaggctatggctttgtgactttcaaggaggctgaggctgccaagaaggcttgtgaggattcagcaactctcgttatcaatggccgtcgagcaaattgcaatcttgcttgcctaggtgctcgtcgcccaaggtcttcttccaatgtttcaccacctccacaaccacaaggaggatcaaacggtggagtagtgaagaacaatgcatcaagcccaccagccattaatcacgtgcagccatattattatccagtgaggacaactgctgctctgccattccataatcacactcttcctttctatgggtatgcgcctacctacattgtgacggacgtaaactacaattacaatcagaaactgtgctatggtagcggtgggacctacatgaatgggcagcatgtgtacccgaggcaggctattgtgggtgccaacacactgatgccaatgtaccctctttatcagtatcatcatccaacggagaccataggtgtaccagctcacaacttttatccaacggcatcatgggccccaatgaccatcatgtccaagccatcgtctatcgttcctcatacaggtacagttggcacaggtgagtgctttaaaagggttgtctgagaggagcttggttggctaaataacagcagagggagggaaaatggtggtggtggccgcacagagcaacattattatctgatctgtcttggctttactttccttttttttgttgttgtctttaaatattgtttcatttttagttgttaatcttaggcattttgttgttgatgagattctttcattctctttttctgtctaacatctcagcatgtgctgtgcacagttacattcagttgaaattatcgatttgttctc

SEQ ID NO: 4779 - protein, 267 aa, Glycine max
  misc_feature (1)..(267): Ceres Seq. ID no. 14304137
MTMMSSNNNNNNNNVGEFGDTTLTKVFVGGLAWETPKDALKDHFEKYGEILEAVIISDKHTAKSKGYGFVTFKEAEAAKKACEDSATLVINGRRANCNLACLGARRPRSSSNVSPPPQPQGGSNGGVVKNNASSPPAINHVQPYYYPVRTTAALPFHNHTLPFYGYAPTYIVTDVNYNYNQKLCYGSGGTYMNGQHVYPRQAIVGANTLMPMYPLYQYHHPTETIGVPAHNFYPTASWAPMTIMSKPSSIVPHTGTVGTGECFKRVV

SEQ ID NO: 4780 - protein, 265 aa, Glycine max
  misc_feature (1)..(265): Ceres Seq. ID no. 14304138
MMSSNNNNNNNNVGEFGDTTLTKVFVGGLAWETPKDALKDHFEKYGEILEAVIISDKHTAKSKGYGFVTFKEAEAAKKACEDSATLVINGRRANCNLACLGARRPRSSSNVSPPPQPQGGSNGGVVKNNASSPPAINHVQPYYYPVRTTAALPFHNHTLPFYGYAPTYIVTDVNYNYNQKLCYGSGGTYMNGQHVYPRQAIVGANTLMPMYPLYQYHHPTETIGVPAHNFYPTASWAPMTIMSKPSSIVPHTGTVGTGECFKRVV

SEQ ID NO: 4781 - protein, 264 aa, Glycine max
  misc_feature (1)..(264): Ceres Seq. ID no. 14304139
MSSNNNNNNNNVGEFGDTTLTKVFVGGLAWETPKDALKDHFEKYGEILEAVIISDKHTAKSKGYGFVTFKEAEAAKKACEDSATLVINGRRANCNLACLGARRPRSSSNVSPPPQPQGGSNGGVVKNNASSPPAINHVQPYYYPVRTTAALPFHNHTLPFYGYAPTYIVTDVNYNYNQKLCYGSGGTYMNGQHVYPRQAIVGANTLMPMYPLYQYHHPTETIGVPAHNFYPTASWAPMTIMSKPSSIVPHTGTVGTGECFKRVV

SEQ ID NO: 4782 - DNA, 711 bp, Glycine max
  misc_feature (1)..(711): Ceres Seq. ID no. 14304144
acctcttgctcttgcttatactaactaactcttcttgagaaactctttctcacacgccaagagtaacatgggatttccagtggggtacacagagttgatgctgccgaaggtgtttctgcaggtgctatccgtattgggcttgataagaaaactcatcaccgtcctcttgtgctacatgggcttccacgatttcttcgaatccgacattgcgtggccggagagggcgccggaattccagtcggtgtgggcggtgctcataagggaaatcctaccggtggtgaagttctcggagatggagatggagatggcggaggcgccggagagctgcgcggtgtgtctgtacgagttcgagggagaggacgagatcagacggctgacgaactgccgccacatattccacagagggtgtctggaccgttggatgggatacgatcaaagaacgtgtcccctgtgtcggacacccttcataccccaccatatgcaagctgccttcaatgatagactttgggctgcttcagggattcctgatttctattacaatcatgaatgactctagggaaaaaaaatcctagatttggggacgggagtgttctgtttaggttgttgagtatgtgttcagtgttcaatgttcgtgtaaatattatacaaaatggaaagcggagaattgttgttaaaaaaaaaaaaaaaaaaaaaaaaaaaaaaaaaaaaacc

SEQ ID NO: 4783 - protein, 160 aa, Glycine max
  misc_feature (1)..(160): Ceres Seq. ID no. 14304145
MGFPVGYTELMLPKVFLQVLSVLGLIRKLITVLLCYMGFHDFFESDIAWPERAPEFQSVWAVLIREILPVVKFSEMEMEMAEAPESCAVCLYEFEGEDEIRRLTNCRHIFHRGCLDRWMGYDQRTCPLCRTPFIPHHMQAAFNDRLWAASGIPDFYYNHE

SEQ ID NO: 4784 - protein, 150 aa, Glycine max
  misc_feature (1)..(150): Ceres Seq. ID no. 14304146
MLPKVFLQVLSVLGLIRKLITVLLCYMGFHDFFESDIAWPERAPEFQSVWAVLIREILPVVKFSEMEMEMAEAPESCAVCLYEFEGEDEIRRLTNCRHIFHRGCLDRWMGYDQRTCPLCRTPFIPHHMQAAFNDRLWAASGIPDFYYNHE

SEQ ID NO: 4785 - protein, 124 aa, Glycine max
  misc_feature (1)..(124): Ceres Seq. ID no. 14304147
MGFHDFFESDIAWPERAPEFQSVWAVLIREILPVVKFSEMEMEMAEAPESCAVCLYEFEGEDEIRRLTNCRHIFHRGCLDRWMGYDQRTCPLCRTPFIPHHMQAAFNDRLWAASGIPDFYYNHE

SEQ ID NO: 4786 - DNA, 774 bp, Glycine max
  misc_feature (1)..(774): Ceres Seq. ID no. 14304167
acataatgcgttctaaatttaattccagtagacccatgcacaccagaacacttccttctgcggcgggttgcttcctcctcttacgagcctttccattcactccatcgattcggtgggtgcgggtgctgcgaaaccgagctagaccctgatcggtgtcggcacaccgccggagaacaagatgatcgtctgcgtcgccgtcgtcggtcaccagaacaatccgctgtacattcagagcttcacggaggccgacgatgctcttaagctccaccacatcgtccattgctcgctcgatgtggtcgacgagcgagtgaacaatcctaaaaagtctggaccgatgcttaatgagacgtttttgggactgctttatcctattgaaaactacaaagtatatggatatctgactaatacgaaggtgaaatttatcttggtgaccacggatctggatgttaaagatgcggatgtaaggaattttttcaggaggttccattctgcatatgtagatgccgtttcaaacccattccatgtaccaggcaaaaagataacctccagaacttttgcagaaagagtgagcacaattgtcaagtcatttggcttgagttctgctgggtgaacatctataactggtgcctagtatgatgatgcttggttgatatttggcacaacttttcttttgttattctaagctcctgccttgtagttttagcagtggtaaatgcttaggaacattttgaacagaatcctattttcaatatatcatattcaaattgaaccatc

SEQ ID NO: 4787 - protein, 143 aa, Glycine max
  misc_feature (1)..(143): Ceres Seq. ID no. 14304168
MIVCVAVVGHQNNPLYIQSFTEADDALKLHHIVHCSLDVVDERVNNPKKSGPMLNETFLGLLYPIENYKVYGYLTNTKVKFILVTTDLDVKDADVRNFFRRFHSAYVDAVSNPFHVPGKKITSRTFAERVSTIVKSFGLSSAG

SEQ ID NO: 4788 - protein, 91 aa, Glycine max
  misc_feature (1)..(91): Ceres Seq. ID no. 14304169
MLNETFLGLLYPIENYKVYGYLTNTKVKFILVTTDLDVKDADVRNFFRRFHSAYVDAVSNPFHVPGKKITSRTFAERVSTIVKSFGLSSAG

SEQ ID NO: 4789 - DNA, 768 bp, Glycine max
  misc_feature (1)..(768): Ceres Seq. ID no. 14304183
gaattccatggcgacgagtgggtcagagacaaagcaagtgatggtgattggaatcgacgacagtgatttcagcacgtacgctctccaatggactctggatcacttgctatcccctgcaaatgttcctaagttcaagatttttcttgtttatgccaagccttctgttgcctctgctgtcggttttgttggccctggagccgctgaggtgttacctgttgttgaggccgatttgagaaaaacagctgccaaaatcactgaacgtgctacagaactatgcaagaagaaatccgtaaatgacgtagcagtggaagtgctagaaggtgatcctagaaatgttctttgcgaggcagtggaaaagcaccaagcttcaatgttggttgtgggtagtcatggttatgggactttaaaaagagcggttttaggtagtgtaagtgactattgtgctcatcatgctcactgcactgtcatgatcgtgaagaaaccaaagcacaaacactgatctcaatcgttggctccgattaaatagcagtgcacataaatcttttcagcaacagggaaaataaatgttcttaagaattcataatattgttttctgcatgcctagctgactttgtggtttaaggttcatttacttttttattttcaaagttacaacccacaaataatgtatgtaagcacaatactttttccttcacggccactggtggtgcttggtttattttgttcaagagcaatttatttaaataaatgtcactgttgtgtgtgtat

SEQ ID NO: 4790 - protein, 165 aa, Glycine max
  misc_feature (1)..(165): Ceres Seq. ID no. 14304184
NSMATSGSETKQVMVIGIDDSDFSTYALQWTLDHLLSPANVPKFKIFLVYAKPSVASAVGFVGPGAAEVLPVVEADLRKTAAKITERATELCKKKSVNDVAVEVLEGDPRNVLCEAVEKHQASMLVVGSHGYGTLKRAVLGSVSDYCAHHAHCTVMIVKKPKHKH

SEQ ID NO: 4791 - protein, 163 aa, Glycine max
  misc_feature (1)..(163): Ceres Seq. ID no. 14304185
MATSGSETKQVMVIGIDDSDFSTYALQWTLDHLLSPANVPKFKIFLVYAKPSVASAVGFVGPGAAEVLPVVEADLRKTAAKITERATELCKKKSVNDVAVEVLEGDPRNVLCEAVEKHQASMLVVGSHGYGTLKRAVLGSVSDYCAHHAHCTVMIVKKPKHKH

SEQ ID NO: 4792 - protein, 152 aa, Glycine max
  misc_feature (1)..(152): Ceres Seq. ID no. 14304186
MVIGIDDSDFSTYALQWTLDHLLSPANVPKFKIFLVYAKPSVASAVGFVGPGAAEVLPVVEADLRKTAAKITERATELCKKKSVNDVAVEVLEGDPRNVLCEAVEKHQASMLVVGSHGYGTLKRAVLGSVSDYCAHHAHCTVMIVKKPKHKH

SEQ ID NO: 4793 - DNA, 1209 bp, Glycine max
  misc_feature (1)..(1209): Ceres Seq. ID no. 14304198
acacactctgcagtgaaacaccctgctccaaactccttcgatggaaaacatccagcacagtcacgtggaagttaagggactaaagctccatgttgctgagattggaagtggtcaaaaggcactggttttcttacatggattcccagaaatatggtatacatggaggcaccagatgattgctgcagcaaatgctggctaccgggctattgcctttgatttcagaggctatggactttctgagcatcctgcggagccagaaaaagcaaacttacttgaccttgttgatgatgtcgtgggtctgttggattcattaagcattaccaaggctgtgcttgttggtaaggactttggtgcctttccagcgtatattgttgccgctctccatccagacaaagtagattcagtcataatgttaggtgttccattcatgcttccaggtccctctgctattcagaacctcccaaaaggctcctacgttattaagtggcaggagcctgggagggcagaagcagattttggccgctttgatgttaagtcagttataaggaacatctacacactcttctctggaagtgagataccaatagcaggtgataatcaggaaatcatggatttgtatgacccaactactcccctgccaccatggttctctgaggaagacctggcaacctatgcatcactatacgaaaaatctggcttcagatttgcattgcaggttccatacaggactcttggagtggatagtggcataagtgatcctaaaatcacagttccggcactgctgatcatgggtgagaaagactatgtcttcaagtgttttggaatggaggactacatccgaagtggcgcagtgaaacattttgtgccagacttggaaatcatatatattccagaaggaagccattttgtgcatgaacaatttcctgagaaggtgaaccagctcatcattgaattccttaacaaacaaagcatttgattgtctgatctgaagctcagagtaggatgcaatattgtataagaagcaactctctgtggcgggatgatttttaaggaatcacttatttccaaataaggcaataagtaacttgaatgagtacttattcgatagaactttgatctacactctacagacattttgataaatactatgtaattcgtatagaattgcttttgctctatcctcaacattaatgatcaatcatctcattg

SEQ ID NO: 4794 - protein, 311 aa, Glycine max
  misc_feature (1)..(311): Ceres Seq. ID no. 14304199
MENIQHSHVEVKGLKLHVAEIGSGQKALVFLHGFPEIWYTWRHQMIAAANAGYRAIAFDFRGYGLSEHPAEPEKANLLDLVDDVVGLLDSLSITKAVLVGKDFGAFPAYIVAALHPDKVDSVIMLGVPFMLPGPSAIQNLPKGSYVIKWQEPGRAEADFGRFDVKSVIRNIYTLFSGSEIPIAGDNQEIMDLYDPTTPLPPWFSEEDLATYASLYEKSGFRFALQVPYRTLGVDSGISDPKITVPALLIMGEKDYVFKCFGMEDYIRSGAVKHFVPDLEIIYIPEGSHFVHEQFPEKVNQLIIEFLNKQSI

SEQ ID NO: 4795 - protein, 267 aa, Glycine max
  misc_feature (1)..(267): Ceres Seq. ID no. 14304200
MIAAANAGYRAIAFDFRGYGLSEHPAEPEKANLLDLVDDVVGLLDSLSITKAVLVGKDFGAFPAYIVAALHPDKVDSVIMLGVPFMLPGPSAIQNLPKGSYVIKWQEPGRAEADFGRFDVKSVIRNIYTLFSGSEIPIAGDNQEIMDLYDPTTPLPPWFSEEDLATYASLYEKSGFRFALQVPYRTLGVDSGISDPKITVPALLIMGEKDYVFKCFGMEDYIRSGAVKHFVPDLEIIYIPEGSHFVHEQFPEKVNQLIIEFLNKQSI

SEQ ID NO: 4796 - protein, 188 aa, Glycine max
  misc_feature (1)..(188): Ceres Seq. ID no. 14304201
MLGVPFMLPGPSAIQNLPKGSYVIKWQEPGRAEADFGRFDVKSVIRNIYTLFSGSEIPIAGDNQEIMDLYDPTTPLPPWFSEEDLATYASLYEKSGFRFALQVPYRTLGVDSGISDPKITVPALLIMGEKDYVFKCFGMEDYIRSGAVKHFVPDLEIIYIPEGSHFVHEQFPEKVNQLIIEFLNKQSI

SEQ ID NO: 4797 - DNA, 901 bp, Glycine max
  misc_feature (1)..(901): Ceres Seq. ID no. 14304209
aaccacacactgccttgttcatctcgaacataaatcaagagcatatcattctttgtgagctttattgatctaaaccaatggcgaactcgacgattcttcttgattactggccaagcatgttctgtatgagggctagagtcgcgttgagggagaaaggtgttgtgttcgaggccagagaagaggatctcacgaacaagagccctttgctcctccagagtaatccgattcacaagaaggtcccggttctgatccacaacggtaaaccggtttgcgagtccctcaatgttgtccagtacgtggacgaggcttggtctgacaagaacccattcttcccttctgatccttacgggaaagctcaggctaggttttgggctgatttcgtggacaagaagtttagtgatgcccaattcaagatatggggaaagaaaggtgaggaacaagcagcaggggtgaaggagtttattgaggcagtgaagattcttgaagctgagcttggagacaaaccttactttggtggagatagctttggatatgtagacattgcactgattacattctacagttggttcggagcatacgagaagtttggtaacttcagcatcgaggcagagagtccaaaactgattgcttgggctaagaggtgtatggagaaagagagtgtgtctaagtctctccctgaccaagagaaaattgttgcgtacgccgctgagtttaggaagaataatctctgatctgaataaaaccttgtttgtgccttctgtttcggatgatgctgtagtctgtttttaactgtggtttttgtgtgtttcctaataatgcgtgagggcaagcgtcggcctttgtgtggtggtgttgtatggatcctgagtaatgcatttttaaataaaatatattttcaaat

SEQ ID NO: 4798 - protein, 217 aa, Glycine max
  misc_feature (1)..(217): Ceres Seq. ID no. 14304210
MANSTILLDYWPSMFCMRARVALREKGVVFEAREEDLTNKSPLLLQSNPIHKKVPVLIHNGKPVCESLNVVQYVDEAWSDKNPFFPSDPYGKAQARFWADFVDKKFSDAQFKIWGKKGEEQAAGVKEFIEAVKILEAELGDKPYFGGDSFGYVDIALITFYSWFGAYEKFGNFSIEAESPKLIAWAKRCMEKESVSKSLPDQEKIVAYAAEFRKNNL

SEQ ID NO: 4799 - protein, 204 aa, Glycine max
  misc_feature (1)..(204): Ceres Seq. ID no. 14304211
MFCMRARVALREKGVVFEAREEDLTNKSPLLLQSNPIHKKVPVLIHNGKPVCESLNVVQYVDEAWSDKNPFFPSDPYGKAQARFWADFVDKKFSDAQFKIWGKKGEEQAAGVKEFIEAVKILEAELGDKPYFGGDSFGYVDIALITFYSWFGAYEKFGNFSIEAESPKLIAWAKRCMEKESVSKSLPDQEKIVAYAAEFRKNNL

SEQ ID NO: 4800 - protein, 201 aa, Glycine max
  misc_feature (1)..(201): Ceres Seq. ID no. 14304212
MRARVALREKGVVFEAREEDLTNKSPLLLQSNPIHKKVPVLIHNGKPVCESLNVVQYVDEAWSDKNPFFPSDPYGKAQARFWADFVDKKFSDAQFKIWGKKGEEQAAGVKEFIEAVKILEAELGDKPYFGGDSFGYVDIALITFYSWFGAYEKFGNFSIEAESPKLIAWAKRCMEKESVSKSLPDQEKIVAYAAEFRKNNL

SEQ ID NO: 4801 - DNA, 1103 bp, Glycine max
  misc_feature (1)..(1103): Ceres Seq. ID no. 14304224
aaactgtaagcattaattttcgaaatgggaaaaaacgaaaaataacttttccaaattcatgacaaccgaatcacacaaaaactattttatatgctgtttttctgtttgaaggatcacacaaactagtaaccagaaaaatggcagaaacaaagttgagctccttcaaagacaaaagatggtcactccatggcatgacagctctagtgacaggaggcacacgaggcatagggtacgcaatagctgaagagttagcagaatttggggcagctgtgcatatttgtgcacgtaaacaacaagatattgataaatgtttagaagaatggaataagaaaggacttcccataacagggtcggcatgtgatgtactatctcgtgaccaacgtgaaaatttaatgaaaaatgttgcttcaatctttaacgggaagctcaacattctgataaacaatgctggaacaactacacctaagaatctcatagattatactgcagaagatgtaacgacaataatggaaactaattttgggtctagttaccacttatgtcaactagcacatccacttctaaaagcatctggatatgggagcatagtgtttatatcctccattgcaggtctgaaagctttgccttacagttctgtgtatgcatcctctaaaggagctatgaatcaattcactaagaacatagcattggaatgggcaaaggataatattcgcgcaaatgctgtggcaccggggactgttaagactgtacttctggattctatcatgaaagctgctgctgaagctgataaagccgttgagtatatagtgtctcaaacaccagttggtagacttggagatcccgaggacatatcaccactggttgttttcctttgccttccagctgcttcatacatcactggccagattattactgcggatgggggttacataatttaaagtgtaatgccaaaaataattataaaataaaataaatgcccaaaacataaatctcaagatcaactaggtttttaagaaggtccgaaactaatgattatctgtagttgttttaagtacaatatttcaagtgttataatgtttccaatgtgtgaagttctttttatc

SEQ ID NO: 4802 - protein, 266 aa, Glycine max
  misc_feature (1)..(266): Ceres Seq. ID no. 14304225
MAETKLSSFKDKRWSLHGMTALVTGGTRGIGYAIAEELAEFGAAVHICARKQQDIDKCLEEWNKKGLPITGSACDVLSRDQRENLMKNVASIFNGKLNILINNAGTTTPKNLIDYTAEDVTTIMETNFGSSYHLCQLAHPLLKASGYGSIVFISSIAGLKALPYSSVYASSKGAMNQFTKNIALEWAKDNIRANAVAPGTVKTVLLDSIMKAAAEADKAVEYIVSQTPVGRLGDPEDISPLVVFLCLPAASYITGQIITADGGYII

SEQ ID NO: 4803 - protein, 248 aa, Glycine max
  misc_feature (1)..(248): Ceres Seq. ID no. 14304226
MTALVTGGTRGIGYAIAEELAEFGAAVHICARKQQDIDKCLEEWNKKGLPITGSACDVLSRDQRENLMKNVASIFNGKLNILINNAGTTTPKNLIDYTAEDVTTIMETNFGSSYHLCQLAHPLLKASGYGSIVFISSIAGLKALPYSSVYASSKGAMNQFTKNIALEWAKDNIRANAVAPGTVKTVLLDSIMKAAAEADKAVEYIVSQTPVGRLGDPEDISPLVVFLCLPAASYITGQIITADGGYII

SEQ ID NO: 4804 - protein, 181 aa, Glycine max
  misc_feature (1)..(181): Ceres Seq. ID no. 14304227
MKNVASIFNGKLNILINNAGTTTPKNLIDYTAEDVTTIMETNFGSSYHLCQLAHPLLKASGYGSIVFISSIAGLKALPYSSVYASSKGAMNQFTKNIALEWAKDNIRANAVAPGTVKTVLLDSIMKAAAEADKAVEYIVSQTPVGRLGDPEDISPLVVFLCLPAASYITGQIITADGGYII

SEQ ID NO: 4805 - DNA, 813 bp, Glycine max
  misc_feature (1)..(813): Ceres Seq. ID no. 14304228
cctaaaaaatgtcccgattgctgtcgaaaaccctaattccccacgggagattcttcctccgtcgcttcaacgacgcggcttcgaagaaaacggcggcgccgagcctcgtctgtttcaaccgccgtccctattcatcgaaacctcatctgatcgagatcgacctggactcttcctcgtcagcgacttccaaggccgaagccgaagccgcggttctcaagaagctgaacgagttcgtacggaggatcgtcgttcagaactcgactcccgattggctccctttctccccaggatcctccttctgggtccctccgcaccaaaacaccgccgccaagatcgctaatttggtcgaccaggtgacgcatcctttgacggaggaggaggttctctccctgtcttctccttctggctggccttgctcctctttcttcactcctcctccagatgatgattcttcatctaaacaaagggtggaaggtagcacggagttgaacgttccggggaatgagatgctggaagtcaagctagcgcagtttcccgatccaatctacttgttggaacacggagatgatgatgagtgattttacatttccagctcacgtggaaggccagtcctgatgcatggtttgcgttgacaggctttggagaaaaaaagacagatgattctcgagactgatgaggttgtgtttgtatatacagttgcaagccgtggaattatatcgatgttttggctgtcttaacgctgtttgtgaactataaattatacagcttgatattaattaattaaaaccgtagcagacggtgcaacttcagatt

SEQ ID NO: 4806 - protein, 189 aa, Glycine max
  misc_feature (1)..(189): Ceres Seq. ID no. 14304229
MSRLLSKTLIPHGRFFLRRFNDAASKKTAAPSLVCFNRRPYSSKPHLIEIDLDSSSSATSKAEAEAAVLKKLNEFVRRIVVQNSTPDWLPFSPGSSFWVPPHQNTAAKIANLVDQVTHPLTEEEVLSLSSPSGWPCSSFFTPPPDDDSSSKQRVEGSTELNVPGNEMLEVKLAQFPDPIYLLEHGDDDE

SEQ ID NO: 4807 - protein, 112 aa, Glycine max
  misc_feature (1)..(112): Ceres Seq. ID no. 14304230
LKNVPIAVENPNSPREILPPSLQRRGFEENGGAEPRLFQPPSLFIETSSDRDRPGLFLVSDFQGRSRSRGSQEAERVRTEDRRSELDSRLAPFLPRILLLGPSAPKHRRQDR

SEQ ID NO: 4808 - DNA, 1137 bp, Glycine max
  misc_feature (1)..(1137): Ceres Seq. ID no. 14304231
gactcctttcgcctcctcctcctcctcctctggattgcggcgcgacggcggccgtgagcgagcggtgctcctactcctcctccacgccctcgcgcccagatccgctccccaatggcgcggaacccggcctccagcgtctacgtaggcaacttggatgagaaggtgcctgaaagagtcttgtatgagattcttattcaggctggtcatgtagtagacctgcacataccatgtgacaaagaaactgggcgtcccaaaggttttgcttttgctgagtatgagacagacgcaattgctcagtatgctgttagacttttttcaggacttgttaggcttaatggtaaaacacttaaatttgcgctttctggacaagacaagccctcatcaaatggcaataatccagtaatgcctaaactcaaccctataccattaccaaagcagcctcagtttgtgcattctagtgatacgcttgtgtcgcataaaccagcatatccggtggtaaatggtgggattccacataatgttttttcacaaggctatcatccttacaatgttcaccctcaagcattaccaactcgacccgtgcatgagcaccgagagtttgtccatggtacgtatggttacaacagtcatgtatatggttctgttctgaatgctagctatggaggttatgttgtgaatgctgttggtcatcgagctgtgaggcaaccaatcatttacccatcctactaggttgtaggcaccaaattgcgggatctggtattcagagtaggcaggttaatcgtagcttcttggtccctcaaattctcagtagcatctttgttgtacccttgtacttcaattccctgcatgtaaatagggctggtatatccattttatcaacggtaagttggcaacggaaagctctgcccactacattgtacacctttgtacttgtctagcctggtacatcttttctctttcttggaattggaaaataaagaaatgcaacatcgtgggctgttttgcccccccactgactcggattatttgagctattcctaaagctccttttcatgtactcgaatgatcattgctgttacttacacagaagatgttgatgtctcagctccggggcctcatataattataaattcaagc

SEQ ID NO: 4809 - protein, 205 aa, Glycine max
  misc_feature (1)..(205): Ceres Seq. ID no. 14304232
MARNPASSVYVGNLDEKVPERVLYEILIQAGHVVDLHIPCDKETGRPKGFAFAEYETDAIAQYAVRLFSGLVRLNGKTLKFALSGQDKPSSNGNNPVMPKLNPIPLPKQPQFVHSSDTLVSHKPAYPVVNGGIPHNVFSQGYHPYNVHPQALPTRPVHEHREFVHGTYGYNSHVYGSVLNASYGGYVVNAVGHRAVRQPIIYPSY

SEQ ID NO: 4810 - protein, 108 aa, Glycine max
  misc_feature (1)..(108): Ceres Seq. ID no. 14304233
MPKLNPIPLPKQPQFVHSSDTLVSHKPAYPVVNGGIPHNVFSQGYHPYNVHPQALPTRPVHEHREFVHGTYGYNSHVYGSVLNASYGGYVVNAVGHRAVRQPIIYPSY

SEQ ID NO: 4811 - DNA, 552 bp, Glycine max
  misc_feature (1)..(552): Ceres Seq. ID no. 14304249
aagcgaggttctgaatcaaagtatacaaaagcaatgcaatcaaaggacgaggatgatgagggtggtgtgggtttgggtttggaagacgaagacgaagaggaacatggagataccttgtgtggggcatgtggagagagctatgctgctgatgagttctggatttgctgcgacatctgcgagaaatggttccatggaaagtgcgtgaagattacccctgcaagggctgagcatatcaagcagtacaaatgtccttcttgcagcaacaagcgagctcgaccttgacaaacatggctaggatggtggtgactataatcttggcaattttatgactactaatttgtttagtaggtcaagtttattagtcttgctgtgaatttcaggtatattgtttcagatgttacattaggtatattatgagctgctgtcgattcatctaccattaggatgtttatttcataagtggacttgaatgttgttctgttatgtgtttctttaaattttatgtagctgtgtaactgtgttgtgtccatagcttattatctgccgtggtgt

SEQ ID NO: 4812 - protein, 93 aa, Glycine max
  misc_feature (1)..(93): Ceres Seq. ID no. 14304250
KRGSESKYTKAMQSKDEDDEGGVGLGLEDEDEEEHGDTLCGACGESYAADEFWICCDICEKWFHGKCVKITPARAEHIKQYKCPSCSNKRARP

SEQ ID NO: 4813 - protein, 82 aa, Glycine max
  misc_feature (1)..(82): Ceres Seq. ID no. 14304251
MQSKDEDDEGGVGLGLEDEDEEEHGDTLCGACGESYAADEFWICCDICEKWFHGKCVKITPARAEHIKQYKCPSCSNKRARP

SEQ ID NO: 4814 - protein, 67 aa, Glycine max
  misc_feature (1)..(67): Ceres Seq. ID no. 14304252
SEVLNQSIQKQCNQRTRMMRVVWVWVWKTKTKRNMEIPCVGHVERAMLLMSSGFAATSARNGSMESA

SEQ ID NO: 4815 - DNA, 1760 bp, Glycine max
  misc_feature (1)..(1760): Ceres Seq. ID no. 14304276
ggtgccttcactctgacaatggatccagcgttacccattgtagcgctgtcgcttctcttgggtgccatcatcgccttcctcatcttcaacacctacttctgcaagcgccaatccgaaatccgatccatcgccgatccaaatccaaattcaaattcgaatcccaaactcgtgtcttccaaaccccctcccaagaagcctctctccaaaccccattcctccgacaaggatcaaaacaagcgtcaccatccgttggatttgaataccttgaagggtcatggtgatgcagtgacaggggtatgcttctcccgcgatggacgaaatttggcaactgcttgcgctgatggagttgtgagagtattcaagttggatgatgcttcgagtaaaagtttcaagtttctaaggattaatttgcctgccggcggtcatccaacggcagttgcattttccgatgatgcatcctccattgttgtggcgtcttatactctgtccggttgttcattatacatgtatggagaagagaaacctaaaacatctgaagacaaaccacaagcaaagcttcctctccccgaaattaagtgggagcatcacaaagttcatgataagaagtcaataattactatgtttggagcctctgcaacttatggcactgctgatggaagtacaattattgcctcgtgttcagaagggactgacatcattctttggcatggaaaaactgggaagagtgttgggcatgtcgatacaaatcaattgaaaaataacatggctactatatcacccaacggtcgttttattgcagctgcagcatttactgccgatgtgaagatctgggagattgtatatgcaaaggatggatctgtgaaggaagttttaaatgttatgcagcttaaggggcataagagtgctgtgacttggttatgctttacgccaaactctgagcaaataatcactgcatccaaggatggttcaatgagaatatggaatatcaatgttcgctatcatcttgatgaggatccaaagacgctaaaggtgttcccaattcctcttcatgattcttccggtactacattgcactatgatcgcatgagtgtttcccctgatggaaattttttggctgcgacccatggttccacattgcagtggttatgtgttgagactggaaaggttctggatacaactgaaaaagcccatgatagtgacatttcatgcatttcatgggctcctaaaactattccaatgggaaatgaacaagttttggttttagccacagccagtgctgacaagaaagtgaagttatgggcatctccatctatccctgcatcctaagccactatgctagtgcccggaatgctaccattagtatgcctttgcacgcgctgacactaattatgttaaagagagatgcttctaaagttctgggatttggtctcttcatagttggttcagtcacttcacaactttttagagctgcatggtatcattgaaaagttgaatgagaaacaaggatgagctgaaatgatgcaatcccttcagttgctgctactgctcagactctgtatcttgacgaattttttgactaataatttatatagacagagagataatgttgttggttttcgttgtgttagtgaggctgacgtgaatggtgaagtgtgatgcgagaatagtttatttgtagaactttggaagagaacataatggacatgttactagtggctacagtttgtcatttaaagaagaaaaaaaaaaacattttcatg

SEQ ID NO: 4816 - protein, 441 aa, Glycine max
  misc_feature (1)..(441): Ceres Seq. ID no. 14304277
GAFTLTMDPALPIVALSLLLGAIIAFLIFNTYFCKRQSEIRSIADPNPNSNSNPKLVSSKPPPKKPLSKPHSSDKDQNKRHHPLDLNTLKGHGDAVTGVCFSRDGRNLATACADGVVRVFKLDDASSKSFKFLRINLPAGGHPTAVAFSDDASSIVVASYTLSGCSLYMYGEEKPKTSEDKPQAKLPLPEIKWEHHKVHDKKSIITMFGASATYGTADGSTIIASCSEGTDIILWHGKTGKSVGHVDTNQLKNNMATISPNGRFIAAAAFTADVKIWEIVYAKDGSVKEVLNVMQLKGHKSAVTWLCFTPNSEQIITASKDGSMRIWNINVRYHLDEDPKTLKVFPIPLHDSSGTTLHYDRMSVSPDGNFLAATHGSTLQWLCVETGKVLDTTEKAHDSDISCISWAPKTIPMGNEQVLVLATASADKKVKLWASPSIPAS

SEQ ID NO: 4817 - protein, 435 aa, Glycine max
  misc_feature (1)..(435): Ceres Seq. ID no. 14304278
MDPALPIVALSLLLGAIIAFLIFNTYFCKRQSEIRSIADPNPNSNSNPKLVSSKPPPKKPLSKPHSSDKDQNKRHHPLDLNTLKGHGDAVTGVCFSRDGRNLATACADGVVRVFKLDDASSKSFKFLRINLPAGGHPTAVAFSDDASSIVVASYTLSGCSLYMYGEEKPKTSEDKPQAKLPLPEIKWEHHKVHDKKSIITMFGASATYGTADGSTIIASCSEGTDIILWHGKTGKSVGHVDTNQLKNNMATISPNGRFIAAAAFTADVKIWEIVYAKDGSVKEVLNVMQLKGHKSAVTWLCFTPNSEQIITASKDGSMRIWNINVRYHLDEDPKTLKVFPIPLHDSSGTTLHYDRMSVSPDGNFLAATHGSTLQWLCVETGKVLDTTEKAHDSDISCISWAPKTIPMGNEQVLVLATASADKKVKLWASPSIPAS

SEQ ID NO: 4818 - protein, 273 aa, Glycine max
  misc_feature (1)..(273): Ceres Seq. ID no. 14304279
MYGEEKPKTSEDKPQAKLPLPEIKWEHHKVHDKKSIITMFGASATYGTADGSTIIASCSEGTDIILWHGKTGKSVGHVDTNQLKNNMATISPNGRFIAAAAFTADVKIWEIVYAKDGSVKEVLNVMQLKGHKSAVTWLCFTPNSEQIITASKDGSMRIWNINVRYHLDEDPKTLKVFPIPLHDSSGTTLHYDRMSVSPDGNFLAATHGSTLQWLCVETGKVLDTTEKAHDSDISCISWAPKTIPMGNEQVLVLATASADKKVKLWASPSIPAS

SEQ ID NO: 4819 - DNA, 1589 bp, Glycine max
  misc_feature (1)..(1589): Ceres Seq. ID no. 14304288
aatcgcaactcgcgaaagttgttttgtaaagtcgtcacttcccacttcgtctccgttgctgtagttgtgttctgtgtgggtcgctgaagggcccttcatcagcacagatggatttccatggattcctaaacgacttgcaggattgggaattttctagaaaggataaagcacgaccacaaaaggaaaatgttggcttcatcttctcgaattacgggatctgtgggtgtggagaaggcatcaaaaggagataccatttcttttgataatgcaagaaattctccaggacagtatgatttatcaagaattaatcatttgcatagtagttttgttcctgaagatgttcctgatgctgcttccgagaaagacctgggcaacgagtttttcaagcagaaaaagtttaaggaagctagagactgctattcaaggagcattgccttatcaccaacagctgtagcatatgcaaatagggcaatggccaatatcaagctcagaagattccaagaggctgaggatgactgcacagaggccttaaatcttgatgatcgttacataaaagcatactcacgaagagcaacagctagaaaagaacttggaaaaattaaagaatcaatggacgatgctgaatttgccttgaggttggaaccaaacaatcaagaaatcaagaaacagtatgctgatgctaagtctttctatgagaaagatattcttcagaaagcatcaggggttctgagaagcactgtacagggaactcaaaaagtgggaaagtcagaggaaaaagttaatggagacagcatccaccccatttcacgtagtactcaaaagtctggactagctgaagttcatcatcataaaaagagaaataaaagccagaagctggcctcaatcacaaggagatgatggttctaagggaggtttgagtgcaagcaacagtttggagcagagaaatcacagaattaccaagccagaaatgaaagcttctgttcaacagcttgcttctcgcgctgcttctagagccatgtctgaagctgccaaaaacgtaacacctccaactacagcttatcagtttgaggtctcctggagagcattttcaggtgatcttgctctgcaggctcgtctattaaaggctatatctccccatgaattgccgaaaatattcaaaaatgccttgtcttctaccatactaattgagatcatcaagtgtcttgcatctcttttcactgaggacatggatctggttgtcagttatttggagcatttgaccaaggtaccaagatttgatgtgattgtaatgtgcctttcatcaacaaataaggatgacatacgcaagatctgggatgaagtgttcagcggtgaggcaacaccaatagagtatgcagagattctggacaaccttcaatcaaagttcggccttggacagtgacatcttcccctgtatgttttaatatttttttttcctcggtggatcctctcccttccgcaactatcttcacttgtaaattattatgctattgaaatgtttgagcattattgacggtcaacttgatccatctttaagcgttagttgataatgaggaaatgggaggaaaaag

SEQ ID NO: 4820 - protein, 236 aa, Glycine max
  misc_feature (1)..(236): Ceres Seq. ID no. 14304289
MLASSSRITGSVGVEKASKGDTISFDNARNSPGQYDLSRINHLHSSFVPEDVPDAASEKDLGNEFFKQKKFKEARDCYSRSIALSPTAVAYANRAMANIKLRRFQEAEDDCTEALNLDDRYIKAYSRRATARKELGKIKESMDDAEFALRLEPNNQEIKKQYADAKSFYEKDILQKASGVLRSTVQGTQKVGKSEEKVNGDSIHPISRSTQKSGLAEVHHHKKRNKSQKLASITRR

SEQ ID NO: 4821 - protein, 150 aa, Glycine max
  misc_feature (1)..(150): Ceres Seq. ID no. 14304290
MKASVQQLASRAASRAMSEAAKNVTPPTTAYQFEVSWRAFSGDLALQARLLKAISPHELPKIFKNALSSTILIEIIKCLASLFTEDMDLVVSYLEHLTKVPRFDVIVMCLSSTNKDDIRKIWDEVFSGEATPIEYAEILDNLQSKFGLGQ

SEQ ID NO: 4822 - protein, 141 aa, Glycine max
  misc_feature (1)..(141): Ceres Seq. ID no. 14304291
MANIKLRRFQEAEDDCTEALNLDDRYIKAYSRRATARKELGKIKESMDDAEFALRLEPNNQEIKKQYADAKSFYEKDILQKASGVLRSTVQGTQKVGKSEEKVNGDSIHPISRSTQKSGLAEVHHHKKRNKSQKLASITRR

SEQ ID NO: 4823 - DNA, 1202 bp, Glycine max
  misc_feature (1)..(1202): Ceres Seq. ID no. 14304408
ctgtaccacaataatcaaagtctcaaccatgagaaaacgtatcaatatggaaagtgatgctgacttcaattcctttgccacatcctcctcttccaccacaccttcaatcttctttgacactaacacttctagcacatcctcctcctcaacatctcctacctcaaattcagaatcatgcaccaaagaacactccaaaacacctcaaaatgactcaaccacttctcaaacctcattggaaaatggaaaggactcaaaagggtgcaagaagaggcagatagacaatagcaaccagaatcaccaccctacttataggggtgtaaggatgaggaattggggcaaatgggtgtccgaaatccgtgagccgagaaagaagtcaagaatatggctaggaacataccctacagcagaaatggcagctagagcacatgatgtggctgccttagccatcaagggccattcagcatacctcaattttcctgaattggctcaagagcttccaaggccagttagcacatctcctaaggacattcaagctgcagctgcaaaagctgcaaatactgcctttgaggaggttaggcattgtcaaataactgaagaagaagcagaacaaaaccaagcagaacaagcttcatcttcaactctctcaatggacaatcctcaagagccttcaagttctcattctaccattgatgatgacactttgtttgaccttccagatcttttccctgatggaaacaatggactttgctccttttcttcttcttggcatttgtgtgcagttgatagtggctttaggcttgaggagtcatttttttatgagaaccattagaatttagaggctttttattttctttttaattcaagtaaaatacagagtttaataagaccaaaaggaaggagagcaacatgcggagtttttcttctttgtttggtcactgcaactgcattctgcgcagagaataaccagttgaggaagactttacatttttatctgtaaatggtgctgtctattgctaatattttgtccgatatagtttttttttctattttggggaataaaggtttaggtgagccgtgagcaaagactattccatcatcaagtaagttacgtattcaactaggagtgcataacatctgagacaaggtttctcttctactgtatatgaaaggtatttatgatttgagagaatatcctttcctct

SEQ ID NO: 4824 - protein, 275 aa, Glycine max
  misc_feature (1)..(275): Ceres Seq. ID no. 14304409
CTTIIKVSTMRKRINMESDADFNSFATSSSSTTPSIFFDTNTSSTSSSSTSPTSNSESCTKEHSKTPQNDSTTSQTSLENGKDSKGCKKRQIDNSNQNHHPTYRGVRMRNWGKWVSEIREPRKKSRIWLGTYPTAEMAARAHDVAALAIKGHSAYLNFPELAQELPRPVSTSPKDIQAAAAKAANTAFEEVRHCQITEEEAEQNQAEQASSSTLSMDNPQEPSSSHSTIDDDTLFDLPDLFPDGNNGLCSFSSSWHLCAVDSGFRLEESFFYENH

SEQ ID NO: 4825 - protein, 266 aa, Glycine max
  misc_feature (1)..(266): Ceres Seq. ID no. 14304410
MRKRINMESDADFNSFATSSSSTTPSIFFDTNTSSTSSSSTSPTSNSESCTKEHSKTPQNDSTTSQTSLENGKDSKGCKKRQIDNSNQNHHPTYRGVRMRNWGKWVSEIREPRKKSRIWLGTYPTAEMAARAHDVAALAIKGHSAYLNFPELAQELPRPVSTSPKDIQAAAAKAANTAFEEVRHCQITEEEAEQNQAEQASSSTLSMDNPQEPSSSHSTIDDDTLFDLPDLFPDGNNGLCSFSSSWHLCAVDSGFRLEESFFYENH

SEQ ID NO: 4826 - protein, 260 aa, Glycine max
  misc_feature (1)..(260): Ceres Seq. ID no. 14304411
MESDADFNSFATSSSSTTPSIFFDTNTSSTSSSSTSPTSNSESCTKEHSKTPQNDSTTSQTSLENGKDSKGCKKRQIDNSNQNHHPTYRGVRMRNWGKWVSEIREPRKKSRIWLGTYPTAEMAARAHDVAALAIKGHSAYLNFPELAQELPRPVSTSPKDIQAAAAKAANTAFEEVRHCQITEEEAEQNQAEQASSSTLSMDNPQEPSSSHSTIDDDTLFDLPDLFPDGNNGLCSFSSSWHLCAVDSGFRLEESFFYENH

SEQ ID NO: 4827 - DNA, 717 bp, Glycine max
  misc_feature (1)..(717): Ceres Seq. ID no. 14304454
aacaacgaatcatgtcaaaaatattcagaagtatgtttgaagctgtgccacgagatgaacatcaaggcaattgatctatggtctgcactccagaaaaggggtaactggagagatgtttgtttcacggatggaattcatcttacttctgaggggagcaatatagtggcaaaagagatcttgaaggtcatcaaagaagcagagtgggaaccttgcctgcactggaattcaatgccaactgaatatggagaagattcaccttatgatcctgttggccctgatggaaagacaactgtgaatgtctccaactggaccttccttgaaactaaggaatgggactagagtgatgtgtatttgaaaactatagacatgcccctattcatagaagcctaagcaataatcacaaaataactggaatttatatagaactgtggctaaagaaaaatatattgttcttagttcacatatctgcatcatttgtcactggtttttcaccatgtgagtgggatgatttggtgactgtaattgcactttgattgagctaattgcctagttattttcaccattttatggttgtctttcactaaggttatacacaatagttggataggtgggggcacattatagaaacaaaagtcacatgatcaattgtgggcctgtatctgtgtatgacaatattttttcattttgtgcaacttgtgtatggcttatatgctttgt

SEQ ID NO: 4828 - protein, 112 aa, Glycine max
  misc_feature (1)..(112): Ceres Seq. ID no. 14304455
NNESCQKYSEVCLKLCHEMNIKAIDLWSALQKRGNWRDVCFTDGIHLTSEGSNIVAKEILKVIKEAEWEPCLHWNSMPTEYGEDSPYDPVGPDGKTTVNVSNWTFLETKEWD

SEQ ID NO: 4829 - protein, 94 aa, Glycine max
  misc_feature (1)..(94): Ceres Seq. ID no. 14304456
MNIKAIDLWSALQKRGNWRDVCFTDGIHLTSEGSNIVAKEILKVIKEAEWEPCLHWNSMPTEYGEDSPYDPVGPDGKTTVNVSNWTFLETKEWD

SEQ ID NO: 4830 - DNA, 1514 bp, Glycine max
  misc_feature (1)..(1514): Ceres Seq. ID no. 14304471
aattcccatctacagttagccccaaatctggggttagggtttcctctgcgtcgatggcttcgaattcgatcgacggcgacgccgttacggggtcgggactgtgcataaacgacgtgttaagggacgacgagctgcgttccattctggggcgagtggagagcgagaaggacaaggaaacgttcgggttggtctgcaagcgatggcttcggttgcagagcacggaaaggaagaaactcgccgcacgtgcgggtccccacatgctccgaaaaatggccgataggttcacacgcttagtcgaactggacctcgctcagtccgtctctcgttccttctatcccggcgtcaccgattccgatctcgccgtcatcgccactgccttcacttgcttgaagatcctcaatttgcataattgtaaaggaattacagatgctggaatgaaggctattggtgaacatctttccttattacagtcgttggatgtgtcttactgtagaaagctgactgacaagggattatcagctgttgccaaaggctgttgtgacttaaggatattgcatatggcgggttgcagatttgttactgatggtgtattagaagctctctccaaaaattgcggtaacttagaggagttgggattgcatggctgcacaagcattactgacaatggactgataaaccttgcaagtggatgtcgacggatcaggtttttagacataaataaatgtagtaatgccactgatgttggggtttctagtgtttctagggcttgttcatcttctctcaagacattgaaattgttagattgctataaaattggggatgaaaccatattatccctcgccgaattctgtggtaatctggagactttaatcattggtggttgccgggatgtctctgctgatgcgataaggtcgctggctgctgcatgtggaagcagccttaaaaacttgaggatggattggtgtttaaacatttctgattcttcattgagctgtgttttaagtcaatgcagaaaccttgaggcactggacattggttgctgtgaagagttgactgatgctgcttttcagctattaagcaatgaggagcctggattgagtttgaagattttgaagattagtaattgtccaaagatcacagtggcaggtataggcatcattgtgggtaaatgcacgtctctgcaatacttggatgtgaggtcatgcccgcatattacaaaggctggcctagatgaggctggtttccattttcctgaatgctgcaagattaattttaatggtagcgttaatgagcctgttgtgcttctttgatactctaattattttaaaagattggcttcatagttaaatgttcctatataaactttattgataaggcgtgcctttgtatatttgatgagaatgtggtctgttctggtgatgttagttttcttgtgcaactcacgtatcatgtatgtcagtaaatgacattggatgtatcatattttattgatcagttcagctgtaaatttgaag

SEQ ID NO: 4831 - protein, 435 aa, Glycine max
  misc_feature (1)..(435): Ceres Seq. ID no. 14304472
FPSTVSPKSGVRVSSASMASNSIDGDAVTGSGLCINDVLRDDELRSILGRVESEKDKETFGLVCKRWLRLQSTERKKLAARAGPHMLRKMADRFTRLVELDLAQSVSRSFYPGVTDSDLAVIATAFTCLKILNLHNCKGITDAGMKAIGEHLSLLQSLDVSYCRKLTDKGLSAVAKGCCDLRILHMAGCRFVTDGVLEALSKNCGNLEELGLHGCTSITDNGLINLASGCRRIRFLDINKCSNATDVGVSSVSRACSSSLKTLKLLDCYKIGDETILSLAEFCGNLETLIIGGCRDVSADAIRSLAAACGSSLKNLRMDWCLNISDSSLSCVLSQCRNLEALDIGCCEELTDAAFQLLSNEEPGLSLKILKISNCPKITVAGIGIIVGKCTSLQYLDVRSCPHITKAGLDEAGFHFPECCKINFNGSVNEPVVLL

SEQ ID NO: 4832 - protein, 418 aa, Glycine max
  misc_feature (1)..(418): Ceres Seq. ID no. 14304473
MASNSIDGDAVTGSGLCINDVLRDDELRSILGRVESEKDKETFGLVCKRWLRLQSTERKKLAARAGPHMLRKMADRFTRLVELDLAQSVSRSFYPGVTDSDLAVIATAFTCLKILNLHNCKGITDAGMKAIGEHLSLLQSLDVSYCRKLTDKGLSAVAKGCCDLRILHMAGCRFVTDGVLEALSKNCGNLEELGLHGCTSITDNGLINLASGCRRIRFLDINKCSNATDVGVSSVSRACSSSLKTLKLLDCYKIGDETILSLAEFCGNLETLIIGGCRDVSADAIRSLAAACGSSLKNLRMDWCLNISDSSLSCVLSQCRNLEALDIGCCEELTDAAFQLLSNEEPGLSLKILKISNCPKITVAGIGIIVGKCTSLQYLDVRSCPHITKAGLDEAGFHFPECCKINFNGSVNEPVVLL

SEQ ID NO: 4833 - protein, 350 aa, Glycine max
  misc_feature (1)..(350): Ceres Seq. ID no. 14304474
MLRKMADRFTRLVELDLAQSVSRSFYPGVTDSDLAVIATAFTCLKILNLHNCKGITDAGMKAIGEHLSLLQSLDVSYCRKLTDKGLSAVAKGCCDLRILHMAGCRFVTDGVLEALSKNCGNLEELGLHGCTSITDNGLINLASGCRRIRFLDINKCSNATDVGVSSVSRACSSSLKTLKLLDCYKIGDETILSLAEFCGNLETLIIGGCRDVSADAIRSLAAACGSSLKNLRMDWCLNISDSSLSCVLSQCRNLEALDIGCCEELTDAAFQLLSNEEPGLSLKILKISNCPKITVAGIGIIVGKCTSLQYLDVRSCPHITKAGLDEAGFHFPECCKINFNGSVNEPVVLL

SEQ ID NO: 4834 - DNA, 1363 bp, Glycine max
  misc_feature (1)..(1363): Ceres Seq. ID no. 14304483
tagtagcatctttattctcagaatatggtcagaagctgaggactatgtatcaggcaaatacaactgtgaccagggaagtaataagagtttatcagccaagtcatgaagagcgtcaaaagtcaaataatgacatgcacaacattaaggcatggacagaaatatatttgctgagtttgtgtgatgcattggttacaagcccgaagtctacttttgggtatgttgctcatagtcttggaggtttgaagccatggattttgcagagggcgtatggggaaaccatcccagatccaccttgtcgtcgagctaagtccatggagccttgtttccattatcctcccaagtatgactgtagggccaatagcacagttgattttacttccatttttcatcatatgaagcattgtgaagatgtatctagtggtttgaggctggttaatgttaagcactaggtaacaaacaaacttgacacgagcactgagttatttgctaattgctattacaactaatgtcaataatccctgtttgctctaatatttcattactttactttctcctcctttttttgatagcgtttgatattgtctagactagagagacagagcatttggttttgcgatttccttgtcacttttcactatttccagtcactcagcacagggatcctcctatttctaaatctctgggttagaggctaaagattttattattggcaagagatacattgtaggccttagacgaatttccagttataccaaatggagtgcaactgcttaggatattgttctccaccattaagtcttgtactatgtaatggttgtttgcgatttaaacctgttttaccacattgaaggtggtttgtgttcatgtggactacacacaaatgcttgtaagctttaagaatgaatggcatttgaggtgaaatcctaaatatatcatcaatgacaacatcgaggctattttttatggatgtattttttacagcagggacctatgatggtgttggttctccattctgagaaaggtcgtagatataattcaacttgagaaggatggtctgtccacagaaacctgcacaagatatatgcattattattcaatatcgttatggcaaacttctttagttggttccaggaattctgaaggtctctgccaattttgctgctgaactacctcaaaggcatgtaatgattagtttagctaaaatgtttctagccaaacaactccttttcccccttgttttaactgttatttattcattatcttacattatttaattgtgaattagaacttttgtagtatttaaacaagcaattgaagttgttataagcataaataatttatgacaacattgacaagtaccatt

SEQ ID NO: 4835 - protein, 148 aa, Glycine max
  misc_feature (1)..(148): Ceres Seq. ID no. 14304484
VASLFSEYGQKLRTMYQANTTVTREVIRVYQPSHEERQKSNNDMHNIKAWTEIYLLSLCDALVTSPKSTFGYVAHSLGGLKPWILQRAYGETIPDPPCRRAKSMEPCFHYPPKYDCRANSTVDFTSIFHHMKHCEDVSSGLRLVNVKH

SEQ ID NO: 4836 - protein, 134 aa, Glycine max
  misc_feature (1)..(134): Ceres Seq. ID no. 14304485
MYQANTTVTREVIRVYQPSHEERQKSNNDMHNIKAWTEIYLLSLCDALVTSPKSTFGYVAHSLGGLKPWILQRAYGETIPDPPCRRAKSMEPCFHYPPKYDCRANSTVDFTSIFHHMKHCEDVSSGLRLVNVKH

SEQ ID NO: 4837 - protein, 105 aa, Glycine max
  misc_feature (1)..(105): Ceres Seq. ID no. 14304486
MHNIKAWTEIYLLSLCDALVTSPKSTFGYVAHSLGGLKPWILQRAYGETIPDPPCRRAKSMEPCFHYPPKYDCRANSTVDFTSIFHHMKHCEDVSSGLRLVNVKH

SEQ ID NO: 4838 - DNA, 1419 bp, Glycine max
  misc_feature (1)..(1419): Ceres Seq. ID no. 14304495
agtaattgaaacttgtctccatgaaaatggctatcaaagttcaagagataacaaaagcactttgataccagatggggtttcagatttgctgagtgtgaaggcaaggattagagcggttgaaaaatcaatggtggaagaaatcaagaagcttgtgaaggaagacaatttaaccactaaagctaatccaggagctctgacaaaggcaacaaatgtggaagtttcaccctatgtggagaattgcaacagaaaagaagacaaggtacccaaggatgagagcacacatgatgtcaactcgtggagaacaaaaactgaaaatgggtcattgatgaaagatattccacttgatcacatctcagacaattcagcctccaaaagttgcaggagagaaaatagtggtactgatgatcagatgcttgaattatgggaaactgccgagcaagattgctttgctagttccatgattagtgaagcaatgaaacaaagttctgttccaacagaggatgttattgcataccatcagtcagatcattcaggtaaattccaaaatacctcttcagaattggatgtggaaaaggaattgggtgttgacaggcttcagttgtcgagaagtataaaagagagaactcaagatggcaagaggagaaagatactggagaggctttcttctgatgcgcagaaactgaccattctcaagacagctgtgcaagatttgaaacagaaaatggagacgaagagaagcaagaagggagtcgagactgaatatgaaacagtcaaaagacaaatagacgaagttgagggagctgttgtcaaattagtagatactaatgatcaactgacaaaggatcttgaagagagcgccccatctctaaacaggcagacttcagccgagttggaaaagagtagacacatccagagaaaaagagtaaccgagcaggcgcgaaaaggttctgaacagataggaaggttgcagtttgaggtgcagaacatccaatacactttgctgaaattggctgatgaaaagagcaaagggaagagcagattcactggaaaaacagtggtcttgcttaaggactttattcacagtggcaagagaagtagcaaaaagcgcaacaaggggttctgtggatgctcaaggccttcaactaatgaggactaagtgagaaaatttagaatcattttgttgtaagtaccttctttaattggtatgtgtctaatcttagcataataattttaattttagctgttaaagatgctgttaggctttatctgatcacagtaacttatgtcagatttgtatgttctagctttcagaggacatgtactgagcgacattttcgctaaggagttgcgctgtcatgtttgacaatgtttaagctatgaaagcacagagcagagaataaagcttttcaccctttcttc

SEQ ID NO: 4839 - protein, 384 aa, Glycine max
  misc_feature (1)..(384): Ceres Seq. ID no. 14304496
VIETCLHENGYQSSRDNKSTLIPDGVSDLLSVKARIRAVEKSMVEEIKKLVKEDNLTTKANPGALTKATNVEVSPYVENCNRKEDKVPKDESTHDVNSWRTKTENGSLMKDIPLDHISDNSASKSCRRENSGTDDQMLELWETAEQDCFASSMISEAMKQSSVPTEDVIAYHQSDHSGKFQNTSSELDVEKELGVDRLQLSRSIKERTQDGKRRKILERLSSDAQKLTILKTAVQDLKQKMETKRSKKGVETEYETVKRQIDEVEGAVVKLVDTNDQLTKDLEESAPSLNRQTSAELEKSRHIQRKRVTEQARKGSEQIGRLQFEVQNIQYTLLKLADEKSKGKSRFTGKTVVLLKDFIHSGKRSSKKRNKGFCGCSRPSTNED

SEQ ID NO: 4840 - protein, 342 aa, Glycine max
  misc_feature (1)..(342): Ceres Seq. ID no. 14304497
MVEEIKKLVKEDNLTTKANPGALTKATNVEVSPYVENCNRKEDKVPKDESTHDVNSWRTKTENGSLMKDIPLDHISDNSASKSCRRENSGTDDQMLELWETAEQDCFASSMISEAMKQSSVPTEDVIAYHQSDHSGKFQNTSSELDVEKELGVDRLQLSRSIKERTQDGKRRKILERLSSDAQKLTILKTAVQDLKQKMETKRSKKGVETEYETVKRQIDEVEGAVVKLVDTNDQLTKDLEESAPSLNRQTSAELEKSRHIQRKRVTEQARKGSEQIGRLQFEVQNIQYTLLKLADEKSKGKSRFTGKTVVLLKDFIHSGKRSSKKRNKGFCGCSRPSTNED

SEQ ID NO: 4841 - protein, 276 aa, Glycine max
  misc_feature (1)..(276): Ceres Seq. ID no. 14304498
MKDIPLDHISDNSASKSCRRENSGTDDQMLELWETAEQDCFASSMISEAMKQSSVPTEDVIAYHQSDHSGKFQNTSSELDVEKELGVDRLQLSRSIKERTQDGKRRKILERLSSDAQKLTILKTAVQDLKQKMETKRSKKGVETEYETVKRQIDEVEGAVVKLVDTNDQLTKDLEESAPSLNRQTSAELEKSRHIQRKRVTEQARKGSEQIGRLQFEVQNIQYTLLKLADEKSKGKSRFTGKTVVLLKDFIHSGKRSSKKRNKGFCGCSRPSTNED

SEQ ID NO: 4842 - DNA, 1393 bp, Glycine max
  misc_feature (1)..(1393): Ceres Seq. ID no. 14304528
gattcaacaagagctagctccgcaagataaagaaaggtcttagaatacttgcaaacacacaaacacaaaacaccctttttccaagaacaagagcaagagcctcaacctcagagctgtgataacttgttccaatgagcatgttaggcctgagagacctagttctcatagctcaaaccccttcttcccttcaccaccaacaccaaggccaacccatttcagaaaaccagactcacactcacactccaaaccttcctttgccttcttcagcagcttctctcagtgttggctttggaattttccctctcctcactgccacaccatgtgtgccacagcctcatcaaaacaatgaggttcaagagtgtggtggtggtggtgccaatagtaacactaccaccaccaattattggaacctcaagatgtgccaagaagtgaataatcctccaaagaagggtgtgatcaacgtggctgatcatgatgatgagaagggtgtgatggagagtgaggaaaacggggtctatgggcctgactttagggtgtgccaagattgtggcaacagggctaagaaagattgcgtctttagaagatgcaggacttgctgcaagggacgtgggtatgattgtaacactcacgtgaagagcacgtggatcccctccgttcgccgccgcgagcgcgagatcacggtggcttccggtggcggtgttggcggcaatggtggttgtaagaggccaagagctgtggtggggtcatctcaaaatgccacttctcatagttccaactctaatgctacaactcctaagaccttagctactagctcttttcatcaagatgctagcttcaagcagtctttaccgggtcatgttcgtgcaccagcagtgttcaagtgccatagagtctctgccattgggaatggtgaagatgagtttgcatacttggcaacggtccagattagtgggcatgtgttcaaagggtttctctatgaccatggtgttgatgggaaaaccgcaaatgtagtcccttgtgtctcggaactgcagctgggaaacaattgcagtgggaagaacagagaatgttcctctgcaattgcaattggggttgcaaataacaatgcataccctgcttctgcgagttgaagattgctttagagatggaaagatttcaccacagagaacaaattgttttagaatcccatgttgcacctcaaattattgaaagaggtagagggctatgtacccacaaggccacgacgaggactggccaaatggtgatggatcagtttcgtgaacctcaaaagaagccagttcatttgcaattttgttttctgggaaaaatgaccatatatgctaaattggtctttaattgtgtaaatttatcttccaaaaatgtttatatctac

SEQ ID NO: 4843 - protein, 332 aa, Glycine max
  misc_feature (1)..(332): Ceres Seq. ID no. 14304529
MSMLGLRDLVLIAQTPSSLHHQHQGQPISENQTHTHTPNLPLPSSAASLSVGFGIFPLLTATPCVPQPHQNNEVQECGGGGANSNTTTTNYWNLKMCQEVNNPPKKGVINVADHDDEKGVMESEENGVYGPDFRVCQDCGNRAKKDCVFRRCRTCCKGRGYDCNTHVKSTWIPSVRRREREITVASGGGVGGNGGCKRPRAVVGSSQNATSHSSNSNATTPKTLATSSFHQDASFKQSLPGHVRAPAVFKCHRVSAIGNGEDEFAYLATVQISGHVFKGFLYDHGVDGKTANVVPCVSELQLGNNCSGKNRECSSAIAIGVANNNAYPASAS

SEQ ID NO: 4844 - protein, 330 aa, Glycine max
  misc_feature (1)..(330): Ceres Seq. ID no. 14304530
MLGLRDLVLIAQTPSSLHHQHQGQPISENQTHTHTPNLPLPSSAASLSVGFGIFPLLTATPCVPQPHQNNEVQECGGGGANSNTTTTNYWNLKMCQEVNNPPKKGVINVADHDDEKGVMESEENGVYGPDFRVCQDCGNRAKKDCVFRRCRTCCKGRGYDCNTHVKSTWIPSVRRREREITVASGGGVGGNGGCKRPRAVVGSSQNATSHSSNSNATTPKTLATSSFHQDASFKQSLPGHVRAPAVFKCHRVSAIGNGEDEFAYLATVQISGHVFKGFLYDHGVDGKTANVVPCVSELQLGNNCSGKNRECSSAIAIGVANNNAYPASAS

SEQ ID NO: 4845 - protein, 237 aa, Glycine max
  misc_feature (1)..(237): Ceres Seq. ID no. 14304531
MCQEVNNPPKKGVINVADHDDEKGVMESEENGVYGPDFRVCQDCGNRAKKDCVFRRCRTCCKGRGYDCNTHVKSTWIPSVRRREREITVASGGGVGGNGGCKRPRAVVGSSQNATSHSSNSNATTPKTLATSSFHQDASFKQSLPGHVRAPAVFKCHRVSAIGNGEDEFAYLATVQISGHVFKGFLYDHGVDGKTANVVPCVSELQLGNNCSGKNRECSSAIAIGVANNNAYPASAS

SEQ ID NO: 4846 - DNA, 849 bp, Glycine max
  misc_feature (1)..(849): Ceres Seq. ID no. 14304536
atatttcaagcctcttcatagtttccatggttatctaaatataccatttgagattttgaatactatttgggtattgaatgtcacttgagaggagtgaggactaatactttttcttttgtataattgcatcaaattttgcagaatactactcaagtgagatactttgatttaactccctttgttcatggatgaaaaactcaattgaagtaattcactggactactttgtcctcttggtctgaggttgaagctatttgatttctgaatttcgctagtttcttaatctgagtatggctgggaaccaagatcagttagagatcaagtttctgttgagtgatggtacagatattggccccaaaagttatgctgctgccactagtattgcaacactgaaagaaagtgttcttgctcaatggccaaaagataaagagtatggaccaagaactgtaaaagatttgaagttaattagtgccggaaaaatattggagaacaacagaacagtgggagaatgtcagagtcccctgtgtgatctacctggtggagttataacaatgcatgtggttgtgcaaccaccttctgtggagaaagataagaaagtagcaagtgaagcgaagcagagcaaatgtgtttgtgtgatattatagtgtccaaattgaatagaagttgtcatgtatttaggtggttaaaagttacacttgtattcattttaaaagtaatctatggctttcaaaagatttcctcatacacaaattctttgggtgcatgcctcattgtctgattgatgtaaatgctgattgaaatgaactctaaaattattctcgtgcttcagcttgaaaaaaaaaaaaaaaag

SEQ ID NO: 4847 - protein, 117 aa, Glycine max
  misc_feature (1)..(117): Ceres Seq. ID no. 14304537
MAGNQDQLEIKFLLSDGTDIGPKSYAAATSIATLKESVLAQWPKDKEYGPRTVKDLKLISAGKILENNRTVGECQSPLCDLPGGVITMHVVVQPPSVEKDKKVASEAKQSKCVCVIL

SEQ ID NO: 4848 - DNA, 1326 bp, Glycine max
  misc_feature (1)..(1326): Ceres Seq. ID no. 14304623
gagggacaacacaacagagaagaaaggggccaaaaccaaaagacaaatcagaaactgaaaaggaactgcacataagcattcacaaaagcaccaaccaacgtaacgcctcaacctcaatctcttcaaactcgcgcgttcttcccccttcgcctcgcagtatatgtattgcaatcctcccaatttggttgagactccacatacgcgacaaggactgccttgtttccgtctctgcactctattctggaactttgtttgaaattaaacgatttacattaactttggtcattgatgtggcccatttgcttgctattcaacaagattctcaaggcaggggatgaaggagaattaaaaggggataatttgaatgcgatagatccgtacctgtttcagcaaccatcaattaacatagattcccatcctccctccttgcgctgttcacacttcattgaagtaccacacataaaccaaatatatacatgggattgtggccttgcttgtgtcttgatggttttgaaaactattggcgtcaacaactgtgatattcaaacactggctgaactatgctgcacaactagcatttggactgttgatttggcatatttattacagagatttgctgttgctttttcctacttcacagttacatttggggcaaacccaaactatagcattgaatcattctacaaggaggaactgcctaatgatctagtgagagtggatttgctatttcaaaaagcagtggaggctggcattgatatacagtgcaggtcaattagtgaagaagagatttctattctcatattgtctgggaaatatattgcaattgtattagttgatcacaacaaattgagtcatgttttgcaagaagatgttcccatgcctggtcttttcagcaacaaccctggctacacaggtcactatgtgttgatatgtggctatgatgctggagcagatatgtttgagattagagatcctgccagctctaagaaacataagaggatttcttcaaagtctttagaagaagctcgcaacacctttggaactgatgaggatcttctgttgatatctttggagaaaagcagtaaccatcatcaaccttttctgcaactttccaatgatgtcaataccgattcttgattttctttacctgttttgaaataattatgttgctgcttttttttttctgcatccttgtgtattttagttgctacactaggcctattatttatttatattcccagtataaacctcttaaaatggttttgtctgggctgtatgtaccgtgtaggtttactcaaaactgtatagtaaatataaattcatttc

SEQ ID NO: 4849 - protein, 282 aa, Glycine max
  misc_feature (1)..(282): Ceres Seq. ID no. 14304624
MWPICLLFNKILKAGDEGELKGDNLNAIDPYLFQQPSINIDSHPPSLRCSHFIEVPHINQIYTWDCGLACVLMVLKTIGVNNCDIQTLAELCCTTSIWTVDLAYLLQRFAVAFSYFTVTFGANPNYSIESFYKEELPNDLVRVDLLFQKAVEAGIDIQCRSISEEEISILILSGKYIAIVLVDHNKLSHVLQEDVPMPGLFSNNPGYTGHYVLICGYDAGADMFEIRDPASSKKHKRISSKSLEEARNTFGTDEDLLLISLEKSSNHHQPFLQLSNDVNTDS

SEQ ID NO: 4850 - protein, 210 aa, Glycine max
  misc_feature (1)..(210): Ceres Seq. ID no. 14304625
MVLKTIGVNNCDIQTLAELCCTTSIWTVDLAYLLQRFAVAFSYFTVTFGANPNYSIESFYKEELPNDLVRVDLLFQKAVEAGIDIQCRSISEEEISILILSGKYIAIVLVDHNKLSHVLQEDVPMPGLFSNNPGYTGHYVLICGYDAGADMFEIRDPASSKKHKRISSKSLEEARNTFGTDEDLLLISLEKSSNHHQPFLQLSNDVNTDS

SEQ ID NO: 4851 - DNA, 1195 bp, Glycine max
  misc_feature (1)..(1195): Ceres Seq. ID no. 14304689
aaagtaaaccatgaattctctatcactcttcaccttcctctgcgcaatttgtgcgcactccgtcgccgtcacctccgcggcatatccttccatccccggcacggaaaccggagagtgctccctccgcggcgtcggcgtcggcgacggtgttctggtccctccgcggcgagaagtgtacgaggaggggcgaatcttcgacatcacccacaggtatgtccccgagatgccggtgtgggactcgacggaggggctcgggcagcacttcctgtggctcgaaaagagcatgaagaatggctcgcgcgctaacaactccaacatgaagctcggtgttcacaccggcacccatgtcgacgcgcccggtcacttttacgacaattactacgacgccggcttcgatgttgactcactcgacctaacactcctcaatggccttgcacttttggttgatgttccacgggataaaaacattactgctgaggttatgaagtccttgaatatccctagaggtgtaagccgcgtgcttttcagaactttaaacactgacaggcaactcatgtttaagaaagaatttgacacaagctatgtgggattcaaggaggatggtgcaaaatggctggcagagaacaccgacatcaaacttgtaggagtcgattacttatctgttgctgcttatgatcactccattccatctcatcttgttttcctggaaagcaaggaaatcattcttgtggaaggcctaaagcttgatgatgtcccagcaggaatatattcactgaattgcttgcctcttaggttggttcactctgaggcatcaccaattcgatgcattctgatcaaatgatcaaatgatggggtcaaacctggttttcaattgcacggatgaacctgccacaagaagcaacgtagccacgaatacaattagtggtgtccataagaagcagtttgatgcaaattgcaagctaagctgatagtagtatgttgaattactcttagtttacgtccttgggttggaaagtactgaattattgtgattaaacttcagttgcggactagggggtccacctgtattaacttatgcttttaatattttcctaggcaagtacttgtgcaattctgaagacgcatgcttgtacgtctcaataattatatctatttctctttgaaaaataatgaaatactactaataatctcgggc

SEQ ID NO: 4852 - protein, 276 aa, Glycine max
  misc_feature (1)..(276): Ceres Seq. ID no. 14304690
MNSLSLFTFLCAICAHSVAVTSAAYPSIPGTETGECSLRGVGVGDGVLVPPRREVYEEGRIFDITHRYVPEMPVWDSTEGLGQHFLWLEKSMKNGSRANNSNMKLGVHTGTHVDAPGHFYDNYYDAGFDVDSLDLTLLNGLALLVDVPRDKNITAEVMKSLNIPRGVSRVLFRTLNTDRQLMFKKEFDTSYVGFKEDGAKWLAENTDIKLVGVDYLSVAAYDHSIPSHLVFLESKEIILVEGLKLDDVPAGIYSLNCLPLRLVHSEASPIRCILIK

SEQ ID NO: 4853 - protein, 205 aa, Glycine max
  misc_feature (1)..(205): Ceres Seq. ID no. 14304691
MPVWDSTEGLGQHFLWLEKSMKNGSRANNSNMKLGVHTGTHVDAPGHFYDNYYDAGFDVDSLDLTLLNGLALLVDVPRDKNITAEVMKSLNIPRGVSRVLFRTLNTDRQLMFKKEFDTSYVGFKEDGAKWLAENTDIKLVGVDYLSVAAYDHSIPSHLVFLESKEIILVEGLKLDDVPAGIYSLNCLPLRLVHSEASPIRCILIK

SEQ ID NO: 4854 - protein, 185 aa, Glycine max
  misc_feature (1)..(185): Ceres Seq. ID no. 14304692
MKNGSRANNSNMKLGVHTGTHVDAPGHFYDNYYDAGFDVDSLDLTLLNGLALLVDVPRDKNITAEVMKSLNIPRGVSRVLFRTLNTDRQLMFKKEFDTSYVGFKEDGAKWLAENTDIKLVGVDYLSVAAYDHSIPSHLVFLESKEIILVEGLKLDDVPAGIYSLNCLPLRLVHSEASPIRCILIK

SEQ ID NO: 4855 - DNA, 1246 bp, Glycine max
  misc_feature (1)..(1246): Ceres Seq. ID no. 14304708
ttgtttgccttccagatacctttcataacttaaactccctcatagttctgaatgtttctggctgctcaaaacttggttgcttaccagagggtttaaaggaaatcaagtctttggaggaacttgatgcaagtggaactgctattcaagagctaccttcatctgtcttttatttggaaaacctaaaaagtatctcatttgctgggtgcaaaaagccagtatctaactcagtaagtggatttcttctcccctttcagtgggtatttgggaatcaacaaactcctactgcatttagattaccaccttctaaactgaatctaccctctttgatgagaataaatttaagttactgcaatctatctgaagagtcattcccagatggttttcgtcacttatcttcattgcagtttctagatctcactggcaacaattttgttaccctaccaagttgcatttcgaacctcacaaagcttgaaattcttctcctaaacttgtgcaaaaaacttaaaaggttgccagagctcccttcaagaatgaaacatttggatgcaagcaattgcacttcattggaaacttccaaattcaatccatccaagccatgcagtctctttgcatcatcaccttcaaattttcatttttcgagagaattgatacgctatcttgaggaactccctcttcccagaacaagatttgagatgttaatcccagggagtgaaattccatcatggtttgtccctcaaaaatgtgtttcattagctaaaataccagtccctcataattgccctgtaaatgaatgggtgggatttgctctgtgcttcctattagtaagttatgcaaatcctcctgaggcgtgccatcatgaagttgagtgctacttgtttggacctaatggtaaggcgattatcagttccaggaatttacctcccatggagctagattgccctcacctttatattctctacttgtccattgataaataccgtgacatgatttgtgaaggtgttgtcggcagtgaaattgaatttgtattgaaaagttatggttgccaatcattggaaatagtgaggtgcggatgtcgtttggtatgtaagcaagatgttgaagatatttatgaaaatagtatcatttcttctagtgaagagatcggagtggccagtgagaaggtgcgaattatctaaaaacttgtcatgtaattacgtatgtcttgttatttgtatagaaacttctcattctccatatttgcagtttg

SEQ ID NO: 4856 - protein, 390 aa, Glycine max
  misc_feature (1)..(390): Ceres Seq. ID no. 14304709
VCLPDTFHNLNSLIVLNVSGCSKLGCLPEGLKEIKSLEELDASGTAIQELPSSVFYLENLKSISFAGCKKPVSNSVSGFLLPFQWVFGNQQTPTAFRLPPSKLNLPSLMRINLSYCNLSEESFPDGFRHLSSLQFLDLTGNNFVTLPSCISNLTKLEILLLNLCKKLKRLPELPSRMKHLDASNCTSLETSKFNPSKPCSLFASSPSNFHFSRELIRYLEELPLPRTRFEMLIPGSEIPSWFVPQKCVSLAKIPVPHNCPVNEWVGFALCFLLVSYANPPEACHHEVECYLFGPNGKAIISSRNLPPMELDCPHLYILYLSIDKYRDMICEGVVGSEIEFVLKSYGCQSLEIVRCGCRLVCKQDVEDIYENSIISSSEEIGVASEKVRII

SEQ ID NO: 4857 - protein, 282 aa, Glycine max
  misc_feature (1)..(282): Ceres Seq. ID no. 14304710
MRINLSYCNLSEESFPDGFRHLSSLQFLDLTGNNFVTLPSCISNLTKLEILLLNLCKKLKRLPELPSRMKHLDASNCTSLETSKFNPSKPCSLFASSPSNFHFSRELIRYLEELPLPRTRFEMLIPGSEIPSWFVPQKCVSLAKIPVPHNCPVNEWVGFALCFLLVSYANPPEACHHEVECYLFGPNGKAIISSRNLPPMELDCPHLYILYLSIDKYRDMICEGVVGSEIEFVLKSYGCQSLEIVRCGCRLVCKQDVEDIYENSIISSSEEIGVASEKVRII

SEQ ID NO: 4858 - protein, 214 aa, Glycine max
  misc_feature (1)..(214): Ceres Seq. ID no. 14304711
MKHLDASNCTSLETSKFNPSKPCSLFASSPSNFHFSRELIRYLEELPLPRTRFEMLIPGSEIPSWFVPQKCVSLAKIPVPHNCPVNEWVGFALCFLLVSYANPPEACHHEVECYLFGPNGKAIISSRNLPPMELDCPHLYILYLSIDKYRDMICEGVVGSEIEFVLKSYGCQSLEIVRCGCRLVCKQDVEDIYENSIISSSEEIGVASEKVRII

SEQ ID NO: 4859 - DNA, 1363 bp, Glycine max
  misc_feature (1)..(1363): Ceres Seq. ID no. 14304724
tcagatatgtaggccccccccccggtgatgaagaaaagttctggtacctcccagaaacttggttcatttctaagtccaggggcaccaaactatagagagaaaagcattgggagccaaaaggggtggagctcagagagggtgttgctgcagccatcatcaaacagcataaggaatgctagtgtggctaacttgacacccttcaacagtggaagaacaataccttcaaaatgggatgatgctgagaggtggatttgtagccccgtttcaggctatgccaacaacaaaaccaattcctatacacaacttcagcagcggcgaccaaaatcgaaaagtggtccaattatgcctccaggaacaggctactactccaattactcacccacaattccactgagccaaggtttggtagtgaagaacttcatgatgggtggttctcccttttcaactggggtgttggcaccggatgctatctctcttcaccattattatgcacatgaggctgtttttggtacccgttatgactttgacaatagtatgcaatgcttcagtccattcctcaatgaaaatagtgtagctctcccatcagtgtctagtgcacccatgtggtcagaactgctatgtgacccttcgcctaattctcaagacgagaaacgaaacgaaattaagaatgaggacaccgtgacatctcctctctcaaaatgtgacaaaggcactcaaatgagccctcctgagcctgagaatgatgcacccacttcgacaatggatcaacaaaataacctttctgcaaagttagaggtcagagatgtagagatagacagcgaggctagtattattaggtggtctaagagccatgtacccaagctgagcttgctacctggtaaacactcaagaaaaattagtagaacggaaaccaaagcttcaggtttggataatgcagagtcgacgttggactcatccaagattcagagggaggaagccaaaatcgttgcatgggagagtttgcagaaagccaaggctgaagctgaaatacgaaaactagagatgaaattagaaaagaagaaatcgtcatcaatggataagattcaaagcaaactgagaagggcgcagatggaggctgaaaagatgagaaaccaaataactgtagaagaggagggtcagcaggtttccaagactcgaaaagtattttcattccacaaatatgcccagatatggtttccaaggagctgcttcggcactcatgctctccatgattaattcattatttaatatttaatcccatatctgaaatcactaaggtttagtcccgataaacgcatcgataatcatatttcaagtcataggtcatttttattttttatttttg

SEQ ID NO: 4860 - protein, 408 aa, Glycine max
  misc_feature (1)..(408): Ceres Seq. ID no. 14304725
MKKSSGTSQKLGSFLSPGAPNYREKSIGSQKGWSSERVLLQPSSNSIRNASVANLTPFNSGRTIPSKWDDAERWICSPVSGYANNKTNSYTQLQQRRPKSKSGPIMPPGTGYYSNYSPTIPLSQGLVVKNFMMGGSPFSTGVLAPDAISLHHYYAHEAVFGTRYDFDNSMQCFSPFLNENSVALPSVSSAPMWSELLCDPSPNSQDEKRNEIKNEDTVTSPLSKCDKGTQMSPPEPENDAPTSTMDQQNNLSAKLEVRDVEIDSEASIIRWSKSHVPKLSLLPGKHSRKISRTETKASGLDNAESTLDSSKIQREEAKIVAWESLQKAKAEAEIRKLEMKLEKKKSSSMDKIQSKLRRAQMEAEKMRNQITVEEEGQQVSKTRKVFSFHKYAQIWFPRSCFGTHALHD

SEQ ID NO: 4861 - protein, 303 aa, Glycine max
  misc_feature (1)..(303): Ceres Seq. ID no. 14304726
MPPGTGYYSNYSPTIPLSQGLVVKNFMMGGSPFSTGVLAPDAISLHHYYAHEAVFGTRYDFDNSMQCFSPFLNENSVALPSVSSAPMWSELLCDPSPNSQDEKRNEIKNEDTVTSPLSKCDKGTQMSPPEPENDAPTSTMDQQNNLSAKLEVRDVEIDSEASIIRWSKSHVPKLSLLPGKHSRKISRTETKASGLDNAESTLDSSKIQREEAKIVAWESLQKAKAEAEIRKLEMKLEKKKSSSMDKIQSKLRRAQMEAEKMRNQITVEEEGQQVSKTRKVFSFHKYAQIWFPRSCFGTHALHD

SEQ ID NO: 4862 - protein, 277 aa, Glycine max
  misc_feature (1)..(277): Ceres Seq. ID no. 14304727
MMGGSPFSTGVLAPDAISLHHYYAHEAVFGTRYDFDNSMQCFSPFLNENSVALPSVSSAPMWSELLCDPSPNSQDEKRNEIKNEDTVTSPLSKCDKGTQMSPPEPENDAPTSTMDQQNNLSAKLEVRDVEIDSEASIIRWSKSHVPKLSLLPGKHSRKISRTETKASGLDNAESTLDSSKIQREEAKIVAWESLQKAKAEAEIRKLEMKLEKKKSSSMDKIQSKLRRAQMEAEKMRNQITVEEEGQQVSKTRKVFSFHKYAQIWFPRSCFGTHALHD

SEQ ID NO: 4863 - DNA, 1538 bp, Glycine max
  misc_feature (1)..(1538): Ceres Seq. ID no. 14304760
gtcgaaagagaatagcaaaaagcacagaacaatccgaaaatggcggaacgcgaaacctccgaatccgaggacccctcgagttcagggtcggagtacgaggatgcacaaacggtagagggcaatggtgtgaagaagaagaagggtttgtcggagtacgagaaacagaggatgccgagaattgccgagaacagagccaggttggaggctctgggtttgccccaaatcgcttcctcgttaaagggttcttcgcagcctcataaagccacgaagggcaaagagaagaagaataaggttaacgatgacgatgatgaagaatatgaacccgaagaagacgagggagaacaagtatcgggttcttcaagtgaagaaaatgaggaccgtaaagacgaggactttgcaattgaaaacgcttcagggtcacggaaaagaaaggtgaagaacaaaagtttgaaaaagaaagccagagtttctgggaagaaacatgttagtaattcagagtacattgattacgatgatgatgaagctcttaggcaggcaattgctctttccttgcaagactctgcagaaggttcttatttgcctgacaagaatgtagtgaacaccagcaagaccgagaaaaagggaagcggtcatgttcaagaagataagggaagaaagaagaacaaaaaatcgtttgctagtcggctgcaactgactgaggatgagctcattgtacacttcttccagctagatgaagcaggaaaaggaactataagtgtaagggatatacaaagggcagctacagctcatgattttttatggacagacaaagagttagttgatatgattcgctacttcgatagtgatggagatggaaaggtaaggatcagaaggtctttctgattctgtttttctggcaggaggtcaggaagaaaacctataggctttttatgactttcaatttgaattttggcggataattgctaaaaccttttgaactatagaatgtattctttaggattcttagttcttacactagtccaaatatgttttgttgattgcaagtacttactgagcagtttaacctctttcactttattcatatttttcagtataacttcaaggtcagaaagcatagttctttcttacatcttttgagaaatatgaaaattggtgaatttgaccccttagcatcaaaattgtggaaaattaccatgaaaaattttgtgcactatgtttgattattgttgttgttattattattgttaaaaataattggctctgttgcagataagccttgatgatttctggaagattgttgttcgttgcaacttgattaaagggtcttgaaaatcttgatagaatcatggttagccagagatgatagcacattggaagatattacaaggactgttaaatatatatatatatatatatatatatatatatatatatatatatatatatatatatatatatatatatatatttcatggagtgacacagatttagtattccttgtatcccattatcactatatataacttatattgtactgt

SEQ ID NO: 4864 - protein, 280 aa, Glycine max
  misc_feature (1)..(280): Ceres Seq. ID no. 14304761
MAERETSESEDPSSSGSEYEDAQTVEGNGVKKKKGLSEYEKQRMPRIAENRARLEALGLPQIASSLKGSSQPHKATKGKEKKNKVNDDDDEEYEPEEDEGEQVSGSSSEENEDRKDEDFAIENASGSRKRKVKNKSLKKKARVSGKKHVSNSEYIDYDDDEALRQAIALSLQDSAEGSYLPDKNVVNTSKTEKKGSGHVQEDKGRKKNKKSFASRLQLTEDELIVHFFQLDEAGKGTISVRDIQRAATAHDFLWTDKELVDMIRYFDSDGDGKVRIRRSF

SEQ ID NO: 4865 - protein, 237 aa, Glycine max
  misc_feature (1)..(237): Ceres Seq. ID no. 14304762
MPRIAENRARLEALGLPQIASSLKGSSQPHKATKGKEKKNKVNDDDDEEYEPEEDEGEQVSGSSSEENEDRKDEDFAIENASGSRKRKVKNKSLKKKARVSGKKHVSNSEYIDYDDDEALRQAIALSLQDSAEGSYLPDKNVVNTSKTEKKGSGHVQEDKGRKKNKKSFASRLQLTEDELIVHFFQLDEAGKGTISVRDIQRAATAHDFLWTDKELVDMIRYFDSDGDGKVRIRRSF

SEQ ID NO: 4866 - DNA, 1398 bp, Glycine max
  misc_feature (1)..(1398): Ceres Seq. ID no. 14304815
agtcattctcatctgttgatgaaacagcttttgattctcagaaaagttttggatcgatagaggaaatgatattttccatgtctgggtctcgtaattcatcaatattggacccaatgttatatactaaggctatgcatgctagagtttcctttggagtagatggtccccttggcaaggtaaaatattctgtgacttgttactacgccaagcgatttgaagccttaagaagggtctgttgtccttcagagctcgactatataaggtctctgagtcgctgtaagaaatggggagctcaaggtgggaaaagtaatgtattctttgcaaaaactttggatgatcgatttatcatcaaacaagttaccaaaacagagcttgagtcattcattaaatttggtcctgaatacttcaagtacctttctgaatccataggcaccggaagtccaacttgcctggcaaagattcttggcatataccaggttacatcaaagcatcttaaaggagggaaggaatcaaggatggatgttttggttatggagaatcttctgtttaggaggactgtgacccgactttatgatcttaaaggatcttccaggtctcggtataatgcagatagtaccgggaaaaacaaagttctactggaccagaacttaattgaagcaatgccaacttctcctattttcgtgggaaacaaagctaaacgattgttagagagagctgtctggaatgacactggttttcttgcttcagttgatgtgatggactattctttactggttggagtggatgaagaaaagcatgagttggttattggaatcattgatttcatgaggcagtatacttgggacaagcatcttgaaacatgggtaaaagcttcaggtatccttggaggaccaaagaacacacctccaacagtaatatctcccaaacaatacaagaaaaggttcaggaaagcaatgaccacttactttctcatgcttccagatcagtggtctcccccttctattattcctagtcattctcagtctgattttggtgaagacagcacacaacctaggactccagctgaatgattctttgttttgtgtttctgtaaattttactttcaatttggggaattaactcccccaaattttatattaacttcttttttgtttttccctcttaaatgatataggaattcttttggttcatttgtaattttgtcaactagatattatcaattatttgttagaagatgccaaagaagggctgctagcactttagcagccaaggatgtttgtctggggtaaaagtatttgatgacctctggatgaaatctttgtacaaaaacctacagtaacgttctaggaacacgttctatacatgtatatgacttaaatttctcaaatttctttgccg

SEQ ID NO: 4867 - protein, 355 aa, Glycine max
  misc_feature (1)..(355): Ceres Seq. ID no. 14304816
SFSSVDETAFDSQKSFGSIEEMIFSMSGSRNSSILDPMLYTKAMHARVSFGVDGPLGKVKYSVTCYYAKRFEALRRVCCPSELDYIRSLSRCKKWGAQGGKSNVFFAKTLDDRFIIKQVTKTELESFIKFGPEYFKYLSESIGTGSPTCLAKILGIYQVTSKHLKGGKESRMDVLVMENLLFRRTVTRLYDLKGSSRSRYNADSTGKNKVLLDQNLIEAMPTSPIFVGNKAKRLLERAVWNDTGFLASVDVMDYSLLVGVDEEKHELVIGIIDFMRQYTWDKHLETWVKASGILGGPKNTPPTVISPKQYKKRFRKAMTTYFLMLPDQWSPPSIIPSHSQSDFGEDSTQPRTPAE

SEQ ID NO: 4868 - protein, 334 aa, Glycine max
  misc_feature (1)..(334): Ceres Seq. ID no. 14304817
MIFSMSGSRNSSILDPMLYTKAMHARVSFGVDGPLGKVKYSVTCYYAKRFEALRRVCCPSELDYIRSLSRCKKWGAQGGKSNVFFAKTLDDRFIIKQVTKTELESFIKFGPEYFKYLSESIGTGSPTCLAKILGIYQVTSKHLKGGKESRMDVLVMENLLFRRTVTRLYDLKGSSRSRYNADSTGKNKVLLDQNLIEAMPTSPIFVGNKAKRLLERAVWNDTGFLASVDVMDYSLLVGVDEEKHELVIGIIDFMRQYTWDKHLETWVKASGILGGPKNTPPTVISPKQYKKRFRKAMTTYFLMLPDQWSPPSIIPSHSQSDFGEDSTQPRTPAE

SEQ ID NO: 4869 - protein, 330 aa, Glycine max
  misc_feature (1)..(330): Ceres Seq. ID no. 14304818
MSGSRNSSILDPMLYTKAMHARVSFGVDGPLGKVKYSVTCYYAKRFEALRRVCCPSELDYIRSLSRCKKWGAQGGKSNVFFAKTLDDRFIIKQVTKTELESFIKFGPEYFKYLSESIGTGSPTCLAKILGIYQVTSKHLKGGKESRMDVLVMENLLFRRTVTRLYDLKGSSRSRYNADSTGKNKVLLDQNLIEAMPTSPIFVGNKAKRLLERAVWNDTGFLASVDVMDYSLLVGVDEEKHELVIGIIDFMRQYTWDKHLETWVKASGILGGPKNTPPTVISPKQYKKRFRKAMTTYFLMLPDQWSPPSIIPSHSQSDFGEDSTQPRTPAE

SEQ ID NO: 4870 - DNA, 1448 bp, Glycine max
  misc_feature (1)..(1448): Ceres Seq. ID no. 14304859
attgacaacgactcctttagaagacagaaaattcttgaagagtgaaatgaccaatgatgcaaatttatcccgagttaagcctttggcatctgaaatccctcacaaagattatgcggatagatttgatagaaaaatctcgcaagtcggagaaatcaagtatcatgaagaaccagatgaggaacttgtcagacattacaagcgtcttccaaatagtatccttacagagcaatctcttaaagatatgctttctgattccctcacttcactgaatctagctaacctcaagtgggtgaaaaacgaacatttgaataagcttggttttgttgctccaaacttagtggagcttaatatttcaggtaccgttgctaatgacaccacccttgaagaaattggcaagacatgcttgaatcttaagtcaattgacatttctcattgtccggagcttactgagaaaggagtccgagcatttttcgagaactgtccccctattcaaaaattctgggcatcaacttgtcccaattctgtaacagatgagtcattggcctatttcacaaatgctgaagaattaactacattcaatatcgaattttgttctaaggtcagtgacgtatccctccaggtcattgtcgaagctgctcctccactcaaagagttatacgtttcaggctgtactaaaattaccggaaagattgtaaccgctttaatacagataggaaattaccaattagaaattgccgaaatctcaaacttaagccaagctgagtttgataacgagaccatgaaagcggtcggaacatgttcaaagttaagaagattaaacatttcaggggatagtaatattggagatgaaggtgtacacaacttgatctcaggatataaggaagcagatgattcattggtgaagaaagatgaagggttcaagcacttagttgagtttagaatgagttcaaccaagatcaattctgaaggcgctgtgataaaattctgcaatgcttgtccaaacttggagatcttggacatgaatggttttgtgcctgtaggagagactggaataaatatgatctgcaaatcattatctaagcttaagatctgcttgataaactttacggataagatatcagatccttacctagttgagcttcgtcagacttatcctgatgtgaagtttgtccgcacaataattgcgcctagtaatccagctgataatgaattgagagtgccattcccaaggattcaacaaggaaagaagaaaaagaagaagggtaagaagaagaagtaaaaaggcatagtttagcagttgatattgtaataatataaatatttctatattaaagagctttttttttgttgctgcctcagaacctttattttagtttatttttgctgatatatgacttaatttaaggagatatattccatatatactaaaaacactcttagcttaattc

SEQ ID NO: 4871 - protein, 425 aa, Glycine max
  misc_feature (1)..(425): Ceres Seq. ID no. 14304860
LTTTPLEDRKFLKSEMTNDANLSRVKPLASEIPHKDYADRFDRKISQVGEIKYHEEPDEELVRHYKRLPNSILTEQSLKDMLSDSLTSLNLANLKWVKNEHLNKLGFVAPNLVELNISGTVANDTTLEEIGKTCLNLKSIDISHCPELTEKGVRAFFENCPPIQKFWASTCPNSVTDESLAYFTNAEELTTFNIEFCSKVSDVSLQVIVEAAPPLKELYVSGCTKITGKIVTALIQIGNYQLEIAEISNLSQAEFDNETMKAVGTCSKLRRLNISGDSNIGDEGVHNLISGYKEADDSLVKKDEGFKHLVEFRMSSTKINSEGAVIKFCNACPNLEILDMNGFVPVGETGINMICKSLSKLKICLINFTDKISDPYLVELRQTYPDVKFVRTIIAPSNPADNELRVPFPRIQQGKKKKKKGKKKK

SEQ ID NO: 4872 - protein, 410 aa, Glycine max
  misc_feature (1)..(410): Ceres Seq. ID no. 14304861
MTNDANLSRVKPLASEIPHKDYADRFDRKISQVGEIKYHEEPDEELVRHYKRLPNSILTEQSLKDMLSDSLTSLNLANLKWVKNEHLNKLGFVAPNLVELNISGTVANDTTLEEIGKTCLNLKSIDISHCPELTEKGVRAFFENCPPIQKFWASTCPNSVTDESLAYFTNAEELTTFNIEFCSKVSDVSLQVIVEAAPPLKELYVSGCTKITGKIVTALIQIGNYQLEIAEISNLSQAEFDNETMKAVGTCSKLRRLNISGDSNIGDEGVHNLISGYKEADDSLVKKDEGFKHLVEFRMSSTKINSEGAVIKFCNACPNLEILDMNGFVPVGETGINMICKSLSKLKICLINFTDKISDPYLVELRQTYPDVKFVRTIIAPSNPADNELRVPFPRIQQGKKKKKKGKKKK

SEQ ID NO: 4873 - protein, 345 aa, Glycine max
  misc_feature (1)..(345): Ceres Seq. ID no. 14304862
MLSDSLTSLNLANLKWVKNEHLNKLGFVAPNLVELNISGTVANDTTLEEIGKTCLNLKSIDISHCPELTEKGVRAFFENCPPIQKFWASTCPNSVTDESLAYFTNAEELTTFNIEFCSKVSDVSLQVIVEAAPPLKELYVSGCTKITGKIVTALIQIGNYQLEIAEISNLSQAEFDNETMKAVGTCSKLRRLNISGDSNIGDEGVHNLISGYKEADDSLVKKDEGFKHLVEFRMSSTKINSEGAVIKFCNACPNLEILDMNGFVPVGETGINMICKSLSKLKICLINFTDKISDPYLVELRQTYPDVKFVRTIIAPSNPADNELRVPFPRIQQGKKKKKKGKKKK

SEQ ID NO: 4874 - DNA, 1277 bp, Glycine max
  misc_feature (1)..(1277): Ceres Seq. ID no. 14304863
gaaaaatcgcaatatcttcaactctatctgcaacagccaactttctcgttcgtcgatcacaaaaatggcggcgaaacttcaaatatttacgggattgccccccgcgccatttcaatcttcctcctccactctctgcgtactcaagaagcctctcactacctccttcttcggcactgcacgagtggaagttctgaaacttcgagtgatgaggattgcgaagcctgcgcgcggtggaggtgctctcggtgctcgcatgaacctctttgacaggttcgccagagttgtgaagtcgtacgcaaacgctgtcttaagctcgtttgaagatccggagaaaatattggagcaagctgtgcttgaaatgaacgacgacttgaccaaaatgcgtcaagctactgcacaagtgttggcatctcaaaagcggttggaaaataaatacaaggctgcacaacaagcttctgaagagtggtaccggaaagcacaacttgctcttcagaaaggtgaagaggatcttgctcgtgaagcacttaagaggcgtaaatcttatgcggataatgccagttctttgaaagctcaacttgatcaacaaaagactgttgttgagaatcttgtctctaatacaaggcttttggagagtaagatacaagaggcaaggtcgaaaaaagatactctcaaagcaagagctcaatcggcaaagactgcaaccaaggtgagtgagatgctgggaaatgtcaatacaagtagtgctctttcagcttttgaaaagatggaagagaaagtgttgacaatggagtcccaagctgaagctcttggccagttgacaagtgatgatcttgaaggaaagtttgctttgcttgagggctcgtccgttgatgacgaccttgcgaatttgaaaaaagaattatctggtgcctcaaagaaaggggaccttcctcctggaagaagtaccaccagcgccaacactgggattccatttcgagatgctgagatcgagttggaacttgatcaattgaggcaaagagcaaaggaattttgaagcatggattcttttttgtttcttcatatcaaatcttcaatttagtttctttatttctgatatcaacgttgtacagctaaaggccaatcacgatattgttcgactactggccaaaaattgattagaaaaatgaactgattagctgcatgctcttgtagctcatgttatatgttaattaccttaagtgtgatgatattgtaatatataatttgtaccatcagaagtcttttttattcctattaag

SEQ ID NO: 4875 - protein, 343 aa, Glycine max
  misc_feature (1)..(343): Ceres Seq. ID no. 14304864
KNRNIFNSICNSQLSRSSITKMAAKLQIFTGLPPAPFQSSSSTLCVLKKPLTTSFFGTARVEVLKLRVMRIAKPARGGGALGARMNLFDRFARVVKSYANAVLSSFEDPEKILEQAVLEMNDDLTKMRQATAQVLASQKRLENKYKAAQQASEEWYRKAQLALQKGEEDLAREALKRRKSYADNASSLKAQLDQQKTVVENLVSNTRLLESKIQEARSKKDTLKARAQSAKTATKVSEMLGNVNTSSALSAFEKMEEKVLTMESQAEALGQLTSDDLEGKFALLEGSSVDDDLANLKKELSGASKKGDLPPGRSTTSANTGIPFRDAEIELELDQLRQRAKEF

SEQ ID NO: 4876 - protein, 322 aa, Glycine max
  misc_feature (1)..(322): Ceres Seq. ID no. 14304865
MAAKLQIFTGLPPAPFQSSSSTLCVLKKPLTTSFFGTARVEVLKLRVMRIAKPARGGGALGARMNLFDRFARVVKSYANAVLSSFEDPEKILEQAVLEMNDDLTKMRQATAQVLASQKRLENKYKAAQQASEEWYRKAQLALQKGEEDLAREALKRRKSYADNASSLKAQLDQQKTVVENLVSNTRLLESKIQEARSKKDTLKARAQSAKTATKVSEMLGNVNTSSALSAFEKMEEKVLTMESQAEALGQLTSDDLEGKFALLEGSSVDDDLANLKKELSGASKKGDLPPGRSTTSANTGIPFRDAEIELELDQLRQRAKEF

SEQ ID NO: 4877 - protein, 275 aa, Glycine max
  misc_feature (1)..(275): Ceres Seq. ID no. 14304866
MRIAKPARGGGALGARMNLFDRFARVVKSYANAVLSSFEDPEKILEQAVLEMNDDLTKMRQATAQVLASQKRLENKYKAAQQASEEWYRKAQLALQKGEEDLAREALKRRKSYADNASSLKAQLDQQKTVVENLVSNTRLLESKIQEARSKKDTLKARAQSAKTATKVSEMLGNVNTSSALSAFEKMEEKVLTMESQAEALGQLTSDDLEGKFALLEGSSVDDDLANLKKELSGASKKGDLPPGRSTTSANTGIPFRDAEIELELDQLRQRAKEF

SEQ ID NO: 4878 - DNA, 1813 bp, Glycine max
  misc_feature (1)..(1813): Ceres Seq. ID no. 14304867
gtgattctgaaaatctgaaatttcatttctctctgtataaatatcctagtccttatcagcttcactatttcgattgaaatcgccgaagaaggtattgacgtcgatgatgaaaatgaaattggtgaaaacattactgcttctcctttgtgtgaaactcttctgttatgcagtgattggtgctcctcaaacttgtcctgctaacaatgaggataaatgcggcgattcagatgaatggaaaggggagtttttccctgacattcccaaaattaaatatgagggtccgtcaagtaagaatgtgctttcatttaaatggtataatgcagaggaggaaattcttgggaagaagatgaaggattggttaagatttagtgttgcattttggcatacattccgtggaacaggtgctgacccatttggtgcacctaccaaatactggctatgggaagatggtaccaattcattaaacatggctaaaagacgaatgagagctaactttgagttcataagcaaactcggtgttgacttttggtgtttccacgacagggatatagcccctgatggaaaaactcttgaggaatctaatgcaaacttggatgaagtggttgcccttgctcaagagctccagactaaggctaaaaaaagagtgttatggggaacagctcagttgttcatgcatcctcgttacatgcatggtgctgctactagctctgaattaaaggtctatgcatatgctgctgctcaagtgaagaaagccatagaggtgacacattatttggggggagaaaattatgttttctggggtggtcgtgaaggttatcaatctcttttgaacacagatatggagcgagagcttaatcatttggctaggttttttgaagctgctgttgcatacaaaaagaagattggattcaatgggacatttctaatcgaaccaaagccacaagaacctacaaaacaccagtatgattgggatgctgcaacctcagctaatttcttgcgaaaatatggacttacaggggaattcaaactcaacatagagtgcaaccatgccaccctctctggccacagttgtcatcatgagctcgaaactgcaaggatcaatggattgctgggtaatattgatgcaaacactggtgatcctcaagttggttgggacactgatcagtttcttgtagatattcaagaggcgacactgattatgctcagtgtgatcagaaatggaggacttgcacccggtggattcaacttcgatgcgaaattgcggagagagagcacagatgttgaagacttgttcatagcccacattgttggaatggataccctggcccgtggcctgaggaatgctgccaagttgattgaggatggttctcttgctgagcttgttcgtaagcgttatcagagttttgacactgaaattggggctcaaatagaggctggtaaggctgactttgaactgcttgagaagaaggtcaaggaatggggagaaccaaaggttgcttctgcgaaacaggagctagccgagatgatcctccaatctgttctgtagaaagtagaatctagccgtgtgtggtggctatttttcgtctattatattaggaacaattcggtataattaggtttactaataaaaggaaattaagattgacttatgcctgcttcgttttccttgggaaaatataagtgtgaagctgttatctgctaggtggatacgaagcctggtgaagtgcatgttagcttatgtataaaactacgtgatgcatagcttccctggctttgagcatgcttgagttaattaattttagtttcactccgc

SEQ ID NO: 4879 - protein, 480 aa, Glycine max
  misc_feature (1)..(480): Ceres Seq. ID no. 14304868
MMKMKLVKTLLLLLCVKLFCYAVIGAPQTCPANNEDKCGDSDEWKGEFFPDIPKIKYEGPSSKNVLSFKWYNAEEEILGKKMKDWLRFSVAFWHTFRGTGADPFGAPTKYWLWEDGTNSLNMAKRRMRANFEFISKLGVDFWCFHDRDIAPDGKTLEESNANLDEVVALAQELQTKAKKRVLWGTAQLFMHPRYMHGAATSSELKVYAYAAAQVKKAIEVTHYLGGENYVFWGGREGYQSLLNTDMERELNHLARFFEAAVAYKKKIGFNGTFLIEPKPQEPTKHQYDWDAATSANFLRKYGLTGEFKLNIECNHATLSGHSCHHELETARINGLLGNIDANTGDPQVGWDTDQFLVDIQEATLIMLSVIRNGGLAPGGFNFDAKLRRESTDVEDLFIAHIVGMDTLARGLRNAAKLIEDGSLAELVRKRYQSFDTEIGAQIEAGKADFELLEKKVKEWGEPKVASAKQELAEMILQSVL

SEQ ID NO: 4880 - protein, 479 aa, Glycine max
  misc_feature (1)..(479): Ceres Seq. ID no. 14304869
MKMKLVKTLLLLLCVKLFCYAVIGAPQTCPANNEDKCGDSDEWKGEFFPDIPKIKYEGPSSKNVLSFKWYNAEEEILGKKMKDWLRFSVAFWHTFRGTGADPFGAPTKYWLWEDGTNSLNMAKRRMRANFEFISKLGVDFWCFHDRDIAPDGKTLEESNANLDEVVALAQELQTKAKKRVLWGTAQLFMHPRYMHGAATSSELKVYAYAAAQVKKAIEVTHYLGGENYVFWGGREGYQSLLNTDMERELNHLARFFEAAVAYKKKIGFNGTFLIEPKPQEPTKHQYDWDAATSANFLRKYGLTGEFKLNIECNHATLSGHSCHHELETARINGLLGNIDANTGDPQVGWDTDQFLVDIQEATLIMLSVIRNGGLAPGGFNFDAKLRRESTDVEDLFIAHIVGMDTLARGLRNAAKLIEDGSLAELVRKRYQSFDTEIGAQIEAGKADFELLEKKVKEWGEPKVASAKQELAEMILQSVL

SEQ ID NO: 4881 - protein, 477 aa, Glycine max
  misc_feature (1)..(477): Ceres Seq. ID no. 14304870
MKLVKTLLLLLCVKLFCYAVIGAPQTCPANNEDKCGDSDEWKGEFFPDIPKIKYEGPSSKNVLSFKWYNAEEEILGKKMKDWLRFSVAFWHTFRGTGADPFGAPTKYWLWEDGTNSLNMAKRRMRANFEFISKLGVDFWCFHDRDIAPDGKTLEESNANLDEVVALAQELQTKAKKRVLWGTAQLFMHPRYMHGAATSSELKVYAYAAAQVKKAIEVTHYLGGENYVFWGGREGYQSLLNTDMERELNHLARFFEAAVAYKKKIGFNGTFLIEPKPQEPTKHQYDWDAATSANFLRKYGLTGEFKLNIECNHATLSGHSCHHELETARINGLLGNIDANTGDPQVGWDTDQFLVDIQEATLIMLSVIRNGGLAPGGFNFDAKLRRESTDVEDLFIAHIVGMDTLARGLRNAAKLIEDGSLAELVRKRYQSFDTEIGAQIEAGKADFELLEKKVKEWGEPKVASAKQELAEMILQSVL

SEQ ID NO: 4882 - DNA, 1748 bp, Glycine max
  misc_feature (1)..(1748): Ceres Seq. ID no. 14304910
aataaaaaaacaaagcacacgctccacattggcatcgacttaatgcgtggtttccctcgccggagatcggtggaaaaccggtcatcttcccggcggagaccctccatcttctacggcgccggcaattcggaatctatggacgccgacgacttcgccgacgtctttggtggcccaccgcgaactctccttgcgcacaaattctcgagctctggttctttttacgaggaagttttccgaccaccagagttcacgttcccggcacctaaggatggccggagcttgccggtgttcaggattccggcgaggaatgagggattttacagcgacatattcaggtcggacgatgaccggagatcgagagagcggtcaaggtcactgtcgaaagagaattcgtcgtcggcgatgagttcggaggagttaagccctcgccggccggcgattggagatgacgtggcactttctggttttgcttcaaagctaaggccaatcaatattccatggagatggaatccatccactgtgatgcctgaggctgaggaatacacaagtaaacttggggtgcccctttttgcatgcaaggatcagtcatttgaaattcagcatcaggacaatgaatacaaggagaacttcagaagcccccatttaggatcctcaagaagagcctcatccccagaaaccattagtcttgaatccaattcatatcaaagcaccaaagtgttcactgatgactgggagctcaattccccattttctgtcgtctcttcgctttatcaagaacctgaggcaaaattttctgtgcatgatcgtgtgctttcagaccaaattatagaagatgatgatgacgacgacgacgacgatattatgagctcctatgtcattgaactcaactccaacctcagaagggaagagtgtggagaatcagccattgatgaagcaattgcatgggccaaagagaagtttcaatcgcaaagctctgatgaagaatcaagcataagaaacgatggcaaagagcaaactgttggaataggaggctctgatgcaagtgaataccatgacaatggaattggaatagttcaaactcaggagaagcaacagacagaaacagagaagttagacagagatataagattgtggtcatctggcaaggaaacagatattaggctactactttcaacattacatcatattctaaggcctgagagtggctggtatgctattcctcctaagagtctattagaaagctcacaggtgaagaaggcttatcagaaagcaaggttatgcctgcacccagacaaactgcagcaaagaggagcaacactccttcagaagtatgtagcagagaaggctttctcaattcttcaggatgcatgggctgcattcatttccatagatgtttccttctagccagtggatgactctaatcttgataactcagttttgtcttgagatttgtggacaaacaccaagcttgacattcgaaatgtcgggagtgtttgttgttgacaagcagcatatatagctaaatacatgaaacttgaacacatcagctcttttgtacaaatagtttactgatggatctgctgttctatttatgtttgtatcataacttcataagctgtttgttgcttaggtaggtattgtttctgatgtagttaacagaaggtaatttgattggccttagtatttgatttgtatatgatatgaaatggaaacaagagttagtttgtatgtgattcatatggaaaccc

SEQ ID NO: 4883 - protein, 467 aa, Glycine max
  misc_feature (1)..(467): Ceres Seq. ID no. 14304911
NKKTKHTLHIGIDLMRGFPRRRSVENRSSSRRRPSIFYGAGNSESMDADDFADVFGGPPRTLLAHKFSSSGSFYEEVFRPPEFTFPAPKDGRSLPVFRIPARNEGFYSDIFRSDDDRRSRERSRSLSKENSSSAMSSEELSPRRPAIGDDVALSGFASKLRPINIPWRWNPSTVMPEAEEYTSKLGVPLFACKDQSFEIQHQDNEYKENFRSPHLGSSRRASSPETISLESNSYQSTKVFTDDWELNSPFSVVSSLYQEPEAKFSVHDRVLSDQIIEDDDDDDDDDIMSSYVIELNSNLRREECGESAIDEAIAWAKEKFQSQSSDEESSIRNDGKEQTVGIGGSDASEYHDNGIGIVQTQEKQQTETEKLDRDIRLWSSGKETDIRLLLSTLHHILRPESGWYAIPPKSLLESSQVKKAYQKARLCLHPDKLQQRGATLLQKYVAEKAFSILQDAWAAFISIDVSF

SEQ ID NO: 4884 - protein, 453 aa, Glycine max
  misc_feature (1)..(453): Ceres Seq. ID no. 14304912
MRGFPRRRSVENRSSSRRRPSIFYGAGNSESMDADDFADVFGGPPRTLLAHKFSSSGSFYEEVFRPPEFTFPAPKDGRSLPVFRIPARNEGFYSDIFRSDDDRRSRERSRSLSKENSSSAMSSEELSPRRPAIGDDVALSGFASKLRPINIPWRWNPSTVMPEAEEYTSKLGVPLFACKDQSFEIQHQDNEYKENFRSPHLGSSRRASSPETISLESNSYQSTKVFTDDWELNSPFSVVSSLYQEPEAKFSVHDRVLSDQIIEDDDDDDDDDIMSSYVIELNSNLRREECGESAIDEAIAWAKEKFQSQSSDEESSIRNDGKEQTVGIGGSDASEYHDNGIGIVQTQEKQQTETEKLDRDIRLWSSGKETDIRLLLSTLHHILRPESGWYAIPPKSLLESSQVKKAYQKARLCLHPDKLQQRGATLLQKYVAEKAFSILQDAWAAFISIDVSF

SEQ ID NO: 4885 - protein, 422 aa, Glycine max
  misc_feature (1)..(422): Ceres Seq. ID no. 14304913
MDADDFADVFGGPPRTLLAHKFSSSGSFYEEVFRPPEFTFPAPKDGRSLPVFRIPARNEGFYSDIFRSDDDRRSRERSRSLSKENSSSAMSSEELSPRRPAIGDDVALSGFASKLRPINIPWRWNPSTVMPEAEEYTSKLGVPLFACKDQSFEIQHQDNEYKENFRSPHLGSSRRASSPETISLESNSYQSTKVFTDDWELNSPFSVVSSLYQEPEAKFSVHDRVLSDQIIEDDDDDDDDDIMSSYVIELNSNLRREECGESAIDEAIAWAKEKFQSQSSDEESSIRNDGKEQTVGIGGSDASEYHDNGIGIVQTQEKQQTETEKLDRDIRLWSSGKETDIRLLLSTLHHILRPESGWYAIPPKSLLESSQVKKAYQKARLCLHPDKLQQRGATLLQKYVAEKAFSILQDAWAAFISIDVSF

SEQ ID NO: 4886 - DNA, 1099 bp, Glycine max
  misc_feature (1)..(1099): Ceres Seq. ID no. 14304937
tttagatctcaatgttgtaaaatatggtaaaaggtcttatctggactctcttgccagatgtaagagttgtcatgatctatactggagagatgagagacactgtaaaatttgccatatgacatttgagcttgattttgatctagaagaaagatatgcaatccacatagccacatgcagggagaaagaagacagcaatacatttcctaatcataaagtgctatcatcacagattcaatcactgaaagctgcagtttatgctattgagtctgttatgcctgaagatgccatggttggtgcttggaggaaatctgctcataagctatgggtaaaacggctcagacgcacctcaactttagtggagcttttgcaggttcttactgattttgttggtgccatcaataaggattggttgtatcaatgcaaatttctggatggggtggttgaagaaatcattgcatcttttgcatctatgccccatacaccatctgcccttgctctgtggttagtgaagttagatgccataattgctccctacctggacagagtccatcttcagaagaaacagggaaccagtcaacatggtgcttggcgataggtgcacttttacgtttgttgaagggcatgcgaattgaaatgaaggaactacctgttccgctccttgatcagagattcatgtgctggcttcacttggttctgaatttctagaacgactacaatttggccgaggctttttttttaatcctcccctccccgatttatacaggcaatcttgttggtcagatgtataggtttacattttttctatataaaaaaatactaggtagctcgagttttttggtgcgtaatgccacttggtttctacaaggtcgcccatttttcttgcttcatgatgtctggtcttctcgttcgagaaatcaattttgtctttgtatcttacagaataataatgtcgtactgattgaaaataatttgtattatgagaggatagagttttaggccgtctataaagttaaactgactggcaatgtacaatttgctttgctttaaataccctaaaaatagagcaagtaaactgcctacctttccgattgtttaaaag

SEQ ID NO: 4887 - protein, 197 aa, Glycine max
  misc_feature (1)..(197): Ceres Seq. ID no. 14304938
LDLNVVKYGKRSYLDSLARCKSCHDLYWRDERHCKICHMTFELDFDLEERYAIHIATCREKEDSNTFPNHKVLSSQIQSLKAAVYAIESVMPEDAMVGAWRKSAHKLWVKRLRRTSTLVELLQVLTDFVGAINKDWLYQCKFLDGVVEEIIASFASMPHTPSALALWLVKLDAIIAPYLDRVHLQKKQGTSQHGAWR

SEQ ID NO: 4888 - protein, 159 aa, Glycine max
  misc_feature (1)..(159): Ceres Seq. ID no. 14304939
MTFELDFDLEERYAIHIATCREKEDSNTFPNHKVLSSQIQSLKAAVYAIESVMPEDAMVGAWRKSAHKLWVKRLRRTSTLVELLQVLTDFVGAINKDWLYQCKFLDGVVEEIIASFASMPHTPSALALWLVKLDAIIAPYLDRVHLQKKQGTSQHGAWR

SEQ ID NO: 4889 - protein, 107 aa, Glycine max
  misc_feature (1)..(107): Ceres Seq. ID no. 14304940
MPEDAMVGAWRKSAHKLWVKRLRRTSTLVELLQVLTDFVGAINKDWLYQCKFLDGVVEEIIASFASMPHTPSALALWLVKLDAIIAPYLDRVHLQKKQGTSQHGAWR

SEQ ID NO: 4890 - DNA, 1461 bp, Glycine max
  misc_feature (1)..(1461): Ceres Seq. ID no. 14304941
gcaccctcgtacaggcggcacagcttcgtaccccgttctttttctcactgacaaccctaacctaaagtctccgctgcgcacagctgctccgccgtgactctgtggtcgacggtataaagtatatgccaaactaatgttaatttctcttcctctttactccatcattcatcaatctatcatatgtgaactttcaaaaatggtggatgtggttctgaatgaaaccagattatatgattggcatttatgcaaaagttgaatgatctaatgccgattaaatttccgagctaacccctgtctccgcattttcttcagattgtgttatatgcattgttgcagatgaaggtgaaaaagcagaagaggcacaggaagattttgacgttttacactgcttgcttcggttttcggaagccttacaaggttctatgtgatggcacatttgttcatcaccttcttgtgaatcgaataacccctgctgacacggccattggcaatgtcctcagtgctacgatcaagctctacacaacaagatgtgttctagctgagttgaaacgacttggtagctcgtattctgaggctctcgaggcagctcataaacttatagttgcaagatgtgagcatgaaaaatgtaagagcgcagatgcttgcatcatggaggttgttggagaaaaaaattctgagcatttctttgttgctagtcaggacactgacctgcggaaacagttgcaagaggtacctggtgtgcctctcatatttggtcttagaaatgctcttttccttgaatctccatctgcatttcagcggcaatatgtcaaaacttctgaagaaggacgattacatatgacacagaaggagtaccagatatttaaggatagggtaatgaatagattgactggtgaggaagccaacaattccattactgaaataatggaaattgaagattcagaagatcagaccataaatgtgcaggcagtagagaagggtattacctcaaggaatcgtatggaaatcaaggatgaacctcagttcaagagaaaaagagctaagggtccaaacccactttcatgcaagaagaagaaaagtgaaaaacaaaatattggtcctttgaaggaaacgaatgaagacaacacagtgaagagaagtaggaaaaggaagaggtcacataaacaaaaaatggcaacagaaacaagcagttaggtccatatatatatatatatatatatatatatatatacacagttacaaataggtatttttagaagagctccttgactttactgcttctgttgagtcgagagaaaagcaagttttaaatccatgctgacatggaaggggaagtgtatcgagattagttgcttgttgaattttatactgtgtctattttgctggctatcgtatttttacctacggatagccaaatagccgttgttcacggtggaaatagattctgatatttatgatctt

SEQ ID NO: 4891 - protein, 285 aa, Glycine max
  misc_feature (1)..(285): Ceres Seq. ID no. 14304942
MKVKKQKRHRKILTFYTACFGFRKPYKVLCDGTFVHHLLVNRITPADTAIGNVLSATIKLYTTRCVLAELKRLGSSYSEALEAAHKLIVARCEHEKCKSADACIMEVVGEKNSEHFFVASQDTDLRKQLQEVPGVPLIFGLRNALFLESPSAFQRQYVKTSEEGRLHMTQKEYQIFKDRVMNRLTGEEANNSITEIMEIEDSEDQTINVQAVEKGITSRNRMEIKDEPQFKRKRAKGPNPLSCKKKKSEKQNIGPLKETNEDNTVKRSRKRKRSHKQKMATETSS

SEQ ID NO: 4892 - protein, 181 aa, Glycine max
  misc_feature (1)..(181): Ceres Seq. ID no. 14304943
MEVVGEKNSEHFFVASQDTDLRKQLQEVPGVPLIFGLRNALFLESPSAFQRQYVKTSEEGRLHMTQKEYQIFKDRVMNRLTGEEANNSITEIMEIEDSEDQTINVQAVEKGITSRNRMEIKDEPQFKRKRAKGPNPLSCKKKKSEKQNIGPLKETNEDNTVKRSRKRKRSHKQKMATETSS

SEQ ID NO: 4893 - DNA, 1379 bp, Glycine max
  misc_feature (1)..(1379): Ceres Seq. ID no. 14304944
attttttataagtcgcttgctttttttcttcttcttcttcttcttcttttttcattcattcatttgtatttaatctacattacaacttttttttttcattcattcatttgtgttagccttgtatgtttatttataagttttaaccttaagtatatatcatttgttttctgttgatattttatacctattaacctgtgcataataagtgcagtatatctttatagagtgaatagcttctgtacgctttctgcttcaatgaaagactctaactaaatataaactgactggagctggttattgtttagctgtgtaagcagagttgtgtccataaacttagtcctgtatggagagaaacatgcacgttccttgctttctaagttttgtcattgactacatcaggacagtgtccccgattcattagtatgcatgcagatatatgaaggggtataggccttgggaaggaaaagaaggattttgctcctctaaataagggaggaaaaatttgagaaaatcacattccttgttgtttgtttccttcttttggaatttaactatgtaggggctctaagctgattttgagagtgttgttaaatatctgctatagtggtattgcattgcagaattccttggatctgtaattgagactccgtccactactgcaactgctatgggtcttgtggttgtggcatgtgtcatacatcctcttgtcatctttgatcctcacccagacaaagaacccctaagttggagtactcgaatgaagattgctgttggagctgctcgtggccttgaatatctccattgtaaagcagatccacctgttatctacagggacttgaaatctgcgaacatcttgttagataatgaattcaacccaaaactgtcagattttgggcttgctaaacttggacctgttggagacaatacccatgtttcaaccagagtgatgggaacatatggttactgtgcaccagagtatgccatgagcggcaaattaactcttaaatctgatatatatagctttggtgtgcttttgttggagttgatcactggacgtagggcaatagatactaatagaagaccaggagagcaaaacttggtttcatgggtaaatatttagtttgtatagtttatttaaaaagaaattcccctttaagtttagtatgttagtcttagctttgtatgcaagtgattccttttagattttcatcttttcactagcatattgagatttctcatataaaattttatgagaaagtgtggaaaaactagaaattagagcatgtctcatctcattaatcattatgaaaactctagcgtgttataaggcgtttcctgccttcttcataaattataatgaatccttgggattctttgac

SEQ ID NO: 4894 - protein, 150 aa, Glycine max
  misc_feature (1)..(150): Ceres Seq. ID no. 14304945
MGLVVVACVIHPLVIFDPHPDKEPLSWSTRMKIAVGAARGLEYLHCKADPPVIYRDLKSANILLDNEFNPKLSDFGLAKLGPVGDNTHVSTRVMGTYGYCAPEYAMSGKLTLKSDIYSFGVLLLELITGRRAIDTNRRPGEQNLVSWVNI

SEQ ID NO: 4895 - protein, 120 aa, Glycine max
  misc_feature (1)..(120): Ceres Seq. ID no. 14304946
MKIAVGAARGLEYLHCKADPPVIYRDLKSANILLDNEFNPKLSDFGLAKLGPVGDNTHVSTRVMGTYGYCAPEYAMSGKLTLKSDIYSFGVLLLELITGRRAIDTNRRPGEQNLVSWVNI

SEQ ID NO: 4896 - DNA, 1297 bp, Glycine max
  misc_feature (1)..(1297): Ceres Seq. ID no. 14304950
agggtcagagagagctctcgctacggatcaaagaacacttagatctcttgagggtgccaatataaaccggtctcttcttgcactaagcagctgtattaattctctggtagaaggcaagaaacacattccataccgaaactcaaaactcactcaacttctcaaggattcactaggaggaacttgtaacactgtcatgattgcaaacataagcccaagtaacctctcatttggtgaaactcagaacacagttcattgggctgatagagccaaggagattcgggcaaaggtaagtgatgcaaatgaggatcaattgccggtgcccgagatagaaactgaccaggccaagctggtacttgagctgcaaaaggagaatcgtgaattaagaatacaactagcacaacatcaacagaaattgttgaccctccaagcacaatccttagcttcccattcctccccaacaccaccaccttcagctggacctctttccactcctctaacttctgctcaaccaatcgaaaaacgaaggactagatcctctttcttggctggaacttgtttcactccagaaaccaagcagaagggagctgaactaaccatcaagacacttcaacggacggtgaaaacactagaggcagagatagagaaaatgaggaaggatcatagcttgcagctaaagcaaaaagatgatcttattcgcgagctttcgcaaaagggcggaaaacaggcattagcaactggagaactggggaagggagtggtgaccaggtctagcatacggccaaaggaaccaaacaatagtgagatgaagagtccaagtcaacgttttagatcaccagccccaactgccaagaaacgaagcttttgggacataaccacaactaatagtccatcagttactacagtaaatggtagaaaaactagaagtcatgtccttgctgaacctgctgcacctcctccatccatgcttcttcagcctggttttgctcgtcaaaaacccaatatttaagttaagtgatttttatgaggcagtggaaaggaagttgccagagcacagtgaagtacagtatttatatagagaaagatcattgcacgctttatatgctctcctcctttgtggccatctttttatttatgctctcctgctttttcattcactaccttcctacccccacaccatatttatcatatatgtacattctttgttttttcaatctagatacacctatattcttgtaagaatttgtctatgggctggtgatgctccttaaattaatttcctgttaggctttgatgtttc

SEQ ID NO: 4897 - protein, 334 aa, Glycine max
  misc_feature (1)..(334): Ceres Seq. ID no. 14304951
GSERALATDQRTLRSLEGANINRSLLALSSCINSLVEGKKHIPYRNSKLTQLLKDSLGGTCNTVMIANISPSNLSFGETQNTVHWADRAKEIRAKVSDANEDQLPVPEIETDQAKLVLELQKENRELRIQLAQHQQKLLTLQAQSLASHSSPTPPPSAGPLSTPLTSAQPIEKRRTRSSFLAGTCFTPETKQKGAELTIKTLQRTVKTLEAEIEKMRKDHSLQLKQKDDLIRELSQKGGKQALATGELGKGVVTRSSIRPKEPNNSEMKSPSQRFRSPAPTAKKRSFWDITTTNSPSVTTVNGRKTRSHVLAEPAAPPPSMLLQPGFARQKPNI

SEQ ID NO: 4898 - protein, 270 aa, Glycine max
  misc_feature (1)..(270): Ceres Seq. ID no. 14304952
MIANISPSNLSFGETQNTVHWADRAKEIRAKVSDANEDQLPVPEIETDQAKLVLELQKENRELRIQLAQHQQKLLTLQAQSLASHSSPTPPPSAGPLSTPLTSAQPIEKRRTRSSFLAGTCFTPETKQKGAELTIKTLQRTVKTLEAEIEKMRKDHSLQLKQKDDLIRELSQKGGKQALATGELGKGVVTRSSIRPKEPNNSEMKSPSQRFRSPAPTAKKRSFWDITTTNSPSVTTVNGRKTRSHVLAEPAAPPPSMLLQPGFARQKPNI

SEQ ID NO: 4899 - DNA, 1682 bp, Glycine max
  misc_feature (1)..(1682): Ceres Seq. ID no. 14304957
atataagcttgtcagcattacagagaaaaagagagagagagaaagaaaagtaatggcaatggcaacgatggaagagattccacaaagcccagaagcgaagttggggatgcgagtggaggatctttgggacgttcaggaggcacagttgagtcccaccgagaagctcaacgcttgttttgaaagcatccctgtctctgcttttcctttggatccttcaaacacagaaattgagattaaatcagacgccaccctagcagatgctgttaagatattggcaggacacaacgttttcagcgcgcctgtggtggatgttgaggcgcctgaagacgctagttggattgacagatacatcggaattgttgagtttgctggaattgttgtatggattttgcatcagtctgaacctacgtctccgaggactccgtccactccatccagtgcaagggctattgcagctgcagctaatggagcggcttttgctctagaacttgaagccttaggccttggatctgctgcaacaactgcagggaacttttttgaggatctcacttcttctgaactttataagaataccaaggttcaacctagaagagtttttcttttaaatgcttcttgttctagctatttacttagtttgattactcttatttatttatgaatttaataactatgcattgtctttgtaaaaacttagacggtcaaccaattagaaatcaccgttggtatgatgaataagatagttagtcaacaaacttatcatatatggtgatatatatggtggtatgtgactgtgactggatgacagtgtaaagttttcggtgcataacctattttttctttaattatttcactggctaactttctggcaaacaggttcgtgatatttcagggacattccgctgggccccgtttcttgctttagagagatcaaactcatttctaaccatgctcttgctgctttctaagtacaagatgaagagtgttcctgtgttggatttaggctctggtgcaattgataacattattacacaatctgctgtgattcatatgctggcagaatgcgctggacttcagtggttcgaaagttggggaaccaagaaactatctgaagttggtcttcccctggtgacaggaaatcaaatcatcaaggtttatgaggatgaaccagtcctccaagcatttaaagtaatgaggaaaaaaagggtcggaggggttcctgtaatcgaaagagagaccaaaaaagcagttggtaatataagtttgcgagacgttcaattcttgctaactgcaccagaaatctatcatgattatagaggtattacagtaaaagacttcctaactgaggttagaagctacttggagaagaataaaaatgcatccccaatgttaaatgaatatgtcacatgcaaaaaggactgtacaatcaaagagttgattcaactacttgatcaagagaagattcacagggtctatgtggtggacgatgatggggatttgcaaggactaatcacactaagagatatcatctcaaggctagtacacgaaccgcgtggctattttggtgatttctttgatggtgttctaccgctgcctgcaaacagcagagtttaacaggcaaggttacaagggagaataacctgctggtgcagcttttttttttttaaaaaaagaaaaatttaagt

SEQ ID NO: 4900 - protein, 221 aa, Glycine max
  misc_feature (1)..(221): Ceres Seq. ID no. 14304958
MLLLLSKYKMKSVPVLDLGSGAIDNIITQSAVIHMLAECAGLQWFESWGTKKLSEVGLPLVTGNQIIKVYEDEPVLQAFKVMRKKRVGGVPVIERETKKAVGNISLRDVQFLLTAPEIYHDYRGITVKDFLTEVRSYLEKNKNASPMLNEYVTCKKDCTIKELIQLLDQEKIHRVYVVDDDGDLQGLITLRDIISRLVHEPRGYFGDFFDGVLPLPANSRV

SEQ ID NO: 4901 - protein, 218 aa, Glycine max
  misc_feature (1)..(218): Ceres Seq. ID no. 14304959
YKLVSITEKKRERERKVMAMATMEEIPQSPEAKLGMRVEDLWDVQEAQLSPTEKLNACFESIPVSAFPLDPSNTEIEIKSDATLADAVKILAGHNVFSAPVVDVEAPEDASWIDRYIGIVEFAGIVVWILHQSEPTSPRTPSTPSSARAIAAAANGAAFALELEALGLGSAATTAGNFFEDLTSSELYKNTKVQPRRVFLLNASCSSYLLSLITLIYL

SEQ ID NO: 4902 - protein, 212 aa, Glycine max
  misc_feature (1)..(212): Ceres Seq. ID no. 14304960
MKSVPVLDLGSGAIDNIITQSAVIHMLAECAGLQWFESWGTKKLSEVGLPLVTGNQIIKVYEDEPVLQAFKVMRKKRVGGVPVIERETKKAVGNISLRDVQFLLTAPEIYHDYRGITVKDFLTEVRSYLEKNKNASPMLNEYVTCKKDCTIKELIQLLDQEKIHRVYVVDDDGDLQGLITLRDIISRLVHEPRGYFGDFFDGVLPLPANSRV

SEQ ID NO: 4903 - DNA, 558 bp, Glycine max
  misc_feature (1)..(558): Ceres Seq. ID no. 14305561
ttaacagcattggttatggaagcaactgtggaagtagcagcaatgttgatcaagttaacactgtctgggcagcttcagagggaaagcatgaagacctcacaaataatgcaaactctcatcgatctatccaaagagaagcagctctaaacaaatttcgcttgaaaaggaaagagagatgctatgagaagaaggttcgatacgagagcagaaaaaaactagcagagcagcgtcccagagttaaaggacaatttgttcgtcaagtgcatcctgatcctcttgttgcagaaaaagatggcaaagaatatgatcattcagatttctgactcactggagaggagagcatgaattccttagagtatatagttgcttcaaaattttgttttcctgaatccttaaataccagaagcacttaatctgtatatgctttctaaaaccgtttttcttatttgcccttactgtagatcgtgatatataatatacctgatgtattatatcattgtaattttacagtcttatagggatcttcgtgcatcattatttatttatttatttatttat

SEQ ID NO: 4904 - protein, 106 aa, Glycine max
  misc_feature (1)..(106): Ceres Seq. ID no. 14305562
NSIGYGSNCGSSSNVDQVNTVWAASEGKHEDLTNNANSHRSIQREAALNKFRLKRKERCYEKKVRYESRKKLAEQRPRVKGQFVRQVHPDPLVAEKDGKEYDHSDF

SEQ ID NO: 4905 - DNA, 969 bp, Glycine max
  misc_feature (1)..(969): Ceres Seq. ID no. 14305633
gtggaaacaagcagcaaacaaagcagatgttcatcccacggaattcctcactgctgcaaagtacaaaacagaaagaagcagcagagcttcaagagaaagaagacatcaagaggcttgtcttggagtataatgacagagaagaagaggagcttaatggattagggacccaggcaacaaactggatgcagagtgtaggttacaagggtggtggccgtggcagcagtttggaaggaaacagtggcaggggtagtggatcaagacatcggcatcataattattctggcagtggaatctattacagtagaagaaagtgaatggtacttgagtgaatactgaaggcagatatttgttgccttctgcttcccctcagcaaggcagatatttgtttgccacactaccacactaccacactttgctgttcaaaaaattcatggcaaaggcaagtctaatagcttatcttgttggtaagtggtggtttcgaacatagagtgttggagatgctggcaggggttatagagtggtgtacacaccactttggtttcctgatcttaagctgacatgcaggatgtaagattgtgggttgcctgcatacatgtagcaaatgtagtcctgtaatttatatcacggcttcggagcttcctgtatagctatctgtatggagctaaaatcacaatgtttggttttggtggtgtcaagttagccaaaggttggattatataacgtgaagaaagaataggcaaaaaaatgtcttgatgctttgttaacatatcaaaaaccctgtcaaacatcagtgtaagaatcgatctctattgtttacaagtttgtattgccaatcatcatcattacattctagttcaatgagtaattcttgtatgggcattggtttgatcccagactgctcaattggagatctagctgaagattgtaccatagtttgccattgggaatgtgttaagctttttcttgtag

SEQ ID NO: 4906 - protein, 103 aa, Glycine max
  misc_feature (1)..(103): Ceres Seq. ID no. 14305634
GNKQQTKQMFIPRNSSLLQSTKQKEAAELQEKEDIKRLVLEYNDREEEELNGLGTQATNWMQSVGYKGGGRGSSLEGNSGRGSGSRHRHHNYSGSGIYYSRRK

SEQ ID NO: 4907 - protein, 95 aa, Glycine max
  misc_feature (1)..(95): Ceres Seq. ID no. 14305635
MFIPRNSSLLQSTKQKEAAELQEKEDIKRLVLEYNDREEEELNGLGTQATNWMQSVGYKGGGRGSSLEGNSGRGSGSRHRHHNYSGSGIYYSRRK

SEQ ID NO: 4908 - protein, 53 aa, Glycine max
  misc_feature (1)..(53): Ceres Seq. ID no. 14305636
VETSSKQSRCSSHGIPHCCKVQNRKKQQSFKRKKTSRGLSWSIMTEKKRSLMD

SEQ ID NO: 4909 - DNA, 1142 bp, Glycine max
  misc_feature (1)..(1142): Ceres Seq. ID no. 14305669
attactcttcttcatttcaataacacatatccattcacaacaacacaagacagaaccaaaaaagaaaaaagaaataacttttccgattcaaatatcggaaaccctgagaatctccctcgcaagtgatcagaagagtaaaactagtaaaaaatttgctgctgaagctgggctccctgtgctgacaaatgtattacttccgaaaacaaaggggcttcatgcttgcttggaagctctgcgaggctcattggatgcaggtttctattataatttctgctccttttttataatatactatagtcaattcataatgactctgtggtggctatttatgaaattatgcaatttgtattaccaaatgttttttttatcggcaaatgttagtttagtatttagcattttcttcatcttgtgactattgagctttgtgtgtcttcattatgttcatgttccatatctctaatgctatttcactgatccaagctggcttgtaccatatgttcaaagattttgtgacatgacaattgcggtctatttgcacaattttgtaactatgtgtgatattttctattcaattcttctcggctaaagtctgttgaacattgtcattcaattacatgcagtatacgatgtgacaattgcatacaagaatcagtgtccttcctttctggacaatgtttttggtgttgacccttcagaagtgcacctgcatgtgcggcgtattccggtggaggagattccagcttctgaaaccaaagctgcttcttggttaatcgacacattccagatcaaggaccaattgctttcggatttcaagattcaaggccatttccctaaccaactaaatgaaaatgaaatttctagatttaagagcctactctcttttatggtgatagtttcttttactgccatgtttatttattttacatttttttctgtcatttggttcaaactgtatgtaggtctatcttgtgcatatcttactcttgcaacccgcttcaattttcaattgatgcctttaagtagctatgtccatgcactccataacagcaagaatcaaaagagtgaatagtgttctcaatgtatgatcttggtcttgaacttgatattgaagtgtgaattatttgttgctgtttttaccccat

SEQ ID NO: 4910 - protein, 136 aa, Glycine max
  misc_feature (1)..(136): Ceres Seq. ID no. 14305670
LLFFISITHIHSQQHKTEPKKKKEITFPIQISETLRISLASDQKSKTSKKFAAEAGLPVLTNVLLPKTKGLHACLEALRGSLDAGFYYNFCSFFIIYYSQFIMTLWWLFMKLCNLYYQMFFLSANVSLVFSIFFIL

SEQ ID NO: 4911 - DNA, 478 bp, Glycine max
  misc_feature (1)..(478): Ceres Seq. ID no. 14305686
caagtttcagctctaagcttcatctatctccgtctttcaggcaaactaaaaagtttataatctagttttctgtcctcctctatctagaatggcgcttgtcaaaagtattgtttcaacagtaagacccaacttaatgacatttctgaagtttgcaaaagttgaattaactccacctactcctggtgacattccagcaatttcccgtgggtttggagacatcgttagtgcagccaagactggtcggtggaagcaactgactgttaaagaagcatggctgaatgttttggtgttcactgaagtaacatgctggttttggattggagaagtaattggcaagaggaacatgattggatatgacgttcaagtataagtcatgccatcaaaaaaagtttagaaatgtatctttcaatttagcaggcattgtttaacactcatattgagatttggtaatgtaaatgttaaaataaaacttgtttct

SEQ ID NO: 4912 - protein, 93 aa, Glycine max
  misc_feature (1)..(93): Ceres Seq. ID no. 14305687
MALVKSIVSTVRPNLMTFLKFAKVELTPPTPGDIPAISRGFGDIVSAAKTGRWKQLTVKEAWLNVLVFTEVTCWFWIGEVIGKRNMIGYDVQV

SEQ ID NO: 4913 - protein, 78 aa, Glycine max
  misc_feature (1)..(78): Ceres Seq. ID no. 14305688
MTFLKFAKVELTPPTPGDIPAISRGFGDIVSAAKTGRWKQLTVKEAWLNVLVFTEVTCWFWIGEVIGKRNMIGYDVQV

SEQ ID NO: 4914 - DNA, 740 bp, Glycine max
  misc_feature (1)..(740): Ceres Seq. ID no. 14305727
cttcacatcacaacttgctaaagttaatttcttcagaggccactggcattcggatctcagttaacttacattaaattttggccacctagttttctcttttagatgggcagtgacttcaaggggtggtgacttgatcacatgcatttatggcttcacttaattcatatcattactacacaaacacctccttgctcatcatacttcttctccataatttgttctctctatctctagcttctgcctccaatcaccctcagcctgcaatttctacaagggaactgttatttgaggagaaaaacaggctaggttcaattcctcctagctgtcataacaagtgcaatgattgccatccatgcatggcagttcaagtgccaactttgccaagccatgactctaaccctccagatcttaccaaaactgcagccatggcaacttttcttaacccttcttctccgcaaggcaacaggtactccaattacaagccattgggatggaaatgccattgtggtgaccacttcttcaacccgtaattataaatttgtaaaatggccctcttattttttttgttggttaaattttaatatttgtggcttagggatcagctagggtaacagatttgcgtcagcatggatcctatacattggagcttgatacacttgtacatagtttgttagacctcatgatttccaactttattatattgttacatctaaattttgagaaagttattacctttttcc

SEQ ID NO: 4915 - protein, 127 aa, Glycine max
  misc_feature (1)..(127): Ceres Seq. ID no. 14305728
MASLNSYHYYTNTSLLIILLLHNLFSLSLASASNHPQPAISTRELLFEEKNRLGSIPPSCHNKCNDCHPCMAVQVPTLPSHDSNPPDLTKTAAMATFLNPSSPQGNRYSNYKPLGWKCHCGDHFFNP

SEQ ID NO: 4916 - protein, 88 aa, Glycine max
  misc_feature (1)..(88): Ceres Seq. ID no. 14305729
MIAIHAWQFKCQLCQAMTLTLQILPKLQPWQLFLTLLLRKATGTPITSHWDGNAIVVTTSSTRNYKFVKWPSYFFCWLNFNICGLGIS

SEQ ID NO: 4917 - protein, 72 aa, Glycine max
  misc_feature (1)..(72): Ceres Seq. ID no. 14305730
MTLTLQILPKLQPWQLFLTLLLRKATGTPITSHWDGNAIVVTTSSTRNYKFVKWPSYFFCWLNFNICGLGIS

SEQ ID NO: 4918 - DNA, 800 bp, Glycine max
  misc_feature (1)..(800): Ceres Seq. ID no. 14305794
ttacccaaaatctatggcacaggatacagcaaaattggcaactaaatcttcagccatagctcatcttacttctagttttgaactaacatcagcacgagaaaatttgattcctcggtcacaaaaagcgagttcagttacccccaaatcaaaccctgagacaagtgatgaggagggttctttgagcagcaggatagaatctcttaccatacaggaggatgcgaaagagggtgaagctgaagacgatgaaggtctcccagtttacccgcatgaacgcgttaacacagcttctacagatcctgtagaagatattgacgtgactaaacgagaggcttatctgtcatctgcagagtttcaagagaaatttgggatggcgaagaatgaattttacaagttgccaaaatggaaacagaacaaactcaaaatggcagttcagttgttctgagttaaatcagtaagaaactgaatatatggaagtgaaaggggacagcatgagcgttttttttttccttcttttaacatagctgcttctactccgaagaagctccttttgaggaagaaaataaataaagattcttccttggagtggtttgatatttataggttctttctttgttgagagctgcttggtgttaattttataggccaagggttgatggagtgcttgtcttaatttgtttttcttgttgatcattttttcattcaaaattgttttggggaagcaattacttaggttgttttgatagtcagagtatgaagtttgtacattatcatttaatatttaaaagaaatattattgagat

SEQ ID NO: 4919 - protein, 146 aa, Glycine max
  misc_feature (1)..(146): Ceres Seq. ID no. 14305795
YPKSMAQDTAKLATKSSAIAHLTSSFELTSARENLIPRSQKASSVTPKSNPETSDEEGSLSSRIESLTIQEDAKEGEAEDDEGLPVYPHERVNTASTDPVEDIDVTKREAYLSSAEFQEKFGMAKNEFYKLPKWKQNKLKMAVQLF

SEQ ID NO: 4920 - protein, 142 aa, Glycine max
  misc_feature (1)..(142): Ceres Seq. ID no. 14305796
MAQDTAKLATKSSAIAHLTSSFELTSARENLIPRSQKASSVTPKSNPETSDEEGSLSSRIESLTIQEDAKEGEAEDDEGLPVYPHERVNTASTDPVEDIDVTKREAYLSSAEFQEKFGMAKNEFYKLPKWKQNKLKMAVQLF

SEQ ID NO: 4921 - DNA, 527 bp, Glycine max
  misc_feature (1)..(527): Ceres Seq. ID no. 14305801
atttgcaggtcctcctcatatacagtacaaacttcagctggtagatagtgcttccaaatggagaagaaaaggaagactttactattgctgctgctcatggctgcaactctcttctgcatgccaattgtgtcgtatgctgtttctagtgtcaacattcaaggtcatctcacccattctgagctggtaaaaggtcccaatagaaggcttttgccatttgtggattgtggagcgaggtgcagggtgaggtgcagtttgcactcaaggccaaaaatttgctcaagagcttgcgggacatgctgtttcaggtgcaggtgtgttcctccaggcacttacgggaacagagagatgtgtggcaagtgttacactgacatgatcactcatggcaacaaacctaagtgcccctaaacctgtgcatgcatgcccatgtgtgtctacaccttatgatgtttatcactagttaacacaaatttgaattcccatttttttgttttttctaccttaatttcttaatgcattgtgtttctcat

SEQ ID NO: 4922 - protein, 115 aa, Glycine max
  misc_feature (1)..(115): Ceres Seq. ID no. 14305802
MEKKRKTLLLLLLMAATLFCMPIVSYAVSSVNIQGHLTHSELVKGPNRRLLPFVDCGARCRVRCSLHSRPKICSRACGTCCFRCRCVPPGTYGNREMCGKCYTDMITHGNKPKCP

SEQ ID NO: 4923 - protein, 102 aa, Glycine max
  misc_feature (1)..(102): Ceres Seq. ID no. 14305803
MAATLFCMPIVSYAVSSVNIQGHLTHSELVKGPNRRLLPFVDCGARCRVRCSLHSRPKICSRACGTCCFRCRCVPPGTYGNREMCGKCYTDMITHGNKPKCP

SEQ ID NO: 4924 - protein, 95 aa, Glycine max
  misc_feature (1)..(95): Ceres Seq. ID no. 14305804
MPIVSYAVSSVNIQGHLTHSELVKGPNRRLLPFVDCGARCRVRCSLHSRPKICSRACGTCCFRCRCVPPGTYGNREMCGKCYTDMITHGNKPKCP

SEQ ID NO: 4925 - DNA, 894 bp, Glycine max
  misc_feature (1)..(894): Ceres Seq. ID no. 14305843
aaaaaacacacttctataatggatcggaaaagcctcctctccctcgcaatcatcgccattgtcgtcgccgccgtcggaggacagtctccagcggcgtcgcccaccacttctcctccggctgccaccaccactccctttgcatccccagccacagccccttctaagccaaaatcaccggcgccagttgcttctcccacgtcatcatctccaccagcttcgtcccccaatgctgcaaccgcaaccccacccgcttcatctcccacagtagcatctcctccgtctaaagctgccgctccagctccggtggctacacctcccgcagccactcctcctgcggctacaccaccggcagccacacctcctgccgtgactccagtgagttcgccgccagcgccagttccggtgagttctccacctgctcctgttccggtgagctctccacctgcactcgcaccgacaactcccgcacccgtggtagcacccagcgctgaggttccggcacccgctcccaagtcaaagaagaagacaaagaagagtaagaagcacactgcaccagcaccgtcgccgtcattgcttggccctcccgctcctccggtaggagctccgggatcaagccaggattccatgtctcctggtccagctgtatctgaggacgagagtggagctgaaaccatcaggtgcttgaagaaggtcattggatgcttagccttgagctgggctacccttgttttgttcttctagagaagaggctgaggcttcattgctgctgttacatagtattattgtatcatttattgtcttttttggaccctgtcggggggctaaaattaaatttattaccattgttttcttcaatctcttattactttataattgatgatgtttgttgacact

SEQ ID NO: 4926 - protein, 246 aa, Glycine max
  misc_feature (1)..(246): Ceres Seq. ID no. 14305844
KKHTSIMDRKSLLSLAIIAIVVAAVGGQSPAASPTTSPPAATTTPFASPATAPSKPKSPAPVASPTSSSPPASSPNAATATPPASSPTVASPPSKAAAPAPVATPPAATPPAATPPAATPPAVTPVSSPPAPVPVSSPPAPVPVSSPPALAPTTPAPVVAPSAEVPAPAPKSKKKTKKSKKHTAPAPSPSLLGPPAPPVGAPGSSQDSMSPGPAVSEDESGAETIRCLKKVIGCLALSWATLVLFF

SEQ ID NO: 4927 - protein, 240 aa, Glycine max
  misc_feature (1)..(240): Ceres Seq. ID no. 14305845
MDRKSLLSLAIIAIVVAAVGGQSPAASPTTSPPAATTTPFASPATAPSKPKSPAPVASPTSSSPPASSPNAATATPPASSPTVASPPSKAAAPAPVATPPAATPPAATPPAATPPAVTPVSSPPAPVPVSSPPAPVPVSSPPALAPTTPAPVVAPSAEVPAPAPKSKKKTKKSKKHTAPAPSPSLLGPPAPPVGAPGSSQDSMSPGPAVSEDESGAETIRCLKKVIGCLALSWATLVLFF

SEQ ID NO: 4928 - DNA, 856 bp, Glycine max
  misc_feature (1)..(856): Ceres Seq. ID no. 14305885
caacccaattaatctttgttttcaattccttatttcaataattctctttctccttcttctataactctcctctgtttactctgtttttttcacaaaacaacatggctgcatacagagaacccatgaacatgaacatgagcgacagagccccggtttctccgcagcaaccacactcgccgtggcattctccggttccgtaccttttcggtggtttagcagcgatgttgggtctcatagccttcgctctgttgatccttgcatgttcctattggaagctctccgggtacctcgaagggaacggggaaacagaacgggacctggaagctggcgaaacggaacaggaccagaaacctgcgaaaccgtacgaggagaagatcttggtgatcatggccgggcaagagaagccaacattcttggcaactccgagcgtgtcttcgagttgcagcactagcaggacctcttcgttcggcgacaacactagcacatgcacctgcgaggagaaccgaaaatcgcttgaaatggccgtcaaagagggaagcgctgccgggactgggaccaccgaaaccgcacacacctcatcagatcagaacctttgaaacatagtcacatgttgggggttttgttttgtagttaggttgctttcgtgaaaaagcaaagctcgtgacacctgggtgtctctctaggttgcatgttcaacaattggtgctgatatggggattctcttctcttctcttctctttttattttttcttttttctttttccttcttcttctctttcgattctcgtctatacattatttcgggaatgtaaattctttgaggtggaattgagacatttgctgtttcacaaatcac

SEQ ID NO: 4929 - protein, 164 aa, Glycine max
  misc_feature (1)..(164): Ceres Seq. ID no. 14305886
MAAYREPMNMNMSDRAPVSPQQPHSPWHSPVPYLFGGLAAMLGLIAFALLILACSYWKLSGYLEGNGETERDLEAGETEQDQKPAKPYEEKILVIMAGQEKPTFLATPSVSSSCSTSRTSSFGDNTSTCTCEENRKSLEMAVKEGSAAGTGTTETAHTSSDQNL

SEQ ID NO: 4930 - protein, 157 aa, Glycine max
  misc_feature (1)..(157): Ceres Seq. ID no. 14305887
MNMNMSDRAPVSPQQPHSPWHSPVPYLFGGLAAMLGLIAFALLILACSYWKLSGYLEGNGETERDLEAGETEQDQKPAKPYEEKILVIMAGQEKPTFLATPSVSSSCSTSRTSSFGDNTSTCTCEENRKSLEMAVKEGSAAGTGTTETAHTSSDQNL

SEQ ID NO: 4931 - protein, 155 aa, Glycine max
  misc_feature (1)..(155): Ceres Seq. ID no. 14305888
MNMSDRAPVSPQQPHSPWHSPVPYLFGGLAAMLGLIAFALLILACSYWKLSGYLEGNGETERDLEAGETEQDQKPAKPYEEKILVIMAGQEKPTFLATPSVSSSCSTSRTSSFGDNTSTCTCEENRKSLEMAVKEGSAAGTGTTETAHTSSDQNL

SEQ ID NO: 4932 - DNA, 903 bp, Glycine max
  misc_feature (1)..(903): Ceres Seq. ID no. 14305893
agcattagcagcaacgccaccaccaacactcacatcaagaaaacctagggtttgggtttgcggcatgagtcgccgtggcatggacgacgacgatgaggaggagtacgaggaggaggacgagcaggtcgccgacttcgacgaggaggaggaggaggacaaccaccgaggacgcgggggtggtggcggcaggaagaggagaagatctggattcattgacgacgacgccgaagaggtcgatgaggacgaggacgaggaggacgacgatgacgaggatttcgatggacggggtggtggtggcggtcggaggcgccagtacaagaaggtttccgcttctaatttcttcgacgaagaggccgtggtggatagtgatgaggaagaggaagaagaggagggagaagacggcaattgcgggtgatgtggctgcaattgcagtcgtgatgggattgcggagtgtcgaaataccttgacgctgcagatcgcaatttaacaccatgggcaagaggatcctggaattgaaatttgtgggatgctcttttgttttattgtcatggctcttgtgggagtgggatttgacattgacagccatactgggatttaaagttacagttgcagtacatgttgctggctactgtaatctgtaccctttgtaatattgttgtgacatttttctgcaattaaggtgttgtggtctgctattcgatccttggtttggatcatgttcatgcttaactgactagcataaaagttggatgatggatcccatcaacactgtttaaaaatttgaaaggaactggcaagaaattgtgtcaagtgaatgttattgtgaccgggaaggactactttgttatttgaggtgatgtgtcactagcaataattatgaatataatgtcatgtcttctagtc

SEQ ID NO: 4933 - protein, 137 aa, Glycine max
  misc_feature (1)..(137): Ceres Seq. ID no. 14305894
ALAATPPPTLTSRKPRVWVCGMSRRGMDDDDEEEYEEEDEQVADFDEEEEEDNHRGRGGGGGRKRRRSGFIDDDAEEVDEDEDEEDDDDEDFDGRGGGGGRRRQYKKVSASNFFDEEAVVDSDEEEEEEEGEDGNCG

SEQ ID NO: 4934 - protein, 124 aa, Glycine max
  misc_feature (1)..(124): Ceres Seq. ID no. 14305895
MRRSTRRRTSRSPTSTRRRRRTTTEDAGVVAAGRGEDLDSLTTTPKRSMRTRTRRTTMTRISMDGVVVAVGGASTRRFPLLISSTKRPWWIVMRKRKKRREKTAIAGDVAAIAVVMGLRSVEIP

SEQ ID NO: 4935 - protein, 116 aa, Glycine max
  misc_feature (1)..(116): Ceres Seq. ID no. 14305896
MSRRGMDDDDEEEYEEEDEQVADFDEEEEEDNHRGRGGGGGRKRRRSGFIDDDAEEVDEDEDEEDDDDEDFDGRGGGGGRRRQYKKVSASNFFDEEAVVDSDEEEEEEEGEDGNCG

SEQ ID NO: 4936 - DNA, 659 bp, Glycine max
  misc_feature (1)..(659): Ceres Seq. ID no. 14305921
acggagccaaacacgccaaccagacttgttccgacaccaacagaagagcaaatctaacaccctctccggctaaatgctcccttcccgggagcctaacggcaacaacgatggcgcaaaacgtgaatcgtgatcgtcatcactcttttttgctacactctcattttttaatcactcagaatggcggtgtggcgacgaacgctggtgcggcggtggtgaagagggtgctgaagcgctttgaagagcttctgatggtttgaaacaaagcgatagagggaaaagacgcatggtactgaacgcatctagaacctttgttggttcacaacatcgaaatgggactccccgaagcagtaaaggaatttcttggcgatttggtctacgagccttgtgtcgctgcttctttcttgagtttggagcatccaaagcttcgaacttttctcgcacaggtttgtttgccggcgatcttttcgacggagattatggggacgaggttcgaggagtttccgaaggagttctggctttttttttgcaatattagaagttacaatgttttccataacttttacaaattcttgaaagcagtgtgaaattaattattataaatcttgttggcgggttgggttgatttagaaatatatgaagggtatggtattgctattggc

SEQ ID NO: 4937 - protein, 84 aa, Glycine max
  misc_feature (1)..(84): Ceres Seq. ID no. 14305922
GAKHANQTCSDTNRRANLTPSPAKCSLPGSLTATTMAQNVNRDRHHSFLLHSHFLITQNGGVATNAGAAVVKRVLKRFEELLMV

SEQ ID NO: 4938 - protein, 84 aa, Glycine max
  misc_feature (1)..(84): Ceres Seq. ID no. 14305923
MGLPEAVKEFLGDLVYEPCVAASFLSLEHPKLRTFLAQVCLPAIFSTEIMGTRFEEFPKEFWLFFCNIRSYNVFHNFYKFLKAV

SEQ ID NO: 4939 - protein, 83 aa, Glycine max
  misc_feature (1)..(83): Ceres Seq. ID no. 14305924
MVLNASRTFVGSQHRNGTPRSSKGISWRFGLRALCRCFFLEFGASKASNFSRTGLFAGDLFDGDYGDEVRGVSEGVLAFFLQY

SEQ ID NO: 4940 - DNA, 694 bp, Glycine max
  misc_feature (1)..(694): Ceres Seq. ID no. 14305944
attcacaattcacaacaacacacaacatattattaagacacaccccaaaccaaaccacttcacacagaacacatatccattggtgaaggagtatcatgggtgaacaattagggctactaaaagtcatggttgtgcaagggaaaaggttggtgatccgggatttcaagaccagtgatccttatgtagtactcaaactagggaatcagactgcaaagaccaaggtaattaatagctgcttgaatcctgtttggaatgaagagctgaatttcactctgacagaaccattgggagttctgaatttggaagtgtttgataaagatcttttgaaggctgatgacaagatgggaaatgctttcttgaaccttcaaccaatagtctctgcagccagattaagagacatcttaagagtgtcctctggtgagacaacattaaggaaggtcatacctgatggtgaaaactgtcttgtccgtgaaagcagtatcaactgtgtcaatggtgaggtggtgcagaatgtttggttaaggcttcgtggagttgagtctggggaactagaattgactatcaagttggccacacctgttgctcctgcaatatagtgcaacaattgcatgtgtcataagtgtagatgtctaactattgcatgagtcacttttgccttttattttcaaatttaaatttctttctttttagttcc

SEQ ID NO: 4941 - protein, 166 aa, Glycine max
  misc_feature (1)..(166): Ceres Seq. ID no. 14305945
MGEQLGLLKVMVVQGKRLVIRDFKTSDPYVVLKLGNQTAKTKVINSCLNPVWNEELNFTLTEPLGVLNLEVFDKDLLKADDKMGNAFLNLQPIVSAARLRDILRVSSGETTLRKVIPDGENCLVRESSINCVNGEVVQNVWLRLRGVESGELELTIKLATPVAPAI

SEQ ID NO: 4942 - protein, 156 aa, Glycine max
  misc_feature (1)..(156): Ceres Seq. ID no. 14305946
MVVQGKRLVIRDFKTSDPYVVLKLGNQTAKTKVINSCLNPVWNEELNFTLTEPLGVLNLEVFDKDLLKADDKMGNAFLNLQPIVSAARLRDILRVSSGETTLRKVIPDGENCLVRESSINCVNGEVVQNVWLRLRGVESGELELTIKLATPVAPAI

SEQ ID NO: 4943 - protein, 84 aa, Glycine max
  misc_feature (1)..(84): Ceres Seq. ID no. 14305947
MGNAFLNLQPIVSAARLRDILRVSSGETTLRKVIPDGENCLVRESSINCVNGEVVQNVWLRLRGVESGELELTIKLATPVAPAI

SEQ ID NO: 4944 - DNA, 830 bp, Glycine max
  misc_feature (1)..(830): Ceres Seq. ID no. 14305994
atatatctcttataccccttttgtttccatttgaactttgcttttagtagttttaaatcatatcaatagctatgacgactgtggacaggcgtgtgaatgtcgaccgtactgacaaaggacttcaacttaagccgcagtacgaagatcgtgtcggttatggcgctggttatgattatggttatggtgctgattacaagagtcgcggcccatccactaatcaagtcgtggcacttatagcaggagttccaattggtggctcattactagccctagctggactcactctagccggttcggtgataggtttgattctctccattccgctcttcctcctcttcagtcccgtgattgtcccagccgctctcaccatagggctcgctgtgaccggaattttggcgtctgggttatttggtctgacgggtctgagctcggtctcatgggtcctaaactacatccgtgggacgagtgatacggtgccggagcaactggactatgctaagcggcgtatggctgatgcagtaggctacgctggtcagaagggaaaagagatgggacagtatgtgcaggataaggcccatgaagcccacgatactagtctgaccactgagaccagagagccggttcaggcaaagaggactttagcgtaaggcaaggaggaaccttctataaagttgtgggtttatgttggaaaaggcaattatgtaattttacttttgtgtcccagtttcttcgttttttttttgaatatttgtgaattatgtgtaagttcgttttgttatgtccaaataaaatattttgtgagtgaaataaagtgggataaaaggaaatac

SEQ ID NO: 4945 - protein, 191 aa, Glycine max
  misc_feature (1)..(191): Ceres Seq. ID no. 14305995
MTTVDRRVNVDRTDKGLQLKPQYEDRVGYGAGYDYGYGADYKSRGPSTNQVVALIAGVPIGGSLLALAGLTLAGSVIGLILSIPLFLLFSPVIVPAALTIGLAVTGILASGLFGLTGLSSVSWVLNYIRGTSDTVPEQLDYAKRRMADAVGYAGQKGKEMGQYVQDKAHEAHDTSLTTETREPVQAKRTLA

SEQ ID NO: 4946 - DNA, 847 bp, Glycine max
  misc_feature (1)..(847): Ceres Seq. ID no. 14306010
ctctttccgttcccttgatgtaatggctttatgccgattcgcttactcttattctcctgcttctgcttccaccatttttcgtttcccgaaatacccttcgaaacacactaaattctccttgctaccactctcattctcaacgatggaagctcctccagaaggttatcgtaggaacgttggtatctgtctcatgaacaatcacaaaaagattttcgcggcttcgaggctcgacattcccaatgcttggcaaatgcctcagggtggtattgatgaaggtgaggatccaagaaatgcagctatcagggagttacgagaagagacaggagttaattcagtagaagtgatcgctgaggtaccatattggttaacttatgacttcccaccaaaagtgagggagaaattaaatattcagtggggatctgattggaagggtcaggcgcagaaatggtttctttttaagttcactgggcaagatcaagaaattaatcttttgggtgatggtactgagaaagctgagtttggggaatggtcatggatatcacctgaacaagtaattgagcttgcagtggatttcaagaaacctgtctacaaggaagtcttagcagtgtttgctccacatttccaataaatcttatctttggctgaaattgttactgatgccttgggtgattatgagggctgctttaaaaagaatgtattccaattaactaacgagaccattattctcttttttctcctcttggccataataacccatagggcgggagaagagggctgtttattttgtctgaatgaaatatgtattgtcatgaaaattgttgtgcaatgtattgcatttgcatctgcc

SEQ ID NO: 4947 - protein, 208 aa, Glycine max
  misc_feature (1)..(208): Ceres Seq. ID no. 14306011
SFRSLDVMALCRFAYSYSPASASTIFRFPKYPSKHTKFSLLPLSFSTMEAPPEGYRRNVGICLMNNHKKIFAASRLDIPNAWQMPQGGIDEGEDPRNAAIRELREETGVNSVEVIAEVPYWLTYDFPPKVREKLNIQWGSDWKGQAQKWFLFKFTGQDQEINLLGDGTEKAEFGEWSWISPEQVIELAVDFKKPVYKEVLAVFAPHFQ

SEQ ID NO: 4948 - protein, 201 aa, Glycine max
  misc_feature (1)..(201): Ceres Seq. ID no. 14306012
MALCRFAYSYSPASASTIFRFPKYPSKHTKFSLLPLSFSTMEAPPEGYRRNVGICLMNNHKKIFAASRLDIPNAWQMPQGGIDEGEDPRNAAIRELREETGVNSVEVIAEVPYWLTYDFPPKVREKLNIQWGSDWKGQAQKWFLFKFTGQDQEINLLGDGTEKAEFGEWSWISPEQVIELAVDFKKPVYKEVLAVFAPHFQ

SEQ ID NO: 4949 - protein, 161 aa, Glycine max
  misc_feature (1)..(161): Ceres Seq. ID no. 14306013
MEAPPEGYRRNVGICLMNNHKKIFAASRLDIPNAWQMPQGGIDEGEDPRNAAIRELREETGVNSVEVIAEVPYWLTYDFPPKVREKLNIQWGSDWKGQAQKWFLFKFTGQDQEINLLGDGTEKAEFGEWSWISPEQVIELAVDFKKPVYKEVLAVFAPHFQ

SEQ ID NO: 4950 - DNA, 831 bp, Glycine max
  misc_feature (1)..(831): Ceres Seq. ID no. 14306036
ccatttgatgtgaacaagcttcctatagaaactcaaaatcttctagctgtgtgcaagagggaaagcatggctgagtatccatcacctgaaaaggatgataataattgtaagcacatggatgactacccttcacctcaaacagataatccaaagcctttctctcaaatatacaaacgaaggcgtcataacttgaactccaacaactctaatgtttctggagattcagtccgaaccagccaggatccgtgctcctctacaataactaccgctgcaactgcactcccaaccgcaactgttgctggcacagccaccaacactgcaccgaaaaaacattttctgtctgcactggtggagttttccctgctagaatcccttgaatcaaaggacaaccttgcttcaattaaggcaccggattttgacactgaaaatctcgagtcatccatgcctccaagttgcgcaaagttcatcaagcaaatgcagagtgagatgcagaagctttcagttgaaaaggagacgataaggtttgagatgatgagcgcacaagcgatgattaacattctccagtctcgcatcgacgttctcagcaaagaaaatgaggatttgaagaggatggtggcccaaaatccataggaattggcaatgtcatgcccttgtatcagtgtaagttagttacaactgagtaatgaagctcagtcttccggatattttcttatttttctgagtaagaattgtagttcgtttctttggctaaacttattttaaacttgtcatcgtgtatcatatgactttcagtttcccattgttgtgaaaatatggccatgttagcatctc

SEQ ID NO: 4951 - protein, 209 aa, Glycine max
  misc_feature (1)..(209): Ceres Seq. ID no. 14306037
PFDVNKLPIETQNLLAVCKRESMAEYPSPEKDDNNCKHMDDYPSPQTDNPKPFSQIYKRRRHNLNSNNSNVSGDSVRTSQDPCSSTITTAATALPTATVAGTATNTAPKKHFLSALVEFSLLESLESKDNLASIKAPDFDTENLESSMPPSCAKFIKQMQSEMQKLSVEKETIRFEMMSAQAMINILQSRIDVLSKENEDLKRMVAQNP

SEQ ID NO: 4952 - protein, 187 aa, Glycine max
  misc_feature (1)..(187): Ceres Seq. ID no. 14306038
MAEYPSPEKDDNNCKHMDDYPSPQTDNPKPFSQIYKRRRHNLNSNNSNVSGDSVRTSQDPCSSTITTAATALPTATVAGTATNTAPKKHFLSALVEFSLLESLESKDNLASIKAPDFDTENLESSMPPSCAKFIKQMQSEMQKLSVEKETIRFEMMSAQAMINILQSRIDVLSKENEDLKRMVAQNP

SEQ ID NO: 4953 - protein, 171 aa, Glycine max
  misc_feature (1)..(171): Ceres Seq. ID no. 14306039
MDDYPSPQTDNPKPFSQIYKRRRHNLNSNNSNVSGDSVRTSQDPCSSTITTAATALPTATVAGTATNTAPKKHFLSALVEFSLLESLESKDNLASIKAPDFDTENLESSMPPSCAKFIKQMQSEMQKLSVEKETIRFEMMSAQAMINILQSRIDVLSKENEDLKRMVAQNP

SEQ ID NO: 4954 - DNA, 410 bp, Glycine max
  misc_feature (1)..(410): Ceres Seq. ID no. 14306107
tattgttccatggttggtgcagcataactcctgccccgtttgccgccaagaactgccgccacaaggattgagtagtagtaacggtggcgccaatggtagaagtagaagtgcaagggtaagtagtagtggtagggagagccatggaaggagaaatccattttcctttttgtggccttttcgttcttctcattctagcagtaatgatgaagcaacaggaagcagcacaccaacaccaactatccctgagaatagccatcatcatcatgctgggtattctgggtggccatttgaatgacttggtgtgagtataacattttcttttgtttattaatatgctcatgttgatttaaaaatcttatgtactgatgctgcttgcttggggtgaaaacggtttgagatctgagcctacc

SEQ ID NO: 4955 - protein, 97 aa, Glycine max
  misc_feature (1)..(97): Ceres Seq. ID no. 14306108
IVPWLVQHNSCPVCRQELPPQGLSSSNGGANGRSRSARVSSSGRESHGRRNPFSFLWPFRSSHSSSNDEATGSSTPTPTIPENSHHHHAGYSGWPFE

SEQ ID NO: 4956 - protein, 54 aa, Glycine max
  misc_feature (1)..(54): Ceres Seq. ID no. 14306109
MEGEIHFPFCGLFVLLILAVMMKQQEAAHQHQLSLRIAIIIMLGILGGHLNDLV

SEQ ID NO: 4957 - DNA, 952 bp, Glycine max
  misc_feature (1)..(952): Ceres Seq. ID no. 14306198
attgctcctcgcgcttaaacactttcgggcgagtgtgtgtgtagcagtttctggttctgtttttggtttcgtttcagcaaaacctctcttcttcttctgattgattccacctcgcgatttttcgattttcgtttgttttcttctttttcggtttctgatctgaactcgattcgattcgctattgccggaaaatgagtcctccggcaagtgtccggtgatgatcgctccctcgagaggttgttgaggttatcgttgttgttcttcgaagtcatggtttcgatctgaggttttggcgctctcgagttcgttttgtactgttttacgtgtgacatgtgaattggaatgcttattccagcttatacaaaacagagacggatctcttcctattgttctcgctttgtttcttttgcagtagcatcatcatcatcaccataccttgttcagattctgctcactttcaccacaacggctttactatttaccgcgtttcgttttcgtgtcaccgcaaataatgaaaggaggtgttccctgtatccactcctcgtcagggaagatctgaagcagtgctagctgctcacgtcctgtaatggacgcatactcctccggcgaagaagtggttgttaagactagaaaaccatatacaatcactaagcaaagggaacgatggacagaggaggagcataataggtttctagaagctttgaaactacacgggcgagcatggcagcgcatagaagagcatataggaacaaagactgccgtgcaaataaggagtcatgcacagaagttctttacaaaggtcaatgggtaccttctcaccttggtttatatgtttaaaatttccttccttttgtttttaacttatgctttaaaagacttgctgtcgatttatgtatcagttccgtatctcttttgattcactttgatgaataaaaatcccttctaactgccc

SEQ ID NO: 4958 - protein, 109 aa, Glycine max
  misc_feature (1)..(109): Ceres Seq. ID no. 14306199
MDAYSSGEEVVVKTRKPYTITKQRERWTEEEHNRFLEALKLHGRAWQRIEEHIGTKTAVQIRSHAQKFFTKVNGYLLTLVYMFKISFLLFLTYALKDLLSIYVSVPYLF

SEQ ID NO: 4959 - protein, 75 aa, Glycine max
  misc_feature (1)..(75): Ceres Seq. ID no. 14306200
MLIPAYTKQRRISSYCSRFVSFAVASSSSPYLVQILLTFTTTALLFTAFRFRVTANNERRCSLYPLLVREDLKQC

SEQ ID NO: 4960 - DNA, 584 bp, Glycine max
  misc_feature (1)..(584): Ceres Seq. ID no. 14306230
accatttcttcaaaccttatctttcctcaaaaacacacacagacgatggcgtcgctgctaatcggagctcctccgcgagtcaccgtcgcatcatcttcgaggctatcatcatctcactcggaaaccgtcggtgtctctctcccttgcttcactcagcagctgtctctctccgcttcgtcatcatccagctcaattccacttgtgtactgtggccgaggcgaccgcaaaacagcgagaggaaagcgtttcaatcactccttcgggaatgcgaggccacggaacaaggataaaggaagagggccgcagagagtaccagtccctcctgcaccaccgaggaaggataagtttgagaacgacgagaagatcaagattgacatcgacgagtccctcttctccaactagagtctttcttcacttcttctcactgtaattctctatttgagtagaagatgctgctactctttcttgctgttaaacatatcctctttctatgaaaaaatctgctttcttgttttcattgataatgtttctgtaatatgagtgatcgagtcttaactttgttttattaagagacattgaaagat

SEQ ID NO: 4961 - protein, 133 aa, Glycine max
  misc_feature (1)..(133): Ceres Seq. ID no. 14306231
TISSNLIFPQKHTQTMASLLIGAPPRVTVASSSRLSSSHSETVGVSLPCFTQQLSLSASSSSSSIPLVYCGRGDRKTARGKRFNHSFGNARPRNKDKGRGPQRVPVPPAPPRKDKFENDEKIKIDIDESLFSN

SEQ ID NO: 4962 - protein, 118 aa, Glycine max
  misc_feature (1)..(118): Ceres Seq. ID no. 14306232
MASLLIGAPPRVTVASSSRLSSSHSETVGVSLPCFTQQLSLSASSSSSSIPLVYCGRGDRKTARGKRFNHSFGNARPRNKDKGRGPQRVPVPPAPPRKDKFENDEKIKIDIDESLFSN

SEQ ID NO: 4963 - protein, 95 aa, Glycine max
  misc_feature (1)..(95): Ceres Seq. ID no. 14306233
HFFKPYLSSKTHTDDGVAANRSSSASHRRIIFEAIIISLGNRRCLSPLLHSAAVSLRFVIIQLNSTCVLWPRRPQNSERKAFQSLLRECEATEQG

SEQ ID NO: 4964 - DNA, 835 bp, Glycine max
  misc_feature (1)..(835): Ceres Seq. ID no. 14306255
aatattaatctcttccatcacttaaatctcaattcaccgcaaaccaaaaaaagcttcatcatcatcttcttcttctctgcatcatcacaatggctgaagtacgttcacaacaacaacaaccccagcatgtgcaagtccacgcaaccacaacacacaccccacaacaccatggcggggaaggtggcagcggcattctgaacctcatcccggagatgtccctcacgggttcccaactcctagctctcctcgccggcgttccccttggtgcaatgctgctcctcctctccggcatctcgctcatcgccagcctcttggggctggcggtggcgacgccgctcttcatcttcttcagcccgctgctggtccccgccgccttcgccataggaatggcggtgaccgcggtgctggcggcgggggcgtgcgggctggcggggctcgtgttgttctcgtgggtggtgaactatctccggcagatgccacgggggacgacgatgatgacggtgctgccggagcaagcgaagcggcacgtggcggacatggcggagtacgtggggcagaagacgaaggaggttgggcaagacattcagacaagggcacatcatgcccagggaacaacaaggatgacagtgcattgagttatcatgagacaagaaaatggtttcaatttatatcgcttatgtatgacttgtgagatatactagtatgtaattaacctttggtacgtgtgttttggactttggaggagttccattttcagtgttccatgttgtgtcactttctgtatttgctcatgtacgtgtaatcagtaatattaatgcatttttcttttgggttc

SEQ ID NO: 4965 - protein, 181 aa, Glycine max
  misc_feature (1)..(181): Ceres Seq. ID no. 14306256
MAEVRSQQQQPQHVQVHATTTHTPQHHGGEGGSGILNLIPEMSLTGSQLLALLAGVPLGAMLLLLSGISLIASLLGLAVATPLFIFFSPLLVPAAFAIGMAVTAVLAAGACGLAGLVLFSWVVNYLRQMPRGTTMMTVLPEQAKRHVADMAEYVGQKTKEVGQDIQTRAHHAQGTTRMTVH

SEQ ID NO: 4966 - protein, 140 aa, Glycine max
  misc_feature (1)..(140): Ceres Seq. ID no. 14306257
MSLTGSQLLALLAGVPLGAMLLLLSGISLIASLLGLAVATPLFIFFSPLLVPAAFAIGMAVTAVLAAGACGLAGLVLFSWVVNYLRQMPRGTTMMTVLPEQAKRHVADMAEYVGQKTKEVGQDIQTRAHHAQGTTRMTVH

SEQ ID NO: 4967 - protein, 121 aa, Glycine max
  misc_feature (1)..(121): Ceres Seq. ID no. 14306258
MLLLLSGISLIASLLGLAVATPLFIFFSPLLVPAAFAIGMAVTAVLAAGACGLAGLVLFSWVVNYLRQMPRGTTMMTVLPEQAKRHVADMAEYVGQKTKEVGQDIQTRAHHAQGTTRMTVH

SEQ ID NO: 4968 - DNA, 941 bp, Glycine max
  misc_feature (1)..(941): Ceres Seq. ID no. 14306279
atccttttctctgggaattatagtttgtagagaacacatacatacattttcattttcagaggaatgatcatggaagaatcctcggtacacgagatcaaaacccctctcctgtcatctaacaatgaggaagatgaagttggaagcagtactagccataggcagcaaaatgaagagaactcgcccataaaacaagtggccctaacggtgccaaccaccgatgacccatctcttccagttctgacgttccgaatgtgggtgttgggaactctatcatgcgtgctgctgtcgttcctgaaccagttcttctggtaccgcatccagcctctcaccatcaccgcgatctccgcccagatcgcggtggtgccgctcggccaactcatggccgcaacgatcactaagcgcgtgttcttcagaggaacacgctgggaattcactctcaatccgggacccttcaacgtcaaggagcacgttctcatcaccatcttcgccaactccggcgccggcaccgtctacgccatccacgttgttaccgctgtcaaaatcttttaccacaaacacatctccttctttgtctccttgcttgtggtcatcaccacacaggtattgggtttcggatgggctggcatatttagaagatacctggtagagccagcggcaatgtggtggccagcaaatttagttcaagtttcactcttcaggtaataattataatactacagcattaacattttattattctaatttatatggtcaatatgaagagtaaatgtattgaatactatgctctagctagtaacttgacacactacgtaagaattagttagttcgccgacaatatcgtaataagatacaaaagtatccatacctaccaataacatcaatgtaatatatttacgattttttagtttacctatatgtcatcactcactcttgcgtggtgt

SEQ ID NO: 4969 - protein, 212 aa, Glycine max
  misc_feature (1)..(212): Ceres Seq. ID no. 14306280
MIMEESSVHEIKTPLLSSNNEEDEVGSSTSHRQQNEENSPIKQVALTVPTTDDPSLPVLTFRMWVLGTLSCVLLSFLNQFFWYRIQPLTITAISAQIAVVPLGQLMAATITKRVFFRGTRWEFTLNPGPFNVKEHVLITIFANSGAGTVYAIHVVTAVKIFYHKHISFFVSLLVVITTQVLGFGWAGIFRRYLVEPAAMWWPANLVQVSLFR

SEQ ID NO: 4970 - protein, 210 aa, Glycine max
  misc_feature (1)..(210): Ceres Seq. ID no. 14306281
MEESSVHEIKTPLLSSNNEEDEVGSSTSHRQQNEENSPIKQVALTVPTTDDPSLPVLTFRMWVLGTLSCVLLSFLNQFFWYRIQPLTITAISAQIAVVPLGQLMAATITKRVFFRGTRWEFTLNPGPFNVKEHVLITIFANSGAGTVYAIHVVTAVKIFYHKHISFFVSLLVVITTQVLGFGWAGIFRRYLVEPAAMWWPANLVQVSLFR

SEQ ID NO: 4971 - protein, 150 aa, Glycine max
  misc_feature (1)..(150): Ceres Seq. ID no. 14306282
MWVLGTLSCVLLSFLNQFFWYRIQPLTITAISAQIAVVPLGQLMAATITKRVFFRGTRWEFTLNPGPFNVKEHVLITIFANSGAGTVYAIHVVTAVKIFYHKHISFFVSLLVVITTQVLGFGWAGIFRRYLVEPAAMWWPANLVQVSLFR

SEQ ID NO: 4972 - DNA, 910 bp, Glycine max
  misc_feature (1)..(910): Ceres Seq. ID no. 14306315
atagttgaatttttaacttgtctgttcttatcttcatcctacgccaatagcccaaaaccttgttctctttttgtggttcatttctctcttccagatgccacttgccgttcttcaccctcacgattttctcaggaaaaacccatctaaccagtaccagaccataatccctcactctcccaacatgaatcctaataagtctcatcggacttcccgaaaccgtaagaagcggcccgatccaagcccacaaggcgttgtcagcccagcccggctcacattatccccgaaaccccaagtcaaaaacaagccgcagcagcaactcgtcatgggtcaggtcaaaatactcaaacgcggccaacttttgacccaaacgacgccggatccaccgccgcagacggaaatcgtcgatcagaagttaactccgcagacggaaaccgtcgaaaaaaaggacttaacttcaatcgtagatggtttatatgcaggctattcgatgttggtgatgtctccacctcctagctccgttccgttaccggctttcatcactaagaagattgcggttgttagtgacgccacgagcgacttgcggaaaatgttacggcttgattttccctaatcctgtggcggtttgtgaatgaacgaggatttgaacggaggttgttggtgattagggcattgtagtgctcgatcttctcttattttttcagcgggaaggtcgtgtcacgaatgcaagtctcttattgtttagaactttcttcagattgccgtacatacatgttactactgggattagtcttcgtactttttagattaattactttgtgatactaattattagttttaaggaataggcttctgtatatctgtgtaatgctttgtaagtatttaggatatagaagcattttcttcctctctc

SEQ ID NO: 4973 - protein, 171 aa, Glycine max
  misc_feature (1)..(171): Ceres Seq. ID no. 14306316
MPLAVLHPHDFLRKNPSNQYQTIIPHSPNMNPNKSHRTSRNRKKRPDPSPQGVVSPARLTLSPKPQVKNKPQQQLVMGQVKILKRGQLLTQTTPDPPPQTEIVDQKLTPQTETVEKKDLTSIVDGLYAGYSMLVMSPPPSSVPLPAFITKKIAVVSDATSDLRKMLRLDFP

SEQ ID NO: 4974 - protein, 142 aa, Glycine max
  misc_feature (1)..(142): Ceres Seq. ID no. 14306317
MNPNKSHRTSRNRKKRPDPSPQGVVSPARLTLSPKPQVKNKPQQQLVMGQVKILKRGQLLTQTTPDPPPQTEIVDQKLTPQTETVEKKDLTSIVDGLYAGYSMLVMSPPPSSVPLPAFITKKIAVVSDATSDLRKMLRLDFP

SEQ ID NO: 4975 - protein, 95 aa, Glycine max
  misc_feature (1)..(95): Ceres Seq. ID no. 14306318
MGQVKILKRGQLLTQTTPDPPPQTEIVDQKLTPQTETVEKKDLTSIVDGLYAGYSMLVMSPPPSSVPLPAFITKKIAVVSDATSDLRKMLRLDFP

SEQ ID NO: 4976 - DNA, 922 bp, Glycine max
  misc_feature (1)..(922): Ceres Seq. ID no. 14306325
aatcgtctccaccttgctttcttctccaatgtccgattctctcaccgatcttgcgccaaatacaaattcgttacatcctaacccagggttccgacgagcatggtggacggtccgacgagtccaggcaatggtagccatgagagtggcgagcatagccctcgctctaacgtgcgcgagtaggacaggtacctccccatcgctaacataagccccatcatgaagaaggcactacctacgaatggtaaaatcgccaaggacgccaaagagactgttcaggaatgcttatccgagtttttaagatcaacctttcagacacatgtattgagatggatggattacattcagcacaagcaagaatttgtaggtttatttgagaaaatattgttgcagaagcctggatttgagcccccggtaacacatcctgttggagttgtggaagctgatttaaaatcaaacaacactgagcaaagcgtaaagaatgtcagcaagtccgaagtagactcaagcaaggataaaaacaaagttgaggattgacggaaaagaaacagccggataagattacaccggtattttctttgcactcgttaactttgcatttttaaaattcataactcatgttttgtttaagggtgaagatttaacattcaacatgagtctaaaggtggggaacatgagtttagtggttgcattggagcagtatatcagcttctttcagagataaagttcctggatggatgaaagatactttttttgtgagtttgtattgttaaggcatagtattttgttatcttttgaagatcaattcttattatagtttaactagtaaatttttattcttttcttttagcctattcttatttttttctcttgttaaaaatcatagtaatgttatatggtgcaatttatggttttaggagtgcac

SEQ ID NO: 4977 - protein, 105 aa, Glycine max
  misc_feature (1)..(105): Ceres Seq. ID no. 14306326
MKKALPTNGKIAKDAKETVQECLSEFLRSTFQTHVLRWMDYIQHKQEFVGLFEKILLQKPGFEPPVTHPVGVVEADLKSNNTEQSVKNVSKSEVDSSKDKNKVED

SEQ ID NO: 4978 - protein, 68 aa, Glycine max
  misc_feature (1)..(68): Ceres Seq. ID no. 14306327
IVSTLLSSPMSDSLTDLAPNTNSLHPNPGFRRAWWTVRRVQAMVAMRVASIALALTCASRTGTSPSLT

SEQ ID NO: 4979 - protein, 67 aa, Glycine max
  misc_feature (1)..(67): Ceres Seq. ID no. 14306328
MDYIQHKQEFVGLFEKILLQKPGFEPPVTHPVGVVEADLKSNNTEQSVKNVSKSEVDSSKDKNKVED

SEQ ID NO: 4980 - DNA, 402 bp, Glycine max
  misc_feature (1)..(402): Ceres Seq. ID no. 14306345
aaaaagtgtatatagatatcgattgtagtgagctgtatcttccatctttcaatacattgaattaggtttataatttaaaaattttactcaaggaaaatgagtggctttagagcagcaggaatgaactacattcaagtgtccaacatttgtgctaagctgctaaggcgagctctaaagccaaatttgaagacagaggctctaaaacgagacgaatctgttgtgaggttcactccatggaaagatggaaaggcaatcactgaaaaataaagagattccggaaagattaagaggacgacataaggaaacccagcagcagttcaacataaagtcacctaaaaccatcttagattgaattgttaattatttaagctgtttttactcgctattaaagagtgttaattt

SEQ ID NO: 4981 - protein, 56 aa, Glycine max
  misc_feature (1)..(56): Ceres Seq. ID no. 14306346
MSGFRAAGMNYIQVSNICAKLLRRALKPNLKTEALKRDESVVRFTPWKDGKAITEK

SEQ ID NO: 4982 - protein, 48 aa, Glycine max
  misc_feature (1)..(48): Ceres Seq. ID no. 14306347
MNYIQVSNICAKLLRRALKPNLKTEALKRDESVVRFTPWKDGKAITEK

SEQ ID NO: 4983 - protein, 36 aa, Glycine max
  misc_feature (1)..(36): Ceres Seq. ID no. 14306348
MERQSLKNKEIPERLRGRHKETQQQFNIKSPKTILD

SEQ ID NO: 4984 - DNA, 817 bp, Glycine max
  misc_feature (1)..(817): Ceres Seq. ID no. 14306349
attaacattcctccaagcaccatcaagattcaagcacatagttatcatcaattccccagctagttttggccacgcctgcatcttcttctgctttaagctatggcctctaacttcagcttgagaactttgatgatatttgcccttgcattttctctcgccctgcaaggcactcttggagggatagaatgcgagagtctgagccatgacacatgctcattcgccgtgacatctgctggcaaacgatgtgtgcttgagaagcaggtgaagaggactggtgaggaagcatacacatgcaggacatcagagattgaagctgataaactgaaggaccacattgaaactgaacaatgcatcaaggcttgtggtttggacagaaagtcccttggaatctcatcagactctcttcttcaatctagcttcacgcaaaagctctgctcccccatctgctaccagtgttgcccaaacgttgttgacttatacttcaatctggcagctggtgaaggtgtgtttcttcccaagttgtgtgaagcacaaggtctaaatgctcgtcgaggaatggctgaactgaaaagctctggtatcgtggcaccgggacctgtgcacggtgtgcagttcacagctactcctccgattaaccctgtggagctcacaattgaacctgccgttgccccatcaccaaactaaagtcaagtctagtttttttagaacacgcaaaagaaattgagaaaagcgtgtattaaacaacttagcatatactagtatacagatgagagtggcatatatactatattttgtttgtaataatgaagttgcacct

SEQ ID NO: 4985 - protein, 194 aa, Glycine max
  misc_feature (1)..(194): Ceres Seq. ID no. 14306350
MASNFSLRTLMIFALAFSLALQGTLGGIECESLSHDTCSFAVTSAGKRCVLEKQVKRTGEEAYTCRTSEIEADKLKDHIETEQCIKACGLDRKSLGISSDSLLQSSFTQKLCSPICYQCCPNVVDLYFNLAAGEGVFLPKLCEAQGLNARRGMAELKSSGIVAPGPVHGVQFTATPPINPVELTIEPAVAPSPN

SEQ ID NO: 4986 - protein, 184 aa, Glycine max
  misc_feature (1)..(184): Ceres Seq. ID no. 14306351
MIFALAFSLALQGTLGGIECESLSHDTCSFAVTSAGKRCVLEKQVKRTGEEAYTCRTSEIEADKLKDHIETEQCIKACGLDRKSLGISSDSLLQSSFTQKLCSPICYQCCPNVVDLYFNLAAGEGVFLPKLCEAQGLNARRGMAELKSSGIVAPGPVHGVQFTATPPINPVELTIEPAVAPSPN

SEQ ID NO: 4987 - DNA, 1168 bp, Glycine max
  misc_feature (1)..(1168): Ceres Seq. ID no. 14306447
gtgatgtttgagtgccacaagcttcagtttcagataatgtcaactgtgtataacaacagccatgctagaattgccacacactctgaattacgtagacaaattacttcctatcttgaaagtgagctccattttctatcctctagttttaccaagtggattggagctcagaaattctatctggaggccataaatggatggctgcacaaatgtgtttctcttaaacaaaagccaggcaagaaaaagagaccccaacgtccactcctaagaatgtatggtcctccaatatatgccacctgtgaaatctggttggaaaagctcggtgaattacccatccaggatgttgtggattctatgaagagtttagcaggtgaaattgcccggttcttaccgcgtcaagagaagaaccacagtaaaggtgcaaatcaaccccatataacatcttggaatgctcatatccgcagcgaatcatcggataatctattgagagatgacacattagaggactgggattcaggttttgatcaatttcgtgcaagctttctcggatttcttgctcaattaaataatttttccaggtcttcggtcatgatgtacactgatcttagacaagccattcagattgccaagaagaattatcatcaaagatctaattctcaggctcaagatggtcagtggaattctcactctccagatgaaaatcccaagtctcaatctctagacgataatttcaagtctcaatctaaagtggccaattctgaaaagaaaagcccaaaacaataagtaaagggttgcattaaatatggtggagttgcagcattataggtttatgttgaactcgtgaatgttgagtttcatacaagtccattggatgcagcatttgtacatgaaagcaaagaaaaggaaggaataaagtatatttacaggatgaccatactttatatgatagtttttcatcttttctataatacaagacagtggttacaggttaggaaaagctctaattactaggttctgatgatgtgttatgaatgcaaagagaaggaacttgtgaagtgtcatttttgtatacaaagtgtcatatataggactttttattttctttgccaatgtaatttaaatttgtcatatccatgagtataggttgaggtttatttgaattttgtgatgg

SEQ ID NO: 4988 - protein, 259 aa, Glycine max
  misc_feature (1)..(259): Ceres Seq. ID no. 14306448
VMFECHKLQFQIMSTVYNNSHARIATHSELRRQITSYLESELHFLSSSFTKWIGAQKFYLEAINGWLHKCVSLKQKPGKKKRPQRPLLRMYGPPIYATCEIWLEKLGELPIQDVVDSMKSLAGEIARFLPRQEKNHSKGANQPHITSWNAHIRSESSDNLLRDDTLEDWDSGFDQFRASFLGFLAQLNNFSRSSVMMYTDLRQAIQIAKKNYHQRSNSQAQDGQWNSHSPDENPKSQSLDDNFKSQSKVANSEKKSPKQ

SEQ ID NO: 4989 - protein, 258 aa, Glycine max
  misc_feature (1)..(258): Ceres Seq. ID no. 14306449
MFECHKLQFQIMSTVYNNSHARIATHSELRRQITSYLESELHFLSSSFTKWIGAQKFYLEAINGWLHKCVSLKQKPGKKKRPQRPLLRMYGPPIYATCEIWLEKLGELPIQDVVDSMKSLAGEIARFLPRQEKNHSKGANQPHITSWNAHIRSESSDNLLRDDTLEDWDSGFDQFRASFLGFLAQLNNFSRSSVMMYTDLRQAIQIAKKNYHQRSNSQAQDGQWNSHSPDENPKSQSLDDNFKSQSKVANSEKKSPKQ

SEQ ID NO: 4990 - protein, 247 aa, Glycine max
  misc_feature (1)..(247): Ceres Seq. ID no. 14306450
MSTVYNNSHARIATHSELRRQITSYLESELHFLSSSFTKWIGAQKFYLEAINGWLHKCVSLKQKPGKKKRPQRPLLRMYGPPIYATCEIWLEKLGELPIQDVVDSMKSLAGEIARFLPRQEKNHSKGANQPHITSWNAHIRSESSDNLLRDDTLEDWDSGFDQFRASFLGFLAQLNNFSRSSVMMYTDLRQAIQIAKKNYHQRSNSQAQDGQWNSHSPDENPKSQSLDDNFKSQSKVANSEKKSPKQ

SEQ ID NO: 4991 - DNA, 1130 bp, Glycine max
  misc_feature (1)..(1130): Ceres Seq. ID no. 14306479
gcttaaattaatcttcgttttggcctcaaccaacaataattctagtttctctcattccttctgtcccttaattgcgaagcaaatctttcttcttcccatggaaatggaaccgacgtgcgtcgacacttccctcaaccttaacgttattccttccccacacatcgaccacctcgcgggagaagttttgtttgaagagttgcggcgtctaagcagtgagaacaagaggctaactgagacgctgaaccacttgtgcgagagctatgttgccttgcagaaacatttgagtgaattcagccaacttaggaacgcaaattttgataaagaaggaacttgtgcagttccgtcgctaaagagaaagcccgagagtgagaattgtgtgaatctgtttggtactgagtgcaacaccatcacagaggaagaaacattcaaaaggcccaagcatagcaccgagccaaaggtttccaaagttcttacacggacagatgcatctgatactggcttatatgtgagggacggatatcagtggagaaaatacggtcagaaagtcactagagataacccttctcctagggcttacttcaagtgttcatatgcccctagctgtccagtaaaaaagaaggtgcaaagaagtgtagaagatccaagtgtgttggtaacaacttacgaaggggagcacaaccatgggcaacaacatcaaactgcagaaatatcaattaattcatcaagcaaaagtgaaacacctaggcctgcagtttcaccctcagccatgaatattcggagtagtgcagcagcaggtccaattgtaacacttgacttggtcaagtcaaaagttgttgacattaatgcgcaaaagtcatctctccagcagtttttagttcaccaaatggctacttctttgacaagagatcctaatttcacagccgcacttgcttctgccatctctggaagaattctagatgatacttctgtgggaaaacgttgaattattaagagatatatatgtattaatttcactgatgaacatatatgaattttgtcacttttcttcgttttaatatttaataacagctagtcacgaggagtagtgttctatgcagcatctatatttatcttatacaagtaaattttat

SEQ ID NO: 4992 - protein, 326 aa, Glycine max
  misc_feature (1)..(326): Ceres Seq. ID no. 14306480
LKLIFVLASTNNNSSFSHSFCPLIAKQIFLLPMEMEPTCVDTSLNLNVIPSPHIDHLAGEVLFEELRRLSSENKRLTETLNHLCESYVALQKHLSEFSQLRNANFDKEGTCAVPSLKRKPESENCVNLFGTECNTITEEETFKRPKHSTEPKVSKVLTRTDASDTGLYVRDGYQWRKYGQKVTRDNPSPRAYFKCSYAPSCPVKKKVQRSVEDPSVLVTTYEGEHNHGQQHQTAEISINSSSKSETPRPAVSPSAMNIRSSAAAGPIVTLDLVKSKVVDINAQKSSLQQFLVHQMATSLTRDPNFTAALASAISGRILDDTSVGKR

SEQ ID NO: 4993 - protein, 294 aa, Glycine max
  misc_feature (1)..(294): Ceres Seq. ID no. 14306481
MEMEPTCVDTSLNLNVIPSPHIDHLAGEVLFEELRRLSSENKRLTETLNHLCESYVALQKHLSEFSQLRNANFDKEGTCAVPSLKRKPESENCVNLFGTECNTITEEETFKRPKHSTEPKVSKVLTRTDASDTGLYVRDGYQWRKYGQKVTRDNPSPRAYFKCSYAPSCPVKKKVQRSVEDPSVLVTTYEGEHNHGQQHQTAEISINSSSKSETPRPAVSPSAMNIRSSAAAGPIVTLDLVKSKVVDINAQKSSLQQFLVHQMATSLTRDPNFTAALASAISGRILDDTSVGKR

SEQ ID NO: 4994 - protein, 292 aa, Glycine max
  misc_feature (1)..(292): Ceres Seq. ID no. 14306482
MEPTCVDTSLNLNVIPSPHIDHLAGEVLFEELRRLSSENKRLTETLNHLCESYVALQKHLSEFSQLRNANFDKEGTCAVPSLKRKPESENCVNLFGTECNTITEEETFKRPKHSTEPKVSKVLTRTDASDTGLYVRDGYQWRKYGQKVTRDNPSPRAYFKCSYAPSCPVKKKVQRSVEDPSVLVTTYEGEHNHGQQHQTAEISINSSSKSETPRPAVSPSAMNIRSSAAAGPIVTLDLVKSKVVDINAQKSSLQQFLVHQMATSLTRDPNFTAALASAISGRILDDTSVGKR

SEQ ID NO: 4995 - DNA, 1171 bp, Glycine max
  misc_feature (1)..(1171): Ceres Seq. ID no. 14306483
attatcaatcctcatgcatttccttccaggatgacaattgctatgcttttggaatctgttgctgctaagggaggtagcttgcgtggagaatttgtagatgcaactccatttcgaagttcagtgaagaaagacagtggggagtctgattcaatgtcaggttcaattgtcgatgatcttggccttctgctaagagaaaaaggatttaattatcacggtttggaggttctatatagtggtgtttatggaacggaactaacatgtgagatatttattggacctgtttattatcaacggctgcgtcacatggtttcagacaaatttcaggttcgatctactggcacaattgaccaggtcacccggcagccaataaaaggacgaaagcgtggtgggggaattcgatttggagaaatggaacgcgactctctgcttgcacatggagctgcatatcttctgcatgataggttgcacacctgttctgattatcacattgctgatgtttgttcactttgtggaagcatgcttacaacaacattcacccaacctcaaaagcggccagttcgggagattggtggtctacccccgggaagagctccgaaaaaggtcacttgtcatgcttgccaaacgagtaagggcatggagacagttgccatgccctatgtatttagatatttggctgccgagttagcagcaatgaatataaaaatgactcttaagctcagtgatggagctggagccggagcctgatatgttatacttaaattgattggatgtgttaagtttgtgatttgtatcacaacaggaatgttcaatggaggctcagatgcttgctcacatcatggggagttaaaaaatttccaggccatgcattcatataggtgacatcacagactaatctgaattgctggctgcttttaacagatcctgatagtcgtgcaaggattgaagttagtcatgtgaaaatattgtttaatggattcaaatggtgggaggagataggtagattttataatgtcgtaaattgtatcataatcttgagttgtggtgatagcacccttaatcattgcttgaggacaaatacaattgtctattgtttttcgtattaaattatgttgtatccacctttagtaaaagtaaattcatacaatatagtttaattttgatactcttactc

SEQ ID NO: 4996 - protein, 247 aa, Glycine max
  misc_feature (1)..(247): Ceres Seq. ID no. 14306484
IINPHAFPSRMTIAMLLESVAAKGGSLRGEFVDATPFRSSVKKDSGESDSMSGSIVDDLGLLLREKGFNYHGLEVLYSGVYGTELTCEIFIGPVYYQRLRHMVSDKFQVRSTGTIDQVTRQPIKGRKRGGGIRFGEMERDSLLAHGAAYLLHDRLHTCSDYHIADVCSLCGSMLTTTFTQPQKRPVREIGGLPPGRAPKKVTCHACQTSKGMETVAMPYVFRYLAAELAAMNIKMTLKLSDGAGAGA

SEQ ID NO: 4997 - protein, 237 aa, Glycine max
  misc_feature (1)..(237): Ceres Seq. ID no. 14306485
MTIAMLLESVAAKGGSLRGEFVDATPFRSSVKKDSGESDSMSGSIVDDLGLLLREKGFNYHGLEVLYSGVYGTELTCEIFIGPVYYQRLRHMVSDKFQVRSTGTIDQVTRQPIKGRKRGGGIRFGEMERDSLLAHGAAYLLHDRLHTCSDYHIADVCSLCGSMLTTTFTQPQKRPVREIGGLPPGRAPKKVTCHACQTSKGMETVAMPYVFRYLAAELAAMNIKMTLKLSDGAGAGA

SEQ ID NO: 4998 - protein, 233 aa, Glycine max
  misc_feature (1)..(233): Ceres Seq. ID no. 14306486
MLLESVAAKGGSLRGEFVDATPFRSSVKKDSGESDSMSGSIVDDLGLLLREKGFNYHGLEVLYSGVYGTELTCEIFIGPVYYQRLRHMVSDKFQVRSTGTIDQVTRQPIKGRKRGGGIRFGEMERDSLLAHGAAYLLHDRLHTCSDYHIADVCSLCGSMLTTTFTQPQKRPVREIGGLPPGRAPKKVTCHACQTSKGMETVAMPYVFRYLAAELAAMNIKMTLKLSDGAGAGA

SEQ ID NO: 4999 - DNA, 1754 bp, Glycine max
  misc_feature (1)..(1754): Ceres Seq. ID no. 14306497
taaagaatttggaatcaagattagtgagaaacttgctcaagttgaagctcgcatccttcctgctccatggctcaaatatcacgatacgggcagagaaaaggattgtcttcctcaagttgggcaatggaatatgatgaataagaaaatggttaatggggggacagttaacaactggttctgcataaacttttcaaggaatgttcaagatagtgttgcccgtggtttttgctatgaacttgctcagatgtgttatatatctggaatggcatttacacctgagccagtagtccccccagtcagtgctcgccctgatcaagtggaaaaggttcttaaaactcggtatcatgatgccaagaacaaactgcaaggaagagagcttgatttgctcatcgttatcttgcccgataataatggatctctttatggtgatctcaaacggatatgtgagactgacctaggacttgtttcacaatgttgcttaactaagcatgtcttcaaaatgagcaagcagtaccttgcaaatgttgctttgaaaattaatgtcaaagttggagggagaaacactgtactggttgatgcgctctcacgacgcattcccttggtcagtgacagacctacaattatttttggagctgatgtgactcatccacatcctggagaggattcaagcccatcaattgcagcagttgtggcttcgcaagactatcctgaaattacaaagtatgctggtttagtttgtgcccaagttcataggcaggaactcattcaggatcttttcaaacaatggcaagatccagtcagaggaacagtgactggtggaatgatcaaggaacttcttatatcttttaggagagctacaggacaaaagccacaacgcatcatattttatagggatggtgtgagtgagggacagttttatcaggttctactgtttgagcttgatgctattcgaaaggcatgtgcatccctggaacccaattatcagcctcctgtgacttttgtggtggttcaaaagcgtcaccacacaaggctctttgctagcaaccatcatgataagagttctgttgacaagagtggcaacatattgcctggcactgttgttgactccaaaatctgccatcccaccgaatttgacttttatctctgcagccatgctggaatacagggtacaagccgtcctgctcactaccatgtgttgtgggatgaaaacaattttactgctgatgccttgcaaacactcaccaacaatctttgctacacatatgctcggtgcacccggtctgtttcaatcgtgcctcctgcatactatgctcaccttgctgcattccgcgcaaggttttacatggaaccagagacgtcggatagtggctctatgacaagtggtgctgttgcaggccgtgggatgggcggtgtagggcgtagcacgcgtgtacctggtgccaatgctgctgtgagaccattgcctgcactcaaggagaacgtcaagagagttatgttttattgttaagacatgaatgccaaagattactgttaaaaccttgtttagtgagtgcttttttgctttcaaagtttctccagcagtggtcattaggtattgagttttttgaaactatttcaggagtgtggtgtgttgaataaggtgtgttgttttgaaagtatctcctgtgaggagtgctttttatctttgctgctgtgaggatatgaagtttgatgcaaattatgtttattgtcgaaagtactttgttgttgccgtg

SEQ ID NO: 5000 - protein, 501 aa, Glycine max
  misc_feature (1)..(501): Ceres Seq. ID no. 14306498
KEFGIKISEKLAQVEARILPAPWLKYHDTGREKDCLPQVGQWNMMNKKMVNGGTVNNWFCINFSRNVQDSVARGFCYELAQMCYISGMAFTPEPVVPPVSARPDQVEKVLKTRYHDAKNKLQGRELDLLIVILPDNNGSLYGDLKRICETDLGLVSQCCLTKHVFKMSKQYLANVALKINVKVGGRNTVLVDALSRRIPLVSDRPTIIFGADVTHPHPGEDSSPSIAAVVASQDYPEITKYAGLVCAQVHRQELIQDLFKQWQDPVRGTVTGGMIKELLISFRRATGQKPQRIIFYRDGVSEGQFYQVLLFELDAIRKACASLEPNYQPPVTFVVVQKRHHTRLFASNHHDKSSVDKSGNILPGTVVDSKICHPTEFDFYLCSHAGIQGTSRPAHYHVLWDENNFTADALQTLTNNLCYTYARCTRSVSIVPPAYYAHLAAFRARFYMEPETSDSGSMTSGAVAGRGMGGVGRSTRVPGANAAVRPLPALKENVKRVMFYC

SEQ ID NO: 5001 - protein, 458 aa, Glycine max
  misc_feature (1)..(458): Ceres Seq. ID no. 14306499
MMNKKMVNGGTVNNWFCINFSRNVQDSVARGFCYELAQMCYISGMAFTPEPVVPPVSARPDQVEKVLKTRYHDAKNKLQGRELDLLIVILPDNNGSLYGDLKRICETDLGLVSQCCLTKHVFKMSKQYLANVALKINVKVGGRNTVLVDALSRRIPLVSDRPTIIFGADVTHPHPGEDSSPSIAAVVASQDYPEITKYAGLVCAQVHRQELIQDLFKQWQDPVRGTVTGGMIKELLISFRRATGQKPQRIIFYRDGVSEGQFYQVLLFELDAIRKACASLEPNYQPPVTFVVVQKRHHTRLFASNHHDKSSVDKSGNILPGTVVDSKICHPTEFDFYLCSHAGIQGTSRPAHYHVLWDENNFTADALQTLTNNLCYTYARCTRSVSIVPPAYYAHLAAFRARFYMEPETSDSGSMTSGAVAGRGMGGVGRSTRVPGANAAVRPLPALKENVKRVMFYC

SEQ ID NO: 5002 - protein, 457 aa, Glycine max
  misc_feature (1)..(457): Ceres Seq. ID no. 14306500
MNKKMVNGGTVNNWFCINFSRNVQDSVARGFCYELAQMCYISGMAFTPEPVVPPVSARPDQVEKVLKTRYHDAKNKLQGRELDLLIVILPDNNGSLYGDLKRICETDLGLVSQCCLTKHVFKMSKQYLANVALKINVKVGGRNTVLVDALSRRIPLVSDRPTIIFGADVTHPHPGEDSSPSIAAVVASQDYPEITKYAGLVCAQVHRQELIQDLFKQWQDPVRGTVTGGMIKELLISFRRATGQKPQRIIFYRDGVSEGQFYQVLLFELDAIRKACASLEPNYQPPVTFVVVQKRHHTRLFASNHHDKSSVDKSGNILPGTVVDSKICHPTEFDFYLCSHAGIQGTSRPAHYHVLWDENNFTADALQTLTNNLCYTYARCTRSVSIVPPAYYAHLAAFRARFYMEPETSDSGSMTSGAVAGRGMGGVGRSTRVPGANAAVRPLPALKENVKRVMFYC

SEQ ID NO: 5003 - DNA, 1186 bp, Glycine max
  misc_feature (1)..(1186): Ceres Seq. ID no. 14306522
gtagctttaattacttcgggaatatcaacgaaacatcatcgttggtcactttctaccaaaccacaacgctcaaattgttttcttttgctatcactgttaccgaatccctcactttcttcttcatcttcttctcctttgtcacttctcagcaccactcaatctcttcaatttctttcttctactggcaataagcatcagcacactgccacatccagttcccttctgtgtgttcctttcttctactctctccagtccagccaaaacgaagctccttccatcattttcagttttttctgtcaagtgttgttgcttcttctcccaaactcgtccaaacattgctggtaacaagtcccccatgaacttgttgagcagaattgttgggttgggtagcccaagggcagcagaaaacatgaattcaaccactgctcggggaccagatgatgacataccagcaccaggtcaacagtttgcccagtttggtgctggctgcttttggagtgttgagctggccttccagagggcatcaggggtgatcaagacagaagttggttatagccaggggcagttgcataatccaagctatgaggatgtgtgtacggggaccacacaccactcggaggttgtcagggtccaatatgatcccaatgtatgtagctatgagagtttgcttgatgtgttctgggctagacatgatcctaccacactgaatcggcagggaaatgatgtgggaacacaatacaggtctggaatatactattacacacctgaacaagagaaggcagccatagagtctttagaacaacaacagaagaagctgaacaggaagattgttactgagatccttcctgccaagaagttctacagggctgaagaataccatcaacagtaccttgagaaaggagggagatttggttccaagcaatctgcttctaagggatgcaatgatccaattcgatgctatggttagattaatatgactagatgtttaaagcagggagttttcttgataagtatttgttaatataccaataaagtaagtcacaatctacctactctctgtattctatttatagggtgaagatcactatagaatccgaatcagttttagagttatatagtattttatatgtatagttatctaaaaactgattttataacacctttaatcagtgactcttctcgagtt

SEQ ID NO: 5004 - protein, 203 aa, Glycine max
  misc_feature (1)..(203): Ceres Seq. ID no. 14306523
MNLLSRIVGLGSPRAAENMNSTTARGPDDDIPAPGQQFAQFGAGCFWSVELAFQRASGVIKTEVGYSQGQLHNPSYEDVCTGTTHHSEVVRVQYDPNVCSYESLLDVFWARHDPTTLNRQGNDVGTQYRSGIYYYTPEQEKAAIESLEQQQKKLNRKIVTEILPAKKFYRAEEYHQQYLEKGGRFGSKQSASKGCNDPIRCYG

SEQ ID NO: 5005 - protein, 185 aa, Glycine max
  misc_feature (1)..(185): Ceres Seq. ID no. 14306524
MNSTTARGPDDDIPAPGQQFAQFGAGCFWSVELAFQRASGVIKTEVGYSQGQLHNPSYEDVCTGTTHHSEVVRVQYDPNVCSYESLLDVFWARHDPTTLNRQGNDVGTQYRSGIYYYTPEQEKAAIESLEQQQKKLNRKIVTEILPAKKFYRAEEYHQQYLEKGGRFGSKQSASKGCNDPIRCYG

SEQ ID NO: 5006 - protein, 114 aa, Glycine max
  misc_feature (1)..(114): Ceres Seq. ID no. 14306525
VALITSGISTKHHRWSLSTKPQRSNCFLLLSLLPNPSLSSSSSSPLSLLSTTQSLQFLSSTGNKHQHTATSSSLLCVPFFYSLQSSQNEAPSIIFSFFCQVLLLLLPNSSKHCW

SEQ ID NO: 5007 - DNA, 1559 bp, Glycine max
  misc_feature (1)..(1559): Ceres Seq. ID no. 14306538
agaaatagagagtaagcctgagatcatggaaaaagttggtgtggctgtaaatagcaaaaatcaagaatccaaagcaacttccaccattaccattaagggtttcatgagccttctaatgaaaagtgtagatgagaatggtgatggtagcaagagagttatttctctgggtatgggtgacccaactctcaccacttattttcccatctcaaatgtagctgaaaaagctgttgctgaagcacttcagtcacacaggtttcgtgactatgctcccactgcaggtcttccacaggccaggattgcaattgctgaatacctgtctcgtgaccttccttaccaattatcaagtgatgatgtttacatcacttgtggatgcacacaagccattgatgtttcagtggcgatgcttgctcgccccggtgcaaacatcattcttccaagaccaggtttcccactctatgaacttagcgcttcatttagaggagttgaagtgaggcattatgatctgcttccagagaaaggttgggaggttgatctagatgctgttgaagctcttgctgatcagaacactgttgctttggtgattataaatcctgggaatccttgtgggaatgtgtacagttaccatcatttggagaagattgctgaaactgcaaaacgggttggaacaattgtgattgctgatgaagtttatggccatcttgcatttgcgggcaagccttttgtgccaatgggagtttttggctctattgttcctgttctgactcttggctcattttctaagagatggatagttcctggatggaggcttagttggtttgtgacaaatgatccatctggcacttttagaaatccaaaggtagatgagcgctttaaaaagtactttgatcttttgggaggtccagccaccttcatccaggcagctgtacctcagataattgagcatactgaaaaggttttcttcaagaaaaccattgataatttgaggcatgttgcagatatatgttgtaaagagttgaaggatattccatacattatttgcccttataaaccagaagggtccatggctatgatggtgaaactaaacctttcacttctggaggatattagcgatgatattgatttctgtttcaagcttgctaaggaggaatctgttatcattcttccaggaactgcggtagggctgaataattggcttcgtattattttcgctacagatccagttgctcttgtagagggtttgaagagggtaaaatctttttgtgaaagacatgcaagaaagtggtcaatgactacagaataaaatccacaaattaaggcggctactattttgtattgaatacctagcttctcaaatatccaatttttacaaaattggatcgttttacgaataattgggttctcaaatatccatttttttgtgccagctctagtttatcactagcttttaaggaaggattctccaagtatctaggtgtttatcaattggtatttgtgtttattgttgtatctaaaaaattatatattttaaataattttgtgacgctatatattaatcaggt

SEQ ID NO: 5008 - protein, 432 aa, Glycine max
  misc_feature (1)..(432): Ceres Seq. ID no. 14306539
EIESKPEIMEKVGVAVNSKNQESKATSTITIKGFMSLLMKSVDENGDGSKRVISLGMGDPTLTTYFPISNVAEKAVAEALQSHRFRDYAPTAGLPQARIAIAEYLSRDLPYQLSSDDVYITCGCTQAIDVSVAMLARPGANIILPRPGFPLYELSASFRGVEVRHYDLLPEKGWEVDLDAVEALADQNTVALVIINPGNPCGNVYSYHHLEKIAETAKRVGTIVIADEVYGHLAFAGKPFVPMGVFGSIVPVLTLGSFSKRWIVPGWRLSWFVTNDPSGTFRNPKVDERFKKYFDLLGGPATFIQAAVPQIIEHTEKVFFKKTIDNLRHVADICCKELKDIPYIICPYKPEGSMAMMVKLNLSLLEDISDDIDFCFKLAKEESVIILPGTAVGLNNWLRIIFATDPVALVEGLKRVKSFCERHARKWSMTTE

SEQ ID NO: 5009 - protein, 424 aa, Glycine max
  misc_feature (1)..(424): Ceres Seq. ID no. 14306540
MEKVGVAVNSKNQESKATSTITIKGFMSLLMKSVDENGDGSKRVISLGMGDPTLTTYFPISNVAEKAVAEALQSHRFRDYAPTAGLPQARIAIAEYLSRDLPYQLSSDDVYITCGCTQAIDVSVAMLARPGANIILPRPGFPLYELSASFRGVEVRHYDLLPEKGWEVDLDAVEALADQNTVALVIINPGNPCGNVYSYHHLEKIAETAKRVGTIVIADEVYGHLAFAGKPFVPMGVFGSIVPVLTLGSFSKRWIVPGWRLSWFVTNDPSGTFRNPKVDERFKKYFDLLGGPATFIQAAVPQIIEHTEKVFFKKTIDNLRHVADICCKELKDIPYIICPYKPEGSMAMMVKLNLSLLEDISDDIDFCFKLAKEESVIILPGTAVGLNNWLRIIFATDPVALVEGLKRVKSFCERHARKWSMTTE

SEQ ID NO: 5010 - protein, 398 aa, Glycine max
  misc_feature (1)..(398): Ceres Seq. ID no. 14306541
MSLLMKSVDENGDGSKRVISLGMGDPTLTTYFPISNVAEKAVAEALQSHRFRDYAPTAGLPQARIAIAEYLSRDLPYQLSSDDVYITCGCTQAIDVSVAMLARPGANIILPRPGFPLYELSASFRGVEVRHYDLLPEKGWEVDLDAVEALADQNTVALVIINPGNPCGNVYSYHHLEKIAETAKRVGTIVIADEVYGHLAFAGKPFVPMGVFGSIVPVLTLGSFSKRWIVPGWRLSWFVTNDPSGTFRNPKVDERFKKYFDLLGGPATFIQAAVPQIIEHTEKVFFKKTIDNLRHVADICCKELKDIPYIICPYKPEGSMAMMVKLNLSLLEDISDDIDFCFKLAKEESVIILPGTAVGLNNWLRIIFATDPVALVEGLKRVKSFCERHARKWSMTTE

SEQ ID NO: 5011 - DNA, 1203 bp, Glycine max
  misc_feature (1)..(1203): Ceres Seq. ID no. 14306557
gacaatttctcttctagcaatcaaccatctttggatcaaccctccaatttgtttacaatatggaacagaccctctcctttgaatttgagcatgaatttgttcaaaacacggcaagagtgaaatctgttgatatgcatccaactgagccatggattctactgggtttgtattcaggaactatttctatttggaactatcagacaaagactgaagagaagtctttaaaaatcagcgaatctccagtgagatcagcaaagttcattgctcgggaaaactggattgttgcagctacggatgacaaaaacattcacgtctacaattatgacaaaatggaaaagatagtagaatttgcggaacataaagattatatcaggagtttagctgttcatcctgtcctgccatatgtaatatcagcttcagatgatcaggttctaaaattgtggaattggaggaaaggttggtcttgttatgagaactttgaagggcactcacattatgtgatgcaagtggcattcaaccctaaggatccatctacctttgctagtgcatcccttgatggcaccttgaagatctggagccttgattcctctgctccaaattttaccctggaaggacaccagaaaggagtgaattgtgttgattacttcataaccaacgacaaacaatatcttttaagtggttctgatgattacactgccaaggtatgggattatcattctagaaactgtgtacagacgcttgaaggacatgaaaacaatgttacagcaatatgtgctcatcctgagcttcctataataataacagcttcagaggattctactgttaaaatatgggatgctgtcacttacaggcttcaaaccacgttgaactttggtctcaagagagtatggagtattggatacaagaaaggatcatctcagcttgcatttggttgtgaccaaggatttctaattgttaagatttcagaaggaagaccccaataagccaacatctggtagccagatgactagttatgatgagcttaactgcccagagaacatcatattctgccgttggttgtttatttctgagttgttactagttactagaataaattaatttagaatctacatattaccttatgtaatatattggtgtatgtacctgtgtgttcggattaatgtgttgccatttgagtgatatatataatatattttttttatc

SEQ ID NO: 5012 - protein, 307 aa, Glycine max
  misc_feature (1)..(307): Ceres Seq. ID no. 14306558
MEQTLSFEFEHEFVQNTARVKSVDMHPTEPWILLGLYSGTISIWNYQTKTEEKSLKISESPVRSAKFIARENWIVAATDDKNIHVYNYDKMEKIVEFAEHKDYIRSLAVHPVLPYVISASDDQVLKLWNWRKGWSCYENFEGHSHYVMQVAFNPKDPSTFASASLDGTLKIWSLDSSAPNFTLEGHQKGVNCVDYFITNDKQYLLSGSDDYTAKVWDYHSRNCVQTLEGHENNVTAICAHPELPIIITASEDSTVKIWDAVTYRLQTTLNFGLKRVWSIGYKKGSSQLAFGCDQGFLIVKISEGRPQ

SEQ ID NO: 5013 - protein, 283 aa, Glycine max
  misc_feature (1)..(283): Ceres Seq. ID no. 14306559
MHPTEPWILLGLYSGTISIWNYQTKTEEKSLKISESPVRSAKFIARENWIVAATDDKNIHVYNYDKMEKIVEFAEHKDYIRSLAVHPVLPYVISASDDQVLKLWNWRKGWSCYENFEGHSHYVMQVAFNPKDPSTFASASLDGTLKIWSLDSSAPNFTLEGHQKGVNCVDYFITNDKQYLLSGSDDYTAKVWDYHSRNCVQTLEGHENNVTAICAHPELPIIITASEDSTVKIWDAVTYRLQTTLNFGLKRVWSIGYKKGSSQLAFGCDQGFLIVKISEGRPQ

SEQ ID NO: 5014 - protein, 217 aa, Glycine max
  misc_feature (1)..(217): Ceres Seq. ID no. 14306560
MEKIVEFAEHKDYIRSLAVHPVLPYVISASDDQVLKLWNWRKGWSCYENFEGHSHYVMQVAFNPKDPSTFASASLDGTLKIWSLDSSAPNFTLEGHQKGVNCVDYFITNDKQYLLSGSDDYTAKVWDYHSRNCVQTLEGHENNVTAICAHPELPIIITASEDSTVKIWDAVTYRLQTTLNFGLKRVWSIGYKKGSSQLAFGCDQGFLIVKISEGRPQ

SEQ ID NO: 5015 - DNA, 1715 bp, Glycine max
  misc_feature (1)..(1715): Ceres Seq. ID no. 14306565
acactagtactcactgttgttcattgtgaaatcatcatcatcatgggttgctcagcctcaagaaccatcaccatagtggccaacaacaataaccaattagaggatccatcttctgcttctcttgcttcttctttctcttcctcttctgcctcacacaaatccattaactctacttcttcaccagcagcagcaccagttagaagaagagctctttctctcccaatgcctcttgttcatcaccctcccataaaaaagggtgacacacaccaccttgtctccctcacctccaccacctatggctcccttctcctcattgaccaaaaagacccaaacttgacccaaaaaaaccaaccccgcctcaccaaaacctcaaaccaaactgacccagcacactcactctccccagactcagtcatcaacacttgggaactcatggatggcttagatgaagaagaagaagaagaagaagaagaaattgccaatgccaagaagaagcctccttacacttccattttggacaaaccaagttcatgcaggtacacagcatttgatggttctgcaaggaagaaactgcttgattcctttgaatcactgaaaacttcacagacagcaatggaaaaggaaaactcttcttcttctccagcaccaaccaagaagccactttggcagcacttatccgaggaagctttgcttgctaagttggatccgagtgtggcttggagttacagaagagcattatcatcaaggaatctaggtagaaacaccttatctagagatgtaaggtcaatggggtctagccctttgatatttcattcttcttctttttcatttggtaagaacaatagtttgtgccgtttgtctggcactgaggacagaatagtgctttattgcactagtttgagagggatccgaaagacctatgaggattgttgttcggttaggatgattctgaggggcttcatggttgcggttgatgagagggacatctcaatggactcgtcctataggaaggagttgaaggatgctcttggtggaaaagcagtgacattgccacaggtctttatcagagggaggtatgtggggaatgctgagcaaatgaagcatctgaatgagtctggagaattggcaaggcttttggagggtttccccactcaggatcctgggtttgtgtgtgacaactgtggtgatgccaggtttgtgccatgccccaattgcaatggtagcaggaaggtgtttgagcatgaggaaggagggttgagaaggtgccctgattgcaatgagaatggcttgataagatgtccaggttgctgcccatgattggtggaaattagtcatctgaatcaggtataccccgattcgtgaagagtaatttctagaactactgatatccatttaagagataagtatctcttaaggtatatttttcagtgcccagaaagcctatggatcgaattcctgaccacaagcttaaaaaatgattaattatctgtcaatcatatcacatcatattgataatgatgttcttgtgtttgtttattggagtagaatttgtcattataaattttgacaactaccaagaatgcacatttcagtttcgtcctttgtttttagttagtactactttcagctgttatttgtttatgtcagacttttgctttattagcgtttaattacccttgtgaacagcagaaaataaaaaactgacaaggttatgt

SEQ ID NO: 5016 - protein, 438 aa, Glycine max
  misc_feature (1)..(438): Ceres Seq. ID no. 14306566
TLVLTVVHCEIIIIMGCSASRTITIVANNNNQLEDPSSASLASSFSSSSASHKSINSTSSPAAAPVRRRALSLPMPLVHHPPIKKGDTHHLVSLTSTTYGSLLLIDQKDPNLTQKNQPRLTKTSNQTDPAHSLSPDSVINTWELMDGLDEEEEEEEEEIANAKKKPPYTSILDKPSSCRYTAFDGSARKKLLDSFESLKTSQTAMEKENSSSSPAPTKKPLWQHLSEEALLAKLDPSVAWSYRRALSSRNLGRNTLSRDVRSMGSSPLIFHSSSFSFGKNNSLCRLSGTEDRIVLYCTSLRGIRKTYEDCCSVRMILRGFMVAVDERDISMDSSYRKELKDALGGKAVTLPQVFIRGRYVGNAEQMKHLNESGELARLLEGFPTQDPGFVCDNCGDARFVPCPNCNGSRKVFEHEEGGLRRCPDCNENGLIRCPGCCP

SEQ ID NO: 5017 - protein, 424 aa, Glycine max
  misc_feature (1)..(424): Ceres Seq. ID no. 14306567
MGCSASRTITIVANNNNQLEDPSSASLASSFSSSSASHKSINSTSSPAAAPVRRRALSLPMPLVHHPPIKKGDTHHLVSLTSTTYGSLLLIDQKDPNLTQKNQPRLTKTSNQTDPAHSLSPDSVINTWELMDGLDEEEEEEEEEIANAKKKPPYTSILDKPSSCRYTAFDGSARKKLLDSFESLKTSQTAMEKENSSSSPAPTKKPLWQHLSEEALLAKLDPSVAWSYRRALSSRNLGRNTLSRDVRSMGSSPLIFHSSSFSFGKNNSLCRLSGTEDRIVLYCTSLRGIRKTYEDCCSVRMILRGFMVAVDERDISMDSSYRKELKDALGGKAVTLPQVFIRGRYVGNAEQMKHLNESGELARLLEGFPTQDPGFVCDNCGDARFVPCPNCNGSRKVFEHEEGGLRRCPDCNENGLIRCPGCCP

SEQ ID NO: 5018 - protein, 364 aa, Glycine max
  misc_feature (1)..(364): Ceres Seq. ID no. 14306568
MPLVHHPPIKKGDTHHLVSLTSTTYGSLLLIDQKDPNLTQKNQPRLTKTSNQTDPAHSLSPDSVINTWELMDGLDEEEEEEEEEIANAKKKPPYTSILDKPSSCRYTAFDGSARKKLLDSFESLKTSQTAMEKENSSSSPAPTKKPLWQHLSEEALLAKLDPSVAWSYRRALSSRNLGRNTLSRDVRSMGSSPLIFHSSSFSFGKNNSLCRLSGTEDRIVLYCTSLRGIRKTYEDCCSVRMILRGFMVAVDERDISMDSSYRKELKDALGGKAVTLPQVFIRGRYVGNAEQMKHLNESGELARLLEGFPTQDPGFVCDNCGDARFVPCPNCNGSRKVFEHEEGGLRRCPDCNENGLIRCPGCCP

SEQ ID NO: 5019 - DNA, 1574 bp, Glycine max
  misc_feature (1)..(1574): Ceres Seq. ID no. 14306569
actctctccatcaaataccaatcaatcaaaaagccagcgagaaaatgaaaattcgtggtggaataatcatagactgaagagaaaagttgtcgttgtgcagtgcactgtcatggaagaggatgaagagacgcagcaacgagtcactgactcgtccctctccaccgagtcacgcacttccactccttctgatggagcgccacccaactcggaaaccctagttcaccgctcctcgcttccgcatgaccttgccactcatatgcagggcagctctaccgcacataaaggtggaaaagctgagagtaaggtgtcagctcagcctcctgatgaggaaactattgaaaaagatgcagttgaggcacctcaaaaacagacagaaaatcaacttcagtctgtttgttcaacttcattatctgaactatcaccaacttctgtttcacattctttatcatctgcccttagtcccactgtatcacaacagagaccatctcctcccaaggctaatagtgtacaagtgtcgaaaggagacaaaggaacaccttctgatggtacaaccttatcttctgtttctgctgtaagggcatctgcatctgatggatacaactggcggaagtacggccagaagcaagtgaagaatcctatgggttctcgaagctattacaagtgtacccattcaaattgttgtgctaagaagattaaattttgtgaccattcaggacatgtgatagagattgtttataaaagtcaacataatcatgatcctccgcataaaattgataccaccaaggaaagtaagctcctgccttccagtgaacctaaagaagaaagcagtgttccaaagcagtctaccaaagttctgaataattctgatccatcatcttctccgaaagaacctttgcaagaagcaccctgcaatggtgataagaatctagaaaactcatctaatgttgagaatggtaaaattattttgaaggaaaagcatgtcaatgaccgagagccaaaaagaagattgaacaatggtgatttggattcagcagtaaaacatggcaagaaaccaaagtttgttgtacatgcgacagaggatgtggggatatcaggtgatggataccggtggcgcaagtagggacaaaagttggtgaagggaaatccacatttcagaaactactacagatgcacttcttctggatgtcctgtccgaaagcacattgagactgctgtggataattcaaaagctctcatcataacatacaagggagtgcatgatcatgacatgcctgtacccaagaaacgacatggcccgcctagtgcttcacttgtggctgcggcagcacctgcttcaatgaacaatgtgcagttcaaaaaaactggcttgctgcaaagccaggaaactgaagctcaatgttcagaggacacagaaggagaattgatgggggaagcgatggaccttgagggtgagaaagcaattgagtcggctcgaactcttttgagcataggttttgaaattaaaccttgttgaatacatcttttcataaactcatgcagttgcatctatataaattaattggtaggcctcatgt

SEQ ID NO: 5020 - protein, 372 aa, Glycine max
  misc_feature (1)..(372): Ceres Seq. ID no. 14306570
LSPSNTNQSKSQRENENSWWNNHRLKRKVVVVQCTVMEEDEETQQRVTDSSLSTESRTSTPSDGAPPNSETLVHRSSLPHDLATHMQGSSTAHKGGKAESKVSAQPPDEETIEKDAVEAPQKQTENQLQSVCSTSLSELSPTSVSHSLSSALSPTVSQQRPSPPKANSVQVSKGDKGTPSDGTTLSSVSAVRASASDGYNWRKYGQKQVKNPMGSRSYYKCTHSNCCAKKIKFCDHSGHVIEIVYKSQHNHDPPHKIDTTKESKLLPSSEPKEESSVPKQSTKVLNNSDPSSSPKEPLQEAPCNGDKNLENSSNVENGKIILKEKHVNDREPKRRLNNGDLDSAVKHGKKPKFVVHATEDVGISGDGYRWRK

SEQ ID NO: 5021 - protein, 336 aa, Glycine max
  misc_feature (1)..(336): Ceres Seq. ID no. 14306571
MEEDEETQQRVTDSSLSTESRTSTPSDGAPPNSETLVHRSSLPHDLATHMQGSSTAHKGGKAESKVSAQPPDEETIEKDAVEAPQKQTENQLQSVCSTSLSELSPTSVSHSLSSALSPTVSQQRPSPPKANSVQVSKGDKGTPSDGTTLSSVSAVRASASDGYNWRKYGQKQVKNPMGSRSYYKCTHSNCCAKKIKFCDHSGHVIEIVYKSQHNHDPPHKIDTTKESKLLPSSEPKEESSVPKQSTKVLNNSDPSSSPKEPLQEAPCNGDKNLENSSNVENGKIILKEKHVNDREPKRRLNNGDLDSAVKHGKKPKFVVHATEDVGISGDGYRWRK

SEQ ID NO: 5022 - protein, 287 aa, Glycine max
  misc_feature (1)..(287): Ceres Seq. ID no. 14306572
MQGSSTAHKGGKAESKVSAQPPDEETIEKDAVEAPQKQTENQLQSVCSTSLSELSPTSVSHSLSSALSPTVSQQRPSPPKANSVQVSKGDKGTPSDGTTLSSVSAVRASASDGYNWRKYGQKQVKNPMGSRSYYKCTHSNCCAKKIKFCDHSGHVIEIVYKSQHNHDPPHKIDTTKESKLLPSSEPKEESSVPKQSTKVLNNSDPSSSPKEPLQEAPCNGDKNLENSSNVENGKIILKEKHVNDREPKRRLNNGDLDSAVKHGKKPKFVVHATEDVGISGDGYRWRK

SEQ ID NO: 5023 - DNA, 1536 bp, Glycine max
  misc_feature (1)..(1536): Ceres Seq. ID no. 14306585
atttctgaaggagctttcaattgaagggcttgatgggattgtgagtattaatgctgattttttcgggagtagctcttgttcatttacatccttggaatctttgaggttctccaatatgaaggaatgggaagaatgggaatgtaaaggtgtgacaggtgcttttccacgtcttcaacgtctttctatagggtattgtcccaagctgaaaggtttgcctccccttggacttttgccatttctgaaggagctttcaattgaagggcttgatgggattgtgagtattaatgctgattttttcgggagtagctcttgttcatttacatccttggaatctttgaagttctccgatatgaaggaatgggaagaatgggaatgtaaaggtgtgacaggtgcttttccacgtcttcaacgtctttctataaggtattgtcccaagctgaaaggtttgcctccccttggacttttgccatttctgaaggagctttcaattcaaaggcttgatgggattgtgagtattaatgctgattttttcgggagtagctcttgttcatttacatccttggaatctttggatttctacgatatgaaggaatgggaagaatgggaatgtaaaggtgtgacaggtgcttttccacgtcttcaacgtctttctatatataattgtcccaagctgaaatggcacttgccagagcaactatctcatttaaatcgtctagggatttctggatgggactctctaacgaccattccgctagatatcttcccaatactcagggagcttgatatcagggagtgtcttaatctacaggggatttcacaggggcagactcataatcatctccagcgtctgagtatgagagagtgcccccaattagaatcattgcctgaaggaatgcatgtcctccttccatctcttgattatctgggcataattcgttgtccaaaagttgaaatgtttcccgaaggaggtttgccatcaaatttaaaaaatatgcatctctatggtagttacaaacttatgtcctcattgaaaagtgccttgggaggcaatcactctctagaaaccttacggattggaggagtggatgttgagtgtcttcctgaggaaggtgtactgccacactctcttgttactctagacatcagtcattgtgaagatctaaaaagactggactacaaaggtctctgccacctctcctctctcaaggaattgactctttggaactgccgcaggctccaatgcttaccagaggagggtctgcccaaatccatttcaactttgacaattcggaggtgtgggtttctcaaacaacgttgccgggaaccccaaggcgaagactggccaaagattgctcacattgaagacgtggatataaggtagtgaggttgattataaagaataatggtgaaagatgtagatgcttctctattgcctgcaatttactaattaattgttttctaaacttatttttgctttctgcttgctggacgccgccgctctgttatttattattcgactaaataattgtttaatac

SEQ ID NO: 5024 - protein, 459 aa, Glycine max
  misc_feature (1)..(459): Ceres Seq. ID no. 14306586
FLKELSIEGLDGIVSINADFFGSSSCSFTSLESLRFSNMKEWEEWECKGVTGAFPRLQRLSIGYCPKLKGLPPLGLLPFLKELSIEGLDGIVSINADFFGSSSCSFTSLESLKFSDMKEWEEWECKGVTGAFPRLQRLSIRYCPKLKGLPPLGLLPFLKELSIQRLDGIVSINADFFGSSSCSFTSLESLDFYDMKEWEEWECKGVTGAFPRLQRLSIYNCPKLKWHLPEQLSHLNRLGISGWDSLTTIPLDIFPILRELDIRECLNLQGISQGQTHNHLQRLSMRECPQLESLPEGMHVLLPSLDYLGIIRCPKVEMFPEGGLPSNLKNMHLYGSYKLMSSLKSALGGNHSLETLRIGGVDVECLPEEGVLPHSLVTLDISHCEDLKRLDYKGLCHLSSLKELTLWNCRRLQCLPEEGLPKSISTLTIRRCGFLKQRCREPQGEDWPKIAHIEDVDIR

SEQ ID NO: 5025 - protein, 421 aa, Glycine max
  misc_feature (1)..(421): Ceres Seq. ID no. 14306587
MKEWEEWECKGVTGAFPRLQRLSIGYCPKLKGLPPLGLLPFLKELSIEGLDGIVSINADFFGSSSCSFTSLESLKFSDMKEWEEWECKGVTGAFPRLQRLSIRYCPKLKGLPPLGLLPFLKELSIQRLDGIVSINADFFGSSSCSFTSLESLDFYDMKEWEEWECKGVTGAFPRLQRLSIYNCPKLKWHLPEQLSHLNRLGISGWDSLTTIPLDIFPILRELDIRECLNLQGISQGQTHNHLQRLSMRECPQLESLPEGMHVLLPSLDYLGIIRCPKVEMFPEGGLPSNLKNMHLYGSYKLMSSLKSALGGNHSLETLRIGGVDVECLPEEGVLPHSLVTLDISHCEDLKRLDYKGLCHLSSLKELTLWNCRRLQCLPEEGLPKSISTLTIRRCGFLKQRCREPQGEDWPKIAHIEDVDIR

SEQ ID NO: 5026 - protein, 343 aa, Glycine max
  misc_feature (1)..(343): Ceres Seq. ID no. 14306588
MKEWEEWECKGVTGAFPRLQRLSIRYCPKLKGLPPLGLLPFLKELSIQRLDGIVSINADFFGSSSCSFTSLESLDFYDMKEWEEWECKGVTGAFPRLQRLSIYNCPKLKWHLPEQLSHLNRLGISGWDSLTTIPLDIFPILRELDIRECLNLQGISQGQTHNHLQRLSMRECPQLESLPEGMHVLLPSLDYLGIIRCPKVEMFPEGGLPSNLKNMHLYGSYKLMSSLKSALGGNHSLETLRIGGVDVECLPEEGVLPHSLVTLDISHCEDLKRLDYKGLCHLSSLKELTLWNCRRLQCLPEEGLPKSISTLTIRRCGFLKQRCREPQGEDWPKIAHIEDVDIR

SEQ ID NO: 5027 - DNA, 1185 bp, Glycine max
  misc_feature (1)..(1185): Ceres Seq. ID no. 14306605
aacgctggatgcaagacagcagcttccaacattataatgtcacttgcagtaatgttgacattgttattcctgacacccttgttccattacactcccctggtggtgctatcagctattatcgtatctgcaatgcttggactcatagattatgaagcagccatccatctatttaaggttgacaaatttgactttgtggtgtgcatgagtgcatacattggcgtggtctttggcagtgttgaaattggcttagtcatagctattgtaatatctgtacttcgggtacttctatttattgcaaggccaaggacattcgttttgggcaacattccaaattctgtgatataccgaaatgttgagcactatcaaaatgcaaaacatgttcctggaatgctaattctagagattgatgcaccaatttactttgccaatgccagctatttaagagaaaggatcacaaggtggattgatgaagaagaagaaagaattaaagctacaggggagactagtttgcagtatgttataattgatatgagtgctgttggaaacattgatacaagtggaataagtatgcttgaagaggtgaagaagattacagagagaagagagctacagcttgttttggtcaatcctgtaagtgaagtgatgaagaaactgaacaaatcgaagttccaaaatcatttagggaagaaatggatctatctgactgttgaagaggccgttggagcatgcaacttcaatctacgtgcaagcaaaacgaacccaaagaaagatgaaacagagggttggaacaatgtgtgactgagtcatatgccaaagagtattctaaataactcaaaaagcttattcgttttcgtcttagtaatgttaccactacaatgtgtggcatgagaatttctgaatcacgccgaagaagttttaaaggcataggaaaatgaaagatgcaagggtcttctaatttctcaactctgcatccttagttagaagaaaatctcctatgtataggctgttgaaataatctttacgtatcatgcttgataatatattcaagagaaatgctagcaacacactctcagacacactcttttgaacacatgtaaagaggtaaagaagtgtgttgctagcactcctccatattcaattgtaaagtaattgccatgagaatttaaaaatcctttggaaacgtcc

SEQ ID NO: 5028 - protein, 265 aa, Glycine max
  misc_feature (1)..(265): Ceres Seq. ID no. 14306606
NAGCKTAASNIIMSLAVMLTLLFLTPLFHYTPLVVLSAIIVSAMLGLIDYEAAIHLFKVDKFDFVVCMSAYIGVVFGSVEIGLVIAIVISVLRVLLFIARPRTFVLGNIPNSVIYRNVEHYQNAKHVPGMLILEIDAPIYFANASYLRERITRWIDEEEERIKATGETSLQYVIIDMSAVGNIDTSGISMLEEVKKITERRELQLVLVNPVSEVMKKLNKSKFQNHLGKKWIYLTVEEAVGACNFNLRASKTNPKKDETEGWNNV

SEQ ID NO: 5029 - protein, 253 aa, Glycine max
  misc_feature (1)..(253): Ceres Seq. ID no. 14306607
MSLAVMLTLLFLTPLFHYTPLVVLSAIIVSAMLGLIDYEAAIHLFKVDKFDFVVCMSAYIGVVFGSVEIGLVIAIVISVLRVLLFIARPRTFVLGNIPNSVIYRNVEHYQNAKHVPGMLILEIDAPIYFANASYLRERITRWIDEEEERIKATGETSLQYVIIDMSAVGNIDTSGISMLEEVKKITERRELQLVLVNPVSEVMKKLNKSKFQNHLGKKWIYLTVEEAVGACNFNLRASKTNPKKDETEGWNNV

SEQ ID NO: 5030 - protein, 248 aa, Glycine max
  misc_feature (1)..(248): Ceres Seq. ID no. 14306608
MLTLLFLTPLFHYTPLVVLSAIIVSAMLGLIDYEAAIHLFKVDKFDFVVCMSAYIGVVFGSVEIGLVIAIVISVLRVLLFIARPRTFVLGNIPNSVIYRNVEHYQNAKHVPGMLILEIDAPIYFANASYLRERITRWIDEEEERIKATGETSLQYVIIDMSAVGNIDTSGISMLEEVKKITERRELQLVLVNPVSEVMKKLNKSKFQNHLGKKWIYLTVEEAVGACNFNLRASKTNPKKDETEGWNNV

SEQ ID NO: 5031 - DNA, 1277 bp, Glycine max
  misc_feature (1)..(1277): Ceres Seq. ID no. 14306609
aacctttcttcttctctctgttgctcctgccatgtgctgtctctgagttcaaactctacagttaagatgtccagtaacaatgcaacagctttggagattccaattctaagctactgtaaagttaaggtacgcggtgcagtatgcttggagcttcatagactcattgatagaatttcgcatgtaattttagccatcgaatctgctcgaccaaatagtacgttagcggtgcaggtgttgtgctcattaaacttcactttggctaaagccaagtcagttatcagacattgttccaagtgcagtaaactctacctggtatccttttgaacttgaaaccttgactctgatactgaaagatcaattttaacttaatctgatatatataaattgtctgctataacctttgaatatttcttaattagtattattttccatactagaaaatgttgttttgaaataactaacttaatttgcaaactggttaggcaatcacatcgcacaagatactttcaagatgtcaaaaagtaagaaatgcatttgaattttatttggctcagattcaaaatgcggttcaaactccattggctgatgaggttggttatactttttaattagccttttacaccatttggaatatgttatatgtttatagcttcttagtatttattttggccatatattgcacttgtttgtattttcatgacttgtgatttgtgcaacttgataatatttgagcttggaattgtcctacagatatctgcaatactacatgaccttagggatacagaattttccctggaatttgcagaagacgaggctaggaaagtactactttcactgcttgagaagaattttccagatgcagcttctatacaaaaggaagaacttgaagctattcaaattgcaacttctagattggagatcaaatccccgttttctctcttagtagagaaagcaacccttaagaagcaacttgaagaagtcagtgaaaaaaacctaaaggagaaggagcttctacaataccttttgtatctcttggtcaaacatgggaaatccatttgtcagtttcaaaatggaagccactccccgaaacatgaatgtcatgaccagtcctttgagaatgagttggttgtggatgaatcaagtcaatcactctcttaaaccaaaagttggagatttatgattgtttagcacttgaggttgttttgttcgtactatattactgtctagtgtccacagaaggtgatttgtgacttaaaacaaacatttctattttattc

SEQ ID NO: 5032 - protein, 153 aa, Glycine max
  misc_feature (1)..(153): Ceres Seq. ID no. 14306610
MTCDLCNLIIFELGIVLQISAILHDLRDTEFSLEFAEDEARKVLLSLLEKNFPDAASIQKEELEAIQIATSRLEIKSPFSLLVEKATLKKQLEEVSEKNLKEKELLQYLLYLLVKHGKSICQFQNGSHSPKHECHDQSFENELVVDESSQSLS

SEQ ID NO: 5033 - protein, 107 aa, Glycine max
  misc_feature (1)..(107): Ceres Seq. ID no. 14306611
NLSSSLCCSCHVLSLSSNSTVKMSSNNATALEIPILSYCKVKVRGAVCLELHRLIDRISHVILAIESARPNSTLAVQVLCSLNFTLAKAKSVIRHCSKCSKLYLVSF

SEQ ID NO: 5034 - protein, 85 aa, Glycine max
  misc_feature (1)..(85): Ceres Seq. ID no. 14306612
MSSNNATALEIPILSYCKVKVRGAVCLELHRLIDRISHVILAIESARPNSTLAVQVLCSLNFTLAKAKSVIRHCSKCSKLYLVSF

SEQ ID NO: 5035 - DNA, 1277 bp, Glycine max
  misc_feature (1)..(1277): Ceres Seq. ID no. 14306617
aattcttccactaccccttttcgttattcttcttcaattctcccaaaaatcatatttttacactctgagtggtttttcagcttgtgggtcgatgtcaactgtgtcaaaagatgacaacttggcgctttcttcggaggactcttcatgcccagaagagtctgagcttgaattgggtcttgggttgagcctctcctctggctcttcatcaaaatctcatcaccaccatcatgctagaatttacactgctaaggattttccttcttctgcagcagcagcagcagcagcagcatcatcaccttcctcttcttcttcctctcccaacaacatcactgctggcaccaagagagctgctgccgattctcttgttgccaataaccgtcccagtcaagtagttggatggcctccacttcgaacatatagagtgaatagcttcaatagccatgcaaaatcaactgaagtattcaactctgtggctgagaaaagtaagaccgataatactgtggccaggaagactaatgacaatggcaatgataataacataaatgccaaagagaaaagacacctcaggagttccctgtttgtcaaggtaaatatggatgggataccaattggaaggaaggttgatttgagtgctcatagttcctatgaaaccttagcgcaaacattagaggatatgtttaatgaatcaactacagtcaccacttgcaaaggatcaaatggtgaggattatggctttattatcggaggagaaaggcattcaaaattattagatggatcttccaagtttgtgctcacttatgaagacaaggaaggagattggatgcttgttggggatgttccctgggggatgttctttagctcagtgaggaggctaagaatcatgaggacatctgaggctaatggacttgcaccgagattggaagaaaacataaaaaagagatgcaagcccatatagattccgttttcatggctaaggacatgaaaaacctgtcaaatagatgaagaggaaaaaccgaaacagaaaagtataggaatactgcaaatgtatgaagttttgagatttgaatgataaaatctcacacttttgcttaattaattcagtttgtttgtttaatttggtatctttgttgcggcctctctattcatctcacttggagggtgcaggcatcatagattttcatgcaatacaactaatcatacaagtcagactgcttgttagtgttgtaaatgtggaatgtttgctaactatttcagctataaagttttgtttgaacttc

SEQ ID NO: 5036 - protein, 317 aa, Glycine max
  misc_feature (1)..(317): Ceres Seq. ID no. 14306618
ILPLPLFVILLQFSQKSYFYTLSGFSACGSMSTVSKDDNLALSSEDSSCPEESELELGLGLSLSSGSSSKSHHHHHARIYTAKDFPSSAAAAAAAASSPSSSSSSPNNITAGTKRAAADSLVANNRPSQVVGWPPLRTYRVNSFNSHAKSTEVFNSVAEKSKTDNTVARKTNDNGNDNNINAKEKRHLRSSLFVKVNMDGIPIGRKVDLSAHSSYETLAQTLEDMFNESTTVTTCKGSNGEDYGFIIGGERHSKLLDGSSKFVLTYEDKEGDWMLVGDVPWGMFFSSVRRLRIMRTSEANGLAPRLEENIKKRCKPI

SEQ ID NO: 5037 - protein, 287 aa, Glycine max
  misc_feature (1)..(287): Ceres Seq. ID no. 14306619
MSTVSKDDNLALSSEDSSCPEESELELGLGLSLSSGSSSKSHHHHHARIYTAKDFPSSAAAAAAAASSPSSSSSSPNNITAGTKRAAADSLVANNRPSQVVGWPPLRTYRVNSFNSHAKSTEVFNSVAEKSKTDNTVARKTNDNGNDNNINAKEKRHLRSSLFVKVNMDGIPIGRKVDLSAHSSYETLAQTLEDMFNESTTVTTCKGSNGEDYGFIIGGERHSKLLDGSSKFVLTYEDKEGDWMLVGDVPWGMFFSSVRRLRIMRTSEANGLAPRLEENIKKRCKPI

SEQ ID NO: 5038 - DNA, 1450 bp, Glycine max
  misc_feature (1)..(1450): Ceres Seq. ID no. 14306620
aagaatctctgacgccgttgtcggttttctccggccacggctacttccaacggatggcgacgacgaccacggagttcgatctcgattacgagttccccgatctcgattacgaccttcgctatctcagtctcgccggaatcgatgccctcaccgctttccaaaacctattaccggatgcggcgatgacttcattttcagcttgtggactaatagaccctcattgttctcaaaacctcactcccatgcattccaccatcactgctaccattgattctcagtcaacgatttgcgccaccagtaatgttgggagcccaatctcggcaaataaaccagagggcagagagaatcgtaccaaaggagccacgagtggttcctctgagccgtctgatgaggatgatgaagcaggtgcttgtgaacagagcacaaatccagctgatatgaagcgccttagaaggaaggtttctaatcgcgactctgctagaaggtcaagaagaagaaagcaagcgcaattgtctgagcttgagttgcaggtaaactggtctgttgggggagtacatgaatggtatttaatttgataaataagggaataaaatatagtaatgttaattcttagagctaattcatatgaattgtgattaagataatggaacgttactcgctctccgaatctataatttgtttttggaatttaagacatcaacattcaatatttggtcaaatgcacaagaagcaatataatgtttttgtttttttttcgtttgaattttgctttctcaggttgaaaaactcaaagtggaaaatgcaaccctatacaagcagttcacggatgctagtcaacattttcgtgaggctgatacgaataatcgagtgctaaaatcagatgtagaagctttgagagccaaggtgaagttagcggaggatatggtcactaggagctcttttactacgttaaactatcagcttcttcagacacaacaacatcaaatgagcacacccccgcaactgaacacgactaatcttcgccgcatggcgcatgtttcgccaaccatcaccgtccatggtaatgatgcctcatacaatggtgtaacagttggtgaacagaattcatcagcacttggaaacttggatatgactttcaacaacatcaacaatggagtcatgaacaatgctatgagttgtgggactatttggccacttgattagactctagctatgttatttgtcttgtctaatttgattagtagcctatgttaatgtcaagctgtgttatttgtcttcgcttgattcctctttaatgatgcctctgtttaaaatggtgtcttctttcgttgtatctagttttgtataaaaggacatgattgctttatccatttctctgaatgtaattgtaaaaagacaaacatctcaccttgccatatatatcatctaatagacagacaacaaaacctac

SEQ ID NO: 5039 - protein, 190 aa, Glycine max
  misc_feature (1)..(190): Ceres Seq. ID no. 14306621
ESLTPLSVFSGHGYFQRMATTTTEFDLDYEFPDLDYDLRYLSLAGIDALTAFQNLLPDAAMTSFSACGLIDPHCSQNLTPMHSTITATIDSQSTICATSNVGSPISANKPEGRENRTKGATSGSSEPSDEDDEAGACEQSTNPADMKRLRRKVSNRDSARRSRRRKQAQLSELELQVNWSVGGVHEWYLI

SEQ ID NO: 5040 - protein, 173 aa, Glycine max
  misc_feature (1)..(173): Ceres Seq. ID no. 14306622
MATTTTEFDLDYEFPDLDYDLRYLSLAGIDALTAFQNLLPDAAMTSFSACGLIDPHCSQNLTPMHSTITATIDSQSTICATSNVGSPISANKPEGRENRTKGATSGSSEPSDEDDEAGACEQSTNPADMKRLRRKVSNRDSARRSRRRKQAQLSELELQVNWSVGGVHEWYLI

SEQ ID NO: 5041 - protein, 130 aa, Glycine max
  misc_feature (1)..(130): Ceres Seq. ID no. 14306623
MTSFSACGLIDPHCSQNLTPMHSTITATIDSQSTICATSNVGSPISANKPEGRENRTKGATSGSSEPSDEDDEAGACEQSTNPADMKRLRRKVSNRDSARRSRRRKQAQLSELELQVNWSVGGVHEWYLI

SEQ ID NO: 5042 - DNA, 1300 bp, Glycine max
  misc_feature (1)..(1300): Ceres Seq. ID no. 14306675
aatgttaactatgttcttctttttttgttctcatctccacaccatgtcctaatctttctgcaccatcgttctccatttttggctttacaaaaccactgtgtctgattaagggttctttaatatttccaatatttcttgtagtgaaaaagttgttagctaaaagaagaccaagtttttggtgttgtagaaggaagagaagaattaacatgaaaattcagtgtgacgtgtgtgagagagctccagcaacagtgatttgttgcgcggatgaggctgctttgtgtgccaaatgtgacgttgaagttcatgctgcaaacaagcttgcaagcaagcaccaaagacttcttcttcaatgtctatcaagcaagcttcccacatgtgacatttgccaagacaagccagcattcatattttgtgttgaagacagagcactcttctgtcaggattgtgatgaaccaattcattcagccggaagcctttccgcgaaccaccagcgcttccttgctactggtatccgagtggcctcgagttctaattgcaccaaagacaatgaaaaaagtcactcggagcctcctaataggagtgcacaacaagtttctgcgaaaattcctcctcagcaagtgcctagcttcacatcctcttgggctgttgatgacttattggaactaacaggctttgaatcacctgagaaaaaggaatctctgcagtttggagagctggaatggcttacagatgtgggtattttcggcgaacaatttgctcaggaagccttggctgcagctgaagtacctcagcttcccgaaactcataacagtagcagtgttgcttcatacaaaacctccaaatcctacatgtcccacaaaaagcctaggattgaagtcctaaatgatgatgatgatgatgagtattttactgtgcccgatctcggctaagtacgtggcttgccatatgggatggtgcatgcatgattggaaaagattaattatgggaaaataattgttttttttaagctctattagtaaattgtcaaaaaagaatattattttcccaaaaaaactattccattcagacatgttgatatgttgtatattcaattattatgagaacgataattttcacaagttgtgtggagttgattaagtattgtacttaaggtgtttttttgctggatagcatagaatccatgcctttggggaataaattttccttgtccttatgcttcatacactaggggggattctcccacggtcacatcttccccaatccccctcgaatttgagacggttaattccattttgtttgc

SEQ ID NO: 5043 - protein, 240 aa, Glycine max
  misc_feature (1)..(240): Ceres Seq. ID no. 14306676
MKIQCDVCERAPATVICCADEAALCAKCDVEVHAANKLASKHQRLLLQCLSSKLPTCDICQDKPAFIFCVEDRALFCQDCDEPIHSAGSLSANHQRFLATGIRVASSSNCTKDNEKSHSEPPNRSAQQVSAKIPPQQVPSFTSSWAVDDLLELTGFESPEKKESLQFGELEWLTDVGIFGEQFAQEALAAAEVPQLPETHNSSSVASYKTSKSYMSHKKPRIEVLNDDDDDEYFTVPDLG

SEQ ID NO: 5044 - protein, 133 aa, Glycine max
  misc_feature (1)..(133): Ceres Seq. ID no. 14306677
MRLLCVPNVTLKFMLQTSLQASTKDFFFNVYQASFPHVTFAKTSQHSYFVLKTEHSSVRIVMNQFIQPEAFPRTTSASLLLVSEWPRVLIAPKTMKKVTRSLLIGVHNKFLRKFLLSKCLASHPLGLLMTYWN

SEQ ID NO: 5045 - protein, 120 aa, Glycine max
  misc_feature (1)..(120): Ceres Seq. ID no. 14306678
MLQTSLQASTKDFFFNVYQASFPHVTFAKTSQHSYFVLKTEHSSVRIVMNQFIQPEAFPRTTSASLLLVSEWPRVLIAPKTMKKVTRSLLIGVHNKFLRKFLLSKCLASHPLGLLMTYWN

SEQ ID NO: 5046 - DNA, 1241 bp, Glycine max
  misc_feature (1)..(1241): Ceres Seq. ID no. 14306718
agtaatgtatggtcttacaagcatgtattttgctggggttatggttcggttgattcttgtggctacccctgctgtgtgcctcattagtgctatagcggtttctgccactgtgaagaatttggctcgggtagtgagggccaaaagcccagctgttcaaagtggatctactaaaggaactaactctgcaaaaagctcttccaagggtgtagttgacaactcccagcctttccaaaagaatggtgctattgtgttactccttggtgctttctatttgctcagtagatatgtcattcactgcacttgggtcacatcagaggcttactcatctccctcaattgtcttggctgcgaggggtgcccatggcaacagggtcatctttgatgattatcgtgaagcttacttttggcttcgccagaacactccaccagatgcgaaggtgatgtcatggtgggattatggttatcaaatcactgccatgggaaacagaacagttattgttgacaataacacctggaataacacacacatagccactgttgggcgagcaatgtcatcctatgaggatgaggcttatgagataatgagatcacttgatgttgactatgtattagtcgtgtttggtggtgttactggttattcttctgatgatattaacaaatttctctggatggtgagaattggtggtggagtttttcctgtgataaaggagcctgattaccttgtcaatggagagtatcgtgtagataaaggagcagctccaaagatgttgaactgtcttatgtacaagctgtcctattatcggtttggggagctgacaacagaatatggcaaaccacctgggtatgatcgtgctagaggtgttgaaattggaaataaggacataaagcttgagtacttggaagaggcgttcactacacagaattggatagttcgtatttataaagtgaaaccccctaaaaacaggtggtaactccaaaaaaaacaaagactgttttctctgcgggaaatgatagcattctagtgaacttgagcgctgaaaatcttgttagcaatattacagattgtggattatttttgatctagaattagttgaggtaattttgtggatttttgaaatgttacagtttttatgacttttagtcaactgcccaacttaacctatcggcttggcaccacttgtctggcccaaattatacaagatagccagaatagaactgtgcaaatagcccgatatttccttc

SEQ ID NO: 5047 - protein, 322 aa, Glycine max
  misc_feature (1)..(322): Ceres Seq. ID no. 14306719
VMYGLTSMYFAGVMVRLILVATPAVCLISAIAVSATVKNLARVVRAKSPAVQSGSTKGTNSAKSSSKGVVDNSQPFQKNGAIVLLLGAFYLLSRYVIHCTWVTSEAYSSPSIVLAARGAHGNRVIFDDYREAYFWLRQNTPPDAKVMSWWDYGYQITAMGNRTVIVDNNTWNNTHIATVGRAMSSYEDEAYEIMRSLDVDYVLVVFGGVTGYSSDDINKFLWMVRIGGGVFPVIKEPDYLVNGEYRVDKGAAPKMLNCLMYKLSYYRFGELTTEYGKPPGYDRARGVEIGNKDIKLEYLEEAFTTQNWIVRIYKVKPPKNRW

SEQ ID NO: 5048 - protein, 321 aa, Glycine max
  misc_feature (1)..(321): Ceres Seq. ID no. 14306720
MYGLTSMYFAGVMVRLILVATPAVCLISAIAVSATVKNLARVVRAKSPAVQSGSTKGTNSAKSSSKGVVDNSQPFQKNGAIVLLLGAFYLLSRYVIHCTWVTSEAYSSPSIVLAARGAHGNRVIFDDYREAYFWLRQNTPPDAKVMSWWDYGYQITAMGNRTVIVDNNTWNNTHIATVGRAMSSYEDEAYEIMRSLDVDYVLVVFGGVTGYSSDDINKFLWMVRIGGGVFPVIKEPDYLVNGEYRVDKGAAPKMLNCLMYKLSYYRFGELTTEYGKPPGYDRARGVEIGNKDIKLEYLEEAFTTQNWIVRIYKVKPPKNRW

SEQ ID NO: 5049 - protein, 315 aa, Glycine max
  misc_feature (1)..(315): Ceres Seq. ID no. 14306721
MYFAGVMVRLILVATPAVCLISAIAVSATVKNLARVVRAKSPAVQSGSTKGTNSAKSSSKGVVDNSQPFQKNGAIVLLLGAFYLLSRYVIHCTWVTSEAYSSPSIVLAARGAHGNRVIFDDYREAYFWLRQNTPPDAKVMSWWDYGYQITAMGNRTVIVDNNTWNNTHIATVGRAMSSYEDEAYEIMRSLDVDYVLVVFGGVTGYSSDDINKFLWMVRIGGGVFPVIKEPDYLVNGEYRVDKGAAPKMLNCLMYKLSYYRFGELTTEYGKPPGYDRARGVEIGNKDIKLEYLEEAFTTQNWIVRIYKVKPPKNRW

SEQ ID NO: 5050 - DNA, 1371 bp, Glycine max
  misc_feature (1)..(1371): Ceres Seq. ID no. 14306733
ggagacccttcattcacctatcagagacaaagcgctctctctccaaaaaaaaaaaaaactcgctaaattacaaaaatctcttcaaatcctctcaaccgaaaccctaatcataaaaccctagattttactttatttgtttccctcaatcgaatcgattttccccttccgaaaaccctaattccttcctcgctatcgaagatggacatcgagcagaagcaatcggagctcatagaccacttcgtcaagcgtgcctccgcggcctccgacgccgctgcactatcctccgttctcgtcgaagccacttctcacccttcgctcttcgctttctccgagattctcgctctgcccaatcttcttcagcttgaagcaactgagaattctgcttatcttgatatgcttcggttgtttgcacatggaacatggaatgattacaagagtaatgctgaccgtcttccacaattgatacctgatcagatcctcaagcttaagcaacttacagttcttacactggctgagacatataaggtactaccctatgaccaactgatgcaggagttagatgtgacaaatgttcgtgagcttgaagattttctaattaatgaatgcatgtatgcgggaatagttcgaggaaagttggatcagttgcggcggtgctttgaggtccaatttgcagctggtagggacttgaggcctgatcaactagggaatatgatacagactctctctaactggttgtctacatcagaaaatatgcttgtttcaattcaagagaagataaaatgggctgatgcaatgagtgaaattgacaagaagcacaggaaggatgtggaagagaaggtagaagaagtaaagaagtccattttcaaggccgacatcgacttcagagggcatgaggagatctgctctgaatctggtggagtgatggattatgaagaagatcgaagccgaccaaagaggaggcggcatccaatttcttgaagatttagtagataagggagctcattggagatgggttctttagttgcttgcctgacttttattcatggcatgcgtcaacagaggatatcagcttttgcagacagacaagtatatctcatcgatattgcccttgtctgtcacaccacaaagcgagatagggacaaggaaaaaaaggagggaaaacctgttaatttaggaaattgatagtgtttcttgaaccattatttaatcgtctactgagttggcaataacaagctgagatggtggtgcggctatttatttgcggttgctgaatgctatatatactgttttgttttgtattatgctgatatatttgctgcctcaattgcgttgttatactttgtggtgaatatatatattccaaaattatac

SEQ ID NO: 5051 - protein, 259 aa, Glycine max
  misc_feature (1)..(259): Ceres Seq. ID no. 14306734
MDIEQKQSELIDHFVKRASAASDAAALSSVLVEATSHPSLFAFSEILALPNLLQLEATENSAYLDMLRLFAHGTWNDYKSNADRLPQLIPDQILKLKQLTVLTLAETYKVLPYDQLMQELDVTNVRELEDFLINECMYAGIVRGKLDQLRRCFEVQFAAGRDLRPDQLGNMIQTLSNWLSTSENMLVSIQEKIKWADAMSEIDKKHRKDVEEKVEEVKKSIFKADIDFRGHEEICSESGGVMDYEEDRSRPKRRRHPIS

SEQ ID NO: 5052 - protein, 194 aa, Glycine max
  misc_feature (1)..(194): Ceres Seq. ID no. 14306735
MLRLFAHGTWNDYKSNADRLPQLIPDQILKLKQLTVLTLAETYKVLPYDQLMQELDVTNVRELEDFLINECMYAGIVRGKLDQLRRCFEVQFAAGRDLRPDQLGNMIQTLSNWLSTSENMLVSIQEKIKWADAMSEIDKKHRKDVEEKVEEVKKSIFKADIDFRGHEEICSESGGVMDYEEDRSRPKRRRHPIS

SEQ ID NO: 5053 - protein, 143 aa, Glycine max
  misc_feature (1)..(143): Ceres Seq. ID no. 14306736
MQELDVTNVRELEDFLINECMYAGIVRGKLDQLRRCFEVQFAAGRDLRPDQLGNMIQTLSNWLSTSENMLVSIQEKIKWADAMSEIDKKHRKDVEEKVEEVKKSIFKADIDFRGHEEICSESGGVMDYEEDRSRPKRRRHPIS

SEQ ID NO: 5054 - DNA, 1447 bp, Glycine max
  misc_feature (1)..(1447): Ceres Seq. ID no. 14306757
agagatatttctatggatgattttgatttgttattacctgattatgatcagcatcagcagcagcaacagttccttaatgagttatcatgcctctctccacatgctatgaattctaatcccatgaaccgctctggtcgaatgaaactcttgactccttcaaatcttgatgatctgttttcagctgagagttcttctcctagatatgctgatccagcattggcttcagctgtgttttctccaactcacaaatcagctgtcttcaatcaatttcagcagcaccagcaaagcttgttggcaccggtgaatactaattttgcttctaaaaatgttgagcatcctttgttgcaggcctcattggtaatgtctccccgaaacatggaacctatttctccaatgggatctaggatttctatgctagcgcaacgtgagaagcaacaatttcgcagcttaagcttccgggaactcggctccaattctgctgcttctgctgcctctactacctctgccaattcttggtcaaaatgggggtcacctaatggtaattttgattggccagttggtgcttctgatgaaataggtaagctaagaaggtcatcatcatttgagcttgggaacaatggtgaggagcctgatttatcttgggtgcagtcacttgttaaggaatcaccagctgacgttaaaggtaaatttgcaaccactgtctcaaatgtttcagcagcagcagctggatcctccagtgagggatcaaacatgagcacacaaatggagtctgttgttgatcatgctgtgctgggagcatggcttgaacagatgcagcttgatcatcttgtggctcagcaaaactgaaatgagtttctgctgatcctgacgtatttaacaaaagaaatgtctcagtaaataaaaatatatattctttgttgaattttgttgatggaagaaggttacaataactaaagaacggatgcagtactaagataaagaaccattgaggaaaattcattttcaggtttagtgttacaaaagtaacttagaagggtcagaaaaccactgggtggcgttcacagaattaatgccactgaagggttttttggctgcatatctcttcaaattttaggtccacattcctgtcattttttccttccttgaggagcaaatgttgtatcgcaatgaagtcttagtcctaagtttgatctatcttttgattttatttctttatattttggggtaggatccaaagttacagaagggtcattggagtaattccttgtgtctccattttggtccaattttggggatgaaaacacaggttggttgctggatatggtatttcttttgtaatatggaataaatagttgtcgatgccaaggagttggtaagttaggaatatttgaacattgatcctttgggcatgtaacattcaattgaagtttattgctgtattatttct

SEQ ID NO: 5055 - protein, 281 aa, Glycine max
  misc_feature (1)..(281): Ceres Seq. ID no. 14306758
RDISMDDFDLLLPDYDQHQQQQQFLNELSCLSPHAMNSNPMNRSGRMKLLTPSNLDDLFSAESSSPRYADPALASAVFSPTHKSAVFNQFQQHQQSLLAPVNTNFASKNVEHPLLQASLVMSPRNMEPISPMGSRISMLAQREKQQFRSLSFRELGSNSAASAASTTSANSWSKWGSPNGNFDWPVGASDEIGKLRRSSSFELGNNGEEPDLSWVQSLVKESPADVKGKFATTVSNVSAAAAGSSSEGSNMSTQMESVVDHAVLGAWLEQMQLDHLVAQQN

SEQ ID NO: 5056 - protein, 277 aa, Glycine max
  misc_feature (1)..(277): Ceres Seq. ID no. 14306759
MDDFDLLLPDYDQHQQQQQFLNELSCLSPHAMNSNPMNRSGRMKLLTPSNLDDLFSAESSSPRYADPALASAVFSPTHKSAVFNQFQQHQQSLLAPVNTNFASKNVEHPLLQASLVMSPRNMEPISPMGSRISMLAQREKQQFRSLSFRELGSNSAASAASTTSANSWSKWGSPNGNFDWPVGASDEIGKLRRSSSFELGNNGEEPDLSWVQSLVKESPADVKGKFATTVSNVSAAAAGSSSEGSNMSTQMESVVDHAVLGAWLEQMQLDHLVAQQN

SEQ ID NO: 5057 - protein, 246 aa, Glycine max
  misc_feature (1)..(246): Ceres Seq. ID no. 14306760
MNSNPMNRSGRMKLLTPSNLDDLFSAESSSPRYADPALASAVFSPTHKSAVFNQFQQHQQSLLAPVNTNFASKNVEHPLLQASLVMSPRNMEPISPMGSRISMLAQREKQQFRSLSFRELGSNSAASAASTTSANSWSKWGSPNGNFDWPVGASDEIGKLRRSSSFELGNNGEEPDLSWVQSLVKESPADVKGKFATTVSNVSAAAAGSSSEGSNMSTQMESVVDHAVLGAWLEQMQLDHLVAQQN

SEQ ID NO: 5058 - DNA, 1016 bp, Glycine max
  misc_feature (1)..(1016): Ceres Seq. ID no. 14306789
tgttgataatataatgggtatagcatatgcaatggatctgctggattatgttcaaaagggtgagttgctagaaagtactacggttggagatatggctcacaaacctgcttattttgtacctgattcaatgtctgtttggaatcttcttagagagttcagaatcaggaaggttcacatggcggttgttcttaacgagtatggtggaactgtggggattgtaacactcgaagatgttgttgaggaaattgttggtgaaatatttgatgaaaatgactcaaaggaggagatacagaaaaaaactggttacattgtaatgcgagctgagggtgtttttgatgtggatgcaaacacatccattgatcagctctctgaagatttgaacatcaagatgccagagggtcaccaatatgagacggtatcaggctttgtgtgtgaagcatttggatacattccaaggacaggtgagtgcatcaaagtagttcttgaaagggaagatgaagatgataacaatgagtccaatgctgaccagcaggatcagaaggagaagaaccagagtttcaaacttgagatactagctggaaatgccagaaaggtgagcgctgttcggtttgaacacataaataataatgatgaaatgttggagactaaagtaactcgcatgatccccaaaatcatgaaaagaaaatggaggagtgatgcaaactcagacaatgatgcagaatatgacggagatacatttgcaaagacaccacaggatgacatttctagtgaatatttagttgatcaggaaaattctaacagaggttaagtttgtccgttattcatattttttctcctttctttatacctggcatgcttttgtgccatttttgcaacagcctataagatgaaaaaattgagatacatgttcaaaatgagaagcaatgagttcaagcatgtaaaaccttgcaaaagacgaatttgaggcgtctttgctaacgaaagtctttggtataataaagatgtcaggtttgatc

SEQ ID NO: 5059 - protein, 268 aa, Glycine max
  misc_feature (1)..(268): Ceres Seq. ID no. 14306790
VDNIMGIAYAMDLLDYVQKGELLESTTVGDMAHKPAYFVPDSMSVWNLLREFRIRKVHMAVVLNEYGGTVGIVTLEDVVEEIVGEIFDENDSKEEIQKKTGYIVMRAEGVFDVDANTSIDQLSEDLNIKMPEGHQYETVSGFVCEAFGYIPRTGECIKVVLEREDEDDNNESNADQQDQKEKNQSFKLEILAGNARKVSAVRFEHINNNDEMLETKVTRMIPKIMKRKWRSDANSDNDAEYDGDTFAKTPQDDISSEYLVDQENSNRG

SEQ ID NO: 5060 - protein, 264 aa, Glycine max
  misc_feature (1)..(264): Ceres Seq. ID no. 14306791
MGIAYAMDLLDYVQKGELLESTTVGDMAHKPAYFVPDSMSVWNLLREFRIRKVHMAVVLNEYGGTVGIVTLEDVVEEIVGEIFDENDSKEEIQKKTGYIVMRAEGVFDVDANTSIDQLSEDLNIKMPEGHQYETVSGFVCEAFGYIPRTGECIKVVLEREDEDDNNESNADQQDQKEKNQSFKLEILAGNARKVSAVRFEHINNNDEMLETKVTRMIPKIMKRKWRSDANSDNDAEYDGDTFAKTPQDDISSEYLVDQENSNRG

SEQ ID NO: 5061 - protein, 258 aa, Glycine max
  misc_feature (1)..(258): Ceres Seq. ID no. 14306792
MDLLDYVQKGELLESTTVGDMAHKPAYFVPDSMSVWNLLREFRIRKVHMAVVLNEYGGTVGIVTLEDVVEEIVGEIFDENDSKEEIQKKTGYIVMRAEGVFDVDANTSIDQLSEDLNIKMPEGHQYETVSGFVCEAFGYIPRTGECIKVVLEREDEDDNNESNADQQDQKEKNQSFKLEILAGNARKVSAVRFEHINNNDEMLETKVTRMIPKIMKRKWRSDANSDNDAEYDGDTFAKTPQDDISSEYLVDQENSNRG

SEQ ID NO: 5062 - DNA, 1837 bp, Glycine max
  misc_feature (1)..(1837): Ceres Seq. ID no. 14306805
aggtcctgccaaaaagtcaaatgtccaaagctcagctggccctaaatctgataaagtgcaactgattgagcataggcgagcatataattgtgaaatcatgctttcaaaagtgaaagtgccattgcatgatttaatgagctcagtgttagcactggaggagtcagcactcgacactgatcaggttgagaacctcataaagttttgtcctacaaaagaggagatggaattacttaagggttataatggggaaaaggagaagttgggaagatgcgaacagttcttaatggaattgatgaaagtaccacgggtggaatccaagctcagagttttttcgttcaggattcaattcaactctcaggtttctgaccttagaaatagcctgagtgttgtgaattctgcttcagaagaggcatgatatcttcctttttacggaaacatctttttgcaacatagtttctttgtcttttttcatgagaaataacattttggatgttgagattttgtttcctctattcagatcaggaattctgtcaaattaaagagaattatgcaaacaatactttctttaggaaatgctttgaaccaaggaactgccaagggttctgctattggattcagattggatagccttcttaaactcacagagacacgtgcacgggacaagaagatgactcttatgcattatctttgtaaggtgctagatgaccaactaccggacgttttagacttctccaaggatgttgctaacctagagccagcagcaaagatgcaattgaagtttttggctgaggagatgcaagctataaacaaaggattagaaaaagtggtacaggaactatcaacctctgaaaatgatgggcctatatcagaaactttctgcaagaaattgaaaaaattcctcggttctgctgaagctgatgtccgttctctggcttcactatattccagcgtgggtaggaacgtggatcaattgattctctattttggtgaagatccagctcgttgcccatttgagcaagttgtgtcaactttgctcaactttactaggatgttcaacaaagcccatgaagaaaaccgcaagcagctagagcttgaaatgaagaagacagcagaaagtgagaaaaagaaatgtgaatcagaaagaattttacctacagctatccggactggcaatgtcaaatagatgctactagctttgagaatcagtatatactctaacgtgaataggatttgactggacaaaaacgggtctggtgtatggtgtttttgaagagcatgtatagttacacaagtagtagtagctgacattgataaccaaaacgaagagaactgcaataccgcaatacactgcaaagtttagaaatggtgtagtttgcacgagttgtgttatttaccagccaacctgtatatatcttcctcttccctctccgctcagcaactgtatgattgtaagtattttcaggaaacctgggcattcgttattaattttttctctctccctcaggctctgttagcaacactgatttcacatctgtaatgcaatgcttgatttcttcttgtatagcttatatatgatttttttccccctagcaaaatatcttcttaggtgccccaaaaataagggaaatttcttgctcggtattattgaatgtgtactaccccagctataacactaaaatattgctaaagttggagatacttatggctcacataatcaaggtgacatacatttaatagtaccaaacaagagtctaaagcaaaccaagaatttcagttgaaataggcctttgttgccgtttctacttacatttattgaaatgataactgaatattattt

SEQ ID NO: 5063 - protein, 211 aa, Glycine max
  misc_feature (1)..(211): Ceres Seq. ID no. 14306806
MQTILSLGNALNQGTAKGSAIGFRLDSLLKLTETRARDKKMTLMHYLCKVLDDQLPDVLDFSKDVANLEPAAKMQLKFLAEEMQAINKGLEKVVQELSTSENDGPISETFCKKLKKFLGSAEADVRSLASLYSSVGRNVDQLILYFGEDPARCPFEQVVSTLLNFTRMFNKAHEENRKQLELEMKKTAESEKKKCESERILPTAIRTGNVK

SEQ ID NO: 5064 - protein, 171 aa, Glycine max
  misc_feature (1)..(171): Ceres Seq. ID no. 14306807
MTLMHYLCKVLDDQLPDVLDFSKDVANLEPAAKMQLKFLAEEMQAINKGLEKVVQELSTSENDGPISETFCKKLKKFLGSAEADVRSLASLYSSVGRNVDQLILYFGEDPARCPFEQVVSTLLNFTRMFNKAHEENRKQLELEMKKTAESEKKKCESERILPTAIRTGNVK

SEQ ID NO: 5065 - protein, 168 aa, Glycine max
  misc_feature (1)..(168): Ceres Seq. ID no. 14306808
MHYLCKVLDDQLPDVLDFSKDVANLEPAAKMQLKFLAEEMQAINKGLEKVVQELSTSENDGPISETFCKKLKKFLGSAEADVRSLASLYSSVGRNVDQLILYFGEDPARCPFEQVVSTLLNFTRMFNKAHEENRKQLELEMKKTAESEKKKCESERILPTAIRTGNVK

SEQ ID NO: 5066 - DNA, 958 bp, Glycine max
  misc_feature (1)..(958): Ceres Seq. ID no. 14306809
cattactttcaggtttcatttcaaaatattctctctctcctcttaaagcaaaacccttaattattaccaacgaccacacaccacagccactttcatcaatttccttaatccccacctccacataacaacaacaacgaactaacgccaccacattcattctttccttctttgtgcctacaatactactactactactactaattctacatggatggcaactcttttggaaacgtgccacccccaccaatacaagttcctgataacttggctatctcctcctcctcttcgccaactcccacgacatcatctccgtctccgacaccctctggaggctttcggtaccgcgggacgcggtgccggagcggaaagtgggtgtcggagataagggagccacgtaaaacgaatcgcatttggctggggacttacccgacagcggaaatggctgcggcggcatatgatgtcgccgcactcgcgttgaagggtcccgacacgcccgtcaacttccctaattcgatactgtcgtaccctattcctgcttcattgtcctccacggacattcgcgccgcggctgcggccgcggcgcaggctaggatcgtgagggcgccgcaggagagtgaggaaacggtaaaccctgatgatggcgggcaagggttatcggagaggcgtgaggagtacatttatgaggatgagttgttgaacatgccgaatttgctcgatgaaatggccagaggaatgcaggttagtccccttaggatcacttcctattcttcagatgattcgcctgggaattctgatggagataacctttggagttataccctttgatcactgatttgttgtttgttcagtgagtgagtatggtaatttgttttgtgtttgtttgaaagttcgagtcttgattatgtatgttcaaccttgttaaatatttgaaaggagggctttataacgggattgtggg

SEQ ID NO: 5067 - protein, 205 aa, Glycine max
  misc_feature (1)..(205): Ceres Seq. ID no. 14306810
MDGNSFGNVPPPPIQVPDNLAISSSSSPTPTTSSPSPTPSGGFRYRGTRCRSGKWVSEIREPRKTNRIWLGTYPTAEMAAAAYDVAALALKGPDTPVNFPNSILSYPIPASLSSTDIRAAAAAAAQARIVRAPQESEETVNPDDGGQGLSERREEYIYEDELLNMPNLLDEMARGMQVSPLRITSYSSDDSPGNSDGDNLWSYTL

SEQ ID NO: 5068 - protein, 128 aa, Glycine max
  misc_feature (1)..(128): Ceres Seq. ID no. 14306811
MAAAAYDVAALALKGPDTPVNFPNSILSYPIPASLSSTDIRAAAAAAAQARIVRAPQESEETVNPDDGGQGLSERREEYIYEDELLNMPNLLDEMARGMQVSPLRITSYSSDDSPGNSDGDNLWSYTL

SEQ ID NO: 5069 - DNA, 1775 bp, Glycine max
  misc_feature (1)..(1775): Ceres Seq. ID no. 14306857
aatcctcataactgcactatcacacacatagttctcttatctggtgcaagtgcaacaatcaagtactcatcagcatgggaatgttgttgttgttgttgtcttattctctccttttcctggttctattccttacactgaaatcccttttccaaagcagaaaattgagaaacctaccaccaggtcctcctcctcttcccataataggtaaccttaacctcctcgaacaacctattcaccgtttcttccaacgcatgtccaaagaatatggaaacatcgtttccctttggttcggttcacgtctcgccgttgtcatttcctcaccaactgcataccaagaatgcttcaccaaacacgacgttgccttggccaaccggctaccttctctctcgggaaaatacatattctacaacaacaccaccgtagggtcctgctcccacggccagcactggcggaacctccgccgaatcaccgccctggacgtcctctccacgcagcgagtccactctttctccggaatccgaagcgacgagacgaaaaggttggtacagaggttgctggccaagaactccaaggagggttttgctcgcgtggagataagctccatgttcaatgacttgacctacaacaacatcatgaggatgatatcagggaagaggttttacggagaggagagtgagttgaagaacgttgagaaagcgagggagttcagagagacagtgacagagatgctagaactcatgggggtggctaataagggagatcacttacctttcctaagatggttcgattttcagaatgtggagaagcgtttgaagagtattagtaaaaggtatgataccatcttgaatgagatcattgatgagaaccgtagcaagaaggaccgcgagaattccatgattgatcatcttctcaaactgcaagagactcagcctgagtactacactgaccaaatcatcaaaggccttgctttggccatgctttttggcggaactgactcatcaacgggaaccttagagtggtcgctatctaatttattgaatcacccagaggtgttgaagaaagcaaaagaagaattggacactcaagtaggacaagaccgcttgttaaatgagtcagaccttccaaaacttccttatcttagaaagatcattcttgagacacttaggttgtatcctccagctccaattctaatacctcatgtgtcttcagaagatatcactattgaaggattcaatgtcccacgagacacaattgtgatcattaatggttggggcatgcagagagatcctcatttgtggaatgatgccacatgctttaaacctgagaggtttgatgtggaaggagaggagaaaaagttggtagcatttggaatgggaagaagggcttgcccaggagaacccatggctatgcaaagtgtcagctttactttgggattattgattcaatgttttgactggaaacgagtaagtgaggaaaagcttgatatgacagagaataattggattaccttgtcaaggttaattccattggaagccatgtgcaaggctcgtccactcgccactaaaattggagtttaattattaatagtttttttatttggtaaagttgggtcaacatctaatacttataatttcagtgtgcatgtggtggttatacatgttaaacataatagtatttgtttgtatgtttacaaggccagttgtagaattggtgtgcattaggatatattaatattgtatgcatccccaacttctcaaataaattttttacttttt

SEQ ID NO: 5070 - protein, 500 aa, Glycine max
  misc_feature (1)..(500): Ceres Seq. ID no. 14306858
MGMLLLLLSYSLLFLVLFLTLKSLFQSRKLRNLPPGPPPLPIIGNLNLLEQPIHRFFQRMSKEYGNIVSLWFGSRLAVVISSPTAYQECFTKHDVALANRLPSLSGKYIFYNNTTVGSCSHGQHWRNLRRITALDVLSTQRVHSFSGIRSDETKRLVQRLLAKNSKEGFARVEISSMFNDLTYNNIMRMISGKRFYGEESELKNVEKAREFRETVTEMLELMGVANKGDHLPFLRWFDFQNVEKRLKSISKRYDTILNEIIDENRSKKDRENSMIDHLLKLQETQPEYYTDQIIKGLALAMLFGGTDSSTGTLEWSLSNLLNHPEVLKKAKEELDTQVGQDRLLNESDLPKLPYLRKIILETLRLYPPAPILIPHVSSEDITIEGFNVPRDTIVIINGWGMQRDPHLWNDATCFKPERFDVEGEEKKLVAFGMGRRACPGEPMAMQSVSFTLGLLIQCFDWKRVSEEKLDMTENNWITLSRLIPLEAMCKARPLATKIGV

SEQ ID NO: 5071 - protein, 498 aa, Glycine max
  misc_feature (1)..(498): Ceres Seq. ID no. 14306859
MLLLLLSYSLLFLVLFLTLKSLFQSRKLRNLPPGPPPLPIIGNLNLLEQPIHRFFQRMSKEYGNIVSLWFGSRLAVVISSPTAYQECFTKHDVALANRLPSLSGKYIFYNNTTVGSCSHGQHWRNLRRITALDVLSTQRVHSFSGIRSDETKRLVQRLLAKNSKEGFARVEISSMFNDLTYNNIMRMISGKRFYGEESELKNVEKAREFRETVTEMLELMGVANKGDHLPFLRWFDFQNVEKRLKSISKRYDTILNEIIDENRSKKDRENSMIDHLLKLQETQPEYYTDQIIKGLALAMLFGGTDSSTGTLEWSLSNLLNHPEVLKKAKEELDTQVGQDRLLNESDLPKLPYLRKIILETLRLYPPAPILIPHVSSEDITIEGFNVPRDTIVIINGWGMQRDPHLWNDATCFKPERFDVEGEEKKLVAFGMGRRACPGEPMAMQSVSFTLGLLIQCFDWKRVSEEKLDMTENNWITLSRLIPLEAMCKARPLATKIGV

SEQ ID NO: 5072 - protein, 441 aa, Glycine max
  misc_feature (1)..(441): Ceres Seq. ID no. 14306860
MSKEYGNIVSLWFGSRLAVVISSPTAYQECFTKHDVALANRLPSLSGKYIFYNNTTVGSCSHGQHWRNLRRITALDVLSTQRVHSFSGIRSDETKRLVQRLLAKNSKEGFARVEISSMFNDLTYNNIMRMISGKRFYGEESELKNVEKAREFRETVTEMLELMGVANKGDHLPFLRWFDFQNVEKRLKSISKRYDTILNEIIDENRSKKDRENSMIDHLLKLQETQPEYYTDQIIKGLALAMLFGGTDSSTGTLEWSLSNLLNHPEVLKKAKEELDTQVGQDRLLNESDLPKLPYLRKIILETLRLYPPAPILIPHVSSEDITIEGFNVPRDTIVIINGWGMQRDPHLWNDATCFKPERFDVEGEEKKLVAFGMGRRACPGEPMAMQSVSFTLGLLIQCFDWKRVSEEKLDMTENNWITLSRLIPLEAMCKARPLATKIGV

SEQ ID NO: 5073 - DNA, 946 bp, Glycine max
  misc_feature (1)..(946): Ceres Seq. ID no. 14306884
gcagcaacaaggagtgcaccatgctgctatacgagtacatgcccaatggaaacttggatgattggttgcatggcaaaaataaaggagataatttggtcgccgattggttcactaggtataagatcgccttgggcgtggctcagggaatctgctatcttcaccacgactgtgatcccgtcatcgtgcatcgcgatctcaaacctagtaacatattattggacgctgagatggaggccagagtcgcagattttggtgtcgccaagttgattcagaccgacgagtccatgtctgtcattgccggttcctatggctacattgctccagaatatgcttacacccttcaagtcgatgaaaagagtgacatttacagctacggagtggtgttgatggagatcctaagtggaaaacgttcggttgatgcagaatttggcgatgggaacagcgttgttgattgggttaggtctaagataaagtctaaagatggcattgatgacatattggacaagaatgcaggggcagggtgcacctcagtgagagaagagatgatacaaatgcttagaattgcattgctttgcaccagtagaaacccagcggataggccttctatgagggatgttgtgttgatgctgcaagaggccaagccaaagaggaaattgcttgatggtgttctaggtcgatgtgctggggacaatgtggttgttggtggtgacattcctttgccacaaaagccaattgcggatcaatgttaatgtgtttatatgattgaaatgatttttctttttttggatatttttcttattgtgggggattggtataggagaatcattttctattttactttcaatggaatttcaagtgttacttgttctagtttttttttctccagttacatattgttatgactcttgtttgctaatgcttatatattaaaaagtgtgcagctcat

SEQ ID NO: 5074 - protein, 248 aa, Glycine max
  misc_feature (1)..(248): Ceres Seq. ID no. 14306885
SNKECTMLLYEYMPNGNLDDWLHGKNKGDNLVADWFTRYKIALGVAQGICYLHHDCDPVIVHRDLKPSNILLDAEMEARVADFGVAKLIQTDESMSVIAGSYGYIAPEYAYTLQVDEKSDIYSYGVVLMEILSGKRSVDAEFGDGNSVVDWVRSKIKSKDGIDDILDKNAGAGCTSVREEMIQMLRIALLCTSRNPADRPSMRDVVLMLQEAKPKRKLLDGVLGRCAGDNVVVGGDIPLPQKPIADQC

SEQ ID NO: 5075 - protein, 242 aa, Glycine max
  misc_feature (1)..(242): Ceres Seq. ID no. 14306886
MLLYEYMPNGNLDDWLHGKNKGDNLVADWFTRYKIALGVAQGICYLHHDCDPVIVHRDLKPSNILLDAEMEARVADFGVAKLIQTDESMSVIAGSYGYIAPEYAYTLQVDEKSDIYSYGVVLMEILSGKRSVDAEFGDGNSVVDWVRSKIKSKDGIDDILDKNAGAGCTSVREEMIQMLRIALLCTSRNPADRPSMRDVVLMLQEAKPKRKLLDGVLGRCAGDNVVVGGDIPLPQKPIADQC

SEQ ID NO: 5076 - protein, 236 aa, Glycine max
  misc_feature (1)..(236): Ceres Seq. ID no. 14306887
MPNGNLDDWLHGKNKGDNLVADWFTRYKIALGVAQGICYLHHDCDPVIVHRDLKPSNILLDAEMEARVADFGVAKLIQTDESMSVIAGSYGYIAPEYAYTLQVDEKSDIYSYGVVLMEILSGKRSVDAEFGDGNSVVDWVRSKIKSKDGIDDILDKNAGAGCTSVREEMIQMLRIALLCTSRNPADRPSMRDVVLMLQEAKPKRKLLDGVLGRCAGDNVVVGGDIPLPQKPIADQC

SEQ ID NO: 5077 - DNA, 1641 bp, Glycine max
  misc_feature (1)..(1641): Ceres Seq. ID no. 14306900
aaaaatgtgatcttttctttcactgctataaccccttttcttgttttttctcagcagccaaacagagctaatggtagtagcaatagcaagcaagagcaacatagtgtctctttggttcaggattgctccacaaatgctattaaccctataccacaactccagtaagcaatccccatccatgaccttcgatttcattaattacatactattttggaagcttttgatatagataaagataaatgttgttttctacctctttttttttgttaatgcagggataaaagtgaggagcaactaagtgtcagcagcagaaagaaagtgacatttgattccaatgtgaagacctatgagcctcttttggctgatgaagttgtggagaggaaaaatgaggaaggtgggaaggaggaagctttggcccaatcaaagtcatcttcctctgaagctagttctgtgacttcaacggggtcttaccctcccaatcataggtaccagaattgccgcaacagtgatgacgaagaggaagagattgattatggggacagtgatcttagtgatggagatgacgatgaagaatgcaatgaagtgagtgaggactttggagaagatgacatagtggcaagtactgctgctgatgatcatgtgtttgttgaagaggttgatgtgaagtccattgggtccaaccctaatgtcagagacagaagtgcttatgttcatcctgtgctgaatccagtggagaatctcactcagtggaaagttcttaaggctaagagaacaccaataaggcctcagaaagagaatgattttggggttggtgtaaaaggatcacctttcagcttgaattccaaaagcgacttgccaaagaagttgaaccgggagatacgagttgatgccagcctgtcaaattggttggtctcaccagaaactacacctgtttgcaaggctggctcagtggcttcctttgctggtagtacccctgataggatcacctcacaaggttcatattctgtgataagtcatgaagataggccaattttaggggcattgacattggaagagatcaaacaattttcggctacttcgtcttcacggaagtcaccaagtaggagtccagatgagatgcctattattggcactgttggaacctactggaatgttgcaggctctgctgaggaccctggctcagtctcttcctttaaaggaattccgaactcaacaagcaagtacagagaggtaaagatgcggtgaacacttttaagagatattattactcattagttgagggtgaactctgatttggacatgcactggtgcggtattgcaggataagagcgtgaattggcgctcaaccccttttgagacaagattagagaaagctttgaatagaggtgctgcttctgcttatgttcctcgtgtattttagaagttttcaatagtgcgtggattcgaggagagtgtgaattgtgcagggaaagtattttttttattcttttataaacacgatagagtgtagaatgtgacttttacttttctactgcaatttgtacttggctttgaagttataatataaaagttcaagtacagcttataacatctaaaataatatttagatgaaatcatatttcatgctttaacgattacacg

SEQ ID NO: 5078 - protein, 54 aa, Glycine max
  misc_feature (1)..(54): Ceres Seq. ID no. 14306901
KNVIFSFTAITPFLVFSQQPNRANGSSNSKQEQHSVSLVQDCSTNAINPIPQLQ

SEQ ID NO: 5079 - protein, 52 aa, Glycine max
  misc_feature (1)..(52): Ceres Seq. ID no. 14306902
MVVAIASKSNIVSLWFRIAPQMLLTLYHNSSKQSPSMTFDFINYILFWKLLI

SEQ ID NO: 5080 - protein, 42 aa, Glycine max
  misc_feature (1)..(42): Ceres Seq. ID no. 14306903
MPIIGTVGTYWNVAGSAEDPGSVSSFKGIPNSTSKYREVKMR

SEQ ID NO: 5081 - DNA, 1169 bp, Glycine max
  misc_feature (1)..(1169): Ceres Seq. ID no. 14306908
aatttttttgtaattactgtgggatttattgtcctctgcctagtgtttttttttcctgcttttataattatttcttgttttgccataaaagaaagtcaatacatgtcatcattggttcttgttgtagggtaaatcaaaaaagcgtctctccaaaagagatctggttgaaagggttagggttctggatggtccggaaaaggataatgtatttcggggatttagaccagttgctgcaccatctgacctgttgaaagcttccagggcaaaaaagttgctccagaagaaggcaattgaaaaggagaaaagaaaagctgaggcactggcctctggaattgactggctaagtgatgattcagatgatgagcctcagaaagaaaacagagaacctcccttgtgtaatcttctcaaagatgaagaacatcaccagctaataattgatttgtgcaaggcattagcatccttgcaaaggtattgggaagcactggagattattaatctctttctaagattggcccatacatctctgtctactgaaaaaaaagaggagcttcgatctcttggagctcaaatggcatataacaccacagatccgaaacatgggtttgattgtgtaaaatacattgttcagcaacatccacacagtgttgcagcttggaattgctactacaaggttatctcaagattggaaaaccgagatacaagacattacaaatttgtacgtggtatgcaaggaaagtttgtggattgtgtgcctcctatccttatttctgggcatcagtttaccatatgtagccatcatcaagatgcagcaaggaaataccttgaagcttataaactattgccagagaatcctttggttaatctttgtgttggaacagccttgatcaacttagcattgggtttaagacttcaaaataagcatcaatgtgttgtacaaggtttagcattcctctacaataatttgagaatctgcgagaacagccaggtttgtctgctcagcatttcatgaatatttttgtgcccgtttaagaagaaaatgttttattattaataaaagatgataataagaaaaagatatcacctttttttatacataggactggctaagttcgtgtacatattctacaaattcttatccaatagaaaattatgctcgggtaattattatc

SEQ ID NO: 5082 - protein, 146 aa, Glycine max
  misc_feature (1)..(146): Ceres Seq. ID no. 14306909
MAYNTTDPKHGFDCVKYIVQQHPHSVAAWNCYYKVISRLENRDTRHYKFVRGMQGKFVDCVPPILISGHQFTICSHHQDAARKYLEAYKLLPENPLVNLCVGTALINLALGLRLQNKHQCVVQGLAFLYNNLRICENSQVCLLSIS

SEQ ID NO: 5083 - protein, 94 aa, Glycine max
  misc_feature (1)..(94): Ceres Seq. ID no. 14306910
MQGKFVDCVPPILISGHQFTICSHHQDAARKYLEAYKLLPENPLVNLCVGTALINLALGLRLQNKHQCVVQGLAFLYNNLRICENSQVCLLSIS

SEQ ID NO: 5084 - protein, 82 aa, Glycine max
  misc_feature (1)..(82): Ceres Seq. ID no. 14306911
FFCNYCGIYCPLPSVFFSCFYNYFLFCHKRKSIHVIIGSCCRVNQKSVSPKEIWLKGLGFWMVRKRIMYFGDLDQLLHHLTC

SEQ ID NO: 5085 - DNA, 1260 bp, Glycine max
  misc_feature (1)..(1260): Ceres Seq. ID no. 14306953
agatttagtttagtttcttattggatgagcattttcgagccctttcatttcattggccagtatctatttataattctattaatttcaagtttttttgtggttaatgtagttgatacttgctgtgcttcactattttctgtcatgtcaaatgtctcaaaaagttcctttgcatctgataaatatgaaagagtaggacctgattactttgggtattactcttctgaagtagtaaatttattgtcacaagatgaggatgtttttcctgtttctacccaaacacctgagctacctgaaaccaaatatgaagagggaggaaagaagaatttagtcaatcagactgataactgttctggtccgttgtatagtaatgctgttggagctggcctttcagagtttaaaaaggacagatttaaatcactgctcagacagagtgtcattgctctttcgtccgaagttgatgaggtggtagaccctgtttttgcggcatatcatttgcaatccaagctaaaaagtaaatcacaatcattgaatgatacagcgactgcatctgacaatgtaatgcaagttccttgtaaaaagctaaagatctcctcatcttcaacttcagccaggtttcttgaacgaactactaatgtcaatccccaatgcagtaggaagactactgatgatgttcagttcctactagagaaggatagtgtggaggttgcagagatggtgacgaaatattccaatgatctatctagaacaggtatatggaagaacaacttgagttgcttctagatactataatgttgaagtgcaggatgatgctacactctggagactctattactatgttgaagctgttgagaaagccaaaagtctttcttgtagtcaagcggcctagttttctaaatgctttctgaaagccttcgggccttaatgatagttcattagagctctcaaatagatttttctgatcttcctaactctaaagtttagagtttatacagattttcaaaatgcttacctcttttgcgacatcagggatactatagttcatcgactgagagtaaaatgccccttatacctgaagtgtatatagcatatagattgttttttcttcttctcttgacatgtatatcttgagaagtcaccaaatatatatcgtaccagattgttttaggatatgtatgttcaagtcagaattgcatcttgtatgatagcaaaacgtgacatagatatatttctagagaagaatgatagttcttcaaattttcc

SEQ ID NO: 5086 - protein, 259 aa, Glycine max
  misc_feature (1)..(259): Ceres Seq. ID no. 14306954
RFSLVSYWMSIFEPFHFIGQYLFIILLISSFFVVNVVDTCCASLFSVMSNVSKSSFASDKYERVGPDYFGYYSSEVVNLLSQDEDVFPVSTQTPELPETKYEEGGKKNLVNQTDNCSGPLYSNAVGAGLSEFKKDRFKSLLRQSVIALSSEVDEVVDPVFAAYHLQSKLKSKSQSLNDTATASDNVMQVPCKKLKISSSSTSARFLERTTNVNPQCSRKTTDDVQFLLEKDSVEVAEMVTKYSNDLSRTGIWKNNLSCF

SEQ ID NO: 5087 - protein, 251 aa, Glycine max
  misc_feature (1)..(251): Ceres Seq. ID no. 14306955
MSIFEPFHFIGQYLFIILLISSFFVVNVVDTCCASLFSVMSNVSKSSFASDKYERVGPDYFGYYSSEVVNLLSQDEDVFPVSTQTPELPETKYEEGGKKNLVNQTDNCSGPLYSNAVGAGLSEFKKDRFKSLLRQSVIALSSEVDEVVDPVFAAYHLQSKLKSKSQSLNDTATASDNVMQVPCKKLKISSSSTSARFLERTTNVNPQCSRKTTDDVQFLLEKDSVEVAEMVTKYSNDLSRTGIWKNNLSCF

SEQ ID NO: 5088 - protein, 212 aa, Glycine max
  misc_feature (1)..(212): Ceres Seq. ID no. 14306956
MSNVSKSSFASDKYERVGPDYFGYYSSEVVNLLSQDEDVFPVSTQTPELPETKYEEGGKKNLVNQTDNCSGPLYSNAVGAGLSEFKKDRFKSLLRQSVIALSSEVDEVVDPVFAAYHLQSKLKSKSQSLNDTATASDNVMQVPCKKLKISSSSTSARFLERTTNVNPQCSRKTTDDVQFLLEKDSVEVAEMVTKYSNDLSRTGIWKNNLSCF

SEQ ID NO: 5089 - DNA, 1160 bp, Glycine max
  misc_feature (1)..(1160): Ceres Seq. ID no. 14306965
ggttcaagtactgatctaattgctcaaagagtagaatatgtgctcgagtcagacaagagaagccacctcatggaccttcttcatgctcagagggaaactggagttaatggcaagcaaggtctgacattagtttttgtggaaacgaagaaaggagctgatgcattggaacactgcttgtgtgttaatggatttcctgcagctagcattcatggtgacagaacacaacaagaaagagaactagcattgaggtcattcaagactggaaacacaccaattctagtggcaacagatgttgctgcacgtggtcttgacatcccacgggtagcacatgtggtaaattttgatcttcccaatgacattgatgattatgtgcaccggataggaagaacggggcgagctggtaaaatgggattagcaacggccttcttcaacgaaggtaatttcaacatggctaaaccattagctgatctgatgcaagaagcaaatcaagaagtacctgcctggctcagccgttatgcggcaagggctacttacagtggtggcaacagaaataggaagtcggggggatcccgttttggtggccgagattttaggaaagagggctcgtttaataaagcaacagattactatggtggcggaactggtggtggatattgtggcaattatggtggagggtatggtcaaggtgtgcctagtgcttgggattagattagtgtcacatcactaattcattctcttgttgattgtatataaaatttctgactttaatggtgaaaaagctgtatcttctcaaccacggtttgcctgaatccatgcattccttatgacaggaaatcttttatcataggaaagatttaccattttcttggttttgctggtttggcaaataaggtggggaaatgctgcatatggagaagacaatctgtgtaagcaacccaaaaatttctgactgggatgacttgtttgagtctgtagaagagggagaggagagggagtaaacagattggagggggaccaatgggcatgagtaattctgtgttatgtattttgatagggtccttagcctttgacagtctaagtcgggagttatccctaattagcatgcacatatcgttgatttgattactctctcaactaaatggttctgtgcttaattacct

SEQ ID NO: 5090 - protein, 235 aa, Glycine max
  misc_feature (1)..(235): Ceres Seq. ID no. 14306966
GSSTDLIAQRVEYVLESDKRSHLMDLLHAQRETGVNGKQGLTLVFVETKKGADALEHCLCVNGFPAASIHGDRTQQERELALRSFKTGNTPILVATDVAARGLDIPRVAHVVNFDLPNDIDDYVHRIGRTGRAGKMGLATAFFNEGNFNMAKPLADLMQEANQEVPAWLSRYAARATYSGGNRNRKSGGSRFGGRDFRKEGSFNKATDYYGGGTGGGYCGNYGGGYGQGVPSAWD

SEQ ID NO: 5091 - protein, 212 aa, Glycine max
  misc_feature (1)..(212): Ceres Seq. ID no. 14306967
MDLLHAQRETGVNGKQGLTLVFVETKKGADALEHCLCVNGFPAASIHGDRTQQERELALRSFKTGNTPILVATDVAARGLDIPRVAHVVNFDLPNDIDDYVHRIGRTGRAGKMGLATAFFNEGNFNMAKPLADLMQEANQEVPAWLSRYAARATYSGGNRNRKSGGSRFGGRDFRKEGSFNKATDYYGGGTGGGYCGNYGGGYGQGVPSAWD

SEQ ID NO: 5092 - DNA, 1368 bp, Glycine max
  misc_feature (1)..(1368): Ceres Seq. ID no. 14306970
ggtggatctccccaagcatagagcatgttagtcacgttagcagcgggcaagttggtccggcggcaccttccccttttctttcggctgttccatcttcaaaaccgtgggctcggatcttcaaaatcaaaacgaatttccattcgttatcatataaatacctcatcttcatccccaaaaccactttcagtttcagaacacaaagcaatggtggcgctcctagtggcaactacatccgaccctgcttccatcaacccggccaacgcgcttttgggcatgcccgggtggaaacccggtccccatttccaggatgatatgaagagctatgtgaatgaaggggtgagggtgttggtacatgggaagagcatagttgcggaagatgagttggacaagaggtgggaagaagttactggggaggttattgatgaagtgatcttcttcagcaagcacactgctgcctccaacaagcctgccctgactgttcaccctattggagttcctcatttgcgccaaggcgatgttcccccccaaggcggcagacctggatgggcagctcttccaaatcctaggatggggccttggcttcgccttttgaaaaaccttgcccaagctcataatcttgtccctgaatttgagattactttagaggccactcaccatggaccgttgaccaataagccaaccatgtttttggagattggtagtactgaagactattggaagagacaggatgctgctcaagttatggcacagttagtatgggaaggacttggacttggaggtgtgtcagatgtaggaaactggagcagggagaatgataacaagaaaatccttcttgggataggtggtggacattatgcacctcggcatgtggatgtagtattgaaagataatgtatgggtgggtcacctactttctggatattcgctgccaatggaagatccaaaccagtcaaaaggagaaaaaaatgtggagattggtggaacatggagacagtctataaaagctgcatatgaagccacttattctgcatttcctggtggtgaaattcttgcacatctagaccacaagagtttcaagggctggcagaagaatgccataacaggattccttgcggagcaaaacattaaaattggaaaacccaataacttctattgagtggatgctatgtgaacaacatagcttctgcagagtgcggaatgagtcaggctgaagattttggtagatcatactagcaatttaattcagttttcttgagatcacagtgatagttaatgaataactgaagtttgagataaactgatatatacataaatccaattctgatgaaaaacaatatttgcaattacatcaattaaaaccatatatagc

SEQ ID NO: 5093 - protein, 376 aa, Glycine max
  misc_feature (1)..(376): Ceres Seq. ID no. 14306971
MLVTLAAGKLVRRHLPLFFRLFHLQNRGLGSSKSKRISIRYHINTSSSSPKPLSVSEHKAMVALLVATTSDPASINPANALLGMPGWKPGPHFQDDMKSYVNEGVRVLVHGKSIVAEDELDKRWEEVTGEVIDEVIFFSKHTAASNKPALTVHPIGVPHLRQGDVPPQGGRPGWAALPNPRMGPWLRLLKNLAQAHNLVPEFEITLEATHHGPLTNKPTMFLEIGSTEDYWKRQDAAQVMAQLVWEGLGLGGVSDVGNWSRENDNKKILLGIGGGHYAPRHVDVVLKDNVWVGHLLSGYSLPMEDPNQSKGEKNVEIGGTWRQSIKAAYEATYSAFPGGEILAHLDHKSFKGWQKNAITGFLAEQNIKIGKPNNFY

SEQ ID NO: 5094 - protein, 316 aa, Glycine max
  misc_feature (1)..(316): Ceres Seq. ID no. 14306972
MVALLVATTSDPASINPANALLGMPGWKPGPHFQDDMKSYVNEGVRVLVHGKSIVAEDELDKRWEEVTGEVIDEVIFFSKHTAASNKPALTVHPIGVPHLRQGDVPPQGGRPGWAALPNPRMGPWLRLLKNLAQAHNLVPEFEITLEATHHGPLTNKPTMFLEIGSTEDYWKRQDAAQVMAQLVWEGLGLGGVSDVGNWSRENDNKKILLGIGGGHYAPRHVDVVLKDNVWVGHLLSGYSLPMEDPNQSKGEKNVEIGGTWRQSIKAAYEATYSAFPGGEILAHLDHKSFKGWQKNAITGFLAEQNIKIGKPNNFY

SEQ ID NO: 5095 - protein, 293 aa, Glycine max
  misc_feature (1)..(293): Ceres Seq. ID no. 14306973
MPGWKPGPHFQDDMKSYVNEGVRVLVHGKSIVAEDELDKRWEEVTGEVIDEVIFFSKHTAASNKPALTVHPIGVPHLRQGDVPPQGGRPGWAALPNPRMGPWLRLLKNLAQAHNLVPEFEITLEATHHGPLTNKPTMFLEIGSTEDYWKRQDAAQVMAQLVWEGLGLGGVSDVGNWSRENDNKKILLGIGGGHYAPRHVDVVLKDNVWVGHLLSGYSLPMEDPNQSKGEKNVEIGGTWRQSIKAAYEATYSAFPGGEILAHLDHKSFKGWQKNAITGFLAEQNIKIGKPNNFY

SEQ ID NO: 5096 - DNA, 1109 bp, Glycine max
  misc_feature (1)..(1109): Ceres Seq. ID no. 14307018
gaaactgagcatctcattaagggataatttagtgaatatgtattttatcctcttaataaaaatgtctttttgtctgaatttttatatcaacaggtatggttacaaagatgttcggaaagaaaatcaccagacttttgagcagctgctgattgagagcctagagaagtttatacgtcgtgaggctcaggagaggtcactggagagtgatggggatggtgatactggttcagaggatgagtaccctaattctagggttctcatagctcccaatgggagcgtttactcacttggtgttcctcttcttgctggttttaaggatacaagcaaccccgttttagaagaaagcacattagacgtgataagcccggtatccactgatcccctggtgtttgatgctgagcagagccttgagagtgagttatcttttattcataaggctaaagaatctggtgttgtgtatcttcttggtcatggggatataagagcaaggaaggagtcgtggtttatcaagaagttagttataaactatttttatgcctttttgagaaagaactgcagaagggggatcacaactttaagtgtaccacactcacatttgatgcaagttagcatgacatacatggtttgaaaatcaatcaattttgcagcccaaataaaacgagtggcaattctcttgaaagctacagtttgatagcaatgaagggtccctggaaaggtcttattttggattgctcaatctgaaatgttcgatcctttctagccattttggatctccaaattgtttattgtccttccagcgcgagaatccggaagtagtcctgatgtttgttgtcgttgtggattcaccatctgcatatatgggattagaaaaaggctgataacaaagagaaaatgttaaaaactaacatccctccctatgcatacaatgcacatttgcgaatgtgtcaaattcaacttaaacgcaagaaccatggacatcgagtattgtacagtggcatgccattgcccttagttttcttattctatcacctttatttgttgtttaccttcccaactctgactaggcattttcttgattgaaacacaaatgagatcatatcttttttttc

SEQ ID NO: 5097 - protein, 208 aa, Glycine max
  misc_feature (1)..(208): Ceres Seq. ID no. 14307019
KLSISLRDNLVNMYFILLIKMSFCLNFYINRYGYKDVRKENHQTFEQLLIESLEKFIRREAQERSLESDGDGDTGSEDEYPNSRVLIAPNGSVYSLGVPLLAGFKDTSNPVLEESTLDVISPVSTDPLVFDAEQSLESELSFIHKAKESGVVYLLGHGDIRARKESWFIKKLVINYFYAFLRKNCRRGITTLSVPHSHLMQVSMTYMV

SEQ ID NO: 5098 - protein, 196 aa, Glycine max
  misc_feature (1)..(196): Ceres Seq. ID no. 14307020
MYFILLIKMSFCLNFYINRYGYKDVRKENHQTFEQLLIESLEKFIRREAQERSLESDGDGDTGSEDEYPNSRVLIAPNGSVYSLGVPLLAGFKDTSNPVLEESTLDVISPVSTDPLVFDAEQSLESELSFIHKAKESGVVYLLGHGDIRARKESWFIKKLVINYFYAFLRKNCRRGITTLSVPHSHLMQVSMTYMV

SEQ ID NO: 5099 - protein, 188 aa, Glycine max
  misc_feature (1)..(188): Ceres Seq. ID no. 14307021
MSFCLNFYINRYGYKDVRKENHQTFEQLLIESLEKFIRREAQERSLESDGDGDTGSEDEYPNSRVLIAPNGSVYSLGVPLLAGFKDTSNPVLEESTLDVISPVSTDPLVFDAEQSLESELSFIHKAKESGVVYLLGHGDIRARKESWFIKKLVINYFYAFLRKNCRRGITTLSVPHSHLMQVSMTYMV

SEQ ID NO: 5100 - DNA, 916 bp, Glycine max
  misc_feature (1)..(916): Ceres Seq. ID no. 14307030
gatttttgaaaatggtaccatcccagtttcagattcatttccaaaactatcagatttgaacattgactattgcaaggatatggtggaattacctactgggatctgtgatattaccccactaaagaagctcagtattactaattgccacaagcttagttctctgccccaaaacattggaaagttgttgaatttggaactcctgaacctaagttcctgcactgatttggaagagataccagattctattgtaaaactttctaagctaagacttcttgacctctcaaactgcataagcctttcaattttaccagaggacattggtgatctatgcaatctcaggaatctcaatatgacaagctgtgcaaggtgtgaattgccgtactcagtaaccaatcttgagaatttaaaagtggtggtatgtgatgaagagacagctgcttcatgggaagcatttgaagctatgcttccaaatctgaagttagaggttcctcgagttgaggttaacttaaactggcttcattcaattagctcttaagacatgtcctgcttcatggaaagcatttgaagctatgctttcccaatctcaagtttgaggttcctcaagttgatgttaactgaagctggtttcattcaatttgctcctatgacctctttctataaaaatgttagaccaatgatcgtaactgtttcatgtgaaataatcttgtttaaaatagggataataaatgtgtattcaagttgctgtagtagtatttgcatgtcgtgcaaacagtactatgctacttgaaagaagttggtgattttatgtgttgtgtgttgtcacgattggacatcttagcataatgatgccaacaaaataattgaactatgataacttcaaaagtttgtttttatgaagtaggttttcttatcttcg

SEQ ID NO: 5101 - protein, 177 aa, Glycine max
  misc_feature (1)..(177): Ceres Seq. ID no. 14307031
IFENGTIPVSDSFPKLSDLNIDYCKDMVELPTGICDITPLKKLSITNCHKLSSLPQNIGKLLNLELLNLSSCTDLEEIPDSIVKLSKLRLLDLSNCISLSILPEDIGDLCNLRNLNMTSCARCELPYSVTNLENLKVVVCDEETAASWEAFEAMLPNLKLEVPRVEVNLNWLHSISS

SEQ ID NO: 5102 - protein, 151 aa, Glycine max
  misc_feature (1)..(151): Ceres Seq. ID no. 14307032
MVELPTGICDITPLKKLSITNCHKLSSLPQNIGKLLNLELLNLSSCTDLEEIPDSIVKLSKLRLLDLSNCISLSILPEDIGDLCNLRNLNMTSCARCELPYSVTNLENLKVVVCDEETAASWEAFEAMLPNLKLEVPRVEVNLNWLHSISS

SEQ ID NO: 5103 - DNA, 1220 bp, Glycine max
  misc_feature (1)..(1220): Ceres Seq. ID no. 14307041
aaaaacataagaatgcattcaacgcgttgagttgttgtctggaagagcttatgctgtttgttcgcaattcgcatggaaccatcagtttcagctccaccaaaaccttgggagaaagcagcatcatcatctgggccagcaccttttaaacccccatcagcaggtagcacaagtgatgtagttgaggcttcagggactgcaaaacctggcgaaatagttccagcttccgataagactgcaactgtcaataggaatgctcttgggagaccccttcccacaaggccatgggagcagaataatggaagtaccagctatggaggttatggttccacaatgaattataattctggatatggatcttatggtggagtgggagggttgtatggcggaggaatgtatggcagcagtatgtacaggggaggatatgggggcctctatggttcctctgggatgtatggagggggaatgtataatggtggctttggtggtccaatgggtggttatggtatgggtggtggtggtccttatggagctgaagatcccaataatccgtacggagttccttcatcgcccccaggattttggatttcttttatgcgtgtgatgcaaggtgtggttaacttttttggccggatttcaatgctcatagaccagaacacgcaggctttccatatgttcatgactgcacttcttcagctttttgatcgttctggtgtactgtatggagagctagctagatttgtgttgcggttgcttggaatcagaactaaaccaaagaagattaaccctccaggtccagatggacttccactacctgggcaacacaattcctctgtaaatcagaacttcattgagggaacaaagcctgctccaagtggttcttgggacaatgtatgggaaaatgacgccaaaaaatgatgatgcaaatttgttttgctgatagagcaagtccaaatacaaaccaaggaattgaggaacagatgaagcaatacaagtgaatatactgaagctgtgaaatcgatgcttaatctggaagtttaagttcattattgctttgcttagattgctctgataagagagaacaaactagcaatacagttgccttctaagcatttgttctgaatcttgtaggatgctatttgtatagatagttgtattactttgtatttcaaatgtttcttaatcttttgggggcgacaaattgaaagaagtaaattgagtgg

SEQ ID NO: 5104 - protein, 280 aa, Glycine max
  misc_feature (1)..(280): Ceres Seq. ID no. 14307042
MEPSVSAPPKPWEKAASSSGPAPFKPPSAGSTSDVVEASGTAKPGEIVPASDKTATVNRNALGRPLPTRPWEQNNGSTSYGGYGSTMNYNSGYGSYGGVGGLYGGGMYGSSMYRGGYGGLYGSSGMYGGGMYNGGFGGPMGGYGMGGGGPYGAEDPNNPYGVPSSPPGFWISFMRVMQGVVNFFGRISMLIDQNTQAFHMFMTALLQLFDRSGVLYGELARFVLRLLGIRTKPKKINPPGPDGLPLPGQHNSSVNQNFIEGTKPAPSGSWDNVWENDAKK

SEQ ID NO: 5105 - protein, 194 aa, Glycine max
  misc_feature (1)..(194): Ceres Seq. ID no. 14307043
MNYNSGYGSYGGVGGLYGGGMYGSSMYRGGYGGLYGSSGMYGGGMYNGGFGGPMGGYGMGGGGPYGAEDPNNPYGVPSSPPGFWISFMRVMQGVVNFFGRISMLIDQNTQAFHMFMTALLQLFDRSGVLYGELARFVLRLLGIRTKPKKINPPGPDGLPLPGQHNSSVNQNFIEGTKPAPSGSWDNVWENDAKK

SEQ ID NO: 5106 - protein, 174 aa, Glycine max
  misc_feature (1)..(174): Ceres Seq. ID no. 14307044
MYGSSMYRGGYGGLYGSSGMYGGGMYNGGFGGPMGGYGMGGGGPYGAEDPNNPYGVPSSPPGFWISFMRVMQGVVNFFGRISMLIDQNTQAFHMFMTALLQLFDRSGVLYGELARFVLRLLGIRTKPKKINPPGPDGLPLPGQHNSSVNQNFIEGTKPAPSGSWDNVWENDAKK

SEQ ID NO: 5107 - DNA, 1448 bp, Glycine max
  misc_feature (1)..(1448): Ceres Seq. ID no. 14307049
aggagtatcttcgtgataactcacatgtaaatcctggaattgacctgacagtaactgtgcttaccacaggattttggcctagttataagtcttttgatctcaaccttccttcagagatgatcaggtgcttggaagtttttaagggcttctatgaaacgaggacaaaacacagaaaacttacttggatatactctctgggaacatgccacgtcactggcaagtttgaaacaaaaaacattgaactaattgtgccaacctatccagtaaactgcctttcacccatcaccattcctattttatgttgaaatttgtgccactatggtatttaagatttatgacttcatgctggtggtttaacaagtgtctcttctacttcacaggctgctgccctactgctattcaacaatgctgataggttgagctattcagagattatgactcagctgaacttgggccatgaagatgttgctagattgctccattcactgtcatctgcaaaatataagatacttatcaaggagccaaacaataaagttatatctcaaagtgacatctttgagttcaactacaaatttacggataaaatgagaaggatcaagatccctctaccaccagctgatgaaaggaaaaaggtaattgaagatgttgacaaagatcggcgatatgccattgatgcagcaattgtgcgcattatgaagagtaggaaaattttgggtcatcaacaattagttttggagtgtgttgagcagttgggccgcatgttcaagcctgacatcaaagcaatcaagaagaggattgaagatctcatcactcgggactaccttgaaagggacaaagataacccaaacaccttcaggtatttggcataaatggaagttactaatgtatagagtggccagtgttatagcctgcaaatgagcactagggttgccttaatttgattcttagggaagtacagttgaaagttctgacggttacacaatgctgtaaatgatcgtagtcgattgcttgattcagtaacaccaagagcgagattcttttgtcatacttgacattttaagagctagtttaagatacaacatacgtactggagcgaagcaagatattgtaccaaatacgttgttttcatatatatcttgattactttaatggaaagtgaaggtgggaaagtgaaggtggcacaatgaaagattgaaccttgatattctacctaagtgctacaaattgaggcaagctagtgtggctcatcggccgttgttgatatcaactgctttagcaatatattttctggctttatcctttataatttcggattatctcttctctgtcttctttctttgctcagtagtttagattagtcatttgatcttatgtatctatttaagaaaattatgcatatttcacaacttaattttaggggttattaatatgattgatagaattttctc

SEQ ID NO: 5108 - protein, 144 aa, Glycine max
  misc_feature (1)..(144): Ceres Seq. ID no. 14307050
MTQLNLGHEDVARLLHSLSSAKYKILIKEPNNKVISQSDIFEFNYKFTDKMRRIKIPLPPADERKKVIEDVDKDRRYAIDAAIVRIMKSRKILGHQQLVLECVEQLGRMFKPDIKAIKKRIEDLITRDYLERDKDNPNTFRYLA

SEQ ID NO: 5109 - protein, 100 aa, Glycine max
  misc_feature (1)..(100): Ceres Seq. ID no. 14307051
EYLRDNSHVNPGIDLTVTVLTTGFWPSYKSFDLNLPSEMIRCLEVFKGFYETRTKHRKLTWIYSLGTCHVTGKFETKNIELIVPTYPVNCLSPITIPILC

SEQ ID NO: 5110 - protein, 94 aa, Glycine max
  misc_feature (1)..(94): Ceres Seq. ID no. 14307052
MRRIKIPLPPADERKKVIEDVDKDRRYAIDAAIVRIMKSRKILGHQQLVLECVEQLGRMFKPDIKAIKKRIEDLITRDYLERDKDNPNTFRYLA

SEQ ID NO: 5111 - DNA, 1270 bp, Glycine max
  misc_feature (1)..(1270): Ceres Seq. ID no. 14307053
ggttgcatcccaaatggaataagttcagacatgtccatagcgttgaacaaaactaacagcagcaaaatgagcacacccttgttccatgaattcaaaaagcaagcttctttcttcttcaaggagaaaattaagactgctagattagctctaacagatgtcacccctgcagaactgatgacagaagaggcaacaagtggaaatccatgggccccagatgccagaactctcagatcaatttcaagggatgcttttgagctagacgattattggaggattgtggagattctgcataaaaggtttcttaaatttgaaaagaagaattggaggatctcttacaattccctgatcgtgcttgagcacttgttgactcatggaccagagagtgttgcggaggaatttaagagtgacaaagatgtcattagccaaatgaaaggttttcagtatattgatgacactgggtttaattggggcctaactgtgagaaagaaatctgagaggataatgaaactgctggaaaaagggactcttctcaaggaagagagaaaaaatgctagaaggttatctagagggattgaaggtttcggaagtttctctcatcggtcaactccggcacaaggtgttctacgtgagaaatcattgccaaccacacttaagagatatgactcagacttaaacaaccatgaagatcaggaaaaccattcctcttgttcaaacaatgttgtgaatgtggacacagtggctgtcaaatctcctagccatcaaggtgaaacttttaagtcattgggtagtgtggaagccaaggaataccaggatgatgatcttggcaacaatcaaatgcttccgaaatctgaaacaagttctaaagaaaacatggagcctagcaaggaggagttccatctatggaacttgaatggggagtccaaagcacttttggattgtggtgaagaggattccaagcttggaatcatcagaacagaagatgatcaccccttcagttcagcagaaatgcatgccactgcctctttgctttcggcttgctagagacggaaatactagtatactacaagggtgttgaagcaatttgaagatttaaatgaacccaccaagttcaagttgttagcaaatattgcattttcaattcagaagagcatagtctaaagaacgtcttatggtacatgtattcatatttgatggatatgggcaaccattatgttactgctagaatttcccctctatcacggtttgttactcaacaaagagaaattttgtc

SEQ ID NO: 5112 - protein, 346 aa, Glycine max
  misc_feature (1)..(346): Ceres Seq. ID no. 14307054
GCIPNGISSDMSIALNKTNSSKMSTPLFHEFKKQASFFFKEKIKTARLALTDVTPAELMTEEATSGNPWAPDARTLRSISRDAFELDDYWRIVEILHKRFLKFEKKNWRISYNSLIVLEHLLTHGPESVAEEFKSDKDVISQMKGFQYIDDTGFNWGLTVRKKSERIMKLLEKGTLLKEERKNARRLSRGIEGFGSFSHRSTPAQGVLREKSLPTTLKRYDSDLNNHEDQENHSSCSNNVVNVDTVAVKSPSHQGETFKSLGSVEAKEYQDDDLGNNQMLPKSETSSKENMEPSKEEFHLWNLNGESKALLDCGEEDSKLGIIRTEDDHPFSSAEMHATASLLSAC

SEQ ID NO: 5113 - protein, 336 aa, Glycine max
  misc_feature (1)..(336): Ceres Seq. ID no. 14307055
MSIALNKTNSSKMSTPLFHEFKKQASFFFKEKIKTARLALTDVTPAELMTEEATSGNPWAPDARTLRSISRDAFELDDYWRIVEILHKRFLKFEKKNWRISYNSLIVLEHLLTHGPESVAEEFKSDKDVISQMKGFQYIDDTGFNWGLTVRKKSERIMKLLEKGTLLKEERKNARRLSRGIEGFGSFSHRSTPAQGVLREKSLPTTLKRYDSDLNNHEDQENHSSCSNNVVNVDTVAVKSPSHQGETFKSLGSVEAKEYQDDDLGNNQMLPKSETSSKENMEPSKEEFHLWNLNGESKALLDCGEEDSKLGIIRTEDDHPFSSAEMHATASLLSAC

SEQ ID NO: 5114 - protein, 324 aa, Glycine max
  misc_feature (1)..(324): Ceres Seq. ID no. 14307056
MSTPLFHEFKKQASFFFKEKIKTARLALTDVTPAELMTEEATSGNPWAPDARTLRSISRDAFELDDYWRIVEILHKRFLKFEKKNWRISYNSLIVLEHLLTHGPESVAEEFKSDKDVISQMKGFQYIDDTGFNWGLTVRKKSERIMKLLEKGTLLKEERKNARRLSRGIEGFGSFSHRSTPAQGVLREKSLPTTLKRYDSDLNNHEDQENHSSCSNNVVNVDTVAVKSPSHQGETFKSLGSVEAKEYQDDDLGNNQMLPKSETSSKENMEPSKEEFHLWNLNGESKALLDCGEEDSKLGIIRTEDDHPFSSAEMHATASLLSAC

SEQ ID NO: 5115 - DNA, 1029 bp, Glycine max
  misc_feature (1)..(1029): Ceres Seq. ID no. 14307057
agcttatgccagaaaaatatcgatgttttattttatttcatttcttggttgtagttgaatcctctcactttgccaaaaaatcaaacaacataaccttaaattttcttgagggattgagttgttctgcattaagttctcagcacattctagccactgcataccatagcccgttctagattgtaacaaacccaactccctataataatctatgtgtggtccaccaagtgtggtccgtacttactctttcatgactgactttggtgcagacagtatgctcacaacaactaacatattagggagttgggcatctttatatttagttcatgactcttatgctttgatcaggttgtacattcatgcttaattatatgataattgggatatggtttgttcactaccatagtaataaggtgtagttatgtatattaattgatagttgttcaaatttatgttataccaagctaatgcattgagtaacactgcactgagtctagtgttgaaactcaggtagacaaatccactatgcctgcaaatacaaaggatgcattatatcaaagcttgcctcctaatataaaattagctctacgttccaaattaccatccctccgtgctgtagaagagataagtgtagcctatatcacatatgagatgcataaaaaattacattggttggttcccatggccattaacacatccaaagcacataagagatttggttggctaggggagtgggcatactcagggtatgaagtaaaaaagaagactggtgtaatgtggattgagacattctaccatgcagatagagagaaagtggaacattgtattcttgaacttctcttatggcttcatcgcttggccatcagaagtaaggctcacagtgatgctattgctggctaagtaaggtctgccacttgcgaagaaaatggaatgataaaactgaatttggtctcttttgattcaaccttaataaaggaaataattgcttaattagctctctaaataaatctcttgatttaagggattgcccgt

SEQ ID NO: 5116 - protein, 124 aa, Glycine max
  misc_feature (1)..(124): Ceres Seq. ID no. 14307058
MPANTKDALYQSLPPNIKLALRSKLPSLRAVEEISVAYITYEMHKKLHWLVPMAINTSKAHKRFGWLGEWAYSGYEVKKKTGVMWIETFYHADREKVEHCILELLLWLHRLAIRSKAHSDAIAG

SEQ ID NO: 5117 - protein, 82 aa, Glycine max
  misc_feature (1)..(82): Ceres Seq. ID no. 14307059
MHKKLHWLVPMAINTSKAHKRFGWLGEWAYSGYEVKKKTGVMWIETFYHADREKVEHCILELLLWLHRLAIRSKAHSDAIAG

SEQ ID NO: 5118 - protein, 72 aa, Glycine max
  misc_feature (1)..(72): Ceres Seq. ID no. 14307060
MAINTSKAHKRFGWLGEWAYSGYEVKKKTGVMWIETFYHADREKVEHCILELLLWLHRLAIRSKAHSDAIAG

SEQ ID NO: 5119 - DNA, 1140 bp, Glycine max
  misc_feature (1)..(1140): Ceres Seq. ID no. 14307079
atttgttttcgaagattatcacttctccgtggagctttttgtgtctccattcttggttcaagaaggggaaatgactgataagaatgggacaaagaaggaaacacttcgtctcgatttggttggtaaatcttcatctcaatataaagatgcagatattctcgtcttcaacactggccactggtggactcatgataaaacttctaaagggcaggactattatcaagaaggtaaccatgtgtattccgaattaaacgttcttgaggcattccgaagagctttaacaacttggagcaggtgggttgatgccaacataaatccatccaagaccacggtcttcttcagaggctattctgcatcccacttcagtggtggacaatggaattcaggtggtcaatgtgatagtgaaactgatccaattgacaacgagaagtacctaaccgagtatccagataagatgaaggttttggagaaggtgctaaagaatatgaaaacccgtgtgacttaccaaaacatcactagaatgacggatttccggaaggatggtcacccctccatatacaggaagcaaaatctatcacctgaggaactaaaatcacctttgagattccaagactgcagccactggtgccttccgggtgttcctgatttatggaatgaaattctctacgctgaacttctgttgagagagtatcggaatcagcatgagcagaagaaagcataggtaaacacataaactaccaaacttctgcctcacttatggtcaatgagttaagctcaaacagatgcagctgctgtatgttccatttttgttcccacgcatgtccaggatggtgaaagaaagaaaaagaaaccatctacagaagaaagtgccttttgcatttattttaaaggttcataaaattaagtgaaccaatataatacagaattaagagatgtgagtaccttgatcctgtgtaataaatttgttcatatggaaaacaaattggtgaggagaggagagaatacgaggatggtgttatttgttattgtaaatcatcccttaccttgcatcttcattttctttcttgcctgaaaggctgattcttggtgtaaatctataatcaattagattttatatattactataatcaaattattgag

SEQ ID NO: 5120 - protein, 239 aa, Glycine max
  misc_feature (1)..(239): Ceres Seq. ID no. 14307080
FVFEDYHFSVELFVSPFLVQEGEMTDKNGTKKETLRLDLVGKSSSQYKDADILVFNTGHWWTHDKTSKGQDYYQEGNHVYSELNVLEAFRRALTTWSRWVDANINPSKTTVFFRGYSASHFSGGQWNSGGQCDSETDPIDNEKYLTEYPDKMKVLEKVLKNMKTRVTYQNITRMTDFRKDGHPSIYRKQNLSPEELKSPLRFQDCSHWCLPGVPDLWNEILYAELLLREYRNQHEQKKA

SEQ ID NO: 5121 - protein, 216 aa, Glycine max
  misc_feature (1)..(216): Ceres Seq. ID no. 14307081
MTDKNGTKKETLRLDLVGKSSSQYKDADILVFNTGHWWTHDKTSKGQDYYQEGNHVYSELNVLEAFRRALTTWSRWVDANINPSKTTVFFRGYSASHFSGGQWNSGGQCDSETDPIDNEKYLTEYPDKMKVLEKVLKNMKTRVTYQNITRMTDFRKDGHPSIYRKQNLSPEELKSPLRFQDCSHWCLPGVPDLWNEILYAELLLREYRNQHEQKKA

SEQ ID NO: 5122 - DNA, 1082 bp, Glycine max
  misc_feature (1)..(1082): Ceres Seq. ID no. 14307085
atcttcttctctaagctataagccatatacaccaaatattttttcacttgctctccatcttttttcagttcatcagtggccaggtaggccatgggaagggctccatgttgtgacaaatccaatgtgaaaagagggccttggtctcctgatgaagatgccaccctcaaaaactaccttgagaaacatggcacaggtggtaactggatagctctccccaaaaaagcaggccttaagcgttgtgggaagagctgtcgtctaagatggctaaactatctcaggcctcatattaagcttggaggtttcactgaagaggaagacaaaattatctgcaccctttatgacaccatcggaagcaggtggtcctttatagcagctcaacttcccgggagaacagacaatgatgtgaaaaatcactggaacaccaagctaaagaaaaagttcttggcaggaaacacaagtagtactgctgccacgacaagcaacaacaatgtcactttcagcaatactagttattctgatcaagttaagacccttgtcttggatcatcaaaaactgaactcagctgataattggtttgactactcctacaatgttttggaattggaacaaacaccaattccagttccttttccaatgtctcaggaattagaggcttttaattatactgctgggagtataagttgtagtgcaccaccaccctctaaggaagtttcaatgctttccaatgcagacaatcatacgctatggtttggttatgaccatgcaagtgaagatgatccaaatttgcttgagtttgtgcttgatgatgatctgctgaatcatggatttgtttctcaagacaaaagctgcagccaagttggtccaccatctggctaattaaccaagatcactcattctttctactcgtcaaaaacttgaaaaaaccaaggctacagaaaataaaggtaaaatggaatattgatcaagttattatagtatagtactagtgatgaattatatacctctaaatctaactggtgtttaaatttgtgattaaagtggttggttgaatgtggaattgtgtgagtttctgaattgttttc

SEQ ID NO: 5123 - protein, 261 aa, Glycine max
  misc_feature (1)..(261): Ceres Seq. ID no. 14307086
MGRAPCCDKSNVKRGPWSPDEDATLKNYLEKHGTGGNWIALPKKAGLKRCGKSCRLRWLNYLRPHIKLGGFTEEEDKIICTLYDTIGSRWSFIAAQLPGRTDNDVKNHWNTKLKKKFLAGNTSSTAATTSNNNVTFSNTSYSDQVKTLVLDHQKLNSADNWFDYSYNVLELEQTPIPVPFPMSQELEAFNYTAGSISCSAPPPSKEVSMLSNADNHTLWFGYDHASEDDPNLLEFVLDDDLLNHGFVSQDKSCSQVGPPSG

SEQ ID NO: 5124 - DNA, 1344 bp, Glycine max
  misc_feature (1)..(1344): Ceres Seq. ID no. 14307091
attggaagaatgcatcaccgcgttgtgttgtgattgaaaatggagagcgatgttgaagaatctatgcggaagaggcccagaaaatatcctttctccgccgattcatcctctcgcaagcaatttgaacaatattctggacggacatttgcaattatgggggaagtgaattttatgcaagatgatgataatcgtttggagattacccgaactaaatttggaagtttgcttaaaagacatggagatttgacagagcggcttgctagggattctgacaagataatatttgagcgtctacagaaggagtttgaagctgcacgagcttctcaaactgaagagatatgtttagacggggaagagtggaatgatggtctactagctacaataagagagcgggtgcatatggaggcggacagaaaagcaatgcaaggggatgcggacatattagcatgtcccctggaaaaaattacatataaaattggaaacaaggtaatttgctgtttggaaggggcaagaatcggcgtacaatatgagacatcgtttgctggtgaaccttgtgagttttaccattgtgtgctggaaagcaagtcatttcttgaaaagatgactgtccttgaacacacagttccatttttcctgccaatacgagaaatagaaaatgatctccattcatccaatgcaatgaaactcatagatcatgttggagatctattgcaggcttttgtggatagacgggaacaggtcagacttataaaggagctgtatggaaatcagattagagagctgtatcatagccttccctaccatatggtcgaatttgtattagatgattctgattgcaaggtgacagtcagccttagatatgcagatctcatttcggtgcttccaactcgaatttcagtgctagcctggcctatgttcaataaaaatactatgagtaggaaggaagatggactctcgggaagtcattcttccccaattcgcctaacatatgcagaagatgccttacgaaccatgagtttacccgaagcatatgcagagattgtattaaacttaccacaggcgattcggcagacgtatcatcaaaaagccaccgcttagagctttgccctttcagtagcctagatgcatctgtaaaaattcttggtagagatgttaaatattagaaaaacaacttcagaattattacctatttacctagtcaaattgctcaggttgagttcattttgctgtaatattgtcatatagcatttagcatttgtacttcggcctctctggcctcgttattccttcaatacctactccggtgtcttgtatcattaatacaacagggctaggtttacatct

SEQ ID NO: 5125 - protein, 352 aa, Glycine max
  misc_feature (1)..(352): Ceres Seq. ID no. 14307092
MESDVEESMRKRPRKYPFSADSSSRKQFEQYSGRTFAIMGEVNFMQDDDNRLEITRTKFGSLLKRHGDLTERLARDSDKIIFERLQKEFEAARASQTEEICLDGEEWNDGLLATIRERVHMEADRKAMQGDADILACPLEKITYKIGNKVICCLEGARIGVQYETSFAGEPCEFYHCVLESKSFLEKMTVLEHTVPFFLPIREIENDLHSSNAMKLIDHVGDLLQAFVDRREQVRLIKELYGNQIRELYHSLPYHMVEFVLDDSDCKVTVSLRYADLISVLPTRISVLAWPMFNKNTMSRKEDGLSGSHSSPIRLTYAEDALRTMSLPEAYAEIVLNLPQAIRQTYHQKATA

SEQ ID NO: 5126 - protein, 344 aa, Glycine max
  misc_feature (1)..(344): Ceres Seq. ID no. 14307093
MRKRPRKYPFSADSSSRKQFEQYSGRTFAIMGEVNFMQDDDNRLEITRTKFGSLLKRHGDLTERLARDSDKIIFERLQKEFEAARASQTEEICLDGEEWNDGLLATIRERVHMEADRKAMQGDADILACPLEKITYKIGNKVICCLEGARIGVQYETSFAGEPCEFYHCVLESKSFLEKMTVLEHTVPFFLPIREIENDLHSSNAMKLIDHVGDLLQAFVDRREQVRLIKELYGNQIRELYHSLPYHMVEFVLDDSDCKVTVSLRYADLISVLPTRISVLAWPMFNKNTMSRKEDGLSGSHSSPIRLTYAEDALRTMSLPEAYAEIVLNLPQAIRQTYHQKATA

SEQ ID NO: 5127 - protein, 314 aa, Glycine max
  misc_feature (1)..(314): Ceres Seq. ID no. 14307094
MGEVNFMQDDDNRLEITRTKFGSLLKRHGDLTERLARDSDKIIFERLQKEFEAARASQTEEICLDGEEWNDGLLATIRERVHMEADRKAMQGDADILACPLEKITYKIGNKVICCLEGARIGVQYETSFAGEPCEFYHCVLESKSFLEKMTVLEHTVPFFLPIREIENDLHSSNAMKLIDHVGDLLQAFVDRREQVRLIKELYGNQIRELYHSLPYHMVEFVLDDSDCKVTVSLRYADLISVLPTRISVLAWPMFNKNTMSRKEDGLSGSHSSPIRLTYAEDALRTMSLPEAYAEIVLNLPQAIRQTYHQKATA

SEQ ID NO: 5128 - DNA, 764 bp, Glycine max
  misc_feature (1)..(764): Ceres Seq. ID no. 14307103
attcattccaaccattctccaccattcacaatctaagcatcccaaaactaactattgtgctagctacttagttgtgtaagatggcttccaagggaaatgttgcatccacttatgttgcactactcatgtgtctctatttgctttcattcaccatggtgagctctcaaatctcaaccccaccaccaatgccttctcaaaacggtacatgtcctataaatgtacttcgattgggtgtgtgtgccaatgtgttgaacctggtcaatgttacactaggatcaccaccaaccctcccctgttgcaccctcattcagggtttggctgatgttgatgttggtgtttgcctttgcactgccctcagagctaaccttcttggcatcaacttaaacttgccaatttccttgacattgcttctcaatacctgcagagggaacatccctaatatccagtgttcttaaatttatcttctctagtggaatatacatgtggtctatgaaaaaataaactcatcgcctccatccacaattccacatgttgtctctctcatatttcgtatctttttatggtgtttttttttctttcagttcttgttgtactccatgtatttcccctttttagcgctttccatcctaataataatttctcactccttcgacattgttctactatcggacgaaggattactcattagcctctttcattgcattgcatgtgtaagttgttatacaaataaagttatatgattcctaaaaaaaaaaaaaaaaaag

SEQ ID NO: 5129 - protein, 124 aa, Glycine max
  misc_feature (1)..(124): Ceres Seq. ID no. 14307104
MASKGNVASTYVALLMCLYLLSFTMVSSQISTPPPMPSQNGTCPINVLRLGVCANVLNLVNVTLGSPPTLPCCTLIQGLADVDVGVCLCTALRANLLGINLNLPISLTLLLNTCRGNIPNIQCS

SEQ ID NO: 5130 - protein, 109 aa, Glycine max
  misc_feature (1)..(109): Ceres Seq. ID no. 14307105
MCLYLLSFTMVSSQISTPPPMPSQNGTCPINVLRLGVCANVLNLVNVTLGSPPTLPCCTLIQGLADVDVGVCLCTALRANLLGINLNLPISLTLLLNTCRGNIPNIQCS

SEQ ID NO: 5131 - protein, 100 aa, Glycine max
  misc_feature (1)..(100): Ceres Seq. ID no. 14307106
MVSSQISTPPPMPSQNGTCPINVLRLGVCANVLNLVNVTLGSPPTLPCCTLIQGLADVDVGVCLCTALRANLLGINLNLPISLTLLLNTCRGNIPNIQCS

SEQ ID NO: 5132 - DNA, 1207 bp, Glycine max
  misc_feature (1)..(1207): Ceres Seq. ID no. 14307111
gcgccaaagcaaagatgaatgaagcggaggagcaactttgcgaggcggccagaaaaggtgacacggagaaagtgaggtctctcatagactccggcgctgacgtcagccacttcgacggcgagggcctcaatcctctgatgcacgccgcaaagcacggccatgcacccgtcctcaccctcctcctctccgccggcgctccctggaacgctctttccccctccaacctctccgccggcgactacgccatgcaagaaggccacaacgaagccttcgagcttctcgtcaacgccgggattcaagccgaactgatcctgggaacaattgcgaggaaggaaaacaagaacggcgattccggtcacgattacttggaagacagggtgagttttagcgaagacaagcttatggactctgaaagcaaggctgtgatgatggcgtgggagaatccgttgatggaggctcatgccaaagctgtttgttcgggaggtggccacgtactcaatattgggtttggaatggggctggtggattcggccattcagcgatatgcacctgcttcacacaccattgttgaggctcatcctgaggtttatgaacgcatgcttagctccggttggggtcagaaggaaagtgtcaagattgtttttggacgatggcaagatgttctgcctcagcttgaaacatatgatggaatattctttgacacctatggggagtactacgaagatctgagggagttccatcagcatctccccgcattgttgaagcctggtggtatctactcattcttcaacggtctttgtggcagtaatgcatttttccatgttgtttactgcaatttggtatcccttgagcttgagaatttggggtattccacacaattaattccattgccggttaaggattgtttgggagaacaagtttgggaaggtgtgaaacaaagatattggcagctcgatacgtactatcttcctgtctgtcaggccgtagaggaccctgagtgaggcaggaaatggatttcctgcagcttagaaagaactgcaccatgtgcagttaaaatttcaccgtccatgcaagttttttctcttctttatatattaaaattaaaggaataattgaaatctcatgcagttttttttttaactgtagagaatcttaatcccagtgatgtatgattttatttttaatcacatcgtcaaaatattctaac

SEQ ID NO: 5133 - protein, 332 aa, Glycine max
  misc_feature (1)..(332): Ceres Seq. ID no. 14307112
AKAKMNEAEEQLCEAARKGDTEKVRSLIDSGADVSHFDGEGLNPLMHAAKHGHAPVLTLLLSAGAPWNALSPSNLSAGDYAMQEGHNEAFELLVNAGIQAELILGTIARKENKNGDSGHDYLEDRVSFSEDKLMDSESKAVMMAWENPLMEAHAKAVCSGGGHVLNIGFGMGLVDSAIQRYAPASHTIVEAHPEVYERMLSSGWGQKESVKIVFGRWQDVLPQLETYDGIFFDTYGEYYEDLREFHQHLPALLKPGGIYSFFNGLCGSNAFFHVVYCNLVSLELENLGYSTQLIPLPVKDCLGEQVWEGVKQRYWQLDTYYLPVCQAVEDPE

SEQ ID NO: 5134 - protein, 328 aa, Glycine max
  misc_feature (1)..(328): Ceres Seq. ID no. 14307113
MNEAEEQLCEAARKGDTEKVRSLIDSGADVSHFDGEGLNPLMHAAKHGHAPVLTLLLSAGAPWNALSPSNLSAGDYAMQEGHNEAFELLVNAGIQAELILGTIARKENKNGDSGHDYLEDRVSFSEDKLMDSESKAVMMAWENPLMEAHAKAVCSGGGHVLNIGFGMGLVDSAIQRYAPASHTIVEAHPEVYERMLSSGWGQKESVKIVFGRWQDVLPQLETYDGIFFDTYGEYYEDLREFHQHLPALLKPGGIYSFFNGLCGSNAFFHVVYCNLVSLELENLGYSTQLIPLPVKDCLGEQVWEGVKQRYWQLDTYYLPVCQAVEDPE

SEQ ID NO: 5135 - protein, 287 aa, Glycine max
  misc_feature (1)..(287): Ceres Seq. ID no. 14307114
MHAAKHGHAPVLTLLLSAGAPWNALSPSNLSAGDYAMQEGHNEAFELLVNAGIQAELILGTIARKENKNGDSGHDYLEDRVSFSEDKLMDSESKAVMMAWENPLMEAHAKAVCSGGGHVLNIGFGMGLVDSAIQRYAPASHTIVEAHPEVYERMLSSGWGQKESVKIVFGRWQDVLPQLETYDGIFFDTYGEYYEDLREFHQHLPALLKPGGIYSFFNGLCGSNAFFHVVYCNLVSLELENLGYSTQLIPLPVKDCLGEQVWEGVKQRYWQLDTYYLPVCQAVEDPE

SEQ ID NO: 5136 - DNA, 1170 bp, Glycine max
  misc_feature (1)..(1170): Ceres Seq. ID no. 14307115
aatatggaaacaaataaagacttctttgttgtggtgaatcaagttaaatctgagttgtcctgtatatgtcggttatttgaatacagaggctatctttgtagacatgcgttgtttgttcttcaatattctggccagtcagtgttcccatctcaatatattttgaaacggtggacaaaagatgcaaaggtcaggaatataatgggagaagaatcggaacacatgctaactagggtgcaacgttacaatgatttatgtcagcgagcactaaaacttagtgaagagggatcattgtctcaagagagttatggtattgcattccatgcgctacatgaagctcacaaaagttgtgtgagtgttaacaattctagtaagagtagtcctacagaagctggcacaccaggggctcatggtcagctttccactgaagaagatacccaaagtagaaatatgggcaagtcaaacaaaaagaagcatccaactaaaaagaaaaaggtgaactctgaagcagaagtgataacagttggggcattagacaacttgcaacaaatggacaaattcagcacaagagcagtaacccttgaaggttattatggcacacagcagagcgtgcaagggatgttgaacttgatgggaccaacacgtgatgattactacgggaatcaacagacacttcaggggctgggaccaataagttcaataccaaccagtcacgatggttattatggtacacatcagggcatgccgggtctggcacaactagattttttgcgaactggtttcacatatggcattcgggatgatcctaacgtgagagcaacacagttgcatgaggatccatctagacatgcatgagtgtcactatcctttataacgagggctggggaaacgagagctataagctgattatctggcgttgagaatggaatacctcgtgcccgtttgaggttacaatggaaaacctccaaaatccagtatttgtaatataatactgttatattaataatattatataggattactgcaattaacctctattataaatattaatagatgttgtaaggctttagcgttcaacctcttttggagattgttgtattatatattttattctttaggctacttgagaaattgtaattatgaaatattagtgatgaagtattcgtatgctcg

SEQ ID NO: 5137 - protein, 283 aa, Glycine max
  misc_feature (1)..(283): Ceres Seq. ID no. 14307116
NMETNKDFFVVVNQVKSELSCICRLFEYRGYLCRHALFVLQYSGQSVFPSQYILKRWTKDAKVRNIMGEESEHMLTRVQRYNDLCQRALKLSEEGSLSQESYGIAFHALHEAHKSCVSVNNSSKSSPTEAGTPGAHGQLSTEEDTQSRNMGKSNKKKHPTKKKKVNSEAEVITVGALDNLQQMDKFSTRAVTLEGYYGTQQSVQGMLNLMGPTRDDYYGNQQTLQGLGPISSIPTSHDGYYGTHQGMPGLAQLDFLRTGFTYGIRDDPNVRATQLHEDPSRHA

SEQ ID NO: 5138 - protein, 282 aa, Glycine max
  misc_feature (1)..(282): Ceres Seq. ID no. 14307117
METNKDFFVVVNQVKSELSCICRLFEYRGYLCRHALFVLQYSGQSVFPSQYILKRWTKDAKVRNIMGEESEHMLTRVQRYNDLCQRALKLSEEGSLSQESYGIAFHALHEAHKSCVSVNNSSKSSPTEAGTPGAHGQLSTEEDTQSRNMGKSNKKKHPTKKKKVNSEAEVITVGALDNLQQMDKFSTRAVTLEGYYGTQQSVQGMLNLMGPTRDDYYGNQQTLQGLGPISSIPTSHDGYYGTHQGMPGLAQLDFLRTGFTYGIRDDPNVRATQLHEDPSRHA

SEQ ID NO: 5139 - protein, 217 aa, Glycine max
  misc_feature (1)..(217): Ceres Seq. ID no. 14307118
MGEESEHMLTRVQRYNDLCQRALKLSEEGSLSQESYGIAFHALHEAHKSCVSVNNSSKSSPTEAGTPGAHGQLSTEEDTQSRNMGKSNKKKHPTKKKKVNSEAEVITVGALDNLQQMDKFSTRAVTLEGYYGTQQSVQGMLNLMGPTRDDYYGNQQTLQGLGPISSIPTSHDGYYGTHQGMPGLAQLDFLRTGFTYGIRDDPNVRATQLHEDPSRHA

SEQ ID NO: 5140 - DNA, 1225 bp, Glycine max
  misc_feature (1)..(1225): Ceres Seq. ID no. 14307119
gttgggaatttagggatttgcgtttactgatctcaagtcttccacctcactgtcgtagcgtagtgattgtggggtttctcttctcagttctcatcgtgacgatcttgctgctccgaaaaagggttttcctaacatcgcccattcaatttccgggctgttcagttcgtgaatagactgttgtttgttctaaaaagtagtggatagtaaaaattatcgaacttttttaagagaaaaatgcagagtaaagaagcagttgtggaagatggggaaataaagagtgtgactgctgtagggtctgaaattgatgggtggaccaattttggggatgatgacataatgcaacagcagtatacaattctggctgaggaagccaagaaggttccatttgtgggtgacaaggaaccactgagtagcttagctgctgaatataaattaggcagtcctatcttgctggagaaaataaaggtgcttgatgagcaatatgctgccattcgtcgtactcggggagatggaaactgcttctttcgaagctttatgttttcatatcttgagcatattatggaatgtcaagaccaagcagaaattgatcgtatccaagccaatgttgaaaaaagtagaaaggcgctgcagaccttgggttatgcagacttgacttttgaagatttttttgcgttattccttgagcagctggaatctgttattcaagggaaagagacttccataagtcatgaagagcttgttcttagaagccgagatcagtcaatatctgattatgtcgttatgttcttcagatttgttacctctgctgaaatacaaaagcgtgcagaattttttgaaccattcatactgggcttaactaatacaacagtcgagcagttttgcaaatcatctgttgaaccaatgggtgaagagagcgaccacatgcacattactgccctttcggacgcattgggcattccaatccgtgttgtgtaccttgaccgcagctcatgtgatactggcggtgtcagtgtaaatcatcatgatttcatgccagtggctggtgatctcccaaatgctagttgcagctctgaaaagaacattcctttcatcacgctgctatatcgtcctggtcactatgatatcctctatacaaaatgatgacctttttggggggaaaagacctttgtttgttacttttttggtggtagtgggagccgcaacagctctgcactcagagctgttg

SEQ ID NO: 5141 - protein, 301 aa, Glycine max
  misc_feature (1)..(301): Ceres Seq. ID no. 14307120
MQSKEAVVEDGEIKSVTAVGSEIDGWTNFGDDDIMQQQYTILAEEAKKVPFVGDKEPLSSLAAEYKLGSPILLEKIKVLDEQYAAIRRTRGDGNCFFRSFMFSYLEHIMECQDQAEIDRIQANVEKSRKALQTLGYADLTFEDFFALFLEQLESVIQGKETSISHEELVLRSRDQSISDYVVMFFRFVTSAEIQKRAEFFEPFILGLTNTTVEQFCKSSVEPMGEESDHMHITALSDALGIPIRVVYLDRSSCDTGGVSVNHHDFMPVAGDLPNASCSSEKNIPFITLLYRPGHYDILYTK

SEQ ID NO: 5142 - protein, 267 aa, Glycine max
  misc_feature (1)..(267): Ceres Seq. ID no. 14307121
MQQQYTILAEEAKKVPFVGDKEPLSSLAAEYKLGSPILLEKIKVLDEQYAAIRRTRGDGNCFFRSFMFSYLEHIMECQDQAEIDRIQANVEKSRKALQTLGYADLTFEDFFALFLEQLESVIQGKETSISHEELVLRSRDQSISDYVVMFFRFVTSAEIQKRAEFFEPFILGLTNTTVEQFCKSSVEPMGEESDHMHITALSDALGIPIRVVYLDRSSCDTGGVSVNHHDFMPVAGDLPNASCSSEKNIPFITLLYRPGHYDILYTK

SEQ ID NO: 5143 - protein, 201 aa, Glycine max
  misc_feature (1)..(201): Ceres Seq. ID no. 14307122
MFSYLEHIMECQDQAEIDRIQANVEKSRKALQTLGYADLTFEDFFALFLEQLESVIQGKETSISHEELVLRSRDQSISDYVVMFFRFVTSAEIQKRAEFFEPFILGLTNTTVEQFCKSSVEPMGEESDHMHITALSDALGIPIRVVYLDRSSCDTGGVSVNHHDFMPVAGDLPNASCSSEKNIPFITLLYRPGHYDILYTK

SEQ ID NO: 5144 - DNA, 1575 bp, Glycine max
  misc_feature (1)..(1575): Ceres Seq. ID no. 14307123
gaactcaacaacaacccaaagataaaaagcacaacacaagacactgaactcgcactcactgggttttcaaccatggatgcgatacggaagcagctcgatgtgttgatgggagccaaccgtaacggcgacgtccgtgaagtcaatcgcaagtactacgatcgcgacgtctgtcgtctctacctcgtcggtctctgccctcacgaactcttccagttaacgaaaatggatatgggcccttgccctaaggtccactccttgcagctccggaaagaatacgaggaggcgaaagcaaaggggaccgataattatgacagggagttggaggatgtaatagataagcttattggtgagtgtgataggaaaattggcagggctctaaagcggctcgaggacgacgatgcgaaagcggctattgcaatttcggtctctgaagttactcaaacagatgaggtgcttgagttgtcgaagcaaatcaaagagaaattgaaagaagctgatcaatatgatcttgaaggcaagtcagatctcaagattcgagctttagaggttgtagaggaacttagaactaagagagcggacaagcagtctatgcttcttttagatgccttcaacaaagatagggcatctttgcctacacctctgccaaatccaccacctttggcacctcttcctgtagttgctcctgatgctcgaacacaggagatgataaatgaaaagctgaagaaggctgaggatcttggtgagcaaggaatggttgatgaggctcaaaaagcattggaagaggctgaagcacttaagaagcttcctgccaggcaggagccagtgttggattcttcaaagtatacagctgtggatgtgcggattactgatcagaagctacgtgtgtgcgacatttgtggagcatttttgagtgtttatgacagtgatcgccgtttagctgatcattttggaggcaaacttcatttagggtatatgcagattcgtgagaagttagccgaacttcaagaagaaaggaacaagagccgaaagactgatcggcttgatgacaggagatcaaaagaacggagtagggatcgagacagggagtctagtagggaccgtgaacttggtgatagtcgtgaacgagggcgagaccatgatcgtaggagcagagatcatgataggcattatgatagagatcgtggatatgatcgagaccgtgacagagactcagaccgcacccgctcctatgactcaagaagtcgtcggaggtcacgctctagatcccgagagcgatctagagattatgatcgacataggcgtcatgatcgatactagcaattgccatgaatcttatgggtatgagaaaatgtctagtttaggtgggtgttgaacctcatgttgaacaaataattttgcaatttcttctgtgttgaaccgtttctcggatgatggatgtaacttgagcttaggtgtcgctaaattatggtttgatgttgctttgcagacattaaatccaatttgtaatctgccttactttggagcagttcttgctattgtgcttaaaaatagtagtttgattggattgccatttac

SEQ ID NO: 5145 - protein, 438 aa, Glycine max
  misc_feature (1)..(438): Ceres Seq. ID no. 14307124
ELNNNPKIKSTTQDTELALTGFSTMDAIRKQLDVLMGANRNGDVREVNRKYYDRDVCRLYLVGLCPHELFQLTKMDMGPCPKVHSLQLRKEYEEAKAKGTDNYDRELEDVIDKLIGECDRKIGRALKRLEDDDAKAAIAISVSEVTQTDEVLELSKQIKEKLKEADQYDLEGKSDLKIRALEVVEELRTKRADKQSMLLLDAFNKDRASLPTPLPNPPPLAPLPVVAPDARTQEMINEKLKKAEDLGEQGMVDEAQKALEEAEALKKLPARQEPVLDSSKYTAVDVRITDQKLRVCDICGAFLSVYDSDRRLADHFGGKLHLGYMQIREKLAELQEERNKSRKTDRLDDRRSKERSRDRDRESSRDRELGDSRERGRDHDRRSRDHDRHYDRDRGYDRDRDRDSDRTRSYDSRSRRRSRSRSRERSRDYDRHRRHDRY

SEQ ID NO: 5146 - protein, 414 aa, Glycine max
  misc_feature (1)..(414): Ceres Seq. ID no. 14307125
MDAIRKQLDVLMGANRNGDVREVNRKYYDRDVCRLYLVGLCPHELFQLTKMDMGPCPKVHSLQLRKEYEEAKAKGTDNYDRELEDVIDKLIGECDRKIGRALKRLEDDDAKAAIAISVSEVTQTDEVLELSKQIKEKLKEADQYDLEGKSDLKIRALEVVEELRTKRADKQSMLLLDAFNKDRASLPTPLPNPPPLAPLPVVAPDARTQEMINEKLKKAEDLGEQGMVDEAQKALEEAEALKKLPARQEPVLDSSKYTAVDVRITDQKLRVCDICGAFLSVYDSDRRLADHFGGKLHLGYMQIREKLAELQEERNKSRKTDRLDDRRSKERSRDRDRESSRDRELGDSRERGRDHDRRSRDHDRHYDRDRGYDRDRDRDSDRTRSYDSRSRRRSRSRSRERSRDYDRHRRHDRY

SEQ ID NO: 5147 - protein, 403 aa, Glycine max
  misc_feature (1)..(403): Ceres Seq. ID no. 14307126
MGANRNGDVREVNRKYYDRDVCRLYLVGLCPHELFQLTKMDMGPCPKVHSLQLRKEYEEAKAKGTDNYDRELEDVIDKLIGECDRKIGRALKRLEDDDAKAAIAISVSEVTQTDEVLELSKQIKEKLKEADQYDLEGKSDLKIRALEVVEELRTKRADKQSMLLLDAFNKDRASLPTPLPNPPPLAPLPVVAPDARTQEMINEKLKKAEDLGEQGMVDEAQKALEEAEALKKLPARQEPVLDSSKYTAVDVRITDQKLRVCDICGAFLSVYDSDRRLADHFGGKLHLGYMQIREKLAELQEERNKSRKTDRLDDRRSKERSRDRDRESSRDRELGDSRERGRDHDRRSRDHDRHYDRDRGYDRDRDRDSDRTRSYDSRSRRRSRSRSRERSRDYDRHRRHDRY

SEQ ID NO: 5148 - DNA, 1201 bp, Glycine max
  misc_feature (1)..(1201): Ceres Seq. ID no. 14307144
aggccagcagtttaaggcaaaaacctctacactttcttacacccaatactttgctgagtctttgataaaggaagctgaaaatgacaagaagatagtggccattcacgcagcaatgggtggtggtaccggcctaaattatttccataaaaggtttcccaagcgctgtttcgatgtggggattgctgaacaacatgctgtaacatttgcagctggtttagctgctgaaggcctcaaaccattttgtgccatttattcatcattcttgcaacggggatatgatcaagtagtccatgatgttgatcttcaaaagcttcctgttcgatttgctatggatagagctggtttggttggagcagatggaccaacacattgtggagcatttgatatcgcttacatggcttgcctacccaacatggtggtcatggctccttctgatgaagctgaactcatgcacatggttgcgactgcagcagctatagatgatagaccaagctgctttagatttccaaggggaaatggaattggagccactctgccactcaataacaaaggaacctcacttgagataggaaagggaagaattctggtggaagggagcagagttgccattttgggatatggttctgtggtccaacaatgcagacaagcctcagaaatgcttaaggaactaggcattgatgtgacagttgctgatgctagattttgcaaacctttagatactggtctcattaggctactagctaaagagcatgaaatactcatcacagtggaagagggttctatcggtggttttggatcacatgtatcacaattcctgagcttatcaggtatcctagatgggcctctaaagtggagagcaatgatgcttcctgatagatacattgagcatggatcaccccaagttcagatagaagaagcagggctttcatcaaagcagattgcagccacagtcttgtctcttatggaaaggccaaacgaagctcttctgttcaaataaaaagacaaaatggaacaaggatcttgacctggttccccgaagatgcataaaaaaaatttaagacttttgttggtattgtgctttagaggaagctgtaaataactacactggaattgtcggagtttacatcttgatgctcacatattttggataattggattctcaggtcatcactagtgagtaaagagatgaatttattctgat

SEQ ID NO: 5149 - protein, 331 aa, Glycine max
  misc_feature (1)..(331): Ceres Seq. ID no. 14307145
GQQFKAKTSTLSYTQYFAESLIKEAENDKKIVAIHAAMGGGTGLNYFHKRFPKRCFDVGIAEQHAVTFAAGLAAEGLKPFCAIYSSFLQRGYDQVVHDVDLQKLPVRFAMDRAGLVGADGPTHCGAFDIAYMACLPNMVVMAPSDEAELMHMVATAAAIDDRPSCFRFPRGNGIGATLPLNNKGTSLEIGKGRILVEGSRVAILGYGSVVQQCRQASEMLKELGIDVTVADARFCKPLDTGLIRLLAKEHEILITVEEGSIGGFGSHVSQFLSLSGILDGPLKWRAMMLPDRYIEHGSPQVQIEEAGLSSKQIAATVLSLMERPNEALLFK

SEQ ID NO: 5150 - protein, 294 aa, Glycine max
  misc_feature (1)..(294): Ceres Seq. ID no. 14307146
MGGGTGLNYFHKRFPKRCFDVGIAEQHAVTFAAGLAAEGLKPFCAIYSSFLQRGYDQVVHDVDLQKLPVRFAMDRAGLVGADGPTHCGAFDIAYMACLPNMVVMAPSDEAELMHMVATAAAIDDRPSCFRFPRGNGIGATLPLNNKGTSLEIGKGRILVEGSRVAILGYGSVVQQCRQASEMLKELGIDVTVADARFCKPLDTGLIRLLAKEHEILITVEEGSIGGFGSHVSQFLSLSGILDGPLKWRAMMLPDRYIEHGSPQVQIEEAGLSSKQIAATVLSLMERPNEALLFK

SEQ ID NO: 5151 - protein, 222 aa, Glycine max
  misc_feature (1)..(222): Ceres Seq. ID no. 14307147
MDRAGLVGADGPTHCGAFDIAYMACLPNMVVMAPSDEAELMHMVATAAAIDDRPSCFRFPRGNGIGATLPLNNKGTSLEIGKGRILVEGSRVAILGYGSVVQQCRQASEMLKELGIDVTVADARFCKPLDTGLIRLLAKEHEILITVEEGSIGGFGSHVSQFLSLSGILDGPLKWRAMMLPDRYIEHGSPQVQIEEAGLSSKQIAATVLSLMERPNEALLFK

SEQ ID NO: 5152 - DNA, 2054 bp, Glycine max
  misc_feature (1)..(2054): Ceres Seq. ID no. 14307148
aagtctgatttctattttctacactcagagagtgaagcgaacgagtcacgactcagcgatggtgggcccacagtacgattttctggcgaaccctttgggcgtcgtcagatccaccttcgatgccgccgtagcctctgtttccgatccctccgccttcgacgggcgcgactggggcgtcttcccgctcttccaccacttcctctccgaccagtccagtctctctcaggttccacttctgacccctgccaccatcaaatgggtgaagcctaatactctggttcggtttcgcgggatgatacaagacatgctcgggaacgaattttacattggcgcttataaggatggttcggtgtggaggacgaacaagtttatggatgtttctcaatctcttatggcttcttcggtggatatgcgaatctgggaacgtcgactgctttattgtgttccggttccaggactgagtccatggactcaagtttcagttgaagaatttggcgatctatctatggattgcaaatcggagaatagagaaaagcggaggagagaagatggcgagtcttctgatatgcctgtatctggtgatgaggttcagaattccccaaatagtaaaagaatgagagaaggtgaacactcttctgttgcttctcattctcagggagctgcaactgagattgccagctctggtaccagtttggtgtctggtcttgatagcaattcacctccctgtcttgtgaagatatatgattctccagattctgaattgaaactgaatgacatttttgagtttgtgggtatccttacatctgatctagagcttgaagaggacgatgaagattgtgatttatcagatggattttctgaagatcctttgcgtcatctcccacctagcaaggtgccacaccttcattgttttattcagaggaaattagcggttcacgacttccttcagcacaatcctattgtagagccaaggcccaacttggtcagaggaatcagggaagcattgctaaggcatctcacggctgttcttagcaatgatgatttggctactcatttcatgttgctgcatcttctatccaaggtgcatgctagagcagatgatcttgctgtgggaaagctttcattaaatcttacttgttttagcaaagaaaccgtgtctgtatttggaaaaccactaagcgttgctttgaagaacctcctgccattcacattttgcataccccttacagttgaatacttgaattctgtttcacttacgccaaaaaagaattacgatactaatagactggaaactggagtcttacaactagctgaaggttcacacttgattgttgatgagaccaaactagaagctggaactctcaactctgtaggggtagagaatacaaggctactgaaaaatttaatggaattgcaaaaggttgaatatgatttcaagtactataaagtggatatgacaactgatttccaactgctagttttgtcggaggggaaatcaaatatcttgccagccgatgtaattgtaccgttccgaccttctgcaaccagttgctctggagctgtgactgcagaagctttggaggcctggaggtggtatttggccactgtcagacagctatcacacactattgaaccagaaatgcagaaggtgatagaaagtgatctagttgcagcaagacaagcagacaggagcttgagctcccaagatttaagcagattggtaacaatgggccgtctcatgtcattgagctatggtgagaccagcttgtcactagaacattggcaaatggtcaaggaactagaaaggctgcgaagagagaggctataatgaaaaacaccatggaattacaagtggttccaatttgtacaaggttttaaatgagtcaagttatggtgttgacgtcttaaattgtgttgtcggttcaaggaaatgaatgcagttcaaagggtcttggcggttagttgttctgattaccagaattgtcttatgaacagatactcggttccgtaagttgtgcattcagtaaaatgcaatataagaccatttcactaag

SEQ ID NO: 5153 - protein, 608 aa, Glycine max
  misc_feature (1)..(608): Ceres Seq. ID no. 14307149
SLISIFYTQRVKRTSHDSAMVGPQYDFLANPLGVVRSTFDAAVASVSDPSAFDGRDWGVFPLFHHFLSDQSSLSQVPLLTPATIKWVKPNTLVRFRGMIQDMLGNEFYIGAYKDGSVWRTNKFMDVSQSLMASSVDMRIWERRLLYCVPVPGLSPWTQVSVEEFGDLSMDCKSENREKRRREDGESSDMPVSGDEVQNSPNSKRMREGEHSSVASHSQGAATEIASSGTSLVSGLDSNSPPCLVKIYDSPDSELKLNDIFEFVGILTSDLELEEDDEDCDLSDGFSEDPLRHLPPSKVPHLHCFIQRKLAVHDFLQHNPIVEPRPNLVRGIREALLRHLTAVLSNDDLATHFMLLHLLSKVHARADDLAVGKLSLNLTCFSKETVSVFGKPLSVALKNLLPFTFCIPLTVEYLNSVSLTPKKNYDTNRLETGVLQLAEGSHLIVDETKLEAGTLNSVGVENTRLLKNLMELQKVEYDFKYYKVDMTTDFQLLVLSEGKSNILPADVIVPFRPSATSCSGAVTAEALEAWRWYLATVRQLSHTIEPEMQKVIESDLVAARQADRSLSSQDLSRLVTMGRLMSLSYGETSLSLEHWQMVKELERLRRERL

SEQ ID NO: 5154 - protein, 589 aa, Glycine max
  misc_feature (1)..(589): Ceres Seq. ID no. 14307150
MVGPQYDFLANPLGVVRSTFDAAVASVSDPSAFDGRDWGVFPLFHHFLSDQSSLSQVPLLTPATIKWVKPNTLVRFRGMIQDMLGNEFYIGAYKDGSVWRTNKFMDVSQSLMASSVDMRIWERRLLYCVPVPGLSPWTQVSVEEFGDLSMDCKSENREKRRREDGESSDMPVSGDEVQNSPNSKRMREGEHSSVASHSQGAATEIASSGTSLVSGLDSNSPPCLVKIYDSPDSELKLNDIFEFVGILTSDLELEEDDEDCDLSDGFSEDPLRHLPPSKVPHLHCFIQRKLAVHDFLQHNPIVEPRPNLVRGIREALLRHLTAVLSNDDLATHFMLLHLLSKVHARADDLAVGKLSLNLTCFSKETVSVFGKPLSVALKNLLPFTFCIPLTVEYLNSVSLTPKKNYDTNRLETGVLQLAEGSHLIVDETKLEAGTLNSVGVENTRLLKNLMELQKVEYDFKYYKVDMTTDFQLLVLSEGKSNILPADVIVPFRPSATSCSGAVTAEALEAWRWYLATVRQLSHTIEPEMQKVIESDLVAARQADRSLSSQDLSRLVTMGRLMSLSYGETSLSLEHWQMVKELERLRRERL

SEQ ID NO: 5155 - protein, 511 aa, Glycine max
  misc_feature (1)..(511): Ceres Seq. ID no. 14307151
MIQDMLGNEFYIGAYKDGSVWRTNKFMDVSQSLMASSVDMRIWERRLLYCVPVPGLSPWTQVSVEEFGDLSMDCKSENREKRRREDGESSDMPVSGDEVQNSPNSKRMREGEHSSVASHSQGAATEIASSGTSLVSGLDSNSPPCLVKIYDSPDSELKLNDIFEFVGILTSDLELEEDDEDCDLSDGFSEDPLRHLPPSKVPHLHCFIQRKLAVHDFLQHNPIVEPRPNLVRGIREALLRHLTAVLSNDDLATHFMLLHLLSKVHARADDLAVGKLSLNLTCFSKETVSVFGKPLSVALKNLLPFTFCIPLTVEYLNSVSLTPKKNYDTNRLETGVLQLAEGSHLIVDETKLEAGTLNSVGVENTRLLKNLMELQKVEYDFKYYKVDMTTDFQLLVLSEGKSNILPADVIVPFRPSATSCSGAVTAEALEAWRWYLATVRQLSHTIEPEMQKVIESDLVAARQADRSLSSQDLSRLVTMGRLMSLSYGETSLSLEHWQMVKELERLRRERL

SEQ ID NO: 5156 - DNA, 1316 bp, Glycine max
  misc_feature (1)..(1316): Ceres Seq. ID no. 14307171
attattcaaaagttgcctgtgcttcttcaacccgtggctgcaaatggcaaaaaagtccccctcggacaaagaaaactgatgtgtaatgatgactgtgctaagttagagcggaaaagggttcttgcagatgcttttgagattaccgctccaaatctggattcactccattttggtgagaattcggttgcttctgaattgctggctgacatgttgagacgtgattctaaatgggttttatctgttgaagagagatgcaagtttttagtacttggcaagagcagaggaaatgcacatggtccaaaagtccatgttttctgtcctatgttaaaggacaaaagagatgcagtgagggtgattgctgagagatggaagcttgcagtgaatgcagctggtcgggagccaaagcatttcgtagttgttcatgttaccccaaaatcaagagctcctgctcgtgtgctagggtttaagggtactacaactgtaaatgtaccccttcctccggcatttgatcctttggttgatatggatcctcgacttgttgtctcttttatagacttaccaatggatgcagatattagtgcattggtgttgagatttggtggtgagtgtgaacttgtttggttaaatgacaaaaatgcattggccgtttttaatgaccctgcccgtgctgcaactgcaatgaggaggttggatcatggtacggtttatcagggagctgtggtggtggttgttccaaatgtcggggcatcagtagcatcttcagctaccaatgcctggggaggatctgggacaatgaaaggaggagcactggcagcattaaagagtaatccatggaaaaaggatgttattcaagagccaggttggagagaagatgcttggggtgatgaggagtgggctactggttctgctaatgtcaaattgcctattcagaagaaagaagcccgaatatctgcttcagtaaatccttggagtgtcctaaatcaagaatcgtcttcaagttcatctgttgcagccattaaaattgatggttctaggaaacactctgaaagtagtgttatcacaaagttggagcctcgtgatggtggttcaaatctaggagggcagcctgcaggaaactttgatgctttggaagcttctgatgtagtagatgattgggagaaggcttgtgaatagcaaggagtaaacatttttcattttattttgttgagaaggaggcagattttgactagtgaaatgtctaaggctctttttgtccactagatgtatctcttttcatgttttatccccctgattttaatcaatttcgatgttattct

SEQ ID NO: 5157 - protein, 390 aa, Glycine max
  misc_feature (1)..(390): Ceres Seq. ID no. 14307172
IIQKLPVLLQPVAANGKKVPLGQRKLMCNDDCAKLERKRVLADAFEITAPNLDSLHFGENSVASELLADMLRRDSKWVLSVEERCKFLVLGKSRGNAHGPKVHVFCPMLKDKRDAVRVIAERWKLAVNAAGREPKHFVVVHVTPKSRAPARVLGFKGTTTVNVPLPPAFDPLVDMDPRLVVSFIDLPMDADISALVLRFGGECELVWLNDKNALAVFNDPARAATAMRRLDHGTVYQGAVVVVVPNVGASVASSATNAWGGSGTMKGGALAALKSNPWKKDVIQEPGWREDAWGDEEWATGSANVKLPIQKKEARISASVNPWSVLNQESSSSSSVAAIKIDGSRKHSESSVITKLEPRDGGSNLGGQPAGNFDALEASDVVDDWEKACE

SEQ ID NO: 5158 - protein, 364 aa, Glycine max
  misc_feature (1)..(364): Ceres Seq. ID no. 14307173
MCNDDCAKLERKRVLADAFEITAPNLDSLHFGENSVASELLADMLRRDSKWVLSVEERCKFLVLGKSRGNAHGPKVHVFCPMLKDKRDAVRVIAERWKLAVNAAGREPKHFVVVHVTPKSRAPARVLGFKGTTTVNVPLPPAFDPLVDMDPRLVVSFIDLPMDADISALVLRFGGECELVWLNDKNALAVFNDPARAATAMRRLDHGTVYQGAVVVVVPNVGASVASSATNAWGGSGTMKGGALAALKSNPWKKDVIQEPGWREDAWGDEEWATGSANVKLPIQKKEARISASVNPWSVLNQESSSSSSVAAIKIDGSRKHSESSVITKLEPRDGGSNLGGQPAGNFDALEASDVVDDWEKACE

SEQ ID NO: 5159 - protein, 321 aa, Glycine max
  misc_feature (1)..(321): Ceres Seq. ID no. 14307174
MLRRDSKWVLSVEERCKFLVLGKSRGNAHGPKVHVFCPMLKDKRDAVRVIAERWKLAVNAAGREPKHFVVVHVTPKSRAPARVLGFKGTTTVNVPLPPAFDPLVDMDPRLVVSFIDLPMDADISALVLRFGGECELVWLNDKNALAVFNDPARAATAMRRLDHGTVYQGAVVVVVPNVGASVASSATNAWGGSGTMKGGALAALKSNPWKKDVIQEPGWREDAWGDEEWATGSANVKLPIQKKEARISASVNPWSVLNQESSSSSSVAAIKIDGSRKHSESSVITKLEPRDGGSNLGGQPAGNFDALEASDVVDDWEKACE

SEQ ID NO: 5160 - DNA, 1155 bp, Glycine max
  misc_feature (1)..(1155): Ceres Seq. ID no. 14307245
aaaacaacacaccttcagccacggaatggggagacatgactttgacaaccgcgttttcttgttcgctcgccgctgcttctctctccaccgccgccagtttccgccggaataaatgcaccaccagcaagatttttcattcctcttccacgtgcatgccctctttcttgcatgatcatcactaccactctttcttattgcgagttgccaatgatgctgatagaagtgaagtgtcatctgatactgcaatcaagacatcgtattcagaagccgataagatggttgatggtatggactttggtgagctttgcaatgagtttgagtgcatcagcagtcccttggtagaatccactgcaagacaacttgcacgagatatacttgagctaagggagggaaatcgagcacttggaatctttgctgtttctgtcgcatacaaggatcctattaggagctttaccggtcgtgaaaagtataaaagacgactatgggcaaccggtgcactagacaacccatctgtgactgtgcaggaaatggtgatgctgtcaaccagtgttttaagtatcaagtggacaataagagggaaaccaaaatctgtgttaggaggagatctgataattagagttactttcaaatttactcttaaccaaattagtggccaagtcattgagcatgaagaattctgggacttatcagcttcatctgctagtgctcaggcatttttctggacatcacgtgctctctttgctgctgttgaatctgtcaaagatttgggtgacagtgctaagaatttgagtagtaaaatgtcaaccaaaaaagagaacttggagatgtatccagatccttcaggtgatccaaccaagttcttccagagggacgacagttttcaacaggatgcataccagattgcactactcctggcagttatttatttggtggtacaatttctaaggacaactttgtaaagctagcctgccattttatcaactgaacttgtatgtctttgttctccaagagttatcattataaagtgtgactatcagctcataatcatcaggtgtcatcaggttgttttgtcaaagtaaatatgttcacatttgtaagtgtacctataaactgtgacgtttccttcttttgatgccacaacctcaaaggaccact

SEQ ID NO: 5161 - protein, 318 aa, Glycine max
  misc_feature (1)..(318): Ceres Seq. ID no. 14307246
NNTPSATEWGDMTLTTAFSCSLAAASLSTAASFRRNKCTTSKIFHSSSTCMPSFLHDHHYHSFLLRVANDADRSEVSSDTAIKTSYSEADKMVDGMDFGELCNEFECISSPLVESTARQLARDILELREGNRALGIFAVSVAYKDPIRSFTGREKYKRRLWATGALDNPSVTVQEMVMLSTSVLSIKWTIRGKPKSVLGGDLIIRVTFKFTLNQISGQVIEHEEFWDLSASSASAQAFFWTSRALFAAVESVKDLGDSAKNLSSKMSTKKENLEMYPDPSGDPTKFFQRDDSFQQDAYQIALLLAVIYLVVQFLRTTL

SEQ ID NO: 5162 - protein, 307 aa, Glycine max
  misc_feature (1)..(307): Ceres Seq. ID no. 14307247
MTLTTAFSCSLAAASLSTAASFRRNKCTTSKIFHSSSTCMPSFLHDHHYHSFLLRVANDADRSEVSSDTAIKTSYSEADKMVDGMDFGELCNEFECISSPLVESTARQLARDILELREGNRALGIFAVSVAYKDPIRSFTGREKYKRRLWATGALDNPSVTVQEMVMLSTSVLSIKWTIRGKPKSVLGGDLIIRVTFKFTLNQISGQVIEHEEFWDLSASSASAQAFFWTSRALFAAVESVKDLGDSAKNLSSKMSTKKENLEMYPDPSGDPTKFFQRDDSFQQDAYQIALLLAVIYLVVQFLRTTL

SEQ ID NO: 5163 - protein, 268 aa, Glycine max
  misc_feature (1)..(268): Ceres Seq. ID no. 14307248
MPSFLHDHHYHSFLLRVANDADRSEVSSDTAIKTSYSEADKMVDGMDFGELCNEFECISSPLVESTARQLARDILELREGNRALGIFAVSVAYKDPIRSFTGREKYKRRLWATGALDNPSVTVQEMVMLSTSVLSIKWTIRGKPKSVLGGDLIIRVTFKFTLNQISGQVIEHEEFWDLSASSASAQAFFWTSRALFAAVESVKDLGDSAKNLSSKMSTKKENLEMYPDPSGDPTKFFQRDDSFQQDAYQIALLLAVIYLVVQFLRTTL

SEQ ID NO: 5164 - DNA, 1531 bp, Glycine max
  misc_feature (1)..(1531): Ceres Seq. ID no. 14307253
gaataaatagtaactctaatctaacacgctttctctgctgtgtctttgcagtgagtttcattgcaaagctacttttctctgtttggggataaataaaatgggttgcttttcatgtttcgattcgagttccaaggaggatcacaatctccgtcctcagcaccaacccaatcaacctctcccttctcagatttccagattgccctctggagcagacaagttacggtccagaagtaatggaggttccaaaagagaactgcaacagcctcctcccaccgtccaaattgctgctcaaacatttactttccgtgaacttgccgctgcaactaaaaactttagaccagagtcctttgttggggaaggtggttttggaagggtctacaaaggcaggcttgaaaccactgctcagattgttgctgtcaaacagttagacaaaaatggtcttcagggtaatcgggaattccttgtagaggttctcatgctcagtcttctacatcaccctaaccttgtcaatctcattggatactgtgcggatggggatcaacgcctcctcgtttatgaatttatgcctttgggatcattggaagatcaccttcatgatcttccccctgataaggaaccactagattggaacactagaatgaaaattgctgttggtgctgcaaaaggattagaataccttcacgataaggcaaatcctcctgtcatctacagagacttcaagtcatctaacatattacttgatgaaggataccacccaaaactttctgactttggtcttgcgaagcttggtcctgttggtgacaaatcacatgtttctacccgtgtcatgggaacttatggttactgtgctcctgagtatgctatgactggacagctgactgtgaagtctgatgtatatagttttggggtggtcttcttagagctgattactggccgtaaagcaattgacagcacccagccgcagggagaacagaaccttgtcacatgggcacgtccactttttaatgaccgcaggaagttttcaaagttggctgatcccaggctgcaggggcgatttcccatgcggggtctttaccaggctcttgctgtggcatcaatgtgcattcaagaatcagctgcaacgcgtcctctaattggagatgtggtgacagccctctcttatctggccaaccaggcatatgaccccaatggttatagggggtctagtgatgataaaaggaacagagatgataaaggtggaagaatatccaaaaatgatgaagctgggggatctggacgcagatgggacttggaaggatccgagaaagatgactccccacgagaaactgcaaggattttaaacagagatctagatagagaacgagctgtggctgaagccaagatgtggggagagaacttgagacaaaaaagaaaacaaagtttgcagcagggcagtcttgatgcttaattttctgccttgaggctatggaagatggaagaaaatatggggagcttatctagagaaacaactcaaacagccagccatttaggc

SEQ ID NO: 5165 - protein, 449 aa, Glycine max
  misc_feature (1)..(449): Ceres Seq. ID no. 14307254
MGCFSCFDSSSKEDHNLRPQHQPNQPLPSQISRLPSGADKLRSRSNGGSKRELQQPPPTVQIAAQTFTFRELAAATKNFRPESFVGEGGFGRVYKGRLETTAQIVAVKQLDKNGLQGNREFLVEVLMLSLLHHPNLVNLIGYCADGDQRLLVYEFMPLGSLEDHLHDLPPDKEPLDWNTRMKIAVGAAKGLEYLHDKANPPVIYRDFKSSNILLDEGYHPKLSDFGLAKLGPVGDKSHVSTRVMGTYGYCAPEYAMTGQLTVKSDVYSFGVVFLELITGRKAIDSTQPQGEQNLVTWARPLFNDRRKFSKLADPRLQGRFPMRGLYQALAVASMCIQESAATRPLIGDVVTALSYLANQAYDPNGYRGSSDDKRNRDDKGGRISKNDEAGGSGRRWDLEGSEKDDSPRETARILNRDLDRERAVAEAKMWGENLRQKRKQSLQQGSLDA

SEQ ID NO: 5166 - protein, 323 aa, Glycine max
  misc_feature (1)..(323): Ceres Seq. ID no. 14307255
MLSLLHHPNLVNLIGYCADGDQRLLVYEFMPLGSLEDHLHDLPPDKEPLDWNTRMKIAVGAAKGLEYLHDKANPPVIYRDFKSSNILLDEGYHPKLSDFGLAKLGPVGDKSHVSTRVMGTYGYCAPEYAMTGQLTVKSDVYSFGVVFLELITGRKAIDSTQPQGEQNLVTWARPLFNDRRKFSKLADPRLQGRFPMRGLYQALAVASMCIQESAATRPLIGDVVTALSYLANQAYDPNGYRGSSDDKRNRDDKGGRISKNDEAGGSGRRWDLEGSEKDDSPRETARILNRDLDRERAVAEAKMWGENLRQKRKQSLQQGSLDA

SEQ ID NO: 5167 - protein, 294 aa, Glycine max
  misc_feature (1)..(294): Ceres Seq. ID no. 14307256
MPLGSLEDHLHDLPPDKEPLDWNTRMKIAVGAAKGLEYLHDKANPPVIYRDFKSSNILLDEGYHPKLSDFGLAKLGPVGDKSHVSTRVMGTYGYCAPEYAMTGQLTVKSDVYSFGVVFLELITGRKAIDSTQPQGEQNLVTWARPLFNDRRKFSKLADPRLQGRFPMRGLYQALAVASMCIQESAATRPLIGDVVTALSYLANQAYDPNGYRGSSDDKRNRDDKGGRISKNDEAGGSGRRWDLEGSEKDDSPRETARILNRDLDRERAVAEAKMWGENLRQKRKQSLQQGSLDA

SEQ ID NO: 5168 - DNA, 749 bp, Glycine max
  misc_feature (1)..(749): Ceres Seq. ID no. 14307257
tatttttcatgattttaataatcatcgaccaatgtagtctatcaaaatcaacattatcagtcaatttgatttctggcgttaccaaatcagttaactaaattatgaatttgcactttgtgtgtatacaggtattcacacaaccagttttccagcttgtggaaacttgggttgcgaagcgttggcctgaaagcaacttcatgggaaaagaatatcgtgttggcaagttcagattcaatggattcaggatgatatggaggacagtgtacgtgattttcacagcagtggttgctatgatacttcccttcttcaacagcattgtgggtttgcttggagctatttccttctttcctttgacagtgtattttccaacagagatgtatctggtgcaggctaaagtgcccaagttttctctggtctggattggggtcaaaattctaagtggcttctgcttgattgtcactcttgttgctgcagctggatcaatccaaggaatcatcgcagaccttaaaatctatgagcccttcaagtaaatatcctttgtgtagtttagctctttggatgaacaatggtttgtggctaagtttgtggtcattattgatcagttgtttggataaactttctttcaagtgttttcataatatatacttttataatggatcgataagaatgcttttagatcctagaaaaattttaaattgctttttgtcctcaacttctataatcaataatagttttcgtttctgtatttc

SEQ ID NO: 5169 - protein, 142 aa, Glycine max
  misc_feature (1)..(142): Ceres Seq. ID no. 14307258
MNLHFVCIQVFTQPVFQLVETWVAKRWPESNFMGKEYRVGKFRFNGFRMIWRTVYVIFTAVVAMILPFFNSIVGLLGAISFFPLTVYFPTEMYLVQAKVPKFSLVWIGVKILSGFCLIVTLVAAAGSIQGIIADLKIYEPFK

SEQ ID NO: 5170 - protein, 110 aa, Glycine max
  misc_feature (1)..(110): Ceres Seq. ID no. 14307259
MGKEYRVGKFRFNGFRMIWRTVYVIFTAVVAMILPFFNSIVGLLGAISFFPLTVYFPTEMYLVQAKVPKFSLVWIGVKILSGFCLIVTLVAAAGSIQGIIADLKIYEPFK

SEQ ID NO: 5171 - protein, 94 aa, Glycine max
  misc_feature (1)..(94): Ceres Seq. ID no. 14307260
MIWRTVYVIFTAVVAMILPFFNSIVGLLGAISFFPLTVYFPTEMYLVQAKVPKFSLVWIGVKILSGFCLIVTLVAAAGSIQGIIADLKIYEPFK

SEQ ID NO: 5172 - DNA, 1597 bp, Glycine max
  misc_feature (1)..(1597): Ceres Seq. ID no. 14307261
gaagaaacaagcttcacttccaccccttaatggcccgaggcaaggcgaagaagaaggaagaaggtgaagacaccgatgtcgcaaacccagaaacgttagagcggaagaggctgaaatccttggccatttccaacaagattctctcggagacccctgcacggagctccgttcacctcaacccttcctccgtcgtggccaagcaccacggcaaagatatcatcaagaagtctcagaggaagagctgcaggtacctcttctcgttccccgggctaattgctcccatcgccggtggcaagatcggtgacctcaaggacttgggcaccaaaaaccccgttctctacctcgatttcccacagggtcaaatgaagttattcgggaccattgtatatccaaagaacagatacttgactctacagttccctaaaggtggaaagagtgtaatgtgtgaggattattttgataacatgattgtattttcggatgcatggtggatcgggaggaaagatgaaaacccagaagaatccaagctggaatttcctaatgaattgtatgagggacaccaagctgagtatgactttaaagggggtgcgggtgcaggtgcagcttctgtagttaatcaaggtgttcccagaaccaacattcaacgtgtagagcaagagtcaccaaagacacccaccgaagatgatttgtcagacaatgaaatcaatttaaaagatacaaaggaattggttccggtccgacattcaacaagaactgcaaaaaaatcatacaaatttgctgaaatttcttccggtgatgattctggtgaaaacagccctgagctttctgatgatgaagagaaagtgatacagaaaaaaactgtagtttttgacctcgatgatgaggatgatgcaccagtagatcaacctgccaagataaatactgagtctgcttctcgatcaaaaagtaaagaagtgtctcaatctgcttcagccagtgcatctactgaagttaagtccagtaatcgtggatcacttgttcaggctactatatccacattattcaagaaagtggaagaaaagacaactccaagaagttcaaggaaatccccatcatcaaaagcttatggccagaagtcacagcctgctggttcaaaaagaaagattgatctggatgaaggatccaagaaaagggcaagaaagaccacggacaaagatcctggtaaaaaaatcaaggcaaaaagcaaggaagacgatgttgaagatggtgatgatgatggtgatgacattgaagaattttcaaatgcttcagaggatgctaatgaaagtgatgaagactggactgcttgagtgtgtaatctaagttgtggctgctagtcacaagaaatgacaaggcagggtcatgcaagtgatgtgattataccctttatctctctctacactaagatagaacgtaacgacttggttttgcataccatgtggttatgatgggaatatgagaatagagataataccatgtggttatgatggagaaagaatgaggaagttgtccaatgtttaccaatccaatcttcatctccaagttgggagtcattaaatgtatacttttaatttcgatt

SEQ ID NO: 5173 - protein, 441 aa, Glycine max
  misc_feature (1)..(441): Ceres Seq. ID no. 14307262
RNKLHFHPLMARGKAKKKEEGEDTDVANPETLERKRLKSLAISNKILSETPARSSVHLNPSSVVAKHHGKDIIKKSQRKSCRYLFSFPGLIAPIAGGKIGDLKDLGTKNPVLYLDFPQGQMKLFGTIVYPKNRYLTLQFPKGGKSVMCEDYFDNMIVFSDAWWIGRKDENPEESKLEFPNELYEGHQAEYDFKGGAGAGAASVVNQGVPRTNIQRVEQESPKTPTEDDLSDNEINLKDTKELVPVRHSTRTAKKSYKFAEISSGDDSGENSPELSDDEEKVIQKKTVVFDLDDEDDAPVDQPAKINTESASRSKSKEVSQSASASASTEVKSSNRGSLVQATISTLFKKVEEKTTPRSSRKSPSSKAYGQKSQPAGSKRKIDLDEGSKKRARKTTDKDPGKKIKAKSKEDDVEDGDDDGDDIEEFSNASEDANESDEDWTA

SEQ ID NO: 5174 - protein, 432 aa, Glycine max
  misc_feature (1)..(432): Ceres Seq. ID no. 14307263
MARGKAKKKEEGEDTDVANPETLERKRLKSLAISNKILSETPARSSVHLNPSSVVAKHHGKDIIKKSQRKSCRYLFSFPGLIAPIAGGKIGDLKDLGTKNPVLYLDFPQGQMKLFGTIVYPKNRYLTLQFPKGGKSVMCEDYFDNMIVFSDAWWIGRKDENPEESKLEFPNELYEGHQAEYDFKGGAGAGAASVVNQGVPRTNIQRVEQESPKTPTEDDLSDNEINLKDTKELVPVRHSTRTAKKSYKFAEISSGDDSGENSPELSDDEEKVIQKKTVVFDLDDEDDAPVDQPAKINTESASRSKSKEVSQSASASASTEVKSSNRGSLVQATISTLFKKVEEKTTPRSSRKSPSSKAYGQKSQPAGSKRKIDLDEGSKKRARKTTDKDPGKKIKAKSKEDDVEDGDDDGDDIEEFSNASEDANESDEDWTA

SEQ ID NO: 5175 - protein, 321 aa, Glycine max
  misc_feature (1)..(321): Ceres Seq. ID no. 14307264
MKLFGTIVYPKNRYLTLQFPKGGKSVMCEDYFDNMIVFSDAWWIGRKDENPEESKLEFPNELYEGHQAEYDFKGGAGAGAASVVNQGVPRTNIQRVEQESPKTPTEDDLSDNEINLKDTKELVPVRHSTRTAKKSYKFAEISSGDDSGENSPELSDDEEKVIQKKTVVFDLDDEDDAPVDQPAKINTESASRSKSKEVSQSASASASTEVKSSNRGSLVQATISTLFKKVEEKTTPRSSRKSPSSKAYGQKSQPAGSKRKIDLDEGSKKRARKTTDKDPGKKIKAKSKEDDVEDGDDDGDDIEEFSNASEDANESDEDWTA

SEQ ID NO: 5176 - DNA, 1246 bp, Glycine max
  misc_feature (1)..(1246): Ceres Seq. ID no. 14307265
ttctctgttctctctcatctcatcggatcgatcaagcatcagggagctttgagggttgattctctggtgtagtagcaatcagcacaatagaaaatgttttttgacggatatggatatcatgggacatcatttgagcagatatatcgatgctacccagcttcctttattgaaaagccccaaatcgaaagtggtgacaaaattatcatgcctccatcagcccttgaccgtctagcatctctgcatattgattacccaatgttgtttgaactccgtaatgatgctgccgagcgggtttctcattgtggggttctggagttcattgctgaggaaggcatgatatacatgccatactggatgatggagaacatgcttttacaagagggggacattgtcaaagtgaaaaatgtgacacttccaaaggggacatatgttaagttacagccccacacaaaagactttttggatatttccaatccaaaagctatcttagaaacaacattgaggaatttttcctgcttgactactggagatagcattatggtggcttacaacaacaagaaatattacatagatattatagaaactaagcctgacactgccataagcataattgagactgactgtgaggtggactttgctcctcccttggattacaaggaacctgaaaaacccactgcacccctttctgctgggaaggcagcagtggctgctgaggtgatccctgctgaagatgagcccaagttcaacccattttctggaactgggagacgcttggatggaaaacctttgaattatcagcctcctccagtttcctcttcagggtctaaggaccagaaacctgatgttgtcaatttgcagtcttctacagcttctagttcacaaagtaatgctcgtcaatctcagggcaagcttgtgtttgggtcaaatgctaaccgtactaaagagacaggaaaggcgaaagagtcaaaaccagagccacctaaagagaaagaagagccgaaatttcaacctttttcagggaagaagtattctttacggggttaaattaaaatggccttttacttttaaagcaagttactttgttgatctatgcatggatcgatgtctattgcaaaaacttttatttatttattgtattataagcagtagatagaccagtagatgccacagaaaatacctttgattacttgtgaacgaagctcttgacgagggttgcaatcgtgtctgaatggtaacatgctgtgtg

SEQ ID NO: 5177 - protein, 316 aa, Glycine max
  misc_feature (1)..(316): Ceres Seq. ID no. 14307266
MFFDGYGYHGTSFEQIYRCYPASFIEKPQIESGDKIIMPPSALDRLASLHIDYPMLFELRNDAAERVSHCGVLEFIAEEGMIYMPYWMMENMLLQEGDIVKVKNVTLPKGTYVKLQPHTKDFLDISNPKAILETTLRNFSCLTTGDSIMVAYNNKKYYIDIIETKPDTAISIIETDCEVDFAPPLDYKEPEKPTAPLSAGKAAVAAEVIPAEDEPKFNPFSGTGRRLDGKPLNYQPPPVSSSGSKDQKPDVVNLQSSTASSSQSNARQSQGKLVFGSNANRTKETGKAKESKPEPPKEKEEPKFQPFSGKKYSLRG

SEQ ID NO: 5178 - protein, 279 aa, Glycine max
  misc_feature (1)..(279): Ceres Seq. ID no. 14307267
MPPSALDRLASLHIDYPMLFELRNDAAERVSHCGVLEFIAEEGMIYMPYWMMENMLLQEGDIVKVKNVTLPKGTYVKLQPHTKDFLDISNPKAILETTLRNFSCLTTGDSIMVAYNNKKYYIDIIETKPDTAISIIETDCEVDFAPPLDYKEPEKPTAPLSAGKAAVAAEVIPAEDEPKFNPFSGTGRRLDGKPLNYQPPPVSSSGSKDQKPDVVNLQSSTASSSQSNARQSQGKLVFGSNANRTKETGKAKESKPEPPKEKEEPKFQPFSGKKYSLRG

SEQ ID NO: 5179 - protein, 262 aa, Glycine max
  misc_feature (1)..(262): Ceres Seq. ID no. 14307268
MLFELRNDAAERVSHCGVLEFIAEEGMIYMPYWMMENMLLQEGDIVKVKNVTLPKGTYVKLQPHTKDFLDISNPKAILETTLRNFSCLTTGDSIMVAYNNKKYYIDIIETKPDTAISIIETDCEVDFAPPLDYKEPEKPTAPLSAGKAAVAAEVIPAEDEPKFNPFSGTGRRLDGKPLNYQPPPVSSSGSKDQKPDVVNLQSSTASSSQSNARQSQGKLVFGSNANRTKETGKAKESKPEPPKEKEEPKFQPFSGKKYSLRG

SEQ ID NO: 5180 - DNA, 1359 bp, Glycine max
  misc_feature (1)..(1359): Ceres Seq. ID no. 14307296
aacacaaatttcattttatttatttatttgtttattcatttatttttagaaaaagtggagagccatatggaatttgacgagcacgaggaccaagagcaagaagaggaggaggaggaggaggaaatgggattctcagtggcggcggcggcgagttacgactcgctgggaaacgccgcggtgaggtctaaaattagcggcggcgatggtgttgcggccaccgtgaattccggtcgcaaagggacggtgagatacagagaatgtcagaagaaccatgccgtcagcatcggcggccacgccgtcgacggatgctgcgagttcttggctgccggagaggaaggcacgctggaagccgtaatttgcgccgcctgtaactgccaccgcaacttccaccgcaaggagatcgacggcgaaaccagcccttaccagcaccgttcgcagccacagcctcagcctctgcaccctcagtaccaccaccaattctccccttactaccaccgcgcgcccccaccttccgccgccggatatctccaccaccaccttgtaacacctccggtgtcgcagcaccggcccttggctctgccaccgttagcttctggaggagtgttcagtagggaggaagaggacatgtcaaaccccagctccagcggcggcggcggtggtggcggttttagtggcggtggtggtagcgggagtggaacgaagaagaggtttagaacaaaattcacgcaggagcagaaggataagatgctggcatttgcggagaagctagggtggagaattcagaagcatgacgaagctgctgttgaacaattctgcgctgaaacttgcatcaagagacatgtactcaaggtttggatgcacaataacaaacacactcttgctaattctgagcaacattcggctgggaatggatcgaatcacttgaacagcaccacaataattgagaattctcaattctcctgagggatattaacgaaataaagagaaagaactgaagttggcagaagttcatggaagggtttgcaagtgttcatcttatcagtagcatcaggtgatggtgatcgaggagggggagtacgcaatggaagtatgcggatgagcacagagaataaattccaacataaagttgtatttaacgtgagtggaatgcaagtgcaaagctgtttatgttactactttgctgtgttccttcgcattatttgtcgtctttctttcctgtttttcctccctaacaccgccctagtttagttttattatcgtttgtctctctcatattaatgtctcctcttctatttctttgcttctggacacattagacctgaaagatttaatgagtcaaatagattcatcatgatccgt

SEQ ID NO: 5181 - protein, 320 aa, Glycine max
  misc_feature (1)..(320): Ceres Seq. ID no. 14307297
NTNFILFIYLFIHLFLEKVESHMEFDEHEDQEQEEEEEEEEMGFSVAAAASYDSLGNAAVRSKISGGDGVAATVNSGRKGTVRYRECQKNHAVSIGGHAVDGCCEFLAAGEEGTLEAVICAACNCHRNFHRKEIDGETSPYQHRSQPQPQPLHPQYHHQFSPYYHRAPPPSAAGYLHHHLVTPPVSQHRPLALPPLASGGVFSREEEDMSNPSSSGGGGGGGFSGGGGSGSGTKKRFRTKFTQEQKDKMLAFAEKLGWRIQKHDEAAVEQFCAETCIKRHVLKVWMHNNKHTLANSEQHSAGNGSNHLNSTTIIENSQFS

SEQ ID NO: 5182 - protein, 298 aa, Glycine max
  misc_feature (1)..(298): Ceres Seq. ID no. 14307298
MEFDEHEDQEQEEEEEEEEMGFSVAAAASYDSLGNAAVRSKISGGDGVAATVNSGRKGTVRYRECQKNHAVSIGGHAVDGCCEFLAAGEEGTLEAVICAACNCHRNFHRKEIDGETSPYQHRSQPQPQPLHPQYHHQFSPYYHRAPPPSAAGYLHHHLVTPPVSQHRPLALPPLASGGVFSREEEDMSNPSSSGGGGGGGFSGGGGSGSGTKKRFRTKFTQEQKDKMLAFAEKLGWRIQKHDEAAVEQFCAETCIKRHVLKVWMHNNKHTLANSEQHSAGNGSNHLNSTTIIENSQFS

SEQ ID NO: 5183 - protein, 279 aa, Glycine max
  misc_feature (1)..(279): Ceres Seq. ID no. 14307299
MGFSVAAAASYDSLGNAAVRSKISGGDGVAATVNSGRKGTVRYRECQKNHAVSIGGHAVDGCCEFLAAGEEGTLEAVICAACNCHRNFHRKEIDGETSPYQHRSQPQPQPLHPQYHHQFSPYYHRAPPPSAAGYLHHHLVTPPVSQHRPLALPPLASGGVFSREEEDMSNPSSSGGGGGGGFSGGGGSGSGTKKRFRTKFTQEQKDKMLAFAEKLGWRIQKHDEAAVEQFCAETCIKRHVLKVWMHNNKHTLANSEQHSAGNGSNHLNSTTIIENSQFS

SEQ ID NO: 5184 - DNA, 917 bp, Glycine max
  misc_feature (1)..(917): Ceres Seq. ID no. 14307320
aatgaagcttctgataataaaacaagtccctggtgtttcaatcaggcacctggacatcaatggttaattcctgtcatgtctccttctgaagggcttgtctacaagccatatcctgggcctggatttatgggaacaatgaatggaggatgcggcgggccattcgggcaagcacctctcggtgctactttcatgaatcctgcctatcaattcccagcttctcatccagtagttggggtttcaccgtttgtccctccagccagtcatgcctacttcccttcctttggcatgccagtagtgaatcaagcaacatcaggatcaactgttgaacaggtgaaccagtttgctgcacaaggttctcatggtcaaaatggtcattcatatatagagggaaccgattttaacactcatcataaccaaagctcatctaacctgccagttctgaagaatggagctacgctacatgttaaaaaatctcaggcgtctaaggagagagggttacaagggagcacaataagcagtcctagtgaaatggcacagggaatcagagcagggaaaatagctgaaggaaatgatgcacattctctttctcttcaagctgttgaaactagacagcaaacacaagtcatcaaagttgtaccacataaccggaaatcagcgacggaatcagcagctagaatttttcaatccattcaagaagagagaaaacaacatgatttagtctagtgctgtttatggaggtggagttatttgagttgattttgtacagtgcgtcaagtcctgtactttgttgttgtttggtaatatgtatcttgctgttttattctactcttcctttatgtcctttttcttacaacatattcgaatgtagatattgttataactacaatggaatgttaaaattgatcaaatttaatatt

SEQ ID NO: 5185 - protein, 240 aa, Glycine max
  misc_feature (1)..(240): Ceres Seq. ID no. 14307321
NEASDNKTSPWCFNQAPGHQWLIPVMSPSEGLVYKPYPGPGFMGTMNGGCGGPFGQAPLGATFMNPAYQFPASHPVVGVSPFVPPASHAYFPSFGMPVVNQATSGSTVEQVNQFAAQGSHGQNGHSYIEGTDFNTHHNQSSSNLPVLKNGATLHVKKSQASKERGLQGSTISSPSEMAQGIRAGKIAEGNDAHSLSLQAVETRQQTQVIKVVPHNRKSATESAARIFQSIQEERKQHDLV

SEQ ID NO: 5186 - protein, 215 aa, Glycine max
  misc_feature (1)..(215): Ceres Seq. ID no. 14307322
MSPSEGLVYKPYPGPGFMGTMNGGCGGPFGQAPLGATFMNPAYQFPASHPVVGVSPFVPPASHAYFPSFGMPVVNQATSGSTVEQVNQFAAQGSHGQNGHSYIEGTDFNTHHNQSSSNLPVLKNGATLHVKKSQASKERGLQGSTISSPSEMAQGIRAGKIAEGNDAHSLSLQAVETRQQTQVIKVVPHNRKSATESAARIFQSIQEERKQHDLV

SEQ ID NO: 5187 - protein, 198 aa, Glycine max
  misc_feature (1)..(198): Ceres Seq. ID no. 14307323
MGTMNGGCGGPFGQAPLGATFMNPAYQFPASHPVVGVSPFVPPASHAYFPSFGMPVVNQATSGSTVEQVNQFAAQGSHGQNGHSYIEGTDFNTHHNQSSSNLPVLKNGATLHVKKSQASKERGLQGSTISSPSEMAQGIRAGKIAEGNDAHSLSLQAVETRQQTQVIKVVPHNRKSATESAARIFQSIQEERKQHDLV

SEQ ID NO: 5188 - DNA, 1829 bp, Glycine max
  misc_feature (1)..(1829): Ceres Seq. ID no. 14307363
gaggcatcgaactcaaacattatcggtggacagaaacaccactgaacgaggttgcttgctccgacgccgaaatgaaagccccttcctctcttttcctcaaaggccacgttctcccttcttccatttttctcctcagaaactccaaaggaacacccaatgtgaaaatgcaccccatctggtgcttatgtaaagccattcaaactaattcatatgaaatttccaatggaagctatcatcccactgtgcaacaaacaacagaaaagaagacaatggaaaagctatccaggaaagttgaatctattggggcatttcaaaagttgcccatagtgatgccatctattgacattattggctctgcactcagaaaggcgaggaaggtttctccaacgaaaggaattgccaacattgcgaaaagggagaaaaataagggtgcaaagcaacttgatgcgttgatgaaagaaattgctgttcccttgaggacgtatgtggagaattttcctaacaaaatgcatcttcatccttatgagagatctcttattgagctgacacttggagatggatactacgaaatggtgctacgaaaggtagacagtttaaggaagagggtagtatctgttggaaaggaacatgcttcactttgcgctaagtcttcatcaaagcgagaagcagaggaaaggctgaatgaggggcttaagaaaattgaagagatttttgctcaagaacgaaaagttgttgatgatttgttaggcatagccaagactctcagggcaatgcctgtaattaatttggaaacaccaactctctgccttgttggagctcctaatgtaggcaaatcttctttggtccatgtactctctactggcaagcctgagatttgtaactatcccttcacaacaagaggaattcttatgggtcatattattttaaactttcagaagtttcaggtaacagatactccgggcctgctaaggagacatgatgaggacaggaataatttggaaaagttgactctggctgtcctttcgcacctgccgacagcagttttgtatgtccatgacctttctggggagtgtggcacctcaccttctgatcagttttcaatatacaaagaactcagagaaaggttcaatggacatttatggcttgatgtcgtgtcaaaatctgatttgttgaagacgtctcctgtagtctatgcaacagacgagcctcatccctcccaactcgagcttgaaaagtaccggaaatcaggtcccaatggagctattaacgtatctgtcaaaacacaaggagggctacatgagctaaagcagagagtgcatgaactgcttaatttgcagatggccaagataaatgatataagcaacaaccaggagaagtgaaaggtgtcactccactaagggttgatatcaaacttgtgaagaaacttcctgatcaaatagggaagtctgaaaccttcatgagccagaagcttatctttgtaaaatatgttagcagctctgtggccagcctccaagcaggaaaagaagcaaaggcttcttaattaataccttcaagcaattaagcattggtaggttgagcatacgaaacttccagaaaatgttcagtcacttttagctttgttgaggagatcatgttccacccgtattgggccttcttgaagaaacaataaatgcttgtttatcaacttttcagttcattgattgtcattggcttcaatcatgtgtcttaacttcttaagtccattgtcagaagtcttcataaattggttaatgttaagatctgaattgatattgagatataatgtattgatatattagatatgttcatag

SEQ ID NO: 5189 - protein, 458 aa, Glycine max
  misc_feature (1)..(458): Ceres Seq. ID no. 14307364
GIELKHYRWTETPLNEVACSDAEMKAPSSLFLKGHVLPSSIFLLRNSKGTPNVKMHPIWCLCKAIQTNSYEISNGSYHPTVQQTTEKKTMEKLSRKVESIGAFQKLPIVMPSIDIIGSALRKARKVSPTKGIANIAKREKNKGAKQLDALMKEIAVPLRTYVENFPNKMHLHPYERSLIELTLGDGYYEMVLRKVDSLRKRVVSVGKEHASLCAKSSSKREAEERLNEGLKKIEEIFAQERKVVDDLLGIAKTLRAMPVINLETPTLCLVGAPNVGKSSLVHVLSTGKPEICNYPFTTRGILMGHIILNFQKFQVTDTPGLLRRHDEDRNNLEKLTLAVLSHLPTAVLYVHDLSGECGTSPSDQFSIYKELRERFNGHLWLDVVSKSDLLKTSPVVYATDEPHPSQLELEKYRKSGPNGAINVSVKTQGGLHELKQRVHELLNLQMAKINDISNNQEK

SEQ ID NO: 5190 - protein, 435 aa, Glycine max
  misc_feature (1)..(435): Ceres Seq. ID no. 14307365
MKAPSSLFLKGHVLPSSIFLLRNSKGTPNVKMHPIWCLCKAIQTNSYEISNGSYHPTVQQTTEKKTMEKLSRKVESIGAFQKLPIVMPSIDIIGSALRKARKVSPTKGIANIAKREKNKGAKQLDALMKEIAVPLRTYVENFPNKMHLHPYERSLIELTLGDGYYEMVLRKVDSLRKRVVSVGKEHASLCAKSSSKREAEERLNEGLKKIEEIFAQERKVVDDLLGIAKTLRAMPVINLETPTLCLVGAPNVGKSSLVHVLSTGKPEICNYPFTTRGILMGHIILNFQKFQVTDTPGLLRRHDEDRNNLEKLTLAVLSHLPTAVLYVHDLSGECGTSPSDQFSIYKELRERFNGHLWLDVVSKSDLLKTSPVVYATDEPHPSQLELEKYRKSGPNGAINVSVKTQGGLHELKQRVHELLNLQMAKINDISNNQEK

SEQ ID NO: 5191 - protein, 404 aa, Glycine max
  misc_feature (1)..(404): Ceres Seq. ID no. 14307366
MHPIWCLCKAIQTNSYEISNGSYHPTVQQTTEKKTMEKLSRKVESIGAFQKLPIVMPSIDIIGSALRKARKVSPTKGIANIAKREKNKGAKQLDALMKEIAVPLRTYVENFPNKMHLHPYERSLIELTLGDGYYEMVLRKVDSLRKRVVSVGKEHASLCAKSSSKREAEERLNEGLKKIEEIFAQERKVVDDLLGIAKTLRAMPVINLETPTLCLVGAPNVGKSSLVHVLSTGKPEICNYPFTTRGILMGHIILNFQKFQVTDTPGLLRRHDEDRNNLEKLTLAVLSHLPTAVLYVHDLSGECGTSPSDQFSIYKELRERFNGHLWLDVVSKSDLLKTSPVVYATDEPHPSQLELEKYRKSGPNGAINVSVKTQGGLHELKQRVHELLNLQMAKINDISNNQEK

SEQ ID NO: 5192 - DNA, 921 bp, Glycine max
  misc_feature (1)..(921): Ceres Seq. ID no. 14307370
gataaatagctgcaaccactttgatcttgactcatacaggtcccttgtagccacttgttctgtcttgaaaatccattttgcttcatttcattcctcacatttatttttcttccatggagaacttgttgggtctgctgagaattcatgttgaaaaaggtgtcaatcttgccatcagggatgtggtgagcagtgacccttatgttgtcatcaaaatgggcaagcagaagctgaagactcgggtagtcaataagaatctaaatcctgaatggaatgatgacttgaccttgtctatctctgaccctcatgctccaattcatctacatgtgtatgacaaggacacatttagcatggatgacaaaatgggggatgcagagtttttcataggtccatttattgaagcagtgaagatgcgcttatcaagtctccccaacaatactatagttacaaaagtgctacctagcagacaaaacagtttagctgaagagagtcacattgtgtggaaggatggcaaagttgtccaaaacatggttcttagactaagaaatgttgagactggggaagtggagctccagttgcattggattgacattcctggttcaaggcatctctagatcacagtccaaagcatggttcttacttcttagacttgccatattgtgaaaattagatttgcagcttcataaaccagcaggcagcagcaccttatgctttaatttctcctatccttttatctctttcgcacaacataaaaactgtttaatacgttggtattgcaattactagtagttaccgaaaaagaatgggagatgtagtttccctagctgtaatttagactttgaattatctgctagtcttgtgtaataatgtacaagaaatgtaacagaaagatgttgcacttaattagaacatccttagttaacg

SEQ ID NO: 5193 - protein, 165 aa, Glycine max
  misc_feature (1)..(165): Ceres Seq. ID no. 14307371
MENLLGLLRIHVEKGVNLAIRDVVSSDPYVVIKMGKQKLKTRVVNKNLNPEWNDDLTLSISDPHAPIHLHVYDKDTFSMDDKMGDAEFFIGPFIEAVKMRLSSLPNNTIVTKVLPSRQNSLAEESHIVWKDGKVVQNMVLRLRNVETGEVELQLHWIDIPGSRHL

SEQ ID NO: 5194 - protein, 132 aa, Glycine max
  misc_feature (1)..(132): Ceres Seq. ID no. 14307372
MGKQKLKTRVVNKNLNPEWNDDLTLSISDPHAPIHLHVYDKDTFSMDDKMGDAEFFIGPFIEAVKMRLSSLPNNTIVTKVLPSRQNSLAEESHIVWKDGKVVQNMVLRLRNVETGEVELQLHWIDIPGSRHL

SEQ ID NO: 5195 - protein, 87 aa, Glycine max
  misc_feature (1)..(87): Ceres Seq. ID no. 14307373
MDDKMGDAEFFIGPFIEAVKMRLSSLPNNTIVTKVLPSRQNSLAEESHIVWKDGKVVQNMVLRLRNVETGEVELQLHWIDIPGSRHL

SEQ ID NO: 5196 - DNA, 1653 bp, Glycine max
  misc_feature (1)..(1653): Ceres Seq. ID no. 14307374
gaatatcaagtagatgaaaaccaactaatccgtgcagaaaaagtgccagcttgtagaagatccatcaaacagcaatcaaggcatgttggccaaaataaaaatggtgttcagaggctactgcaaactcgtactcacgaaggtggaagtccttttaatcgtgtttttcctgttagtcctgctccatttccttcagctcccccacctgccccagcaacgccaccagtggttcagaagccagctcctgttgaccgaaataattctgcttctccttctcccctgcctggaccacgatctgcaccgctatataaaagtagctcatcaaagaaccatgtagttgttattttggctggagttatgggtggtgctgtatttcttctcatttcaatcattggcctatatctctgtaaaacaaacaaggtagctactgtaaaaccttgggccacaggattaagcggacagcttcagaacgcatttgtaacaggtgtgccaaagctaaagagatcagagcttgaagcagcatgtgaagattttagtaatgtaattggtacttcatccattggtacagtgtacaaagggactttatctagtggtgttgaaatagctgtggcatctgttgcagcgacatcatccaaagattggtcaaagactttagaagcccaatttaggaacaagatagatacattatcaaaagtgaaccacaagaattttgtaaatcttcttgtacattgtgaagaagatgagcctttcaccagaatggtggtttttgagtatgccccgaatggaacactctttgagcatttacacataaaagaatctgagcacttggattggggaacaagacttagaattgccatgggcatggcttactgcctacaacatatgcaccagttggagcctcctttggtccttagcaacctgaattcttcagctgtccaactcactgatgattatgctgccaaaatctctgatttgagtttcttaaatgaaatagcttcagctgtgataaaatctcctgctagaaaaaacactgacatgacaccagcaagtaacatttacagctttggtgttatattatttgaaatggtaactggcagactcccttattcagtggacaatgatggctcacttgatgactgggcttcacactatttacaaggggatcagcccctcaaagaaatggtggatccgactctagcatccttccaagaagaacaactagaacaagtcgatgctttgattaaatcttgtgtccatcctgatcaaaagcaaagaccaacaatgaaagaagtttgtgtgagattaagagagataacaaaaataacacctgatgcagctgttccaaagctttctccactttggtgggcagagcttgagattgcttctgtaaatgcaagctgaaatcggtaaatcaggttgtaagtatggagttcttaccttcctcatcctttttccatcggtgaaggcacaaaaatgtattcacctgtagattaatacatcttgtgttaattatggaagagaggcaaatcacatgtacataagggagataaaagaatgcgattttttcttttcttttcctgcggtgcttcgtttggttatggtttatgaaattatactaacaaaaaaaagtttcacatcagttaatttcatttgctc

SEQ ID NO: 5197 - protein, 465 aa, Glycine max
  misc_feature (1)..(465): Ceres Seq. ID no. 14307375
EYQVDENQLIRAEKVPACRRSIKQQSRHVGQNKNGVQRLLQTRTHEGGSPFNRVFPVSPAPFPSAPPPAPATPPVVQKPAPVDRNNSASPSPLPGPRSAPLYKSSSSKNHVVVILAGVMGGAVFLLISIIGLYLCKTNKVATVKPWATGLSGQLQNAFVTGVPKLKRSELEAACEDFSNVIGTSSIGTVYKGTLSSGVEIAVASVAATSSKDWSKTLEAQFRNKIDTLSKVNHKNFVNLLVHCEEDEPFTRMVVFEYAPNGTLFEHLHIKESEHLDWGTRLRIAMGMAYCLQHMHQLEPPLVLSNLNSSAVQLTDDYAAKISDLSFLNEIASAVIKSPARKNTDMTPASNIYSFGVILFEMVTGRLPYSVDNDGSLDDWASHYLQGDQPLKEMVDPTLASFQEEQLEQVDALIKSCVHPDQKQRPTMKEVCVRLREITKITPDAAVPKLSPLWWAELEIASVNAS

SEQ ID NO: 5198 - protein, 347 aa, Glycine max
  misc_feature (1)..(347): Ceres Seq. ID no. 14307376
MGGAVFLLISIIGLYLCKTNKVATVKPWATGLSGQLQNAFVTGVPKLKRSELEAACEDFSNVIGTSSIGTVYKGTLSSGVEIAVASVAATSSKDWSKTLEAQFRNKIDTLSKVNHKNFVNLLVHCEEDEPFTRMVVFEYAPNGTLFEHLHIKESEHLDWGTRLRIAMGMAYCLQHMHQLEPPLVLSNLNSSAVQLTDDYAAKISDLSFLNEIASAVIKSPARKNTDMTPASNIYSFGVILFEMVTGRLPYSVDNDGSLDDWASHYLQGDQPLKEMVDPTLASFQEEQLEQVDALIKSCVHPDQKQRPTMKEVCVRLREITKITPDAAVPKLSPLWWAELEIASVNAS

SEQ ID NO: 5199 - DNA, 1470 bp, Glycine max
  misc_feature (1)..(1470): Ceres Seq. ID no. 14307385
atgatgtcaacaagataaatccagcatgtacaacaagagaagaaactgaggagtcagaggatgaagaaaacaacatcgacgatatatccaagaatatagcatcaaacatgtctatcgatgatggtgaaacacttaccaaatccgaaggaaaggccgaggaatccagtgctaaattggacattcaaagttctttgcctgaggtagtgaagccctgtggacgtattaatgcttgcatggccgttggaagagatacattatacatatatggtggcatgatggagattaaagatcaagaaatcactcttgatgatttgtattctttgaaccttagcaaacttgatgaatggaaatgcattataccggtttgttattttttctcaagttgactagctttttacctatacatgcatatgttctataccataggtatcaatcatgaacagtggtatgtagcagctactccaaaaacgctatagtggtatagcccatagcgggatgcccattattttcaaacattttatacagtttatataatttataataaatacatataaatgctcaaaatttaaaaaataaaaataatactaaaaaatattgacatggtcataattaacaaaaacaggttatagatcttagctgttaagcaaacatacaagtaaatagtaacaaaggataccatgtctaactaaagggacagagactgctatgtctcataaaaattggttaagtaaaaaataatttcttagttgttggctgataaaagtctgctactgcaaagttggtgaatgtttgtaccttacccagttccaagagtaaaactaggtctttgaatatgagccatgctgaattgctgatgctgttaatatagcttttgttgattcggcttatttaatctaagaatatattgtgattgtaatttcctacttatatacacatttttaccttatttgctataactttacttggcttttcttcaacccaggcatctgaatctgaatgggtggaagcttcagatgatgatgaagaaaatgaagatgatgatgaagatgaatccgatggtgatagtctgactgatgaggatgaagatgacgaggaagaggaggaggaagaggctcagaatgcatccgttcaggtgggagatgccgttgctttaatcaaaggggtgggaaagaatttgcggaggaaagaaaggagggtacggatagagcagattagagctagtcttggcttgtcagattcacagagaacaccctcgccaggagaatccttgaaggatttctacaggcgtacaaatatgtattggcaaatggcagcccatgaacatactcaacacactggaaaagaactccgcaaggatggttttgatcttgctgaagctcggtacagggagctaaaacctattcttgatgagctggctctattagaagctgagcagaaagcagaggaggccgaaggaccagaaactagtgt

SEQ ID NO: 5200 - protein, 127 aa, Glycine max
  misc_feature (1)..(127): Ceres Seq. ID no. 14307386
DVNKINPACTTREETEESEDEENNIDDISKNIASNMSIDDGETLTKSEGKAEESSAKLDIQSSLPEVVKPCGRINACMAVGRDTLYIYGGMMEIKDQEITLDDLYSLNLSKLDEWKCIIPVCYFFSS

SEQ ID NO: 5201 - protein, 92 aa, Glycine max
  misc_feature (1)..(92): Ceres Seq. ID no. 14307387
MSIDDGETLTKSEGKAEESSAKLDIQSSLPEVVKPCGRINACMAVGRDTLYIYGGMMEIKDQEITLDDLYSLNLSKLDEWKCIIPVCYFFSS

SEQ ID NO: 5202 - DNA, 1477 bp, Glycine max
  misc_feature (1)..(1477): Ceres Seq. ID no. 14307431
aaaaaattgccaccttctacatactgtccgaaagcagcaagttcagtacttcagttcactgcgccttcctctccttttcgatggcaaagggttgctccaacaacacttatgaagaggctagaaaacaaagacttgaagaaaacaaaaagaggtttgaggatttgggaatttcgaggatttcaaaaaacttgactgaaatcgcaagttctgcaaagaagaagctgcgtcatgttcctaaacagaaaacaaagaagacaaatgttgaagtggaacctaggcgatcttctcgtgtgcgaaacccagttcgttcataccgtgaagatgtgaacatagaccttccacccttgcggaagaggtcaaggtcaagttcttcatcatggggaagttacattgcgaggcctctagatgaaatcaaagaagcaacaaaagaggaaagactttgtgctctggaggctgcagaggcaatccaaatcaatttgaactcatcaaatccatcatttatcaagtcaatggttcggtctcatgtttatagctgcttttggttgggtcttccttctaaattttgtgaggaacatctgccaaaaactttacatgacatggttttagaagatgaaaatggctcagaatatgaggctgtttacattggcaacagagctgggcttagtggtggttggagagcatttgcattggatcataaactcgatgatggtgatgcccttgtttttgaattgattgaagcttcaagatttaagatttatattgtaagagcatttccagattcagttgaagaaaagggaaataatattttagaggaagaaggaaatgtgcgtgcaaccaaagcaccaaaagctgcctgtaatcttgaatcggaatgtaagacaaaaaagccaaaacaggctgcagtttatgaaactaaggaatcagagagttctcaggaatatcttctagatagcagcattgacaacgaagtgaaaccacagggagtaaatccaactaataaggaaactaaattttctcagaaaaatacgccaaagaaatctaaatatcctgctactgctgattcaaaagggaaagtgcaaattaaaactgagaaaccaaaggcatctataaagctgtcaaacaatacaaggaagtcgaaagaaggtataaatgaaattggtggttcagacaagttagagaagaatgagtttgttcaggatgctgatagcaagttagagaaagttgaactagttgaagaagcaagaaaatgtgtcacaaaaaagctagaaaaaaccagctccaaatttttcagaaagaaagcataatcttggagctaatgactggtaaattataaaatgtattaagacttgtatggagtatattatggtagtagacaatattttctgttgtggattaatggaagtaaagtgtaagatatgtatttgatttgatatctatcagtatgttagttataatacataaaaaacaatgttttgtt

SEQ ID NO: 5203 - protein, 433 aa, Glycine max
  misc_feature (1)..(433): Ceres Seq. ID no. 14307432
KIATFYILSESSKFSTSVHCAFLSFSMAKGCSNNTYEEARKQRLEENKKRFEDLGISRISKNLTEIASSAKKKLRHVPKQKTKKTNVEVEPRRSSRVRNPVRSYREDVNIDLPPLRKRSRSSSSSWGSYIARPLDEIKEATKEERLCALEAAEAIQINLNSSNPSFIKSMVRSHVYSCFWLGLPSKFCEEHLPKTLHDMVLEDENGSEYEAVYIGNRAGLSGGWRAFALDHKLDDGDALVFELIEASRFKIYIVRAFPDSVEEKGNNILEEEGNVRATKAPKAACNLESECKTKKPKQAAVYETKESESSQEYLLDSSIDNEVKPQGVNPTNKETKFSQKNTPKKSKYPATADSKGKVQIKTEKPKASIKLSNNTRKSKEGINEIGGSDKLEKNEFVQDADSKLEKVELVEEARKCVTKKLEKTSSKFFRKKA

SEQ ID NO: 5204 - protein, 407 aa, Glycine max
  misc_feature (1)..(407): Ceres Seq. ID no. 14307433
MAKGCSNNTYEEARKQRLEENKKRFEDLGISRISKNLTEIASSAKKKLRHVPKQKTKKTNVEVEPRRSSRVRNPVRSYREDVNIDLPPLRKRSRSSSSSWGSYIARPLDEIKEATKEERLCALEAAEAIQINLNSSNPSFIKSMVRSHVYSCFWLGLPSKFCEEHLPKTLHDMVLEDENGSEYEAVYIGNRAGLSGGWRAFALDHKLDDGDALVFELIEASRFKIYIVRAFPDSVEEKGNNILEEEGNVRATKAPKAACNLESECKTKKPKQAAVYETKESESSQEYLLDSSIDNEVKPQGVNPTNKETKFSQKNTPKKSKYPATADSKGKVQIKTEKPKASIKLSNNTRKSKEGINEIGGSDKLEKNEFVQDADSKLEKVELVEEARKCVTKKLEKTSSKFFRKKA

SEQ ID NO: 5205 - protein, 264 aa, Glycine max
  misc_feature (1)..(264): Ceres Seq. ID no. 14307434
MVRSHVYSCFWLGLPSKFCEEHLPKTLHDMVLEDENGSEYEAVYIGNRAGLSGGWRAFALDHKLDDGDALVFELIEASRFKIYIVRAFPDSVEEKGNNILEEEGNVRATKAPKAACNLESECKTKKPKQAAVYETKESESSQEYLLDSSIDNEVKPQGVNPTNKETKFSQKNTPKKSKYPATADSKGKVQIKTEKPKASIKLSNNTRKSKEGINEIGGSDKLEKNEFVQDADSKLEKVELVEEARKCVTKKLEKTSSKFFRKKA

SEQ ID NO: 5206 - DNA, 1208 bp, Glycine max
  misc_feature (1)..(1208): Ceres Seq. ID no. 14307456
gggcaaaatcattcttcacttagttaggaaccgaaccatggctataacgttcggtttagtgactcctaactccaacactttgtgtctcactctcaccacaccacccctcatcgccaatcatcgtactactaatgttgtgttctctggtcaaagtgtcttcagctatggacacactaatctttcttattcacaccaaagggcttcttcctttgccactattgtctgttctgctgctaataaaccatcctcttcttctgaaattagctctacagccaagataaggagcgaggttctctctccctttcgttcagttaggatgttcttttatattgcttttgttgcaagtggtgctcttgggggattcatagcaaccacacaactaattggtgcactggctaactcatcaagagcatctgaagtccctgagattctgaagggccttggcatcgaccttgcagcagtgtctttatttgctttcttgtatttcagagagaacaaagcaaagaatgcacaagtggctcgcctatcaagagaggaaagcttatcaaatcttaagctccgtgtggatgagaagaagatcattcctgtgaactcattgagagggattgctcgacttgtcatctgtgctggccctgcatcctttgtaaccgagtcttttaagcgcagtgagcctttcaccgatagtcttttggatagaggggtgcttgttgtgccctttgtaacagatggaaattcacctgctttggagtttgaggagactgaggaacttgccactagaaggaagagactctggcaactggctccagtttacatcaatgagtggtctgagtggttagatgagcaaaagaagttagctggtgtaccttctgattctccagtgtacctatccctacgcttggatggtcgtgttcgtggcagtggtgttggttatcctccttggaatgctttggttgcacaattaccacaggtaaagggaatgtggactggcctactagatggctttgatggtagagtttagaagagcaagtgtttttttctacttctgaaggttgaactctcatacttaccccctcccccacaaaacaaaaagttcttcagcccgttttcttcatattctctttctggttttgtttctaatagtggagattccattaaacttttatgatttgattttaattgtatttattatttattatttattttatttc

SEQ ID NO: 5207 - protein, 338 aa, Glycine max
  misc_feature (1)..(338): Ceres Seq. ID no. 14307457
GKIILHLVRNRTMAITFGLVTPNSNTLCLTLTTPPLIANHRTTNVVFSGQSVFSYGHTNLSYSHQRASSFATIVCSAANKPSSSSEISSTAKIRSEVLSPFRSVRMFFYIAFVASGALGGFIATTQLIGALANSSRASEVPEILKGLGIDLAAVSLFAFLYFRENKAKNAQVARLSREESLSNLKLRVDEKKIIPVNSLRGIARLVICAGPASFVTESFKRSEPFTDSLLDRGVLVVPFVTDGNSPALEFEETEELATRRKRLWQLAPVYINEWSEWLDEQKKLAGVPSDSPVYLSLRLDGRVRGSGVGYPPWNALVAQLPQVKGMWTGLLDGFDGRV

SEQ ID NO: 5208 - protein, 326 aa, Glycine max
  misc_feature (1)..(326): Ceres Seq. ID no. 14307458
MAITFGLVTPNSNTLCLTLTTPPLIANHRTTNVVFSGQSVFSYGHTNLSYSHQRASSFATIVCSAANKPSSSSEISSTAKIRSEVLSPFRSVRMFFYIAFVASGALGGFIATTQLIGALANSSRASEVPEILKGLGIDLAAVSLFAFLYFRENKAKNAQVARLSREESLSNLKLRVDEKKIIPVNSLRGIARLVICAGPASFVTESFKRSEPFTDSLLDRGVLVVPFVTDGNSPALEFEETEELATRRKRLWQLAPVYINEWSEWLDEQKKLAGVPSDSPVYLSLRLDGRVRGSGVGYPPWNALVAQLPQVKGMWTGLLDGFDGRV

SEQ ID NO: 5209 - protein, 233 aa, Glycine max
  misc_feature (1)..(233): Ceres Seq. ID no. 14307459
MFFYIAFVASGALGGFIATTQLIGALANSSRASEVPEILKGLGIDLAAVSLFAFLYFRENKAKNAQVARLSREESLSNLKLRVDEKKIIPVNSLRGIARLVICAGPASFVTESFKRSEPFTDSLLDRGVLVVPFVTDGNSPALEFEETEELATRRKRLWQLAPVYINEWSEWLDEQKKLAGVPSDSPVYLSLRLDGRVRGSGVGYPPWNALVAQLPQVKGMWTGLLDGFDGRV

SEQ ID NO: 5210 - DNA, 1326 bp, Glycine max
  misc_feature (1)..(1326): Ceres Seq. ID no. 14307464
aattactatttttcactttctcctttcaatatgaggaaccccactcacaagtcccctgaggttgaaaatgatggtgattttaaagttcatctgttctcttcatcatccgagttgcttgaaaagcttcatgaaaaatggagttcagtggagaaaccaccatacccagctatttattctagtatttatggaggtatcatacttgatccagcaatgatggtaatccccattgatgatcacatggttcacagagggcatggtgtgtttgatacagctattgttctagatggatacctctatgagttggatgttcaccttgacagattcctaagttcagcctccaaagcaaagatatcctctcccttttctcgatcagtgcttcacagcattctaatacaactaactgcagcatcaaaatgcaagaagggaactctaagatactggctcagtgcaggtcctggagatttcttgctatcatcagcaggatgtccaacatctgcattctatgcagtagtcattgaccaagatatttcccaatgcaaagagggagttaaagtgattacttccaacataccaatgaagccttctctatttgccacagccaaaaatgtgaactatcttccaaatgtcctttcagtaatggaagctgaagagaaaggagcatcttcttctatatgggttgatgaggaaggttatattgctgaaggtccaaatgtgaatgttgctttcataactcaagacaaggaacttgtcatgcctccttttgataacatcttacatggttgcactgcaaaaaggctccttgaactggcacccaagttggttgatcaagggcttctgaaaggtgtagcaactaaaaaactaactgtggaggaagctaaagctgctgctgaaatgatgtatgtaggaagcacgcttcctctgttgcctatcatcgtttgggatgatcaacccattggcaatggaagggtgggagaattaacaatgttactttcggatatgctttgggatgatatggtagctggccctggcacacagaggatacctgttccttatgttgagtaaacctacaaagtcatcaaattacaggctgggaacaactttcttacttttctatgtcatgttcctaggagttctccttgcaaagatttatcaagaggtttctctttgtatttgctttttgtatttcaagtgtgaacactgaacaagtccttaagtgaagcaccaggtgtttcctgcaacacaaaatttacgtagcagataaatagtccttgaactgtttcacgttgttgtattgatataataataataatgaagactcttcatgct

SEQ ID NO: 5211 - protein, 353 aa, Glycine max
  misc_feature (1)..(353): Ceres Seq. ID no. 14307465
NYYFSLSPFNMRNPTHKSPEVENDGDFKVHLFSSSSELLEKLHEKWSSVEKPPYPAIYSSIYGGIILDPAMMVIPIDDHMVHRGHGVFDTAIVLDGYLYELDVHLDRFLSSASKAKISSPFSRSVLHSILIQLTAASKCKKGTLRYWLSAGPGDFLLSSAGCPTSAFYAVVIDQDISQCKEGVKVITSNIPMKPSLFATAKNVNYLPNVLSVMEAEEKGASSSIWVDEEGYIAEGPNVNVAFITQDKELVMPPFDNILHGCTAKRLLELAPKLVDQGLLKGVATKKLTVEEAKAAAEMMYVGSTLPLLPIIVWDDQPIGNGRVGELTMLLSDMLWDDMVAGPGTQRIPVPYVE

SEQ ID NO: 5212 - protein, 343 aa, Glycine max
  misc_feature (1)..(343): Ceres Seq. ID no. 14307466
MRNPTHKSPEVENDGDFKVHLFSSSSELLEKLHEKWSSVEKPPYPAIYSSIYGGIILDPAMMVIPIDDHMVHRGHGVFDTAIVLDGYLYELDVHLDRFLSSASKAKISSPFSRSVLHSILIQLTAASKCKKGTLRYWLSAGPGDFLLSSAGCPTSAFYAVVIDQDISQCKEGVKVITSNIPMKPSLFATAKNVNYLPNVLSVMEAEEKGASSSIWVDEEGYIAEGPNVNVAFITQDKELVMPPFDNILHGCTAKRLLELAPKLVDQGLLKGVATKKLTVEEAKAAAEMMYVGSTLPLLPIIVWDDQPIGNGRVGELTMLLSDMLWDDMVAGPGTQRIPVPYVE

SEQ ID NO: 5213 - protein, 283 aa, Glycine max
  misc_feature (1)..(283): Ceres Seq. ID no. 14307467
MMVIPIDDHMVHRGHGVFDTAIVLDGYLYELDVHLDRFLSSASKAKISSPFSRSVLHSILIQLTAASKCKKGTLRYWLSAGPGDFLLSSAGCPTSAFYAVVIDQDISQCKEGVKVITSNIPMKPSLFATAKNVNYLPNVLSVMEAEEKGASSSIWVDEEGYIAEGPNVNVAFITQDKELVMPPFDNILHGCTAKRLLELAPKLVDQGLLKGVATKKLTVEEAKAAAEMMYVGSTLPLLPIIVWDDQPIGNGRVGELTMLLSDMLWDDMVAGPGTQRIPVPYVE

SEQ ID NO: 5214 - DNA, 1086 bp, Glycine max
  misc_feature (1)..(1086): Ceres Seq. ID no. 14307472
atagagagaaggattcagactctggaagcttcctttggccggagaagaagacggtgtcgtttgagacttgggggagaggagaatgacagagttgagcagcagagaggtggaatacataaggagacaccacagcaaggcagcagaggacaatcagtgtgcctctgctctcgttaagcacataagggccccacttcctctcgtaattccctttgcatcattaagtaattaagtaattattatattattaattactttatgatttgtaggtgtggtcgttggtgaggagatttgatgagccgcagaagtataaaccgtttgtgagcaggtgcgtggtgaggggaaaccttgagattgggagtttgagagaggttgatgttaagtccggccttccagcgactactagtactgaaagattagagattcttgatgacaatcatcatatacttagcgtcaggattattggcggtgatcatagacttaggaactactcgtctatcatgtccctccacccagaaattgttgatggaaggccaggtaccctggtaattgaatcatttgtggtggacatacctgaaggcaacaccaaggatgagacctgctacttcgttgaagcattgatcaaatgcaatctcaaatcacttgctgatgtctcagaaggccttactttgcaggaccacactgaaccaattgatcgaaaatacgagttattgatcacaagaggctgagaatttggctgccatggatgaagctttcccaactttggaggcatagaagacggaatgccaaatggcaatggtgctttattctctgttatatatgattgcttttgctcgtttctctctttagtggtagttaaaaagaatagaatgttttagacaaatgtctgaatcagtgcaggaaaaggtgactgcatgttatgttctttctgtatataggtgttggtcaaagttggtccgtaaaattgtttccattggtcagtactcagttgtaatttctggttgcagtaaatttttagcaaataacagaggtttcttcttaaatgagtactattatattataaataatatctcgacagcttatgtaaag

SEQ ID NO: 5215 - protein, 75 aa, Glycine max
  misc_feature (1)..(75): Ceres Seq. ID no. 14307473
MSLHPEIVDGRPGTLVIESFVVDIPEGNTKDETCYFVEALIKCNLKSLADVSEGLTLQDHTEPIDRKYELLITRG

SEQ ID NO: 5216 - protein, 69 aa, Glycine max
  misc_feature (1)..(69): Ceres Seq. ID no. 14307474
MSESVQEKVTACYVLSVYRCWSKLVRKIVSIGQYSVVISGCSKFLANNRGFFLNEYYYIINNISTAYVK

SEQ ID NO: 5217 - protein, 57 aa, Glycine max
  misc_feature (1)..(57): Ceres Seq. ID no. 14307475
IERRIQTLEASFGRRRRRCRLRLGGEENDRVEQQRGGIHKETPQQGSRGQSVCLCSR

SEQ ID NO: 5218 - DNA, 1513 bp, Glycine max
  misc_feature (1)..(1513): Ceres Seq. ID no. 14307484
aagcactttcgttcccgatactcatactcggaacaccaactcccatcttcgccttcgggttagggttagggttagggaattagggcttcgaacttcgacgcaatgtcgtccattaacccctcacgagctaccgctccctccgccttcgccacgcgccggccgtgggaggagttcttcgcgctccactcgttcacgcgcccctacaccctcggcgagaccacgctccgcgtgaagcgcaacctcggccacttccgcgtgaactacgccatggtcgtgctcctcttcgtgttccttagcctcctctggttccctatctccctcgtcgtcttcctcgccgtcttcgccgcgtggttcttcctctactttttccgcgatggccccatcgtcgtgctccgccgcgagcttgacgaccgcctcgtcctcgcggcgctctccgccgtcaccgtcgccgggcttgtccttaccggcgtctggctcaacgttgtggtggcgttgctcttcgcggcggcggcggtggcgctgcatgcggcgcttcggaacaccgaggatttgtacgtggatgaattggaagtttctgatggaggtttggtttcggttgttggtggtagccctacgaaacgaacagggtacgctagaatatagtaatagttagttatgagatataactgattttcgttttcgtttaatcgttttttgtgttactcgcattgcatatatttgaagaaaatagaggttcgagttttaggttttggtttcgcggaaatatgaattgtgtccatatgatagatttacataccgtgttgttagcttggaattggaatagatttcttgcttgttgcttggccccttcttcttatgtttttagaatctcttgtaaattctaagataggttgaagcattcaatttgtgtatttagagttccaattcaatgtattgtctggcttgatatgctttggtatttgtaataggtttagcaatggtgggtaagatttgttttattttatatcaagtgtaaatgaagaggtaaccattttggttattcatttgtggtttcatatgcatttcagtttgctatcctactaccctctttttttttttagtagattaatatcatgatcaaattaagaacgttatataatataatgttgtgctttttggagtggcttgggttgctgttgtctgaatatctgattttgttgaattagacttgcttgtgttatgctactaagtgttgcagatccttttgtagcctgctgtgaatcaattactgagacttgtaactgtacaacatttgagagaattgaatagagaaccatggaatgccaattcatcattctcttatgtttagctgcaattagctgacacctaagttagttaatgttagctacctctttttagttagtcagttggccatttgggttgattgggatctgatctctcaaaacatgtgtataagaacagattgtaaaccacatgcaatcagactctgactattgaaactcttccctctttt

SEQ ID NO: 5219 - protein, 179 aa, Glycine max
  misc_feature (1)..(179): Ceres Seq. ID no. 14307485
MSSINPSRATAPSAFATRRPWEEFFALHSFTRPYTLGETTLRVKRNLGHFRVNYAMVVLLFVFLSLLWFPISLVVFLAVFAAWFFLYFFRDGPIVVLRRELDDRLVLAALSAVTVAGLVLTGVWLNVVVALLFAAAAVALHAALRNTEDLYVDELEVSDGGLVSVVGGSPTKRTGYARI

SEQ ID NO: 5220 - protein, 124 aa, Glycine max
  misc_feature (1)..(124): Ceres Seq. ID no. 14307486
MVVLLFVFLSLLWFPISLVVFLAVFAAWFFLYFFRDGPIVVLRRELDDRLVLAALSAVTVAGLVLTGVWLNVVVALLFAAAAVALHAALRNTEDLYVDELEVSDGGLVSVVGGSPTKRTGYARI

SEQ ID NO: 5221 - protein, 92 aa, Glycine max
  misc_feature (1)..(92): Ceres Seq. ID no. 14307487
MAPSSCSAASLTTASSSRRSPPSPSPGLSLPASGSTLWWRCSSRRRRWRCMRRFGTPRICTWMNWKFLMEVWFRLLVVALRNEQGTLEYSNS

SEQ ID NO: 5222 - DNA, 1824 bp, Glycine max
  misc_feature (1)..(1824): Ceres Seq. ID no. 14307488
gattctgtgccagcatcaaacgacaaggaaatggataggagagattccatctctttgtctagtacagttaaaggaaaagagccgagcattagagaccgtccagcctgtcccttttttattaaggatttaactaaatcaatagtttctgctggaaaatctttgcagctgatgcgacatgtacctgattgctcagtgaattgtagcaaaggaagcaattatgagattggaaataccaaatgtttaaactatggtttatatccttctcaaagaatgactgggttaacgttgcccgaagttttttctgtatcactagttggacttgttggccatggcgattatgtttgtaagtacttttggcaagacaactggtatgaatctgtatctgtttcatccaatgtatctcatgtaaatgaggaaaaagcagataatgacaatactgaaaaattaattgctccaccttactcagaaaagacatggtataagttcttgattgatacattatttcagaaaagatcagctgatttgaagctaaaatacaaagacataaataatgacacaagagagctgagaggggctagagttattgatgacgaagtgctcctcttgaggtcatacatagaaaatccagttattactgtatgtcaaaaaaacctaggaaagcatggggatgccctgaaaacattgagtttatctcgaaaatttagcttgccttcattaaatgatgagggtttaagaaaggctatatttggtggagaaagtgcagcattttctgatagtgaaggaacgaactatacttttggctttcactttggtgaatctgaataccttcgctcacaggatgacagaaagctgttagaaatgttgtttccttttcccactattttgccttcatttcaggatgatcttcctgtgtcagagctcttgccttttcagagaaacagcagtcttatttcaagagttcttcgttggatgcaaaatgttgacctaagaattactccacttcctctggttattatgcagtactgcctaaccgtctacattcagaaacaggtggattatattggagtgaatatgttgttaaagttgatgaacgaatggagattcatggatgagcttgcagtgttgcgagctatatacttgctaggttcaggtgatttgctgcaacactttttgactgtaattttcaataagttggataagggtgaagcatgggatgatgattttgagttaaacaccatattacaggtagatttacttgatgttgttcaactgttattttatgctatgctatttgctctggtagacttttttggttctactctatttagattccgtctaacttctgctgcaatttattcttcaagttagactaggaagttgcttctaaggtctaatttcttagattaaattatgtttaaatttattctatgatttgaggattaatggaatgggttatcatttaatgcttgatatatgacagttcgtaagatcttcggctaattctatccagagagtaaatttatatagtgtcataatgtgttagccaactagaaaggacctcagcacctgatgcgtacaaatagtactcgcacaagggaaaacataccctatgcagtagtagcagtggactaaaagtccagatatcgaacccaaaggaccagttggggagcaattaagatttaaattaattaaaggatagacgtgatcaattgtttattatgaagtaagaatcaaagcaggaaaatttagtgtgaaaacaataattatagtgcagcctagaattgtgacttttatgtaccatttttccccaatcgtaattccaac

SEQ ID NO: 5223 - protein, 455 aa, Glycine max
  misc_feature (1)..(455): Ceres Seq. ID no. 14307489
DSVPASNDKEMDRRDSISLSSTVKGKEPSIRDRPACPFFIKDLTKSIVSAGKSLQLMRHVPDCSVNCSKGSNYEIGNTKCLNYGLYPSQRMTGLTLPEVFSVSLVGLVGHGDYVCKYFWQDNWYESVSVSSNVSHVNEEKADNDNTEKLIAPPYSEKTWYKFLIDTLFQKRSADLKLKYKDINNDTRELRGARVIDDEVLLLRSYIENPVITVCQKNLGKHGDALKTLSLSRKFSLPSLNDEGLRKAIFGGESAAFSDSEGTNYTFGFHFGESEYLRSQDDRKLLEMLFPFPTILPSFQDDLPVSELLPFQRNSSLISRVLRWMQNVDLRITPLPLVIMQYCLTVYIQKQVDYIGVNMLLKLMNEWRFMDELAVLRAIYLLGSGDLLQHFLTVIFNKLDKGEAWDDDFELNTILQVDLLDVVQLLFYAMLFALVDFFGSTLFRFRLTSAAIYSSS

SEQ ID NO: 5224 - protein, 445 aa, Glycine max
  misc_feature (1)..(445): Ceres Seq. ID no. 14307490
MDRRDSISLSSTVKGKEPSIRDRPACPFFIKDLTKSIVSAGKSLQLMRHVPDCSVNCSKGSNYEIGNTKCLNYGLYPSQRMTGLTLPEVFSVSLVGLVGHGDYVCKYFWQDNWYESVSVSSNVSHVNEEKADNDNTEKLIAPPYSEKTWYKFLIDTLFQKRSADLKLKYKDINNDTRELRGARVIDDEVLLLRSYIENPVITVCQKNLGKHGDALKTLSLSRKFSLPSLNDEGLRKAIFGGESAAFSDSEGTNYTFGFHFGESEYLRSQDDRKLLEMLFPFPTILPSFQDDLPVSELLPFQRNSSLISRVLRWMQNVDLRITPLPLVIMQYCLTVYIQKQVDYIGVNMLLKLMNEWRFMDELAVLRAIYLLGSGDLLQHFLTVIFNKLDKGEAWDDDFELNTILQVDLLDVVQLLFYAMLFALVDFFGSTLFRFRLTSAAIYSSS

SEQ ID NO: 5225 - protein, 399 aa, Glycine max
  misc_feature (1)..(399): Ceres Seq. ID no. 14307491
MRHVPDCSVNCSKGSNYEIGNTKCLNYGLYPSQRMTGLTLPEVFSVSLVGLVGHGDYVCKYFWQDNWYESVSVSSNVSHVNEEKADNDNTEKLIAPPYSEKTWYKFLIDTLFQKRSADLKLKYKDINNDTRELRGARVIDDEVLLLRSYIENPVITVCQKNLGKHGDALKTLSLSRKFSLPSLNDEGLRKAIFGGESAAFSDSEGTNYTFGFHFGESEYLRSQDDRKLLEMLFPFPTILPSFQDDLPVSELLPFQRNSSLISRVLRWMQNVDLRITPLPLVIMQYCLTVYIQKQVDYIGVNMLLKLMNEWRFMDELAVLRAIYLLGSGDLLQHFLTVIFNKLDKGEAWDDDFELNTILQVDLLDVVQLLFYAMLFALVDFFGSTLFRFRLTSAAIYSSS

SEQ ID NO: 5226 - DNA, 1265 bp, Glycine max
  misc_feature (1)..(1265): Ceres Seq. ID no. 14307496
aatgaattctcgttaaaaatattaaccatgtaggaaaaataattgcttgatatggttattatttataatatattagtttaaataaccactcctagtggttattgtcccttgatggtaaatgtttttatcaagagttctgtttctgaaattctcccttttattatatggttctttttacagggttgcttgtgctataaattctgattaactgatccttgttaactcaatgctgtcatcattcatcaggaagatacacagacctttcacatagtttccttgtgctgtctgcttaagatatgacaaaatttcagtttcctattacagggctcgagtttggttgtaagctcttatgatggtgaagacatacttgtatcatttggaggatacaatggacattacaataatgaggtctatgtccttaaaccaagccacaaatcaaccttgcaatcaaaactaatagaaaaccccattccatacagtgtttctggtgcgcataatgccgcaaatgctacccgagatctggattctgaagcaggccacaaagggattatcaaggaacttgtcatggacagtgttgattcaataaaatcaaaaggtgatgttataacagttctaaaggtcgagaaagaagatttggaatcatcgctctacaaagagaagttgcaaactcttcaactaaagcaagagctttcagaaactaaaactcgtaactctgatctttgcaaggaactccaatcaatacgtggtcagcttgcttctgagcagtcaaggtgtttcaaacttgaggtggaggttgctgaattaagtcagaagctccagacaattgggacactacagaaggaacttgagctcctgcagcggcaaaaagctgcatccgagctggctgccctgaatgcaaagcaaaagcagggttcaggtggtgtatggggttggcttgctggtgctcctccccctacccagaaagaagatgatgggtgatcgcgtgattaaactaactggattaccatgctgcatttagtttcattagcccatttttacatccaatacacttattttttttattcaattctttttttggtgaagggaataaaatttagctttctgtttaggaaaaaccccccgtaggggtcttgcaattgcagtaatacatatttcacatattctgtaattttatttacttgttcaggacagtgcatgttgttgttcccgccaatttgctgatttgtttcgaatccactattgaatgaaaagataagtattcttcc

SEQ ID NO: 5227 - protein, 137 aa, Glycine max
  misc_feature (1)..(137): Ceres Seq. ID no. 14307497
MDSVDSIKSKGDVITVLKVEKEDLESSLYKEKLQTLQLKQELSETKTRNSDLCKELQSIRGQLASEQSRCFKLEVEVAELSQKLQTIGTLQKELELLQRQKAASELAALNAKQKQGSGGVWGWLAGAPPPTQKEDDG

SEQ ID NO: 5228 - DNA, 1243 bp, Glycine max
  misc_feature (1)..(1243): Ceres Seq. ID no. 14307530
atccaacctcttaacaattcgcatggtttcgtacccacacaactgaactcacacaaacttctccaccacaccgacaacctcgccggaaaattcctcgccgtttccggttaccggcgatggcctcggcgacgtcgtttttgggcctcggtcttcgcccctccgtcccaatttgcgccaacagaaacaacggcattcgattctctcagtttcaagtctcctttggctttcgtgagaactccacttccctcaagactttgaattcaacaccgttgaagaaaagagaagctttctcaaatgggtcttcgagaacgcgaagaaacccgttgttctctgttcgctgcacagtttcatcaagtggaaagattacacaacaggaattcacggaaatggcatggcaagcaattatctcggcaccagaagtggctaaggagaacaagcatcagattgtggagactgagcacttgatgaaagcattgttggagcaaaagaatggacttgctcgccggatcttttctaaggttggggtagataatactcggcttctagaggccactgataagcacattcagcggcaacccaaggttgtaggggaatctgctggttcaatgctagggcgtgatttggaggcattgattcagagagccagggacttcaagaaagaatatggggactcatttgtgtcggttgagcactttgttcttggttttgcccaagataaacgatttgggaagatattgtttagagattttcaaatatctcagcaagctctaaaatctgccatagaatccataaggggacgccagtcagttattgaccaagatcctgaaggaaagtatgaagccttggaaaagtatgggaaagatttgacggcaatggctaaagcaggaaaacttgacccagtcataggaagagatgatgaaatacgcaggtgcattcagattctctccaggaggacaaagaacaatcctgttctaattggggagcctggtgttggaaagactgcaatctctgaagggctgctactgttatctgtttcctgaatttcatgtgtgacctgtttcatacatacaagaatggcacctgtgatggtgtgaaacaaaatataaaaattatttgaacacgacagttcaattttttgttaatatttttaagaaacaaatgatagttgtttcaaatattacattctgtatgaaagtataatatgtcaaaatagaaattccataaaagtaggaagtaagtttag

SEQ ID NO: 5229 - protein, 307 aa, Glycine max
  misc_feature (1)..(307): Ceres Seq. ID no. 14307531
MASATSFLGLGLRPSVPICANRNNGIRFSQFQVSFGFRENSTSLKTLNSTPLKKREAFSNGSSRTRRNPLFSVRCTVSSSGKITQQEFTEMAWQAIISAPEVAKENKHQIVETEHLMKALLEQKNGLARRIFSKVGVDNTRLLEATDKHIQRQPKVVGESAGSMLGRDLEALIQRARDFKKEYGDSFVSVEHFVLGFAQDKRFGKILFRDFQISQQALKSAIESIRGRQSVIDQDPEGKYEALEKYGKDLTAMAKAGKLDPVIGRDDEIRRCIQILSRRTKNNPVLIGEPGVGKTAISEGLLLLSVS

SEQ ID NO: 5230 - protein, 217 aa, Glycine max
  misc_feature (1)..(217): Ceres Seq. ID no. 14307532
MAWQAIISAPEVAKENKHQIVETEHLMKALLEQKNGLARRIFSKVGVDNTRLLEATDKHIQRQPKVVGESAGSMLGRDLEALIQRARDFKKEYGDSFVSVEHFVLGFAQDKRFGKILFRDFQISQQALKSAIESIRGRQSVIDQDPEGKYEALEKYGKDLTAMAKAGKLDPVIGRDDEIRRCIQILSRRTKNNPVLIGEPGVGKTAISEGLLLLSVS

SEQ ID NO: 5231 - protein, 191 aa, Glycine max
  misc_feature (1)..(191): Ceres Seq. ID no. 14307533
MKALLEQKNGLARRIFSKVGVDNTRLLEATDKHIQRQPKVVGESAGSMLGRDLEALIQRARDFKKEYGDSFVSVEHFVLGFAQDKRFGKILFRDFQISQQALKSAIESIRGRQSVIDQDPEGKYEALEKYGKDLTAMAKAGKLDPVIGRDDEIRRCIQILSRRTKNNPVLIGEPGVGKTAISEGLLLLSVS

SEQ ID NO: 5232 - DNA, 1700 bp, Glycine max
  misc_feature (1)..(1700): Ceres Seq. ID no. 14307534
aaaaccctgctagtgttgttccgttgagataaacataaacctgagtgagtgaggctaagggagaaagctagaactaaaaatgtcatcagcttctaagctcacactgtacggaatcggaaccgcactgttccgcacccgtcgaactgcacctgtaagtgtaactccctttctcttcttcaaacccattcccttacctcggccgccgcgcttcctcctcctccgcgattcctcttcctcctccgccgccgccgcagaaatcctaccctccgttgaccacccctggccggaatgggtctccttcgtcgaccgcttgagcaccaaaggctacctccccaaaccctcctcttcttccgatgacaccgtaagcctttacaccaacatgaactctctcaaggacgcttgtctcagcttctcgcgtgaccgttacgaccttttcaagttgctgcctacgcacgatatccaagcagtagttgagggtgggtgccctaatcttctccgtaaagctgttaattcggccaagagactgagagcacacctgcaattagatgaaggggatgtttgtggtgcttgcaatctacgaagctcttgtgatagagcttatgtgattctaaaggattttgaaactgatgctcgaactattgatatagttcgaatacttttgttctacgcactagatccactagtgctttctagtggagacaaaccaccaggccgagaagttattgaatcatccgccagaaaacttctctctcagctaattgagttgagtgagtcccctgctccagcccctgcttctgctcgttcaaagcctactgcacaggatgctgtgggagaaggccaatctctaagtgttacgactaatcaattgtttaaagatgctgagatgaagaaaggtgactggatgtgtccaaaatgcaatttcatgaacttttctagaaatacgcaatgcctgaattgtaacgaagacaagcctaaggatattaacccatctactgttcaaatgaagccaggagattggacctgtcctgaatgcaattttttaaattttgccagaaacacacgatgtctaaaatgcaaaacagcggggccgacaaaggaagccaatactaatgaagttgaaaggaaaaaaggagattggacttgcccacaatgtgggttcatgaattatgctaggaacacgaaatgtttgcgttgtcctgagacaaggcctaagaaacatcctggtgactggaattgtcccgggtgtgggttcatgaattttggtagtaaaatgaagtgcttgcactgtcaagagccaaacccaagttccaagaaatataacggggattggagttgtcccaaatgtgatttctacaattatgcaagaaatatggcttgcctgaagtgcaatactgaacgccctaaagaacaaccaaccgttgactatgatggccatgaatggagacgatcaaattgattaaaaaaaaaccgccatcgagggaggtcacaattttggtcttggctgtaacaaatattttgattgcatatgaattaattctccaattaatggtgctgagtgcttcttaacttaattagagatactttaaagttatttgattgcatatgaatttgtgttttaatttaatcatgtacagatctaaaagcaaatttacagagattgaatcttgtgaatgttatagctttattttgcttctgattcc

SEQ ID NO: 5233 - protein, 458 aa, Glycine max
  misc_feature (1)..(458): Ceres Seq. ID no. 14307535
MSSASKLTLYGIGTALFRTRRTAPVSVTPFLFFKPIPLPRPPRFLLLRDSSSSSAAAAEILPSVDHPWPEWVSFVDRLSTKGYLPKPSSSSDDTVSLYTNMNSLKDACLSFSRDRYDLFKLLPTHDIQAVVEGGCPNLLRKAVNSAKRLRAHLQLDEGDVCGACNLRSSCDRAYVILKDFETDARTIDIVRILLFYALDPLVLSSGDKPPGREVIESSARKLLSQLIELSESPAPAPASARSKPTAQDAVGEGQSLSVTTNQLFKDAEMKKGDWMCPKCNFMNFSRNTQCLNCNEDKPKDINPSTVQMKPGDWTCPECNFLNFARNTRCLKCKTAGPTKEANTNEVERKKGDWTCPQCGFMNYARNTKCLRCPETRPKKHPGDWNCPGCGFMNFGSKMKCLHCQEPNPSSKKYNGDWSCPKCDFYNYARNMACLKCNTERPKEQPTVDYDGHEWRRSN

SEQ ID NO: 5234 - protein, 358 aa, Glycine max
  misc_feature (1)..(358): Ceres Seq. ID no. 14307536
MNSLKDACLSFSRDRYDLFKLLPTHDIQAVVEGGCPNLLRKAVNSAKRLRAHLQLDEGDVCGACNLRSSCDRAYVILKDFETDARTIDIVRILLFYALDPLVLSSGDKPPGREVIESSARKLLSQLIELSESPAPAPASARSKPTAQDAVGEGQSLSVTTNQLFKDAEMKKGDWMCPKCNFMNFSRNTQCLNCNEDKPKDINPSTVQMKPGDWTCPECNFLNFARNTRCLKCKTAGPTKEANTNEVERKKGDWTCPQCGFMNYARNTKCLRCPETRPKKHPGDWNCPGCGFMNFGSKMKCLHCQEPNPSSKKYNGDWSCPKCDFYNYARNMACLKCNTERPKEQPTVDYDGHEWRRSN

SEQ ID NO: 5235 - DNA, 1686 bp, Glycine max
  misc_feature (1)..(1686): Ceres Seq. ID no. 14307548
ctggtagtgtgctccgttgagataaacctgagtgagagtgaggcgaagggggagaaagctaaaactaaaaaatgtcatcttctaagctcacactgtacggaatcggaaccgcactcttccgcacccgtagaactgcacccgtaactgtaactccccactctccctttctcttcttcaaacccattcccttcccgccgtgcttcctccgcccggattcctcttcctcctcctccttctccgcagctgcagccgccgcagaaaccctaccctccgtcgaccacccctggccggaatgggtctccttcgtcgaccgcttgaacaccaaaggctacctccccaaaacctcctcttccgacgacaccgtaagcctttacgccaacatgaactctctcaaggacgcttgtctcagcttcgcgcgtgaccgttacgaccttttcaatttgctgcctacaaatgatatccaagcagtggttgagggtgggtgccctaatcttctccgtaaagctgttaattcagctaagaggctgagagcacacctgcaattagatgaaggggatgattttgaaactgatgcccgaactgttgatatagttcgaatacttttgttctacgcactagatccacttgtgctttctggaggagacaaaccaccgggccgggaagttattgaatcatctgtcagaaaacttctctctcagctaattgagttgagtgagtcccctgctcctgcccctgctcctgctcgttcaaagcctactgcacaggatggtgtggtagaaggccaatctctaagtgttacgactaatcaattgtttaaagatgttgagatgaagaaaggtgactggatgtgtccaaaatgcaatttcatgaacttttctagaaatacacaatgcctgaattgtaaggaagacaagcctaaggatattaacccgtttactgttcaaatgaagccaggagattggacctgtcctgaatgcaattatttaaattttgccagaaacagactatgtctagaatgcaaaatagaggggccggcgaaggaagctaataccattgaagttgaaaggaaaaaaggagattggacttgcccacaatgtgggttcatgaattatgctaggaacacgaaatgtttgcgttgtcctgagacaaggcctaagaaacatcctggggactggaattgtcccgggtgtgggttcatgaattttgctagtaaaatgaagtgtttgcattgtcaagagccaaacccaagttccaagaaatatagtggggattggagttgccccaaatgcgatttctacaattatgcaagaaatatggcttgcctgaagtgcaatgctgaacgccctaaagaacaaccaaccgttgactatgaggaccatgaatggagacgatcaaactgattaggggaaaaaacgccatcgggctatatcatatagggaggtcacaattgtgctggtgggctgtaacaaatattttgttattgatgcattctctgcccatttttctttctcaatcttccaattaatggtgctaagtgcttcttcacttattggaaatggtacaaaaacgataattagagatactttaaagttatttgattgcatatgaatgtgttttaatataatcatgtacagatctaaaagtaaatttacagagattgaatcttgtgaatgttgttatagcttt

SEQ ID NO: 5236 - protein, 442 aa, Glycine max
  misc_feature (1)..(442): Ceres Seq. ID no. 14307549
MSSSKLTLYGIGTALFRTRRTAPVTVTPHSPFLFFKPIPFPPCFLRPDSSSSSSFSAAAAAAETLPSVDHPWPEWVSFVDRLNTKGYLPKTSSSDDTVSLYANMNSLKDACLSFARDRYDLFNLLPTNDIQAVVEGGCPNLLRKAVNSAKRLRAHLQLDEGDDFETDARTVDIVRILLFYALDPLVLSGGDKPPGREVIESSVRKLLSQLIELSESPAPAPAPARSKPTAQDGVVEGQSLSVTTNQLFKDVEMKKGDWMCPKCNFMNFSRNTQCLNCKEDKPKDINPFTVQMKPGDWTCPECNYLNFARNRLCLECKIEGPAKEANTIEVERKKGDWTCPQCGFMNYARNTKCLRCPETRPKKHPGDWNCPGCGFMNFASKMKCLHCQEPNPSSKKYSGDWSCPKCDFYNYARNMACLKCNAERPKEQPTVDYEDHEWRRSN

SEQ ID NO: 5237 - protein, 339 aa, Glycine max
  misc_feature (1)..(339): Ceres Seq. ID no. 14307550
MNSLKDACLSFARDRYDLFNLLPTNDIQAVVEGGCPNLLRKAVNSAKRLRAHLQLDEGDDFETDARTVDIVRILLFYALDPLVLSGGDKPPGREVIESSVRKLLSQLIELSESPAPAPAPARSKPTAQDGVVEGQSLSVTTNQLFKDVEMKKGDWMCPKCNFMNFSRNTQCLNCKEDKPKDINPFTVQMKPGDWTCPECNYLNFARNRLCLECKIEGPAKEANTIEVERKKGDWTCPQCGFMNYARNTKCLRCPETRPKKHPGDWNCPGCGFMNFASKMKCLHCQEPNPSSKKYSGDWSCPKCDFYNYARNMACLKCNAERPKEQPTVDYEDHEWRRSN

SEQ ID NO: 5238 - DNA, 1214 bp, Glycine max
  misc_feature (1)..(1214): Ceres Seq. ID no. 14307639
aaaaaatcatcaaagctcaaacccccctctctctactcaaactaaccactctgtttctcttgctctacttttaccctgtttccagtggaacaaatcttcatccaaattaggttttgttttggagaaatgtatgcagagactggtcttttcttcccatatttgcacaacgtctctcacggccttcatcagcttgaggagtactgcaaaacccagaagtccaatgcttcaatggatgaccttgttcagtcttctgccatgtcagagtatgatttggcagctgagggagatctgttcaaagctcctgaacctattattgaagagccaatcatggacatgtcagcggccatctcaatgatgtcttgtggggaagatgtctcgtcacagggactaaagtccactgatattgatattcttcaaaatgatcagtttctgagtgaggtgttctatgaatgtgaaaaggatctcttagaaaaggcagcaatagagtcaccattctctgagattctggaaatcaaggttccttttctgaacattgatgagaacacaattcaagaaaacaagccatttactgacatgcaattagcaaagagtgtcagctcaggaagtttgagctcaatggactggatgcgtggagctgcaatgaagcctgctttcattgatatctctgcaatagatttcaatgcagattatggcatgcggagatcatttagtgaaggagatataaagactcttggtaatggtaacatgaacatcgtccaatcaccccttgagaggccccttcttatcagcaactgcaccagtgaggaacgcttccaaaagctctccagatacaggaataagaagacaaagaggaattttgggaggaaaatcaagtatgcttgcaggaaggcacttgctgacagtcagccaagaatccgtggaagatttgcaaggactgaagaatctgatgtcaagagggaatgaatgacttaaaactgatttagtaggaagaaaatagagttgagtagctatatctgatcaagctatatggaaaaactcagcagtaatatgtgattagaacttatgtggggagtctctgtttgtttgagcagatatttgctgaataaaccaggcctcaaacttcttaggctagttcatctcttatctattgtattaacgtctctatagacggaaataaccttccagatatgtaaatagttttgttgaataatgga

SEQ ID NO: 5239 - protein, 278 aa, Glycine max
  misc_feature (1)..(278): Ceres Seq. ID no. 14307640
MYAETGLFFPYLHNVSHGLHQLEEYCKTQKSNASMDDLVQSSAMSEYDLAAEGDLFKAPEPIIEEPIMDMSAAISMMSCGEDVSSQGLKSTDIDILQNDQFLSEVFYECEKDLLEKAAIESPFSEILEIKVPFLNIDENTIQENKPFTDMQLAKSVSSGSLSSMDWMRGAAMKPAFIDISAIDFNADYGMRRSFSEGDIKTLGNGNMNIVQSPLERPLLISNCTSEERFQKLSRYRNKKTKRNFGRKIKYACRKALADSQPRIRGRFARTEESDVKRE

SEQ ID NO: 5240 - protein, 244 aa, Glycine max
  misc_feature (1)..(244): Ceres Seq. ID no. 14307641
MDDLVQSSAMSEYDLAAEGDLFKAPEPIIEEPIMDMSAAISMMSCGEDVSSQGLKSTDIDILQNDQFLSEVFYECEKDLLEKAAIESPFSEILEIKVPFLNIDENTIQENKPFTDMQLAKSVSSGSLSSMDWMRGAAMKPAFIDISAIDFNADYGMRRSFSEGDIKTLGNGNMNIVQSPLERPLLISNCTSEERFQKLSRYRNKKTKRNFGRKIKYACRKALADSQPRIRGRFARTEESDVKRE

SEQ ID NO: 5241 - protein, 235 aa, Glycine max
  misc_feature (1)..(235): Ceres Seq. ID no. 14307642
MSEYDLAAEGDLFKAPEPIIEEPIMDMSAAISMMSCGEDVSSQGLKSTDIDILQNDQFLSEVFYECEKDLLEKAAIESPFSEILEIKVPFLNIDENTIQENKPFTDMQLAKSVSSGSLSSMDWMRGAAMKPAFIDISAIDFNADYGMRRSFSEGDIKTLGNGNMNIVQSPLERPLLISNCTSEERFQKLSRYRNKKTKRNFGRKIKYACRKALADSQPRIRGRFARTEESDVKRE

SEQ ID NO: 5242 - DNA, 1014 bp, Glycine max
  misc_feature (1)..(1014): Ceres Seq. ID no. 14307654
gcatcgcagtgtatctgagtaatatcactgtccctttccctctccctttcatcagaaacacaaacaaaacaccgattcgctatattaccagatcggactcaattcctgaaccgatgaagttgaagccgcagtgaaccaaaccatcatcatcgcgttaccggaataatcgacccatcatcaattagatcgaaatgaaggatgaggacgggcttccgacgacgaccgcggttacaaagaaggaaaacttggattcgagtctgtttggaaaaggcaggtacaaattctgggcgttagcggccatcttgcttctggcgttctggtccatgttcaccggtaccgtctcgctccgctggtccggcactctcaattccctttccaacgacatcgacactcccatccacgacgacctagatgttcttgaaatggaggagagggagaaggttgtgaggcacatgtgggatgtgtacaccaacagtcgcagtgtgaggttgccgcggttctggcaagaggccttcgaggctgcctatgaggatttgacgagcgatgtcgctgaggtcagagacgctgccgtcgccgagatcgccaagatgtctgttcgctccattcattttgatccacctcctcttcaatccacgagtgcccgagaattcagcaagagccttaagcaagccgagaaaggaaaagatgcaacaacctcaaggcgtgcttaaaggttagtgtgtggagcattcaagcgtctgcggtgtacttgaaaaatgctcgagtggtaccggaagattgtgaagagatagtaatggacgaactcatactcggatttcatgtttccatcacagggataatgatgtattttaataggctgtggttcttgcaaattttgcagtcaaaattcgtagtcttcacgaagtgaggagtagtaaatcgaaacacgaacttttgaacagacaaattcaattgagcatgttctgtttagctttattccacaacatctaaattataaaactctcatgtttctac

SEQ ID NO: 5243 - protein, 172 aa, Glycine max
  misc_feature (1)..(172): Ceres Seq. ID no. 14307655
MKDEDGLPTTTAVTKKENLDSSLFGKGRYKFWALAAILLLAFWSMFTGTVSLRWSGTLNSLSNDIDTPIHDDLDVLEMEEREKVVRHMWDVYTNSRSVRLPRFWQEAFEAAYEDLTSDVAEVRDAAVAEIAKMSVRSIHFDPPPLQSTSAREFSKSLKQAEKGKDATTSRRA

SEQ ID NO: 5244 - protein, 128 aa, Glycine max
  misc_feature (1)..(128): Ceres Seq. ID no. 14307656
MFTGTVSLRWSGTLNSLSNDIDTPIHDDLDVLEMEEREKVVRHMWDVYTNSRSVRLPRFWQEAFEAAYEDLTSDVAEVRDAAVAEIAKMSVRSIHFDPPPLQSTSAREFSKSLKQAEKGKDATTSRRA

SEQ ID NO: 5245 - protein, 95 aa, Glycine max
  misc_feature (1)..(95): Ceres Seq. ID no. 14307657
MEEREKVVRHMWDVYTNSRSVRLPRFWQEAFEAAYEDLTSDVAEVRDAAVAEIAKMSVRSIHFDPPPLQSTSAREFSKSLKQAEKGKDATTSRRA

SEQ ID NO: 5246 - DNA, 1515 bp, Glycine max
  misc_feature (1)..(1515): Ceres Seq. ID no. 14307678
tttcttctgtagatccatctatctagcttcggagctgcaaatggacgtcgcagtcactgccttccggtcaccgctgatcatcctccgaagaccggtcaacgagtctgcctcagctcggttcggttccacttttgggttttccagaaagcagcaacggttcagttcagtatgtatccccaaacacaagcacaagcaaggtcgtagaagagggtttgtagttagagcttctgcatcctcatctccggagtcggatgatgccaagattgctcctcttcagtttgaatcctcaattgggcagttcctttctcagattttgaaagatcatccgcatcttgtgcctgctgccgttgaccagcagctccagcaactccaaactgaccgcgatgctcatcaacaaaacgaacaaccttctgcttcaaccactgatttagttttgtacaggagaattgctgaggtgaaggctaatgaaaggaggaaagctctggaagagatcttgtatgcattggtagtgcagaagttcatggatgctaatatttctttgataccctctgtaaccccagatctttctggtaaggttgatttgtggccaaatgaagatggtaaacttgagctgcttcactcacacgaagcatatgagatgattcaaaaccacctggctctcattctcggtaacagagctggagatttaacatcaatagctgaaatcagcaaattcagggtagggcaggtctacgcagcatcagtgatgtatggttattttcttagacgagttgaccaaaggttccagttggagaagacaatgaaagttcttccaaatgcaacagaaaaagagaatagtgctcatcaaactacaatggacaatgcaagacccagtattgaagaggacacttctcaagtgatgtctcatcctgaagtatctacctggcctggtggtgatgtccgtcccggtggatttggctatggtgtaaaggcaaccaggttgcgtaactacgtgatgtcctttgatggtgatacactacaaagatatgcaacaattagatccaaagaggctgtcagcatcatcgagaagcacacagaagcattgtttggaagacctgaaattgttgtaacacctgagggggcagtctctaaggatgaaaacatcaaaattagctttggtggtttaaagaagcttgttttagaggctgtgacatttggttcttttctctgggatgttgagagctatgtggactcaaggtaccattttgtgttgaactgagtaaatctttatatgtgtacccttttagatcccaccaggtgggagggaacctcgtgcattcagttgtccttttgagttctgtttgctctcatacatcacaaggcatagtttatagtgtgttggtactgactgatggagtaaatttgaatgtaacttcggtgttaaaagtccaaatattgtttcactaattaatatgtatatactgtagtggtagtggctctggatttcactaataaagggaagcttattttctagtt

SEQ ID NO: 5247 - protein, 418 aa, Glycine max
  misc_feature (1)..(418): Ceres Seq. ID no. 14307679
FFCRSIYLASELQMDVAVTAFRSPLIILRRPVNESASARFGSTFGFSRKQQRFSSVCIPKHKHKQGRRRGFVVRASASSSPESDDAKIAPLQFESSIGQFLSQILKDHPHLVPAAVDQQLQQLQTDRDAHQQNEQPSASTTDLVLYRRIAEVKANERRKALEEILYALVVQKFMDANISLIPSVTPDLSGKVDLWPNEDGKLELLHSHEAYEMIQNHLALILGNRAGDLTSIAEISKFRVGQVYAASVMYGYFLRRVDQRFQLEKTMKVLPNATEKENSAHQTTMDNARPSIEEDTSQVMSHPEVSTWPGGDVRPGGFGYGVKATRLRNYVMSFDGDTLQRYATIRSKEAVSIIEKHTEALFGRPEIVVTPEGAVSKDENIKISFGGLKKLVLEAVTFGSFLWDVESYVDSRYHFVLN

SEQ ID NO: 5248 - protein, 405 aa, Glycine max
  misc_feature (1)..(405): Ceres Seq. ID no. 14307680
MDVAVTAFRSPLIILRRPVNESASARFGSTFGFSRKQQRFSSVCIPKHKHKQGRRRGFVVRASASSSPESDDAKIAPLQFESSIGQFLSQILKDHPHLVPAAVDQQLQQLQTDRDAHQQNEQPSASTTDLVLYRRIAEVKANERRKALEEILYALVVQKFMDANISLIPSVTPDLSGKVDLWPNEDGKLELLHSHEAYEMIQNHLALILGNRAGDLTSIAEISKFRVGQVYAASVMYGYFLRRVDQRFQLEKTMKVLPNATEKENSAHQTTMDNARPSIEEDTSQVMSHPEVSTWPGGDVRPGGFGYGVKATRLRNYVMSFDGDTLQRYATIRSKEAVSIIEKHTEALFGRPEIVVTPEGAVSKDENIKISFGGLKKLVLEAVTFGSFLWDVESYVDSRYHFVLN

SEQ ID NO: 5249 - protein, 245 aa, Glycine max
  misc_feature (1)..(245): Ceres Seq. ID no. 14307681
MDANISLIPSVTPDLSGKVDLWPNEDGKLELLHSHEAYEMIQNHLALILGNRAGDLTSIAEISKFRVGQVYAASVMYGYFLRRVDQRFQLEKTMKVLPNATEKENSAHQTTMDNARPSIEEDTSQVMSHPEVSTWPGGDVRPGGFGYGVKATRLRNYVMSFDGDTLQRYATIRSKEAVSIIEKHTEALFGRPEIVVTPEGAVSKDENIKISFGGLKKLVLEAVTFGSFLWDVESYVDSRYHFVLN

SEQ ID NO: 5250 - DNA, 2528 bp, Glycine max
  misc_feature (1)..(2528): Ceres Seq. ID no. 14307690
gcgagtttcttcttctgaaccgctttcctgcattttcgccaaactccttctcacaagttatttattactttgaactccataaatagcccccggtttctgctcgaacaaccgttacaagaaatagaattaactattgctttttattctttcctttagtttttgaattttgataatttcattgtgactgaatggatataatttgataatttttcgcagatcgagctttgagcatttgaggcatttcactgataactgatacagattaccgaggacattttgtttttcgttgttggttgtgcttattgtttttggttggatttgatttgagttatttgtcaaaatacgtataactcataataagcatggcaagcactatgcaactaagttgggttagtaagagcacggtccccgtggctttgagtagaagagtgtgttgtcaatgtcaaccacccctgtggctgccatggcgaattgggtttgttactcccgttccccttgtgaggagagtttcgagtgagagggtggcggcactcagggttagttgcagcaaggaaactgaaagtgatgtggttgagggtgaaagtgggggctttgcggaaactgaaatgagttacacatgtgtcatgaagtttggtggctcctcggttgccaatgctgaaagaatgagagaggttgccaaccttattctgagcttcccggaagagaggccaataattgttctctctgccatgggaaagacaactaacatgcttttgctggctggagaaaaagctgtaagctgtggagtaactaatgctgatagtattgatgagctcaacataataaaagatcttcatctcaggactgtggaacagcttggagtggacagaaatgttattgagaagcatctagaagaattggagcaacttctaaaggggatagctatgatgaaagagttgactccacggactcaagattatttagtttcatttggagagtgcatgtccactaggatatttgctgcatatcttaatacattaggagttaaggcccgccaatatgatgcatttgagatgggtattataacaactgatgacttcacaaatgctgacattttggaagcaacatatcctgctgttgcaaagaggttacatagtgattgggtttctgatcctgctattccaattgttacaggcttccttggaaaggcacgaaaatcatgtgcggtgacaacattgggtagaggtggaagtgatttaactgctacaacaattgggaaagcgctagggttgccagaaatccaggtatggaaagatgttgatggtgttctaacctgtgatccaaatatatgcccacaagcaaaacctgttccatatttgacatttgatgaggctgctgaacttgcatactttggtgctcaggtcctccatccacagtctatgagaccggctagggaaagtgatattcctgttagggttaaaaattcatacaaccctaaagctccaggtactctgattgctaagacaagggatatgagcaaggcattattaacaagcattgttttgaaacgtaatgtgaccatgttagatattgtaagcactcgcatgcttggtcagtttgggttccttgctaaggtattttcaatattcgaagagttaggcatatcagttgatgttgtagctacaagtgaagttagtatttccttgacattggatccatcaaagctatggagcagagagctaattcaacaggaacttgactatgttgtcgaagaactggaaaaaattgctgtggtaaatctcttaaagaccagatccataatctctctcattggaaatgttcagaagtcatcactaatattggagaaggttttgtgttatattatctccctttgaatattattctgagaaatattattaaaaagttctattttgatgctttgatgttctgtccctatcttggagcatggtcaaaattgcatattgcaataagttcctgggcttgtttgatgcacttttttggactaagttgattctcatcaacttgcgttcttctgtaataagctaatgttttgctcttttattgactttaaaatttactgattagccttttgttgcaggcctttcatgttcttcgaactcttgggatcactgttcaaatgatctctcagggtgcatctaaggtgaatatctcgttagttataaatgacagtgaagcagaccagtgtgtcagggctctccacaaagccttctttgagagcgaactctctgaattagagaatgaatgcatacctagaaatggttcggttcctgcattatcttagcggtatacttttgttttgccaatatagcagattaatatcttatcttataggttaagaaattttttggctaggaggaataacgatatattagtacagtatttattagtatgttattgacagagtaaacctttgtatattctggtcgcctcctctataagggggtttgaccaggtgcaagcagttatttatattttattgtgagtttgaataatcttcttaaaaaaag

SEQ ID NO: 5251 - protein, 503 aa, Glycine max
  misc_feature (1)..(503): Ceres Seq. ID no. 14307691
MASTMQLSWVSKSTVPVALSRRVCCQCQPPLWLPWRIGFVTPVPLVRRVSSERVAALRVSCSKETESDVVEGESGGFAETEMSYTCVMKFGGSSVANAERMREVANLILSFPEERPIIVLSAMGKTTNMLLLAGEKAVSCGVTNADSIDELNIIKDLHLRTVEQLGVDRNVIEKHLEELEQLLKGIAMMKELTPRTQDYLVSFGECMSTRIFAAYLNTLGVKARQYDAFEMGIITTDDFTNADILEATYPAVAKRLHSDWVSDPAIPIVTGFLGKARKSCAVTTLGRGGSDLTATTIGKALGLPEIQVWKDVDGVLTCDPNICPQAKPVPYLTFDEAAELAYFGAQVLHPQSMRPARESDIPVRVKNSYNPKAPGTLIAKTRDMSKALLTSIVLKRNVTMLDIVSTRMLGQFGFLAKVFSIFEELGISVDVVATSEVSISLTLDPSKLWSRELIQQELDYVVEELEKIAVVNLLKTRSIISLIGNVQKSSLILEKVLCYIISL

SEQ ID NO: 5252 - protein, 499 aa, Glycine max
  misc_feature (1)..(499): Ceres Seq. ID no. 14307692
MQLSWVSKSTVPVALSRRVCCQCQPPLWLPWRIGFVTPVPLVRRVSSERVAALRVSCSKETESDVVEGESGGFAETEMSYTCVMKFGGSSVANAERMREVANLILSFPEERPIIVLSAMGKTTNMLLLAGEKAVSCGVTNADSIDELNIIKDLHLRTVEQLGVDRNVIEKHLEELEQLLKGIAMMKELTPRTQDYLVSFGECMSTRIFAAYLNTLGVKARQYDAFEMGIITTDDFTNADILEATYPAVAKRLHSDWVSDPAIPIVTGFLGKARKSCAVTTLGRGGSDLTATTIGKALGLPEIQVWKDVDGVLTCDPNICPQAKPVPYLTFDEAAELAYFGAQVLHPQSMRPARESDIPVRVKNSYNPKAPGTLIAKTRDMSKALLTSIVLKRNVTMLDIVSTRMLGQFGFLAKVFSIFEELGISVDVVATSEVSISLTLDPSKLWSRELIQQELDYVVEELEKIAVVNLLKTRSIISLIGNVQKSSLILEKVLCYIISL

SEQ ID NO: 5253 - protein, 422 aa, Glycine max
  misc_feature (1)..(422): Ceres Seq. ID no. 14307693
MSYTCVMKFGGSSVANAERMREVANLILSFPEERPIIVLSAMGKTTNMLLLAGEKAVSCGVTNADSIDELNIIKDLHLRTVEQLGVDRNVIEKHLEELEQLLKGIAMMKELTPRTQDYLVSFGECMSTRIFAAYLNTLGVKARQYDAFEMGIITTDDFTNADILEATYPAVAKRLHSDWVSDPAIPIVTGFLGKARKSCAVTTLGRGGSDLTATTIGKALGLPEIQVWKDVDGVLTCDPNICPQAKPVPYLTFDEAAELAYFGAQVLHPQSMRPARESDIPVRVKNSYNPKAPGTLIAKTRDMSKALLTSIVLKRNVTMLDIVSTRMLGQFGFLAKVFSIFEELGISVDVVATSEVSISLTLDPSKLWSRELIQQELDYVVEELEKIAVVNLLKTRSIISLIGNVQKSSLILEKVLCYIISL

SEQ ID NO: 5254 - DNA, 1159 bp, Glycine max
  misc_feature (1)..(1159): Ceres Seq. ID no. 14307698
agtcacacaagaagcccaacaagccagatcagaattccatgaaagcaagaggcagaagctggagcgacagccgtggtgccgtggaagtggcgagtcatggaggcagagttggtcagtgcaaagttgtgcgaagcgaagccaggctacgcagacaagcaggccgagggcgaaggcggtcgggtgccacagatggaggcgctgggacagggtggtgaggtgaagaggacggggtcgagagcagctacagtgcgtgcatctgtcccctcctttgttttttcaccaagcctacctaaaatctatcaaattattcagggtaagatagccgaatacatctacctctggttaattttattttttttttaacatgcaagtactttattcagctgattgggtcttcttttacttccgttcctcaattgtattcattggctgatcgccatgcatctagaaggtgatgtcctgaagcatctatcaacatggattatagaccgaattatcaacaagtatggtgttagccagtgttaccgtgctctaaaactatgcaatagtgatctcaaagaaccataaatatccaacatagtggtggactttggcattttgtgtttctgttatgactttcctttgaatattttgttaattttctaattaatctttccttaccagcactgtcagagtgtgattcattatagaaaatttgattgaagatctcaatgatggcaattctttacatatgtatagttgttcagctcctgctttctgaaactatacaggaaatttgattgaagatatgattgatggcgattctagaaaagtgtttgctccatcagattcacataaaaagaaattgcacaactgcatcatggctgtccagtatatgaaggaagctccggttctgatatctgattcagatgcagtcagagtttcagcagaatatattcttaatggcgacaaggaactaattcttgcatttctatggaatatgttcattcatatgcaggttaatctacacatgtcgttcagtatctcattactcatgttgaagttttatactgttttatttcacctttcgtttgtactgaagaggtggactaatggactgactttgtatttttcactcactgcataggcagcattacagtagagatatgttgtacttctc

SEQ ID NO: 5255 - protein, 112 aa, Glycine max
  misc_feature (1)..(112): Ceres Seq. ID no. 14307699
MIDGDSRKVFAPSDSHKKKLHNCIMAVQYMKEAPVLISDSDAVRVSAEYILNGDKELILAFLWNMFIHMQVNLHMSFSISLLMLKFYTVLFHLSFVLKRWTNGLTLYFSLTA

SEQ ID NO: 5256 - protein, 88 aa, Glycine max
  misc_feature (1)..(88): Ceres Seq. ID no. 14307700
MEAELVSAKLCEAKPGYADKQAEGEGGRVPQMEALGQGGEVKRTGSRAATVRASVPSFVFSPSLPKIYQIIQGKIAEYIYLWLILFFF

SEQ ID NO: 5257 - protein, 88 aa, Glycine max
  misc_feature (1)..(88): Ceres Seq. ID no. 14307701
MAVQYMKEAPVLISDSDAVRVSAEYILNGDKELILAFLWNMFIHMQVNLHMSFSISLLMLKFYTVLFHLSFVLKRWTNGLTLYFSLTA

SEQ ID NO: 5258 - DNA, 892 bp, Glycine max
  misc_feature (1)..(892): Ceres Seq. ID no. 14307709
gttgtgtacttgtgtttcaattcattcttcggttgttctctatttgcgttttctcattttctttctttcgttctcttccgtggaacgagtagtagaaacttgaaatcaaaaggcagcgggggaaaaagaaaagagagaagtagggttcgaaaatggcagcagaatcatcagagggcgaagaagaaaccaagttaagcggaggtaaccaattgctcatagttgacgatgacttaacggaaatgggaaagaaagccgcttggagcgtgagttcctgcaaacccggtaacggcgtttcctctctccgtgacgacaatctcgaaacttattggcaatccgacggagggcaaccccatttagttaacattcagtttcagaagaaagttagacttcaattaattgtgctgtacgtggatttcaagcttgacgagagttacacgccgagcaaagtttccatccgtgccggtgatggttttcacaacttgaaggagattaagaccgtggaactcgtgaagccaactgggtgggtttatctttccttgtctggagttgatcctagggatacctttgtgaatactttcatgttgcaaattgctgtgttgtcaaaccatctcaatggaagggatactcacgtgcggcagatcaaagtttacgggcctcgaccgaaccctatcccacatcagccattccaatttacttcaagggaattcatcacctactcttctataagatgagagtttatggaaggatttgatgaagccaccaagtgttaaatcaaaggatgcttcccactaagttattatagcatctggaaggtctgaaaccaaatcactacagaccgaaatgtcaaaaatacatttcacttcaatagtattcttaaaaattgtcatatcag

SEQ ID NO: 5259 - protein, 192 aa, Glycine max
  misc_feature (1)..(192): Ceres Seq. ID no. 14307710
MAAESSEGEEETKLSGGNQLLIVDDDLTEMGKKAAWSVSSCKPGNGVSSLRDDNLETYWQSDGGQPHLVNIQFQKKVRLQLIVLYVDFKLDESYTPSKVSIRAGDGFHNLKEIKTVELVKPTGWVYLSLSGVDPRDTFVNTFMLQIAVLSNHLNGRDTHVRQIKVYGPRPNPIPHQPFQFTSREFITYSSIR

SEQ ID NO: 5260 - protein, 163 aa, Glycine max
  misc_feature (1)..(163): Ceres Seq. ID no. 14307711
MGKKAAWSVSSCKPGNGVSSLRDDNLETYWQSDGGQPHLVNIQFQKKVRLQLIVLYVDFKLDESYTPSKVSIRAGDGFHNLKEIKTVELVKPTGWVYLSLSGVDPRDTFVNTFMLQIAVLSNHLNGRDTHVRQIKVYGPRPNPIPHQPFQFTSREFITYSSIR

SEQ ID NO: 5261 - DNA, 1409 bp, Glycine max
  misc_feature (1)..(1409): Ceres Seq. ID no. 14307716
tgctcttgatgaaaaaatcaggtctcaaatggatgttattgacaatggtgtccctgctccattatcaatgttcagtgagagtgattcagacatgaaatctgttaatatagatgacttgctgcccaaagaaaagctgcagaggaagttgccaaagccatcagcgggaaggcgaaaaaatggttacctacaaaatggtggttctgtgcatccttatgctgatccagagcaatgtgcagatacaaagcaatcctttggagcctcttccagtggggttacttctcttgatagcatccagaaacataagttgaacatagattctgattctttaggctgtatacagacacaaattcctatgacacgccctgactatagtcatgctccaaatcacacttccctctttccgactttgtctggatcaagatctgagcatgatggacatctgtctccttctcttaaagaatcatcttatgcatcaaacatggagagttcccatggtcattctttggaggctgcggccttgaaaacaaaagagaatagagaaaagttgtataattgctgtgatggacccctaaatagtagtttcaaaaatgaaaatacaccaaatcaaatgccattttgcagtccgggttcagctcagcaagtaggtcatcattttgaaaatgaaaatgaaggtcatagtgaattccgaggagttggcctaggcttttcaccagaaatagattcatcaacagtgcaggaaagctcatccatgggctctgctctggaccaagcttcacttgaagcaactagcttttgccacctgcaacagatcatggatcagttggatattaaaaccaaaatgtgcataagggacagtctataccgcttggctaagagtgctgagcatagacacaataattcaaatgcaaatggttgcattggagacgatgaaacatgcaaagcaatgatggcgcaggatgcaaacaggtgtgccggattaatggatatggaaactgacacaaaccccattgatcggtctgtagcacacttactgtttcacaggccctcagatccatcagtgttgcttcctaacgaaactttacctttcaaatccagtgccacgatgcatcatggatcagtgatcaatccaccagtgaagactgagaaacaggtctgtcaggaagattctactggagtggaaaaaaaggttttacggggtaacacctaatgaaagtgaaaccagcgttggcgcatttcgttgtacaatttatacttttccggtcattgtcgtatatgatgatgtataattatttcgggctaactcggatccctttgttaatttctgaagcatttttgcataggatgccataatactaatgtaactttgtgctaatcaaatcatcaaaaggtagcatacgatgatttagtgt

SEQ ID NO: 5262 - protein, 401 aa, Glycine max
  misc_feature (1)..(401): Ceres Seq. ID no. 14307717
ALDEKIRSQMDVIDNGVPAPLSMFSESDSDMKSVNIDDLLPKEKLQRKLPKPSAGRRKNGYLQNGGSVHPYADPEQCADTKQSFGASSSGVTSLDSIQKHKLNIDSDSLGCIQTQIPMTRPDYSHAPNHTSLFPTLSGSRSEHDGHLSPSLKESSYASNMESSHGHSLEAAALKTKENREKLYNCCDGPLNSSFKNENTPNQMPFCSPGSAQQVGHHFENENEGHSEFRGVGLGFSPEIDSSTVQESSSMGSALDQASLEATSFCHLQQIMDQLDIKTKMCIRDSLYRLAKSAEHRHNNSNANGCIGDDETCKAMMAQDANRCAGLMDMETDTNPIDRSVAHLLFHRPSDPSVLLPNETLPFKSSATMHHGSVINPPVKTEKQVCQEDSTGVEKKVLRGNT

SEQ ID NO: 5263 - protein, 392 aa, Glycine max
  misc_feature (1)..(392): Ceres Seq. ID no. 14307718
MDVIDNGVPAPLSMFSESDSDMKSVNIDDLLPKEKLQRKLPKPSAGRRKNGYLQNGGSVHPYADPEQCADTKQSFGASSSGVTSLDSIQKHKLNIDSDSLGCIQTQIPMTRPDYSHAPNHTSLFPTLSGSRSEHDGHLSPSLKESSYASNMESSHGHSLEAAALKTKENREKLYNCCDGPLNSSFKNENTPNQMPFCSPGSAQQVGHHFENENEGHSEFRGVGLGFSPEIDSSTVQESSSMGSALDQASLEATSFCHLQQIMDQLDIKTKMCIRDSLYRLAKSAEHRHNNSNANGCIGDDETCKAMMAQDANRCAGLMDMETDTNPIDRSVAHLLFHRPSDPSVLLPNETLPFKSSATMHHGSVINPPVKTEKQVCQEDSTGVEKKVLRGNT

SEQ ID NO: 5264 - protein, 379 aa, Glycine max
  misc_feature (1)..(379): Ceres Seq. ID no. 14307719
MFSESDSDMKSVNIDDLLPKEKLQRKLPKPSAGRRKNGYLQNGGSVHPYADPEQCADTKQSFGASSSGVTSLDSIQKHKLNIDSDSLGCIQTQIPMTRPDYSHAPNHTSLFPTLSGSRSEHDGHLSPSLKESSYASNMESSHGHSLEAAALKTKENREKLYNCCDGPLNSSFKNENTPNQMPFCSPGSAQQVGHHFENENEGHSEFRGVGLGFSPEIDSSTVQESSSMGSALDQASLEATSFCHLQQIMDQLDIKTKMCIRDSLYRLAKSAEHRHNNSNANGCIGDDETCKAMMAQDANRCAGLMDMETDTNPIDRSVAHLLFHRPSDPSVLLPNETLPFKSSATMHHGSVINPPVKTEKQVCQEDSTGVEKKVLRGNT

SEQ ID NO: 5265 - DNA, 1538 bp, Glycine max
  misc_feature (1)..(1538): Ceres Seq. ID no. 14307732
gaaaaaagaataaatacatattatcctcccatgtattgtatttgtggggagagagagcgagtggatgtggtgttccggagaagttggaatggcagcggttagtgttagtgttactgtgagagtgaggtggtgcactcgaaaaccacccactccaactccaaccagattcagcgttaatgctctgtttggtgattggggatttgggaatagaacaaggaactcccttcagcagcaattcacgttcactcttgctgatagtaaagtgataagcgtgtcggttgtttcttcgatctcagatgttgcatcgagcgaatgggacgcttgtgctttggatgcgactggccctgacaacttcaatccattcctttcgcatgcctttttgtcgaccttagagcactctgcttccgctgtcagggaaactggttggatcccacaccacatcgttgccaaagccaacaacaacagcaacaacaacgttgtagccgttgtcccactctatcttaaaacccactcctacggcgaatttgtttttgatcattcttgggctaatgcttaccattcttatggctacaattattaccccaagttacaatcttgtgtccccttcacacctgtaactggtccaaggatcttacttcgtaacacctccttcaaacatcaagttttcgacattattgtctccgcaatgaaggaactcgctctcacctcccagctttcatcattacatgttacttttccctctgaaaatgagtggcacaagctcactgagaaaggcttcctccccaggattggaatgcagtaccactggaaaaaccgtaactacaaaaattttgatgacttcttgatggacatgaagcaaagtaaaagaaaaaatatacgtcaagagcgcaaaaagatctcagcccagaacttgattatgaaacgcctccggggttatgaaataaaggctaggcactgggattccttctactctttttacaggaacacaactgataacaaatggggcactcctcacctgacaagggaattttttcatgagctgggagcaaaaatgggagataatgtgctacttgtggtggctgaagaaggggatgaactagttgctggagccctaaatcttatcggaggagataccttgtttgggcgcctatggggatgtcagccacgaagttactacccaagtttgcattttgaagcgtgttattaccaggcaattgaagcagctattgaactcaatcttaaaactgtagaggcaggagctcagggtgaacacaagattcagcggggatatcttcctgtgacaacttatagctgccattaccttattgatgaagaatttagagaagctatacaagattttttaatacgtgaagctgctcaggtgaagctagttataaaactcttgcatgattctggtccttttaaggaaggtatcctttagaaagtaaatttatgggtatagtatttgcaaatatgtatatgattgtaataatttatttataatttagcagaaatgtatatacagctgaagtaatgag

SEQ ID NO: 5266 - protein, 458 aa, Glycine max
  misc_feature (1)..(458): Ceres Seq. ID no. 14307733
MWCSGEVGMAAVSVSVTVRVRWCTRKPPTPTPTRFSVNALFGDWGFGNRTRNSLQQQFTFTLADSKVISVSVVSSISDVASSEWDACALDATGPDNFNPFLSHAFLSTLEHSASAVRETGWIPHHIVAKANNNSNNNVVAVVPLYLKTHSYGEFVFDHSWANAYHSYGYNYYPKLQSCVPFTPVTGPRILLRNTSFKHQVFDIIVSAMKELALTSQLSSLHVTFPSENEWHKLTEKGFLPRIGMQYHWKNRNYKNFDDFLMDMKQSKRKNIRQERKKISAQNLIMKRLRGYEIKARHWDSFYSFYRNTTDNKWGTPHLTREFFHELGAKMGDNVLLVVAEEGDELVAGALNLIGGDTLFGRLWGCQPRSYYPSLHFEACYYQAIEAAIELNLKTVEAGAQGEHKIQRGYLPVTTYSCHYLIDEEFREAIQDFLIREAAQVKLVIKLLHDSGPFKEGIL

SEQ ID NO: 5267 - protein, 450 aa, Glycine max
  misc_feature (1)..(450): Ceres Seq. ID no. 14307734
MAAVSVSVTVRVRWCTRKPPTPTPTRFSVNALFGDWGFGNRTRNSLQQQFTFTLADSKVISVSVVSSISDVASSEWDACALDATGPDNFNPFLSHAFLSTLEHSASAVRETGWIPHHIVAKANNNSNNNVVAVVPLYLKTHSYGEFVFDHSWANAYHSYGYNYYPKLQSCVPFTPVTGPRILLRNTSFKHQVFDIIVSAMKELALTSQLSSLHVTFPSENEWHKLTEKGFLPRIGMQYHWKNRNYKNFDDFLMDMKQSKRKNIRQERKKISAQNLIMKRLRGYEIKARHWDSFYSFYRNTTDNKWGTPHLTREFFHELGAKMGDNVLLVVAEEGDELVAGALNLIGGDTLFGRLWGCQPRSYYPSLHFEACYYQAIEAAIELNLKTVEAGAQGEHKIQRGYLPVTTYSCHYLIDEEFREAIQDFLIREAAQVKLVIKLLHDSGPFKEGIL

SEQ ID NO: 5268 - protein, 251 aa, Glycine max
  misc_feature (1)..(251): Ceres Seq. ID no. 14307735
MKELALTSQLSSLHVTFPSENEWHKLTEKGFLPRIGMQYHWKNRNYKNFDDFLMDMKQSKRKNIRQERKKISAQNLIMKRLRGYEIKARHWDSFYSFYRNTTDNKWGTPHLTREFFHELGAKMGDNVLLVVAEEGDELVAGALNLIGGDTLFGRLWGCQPRSYYPSLHFEACYYQAIEAAIELNLKTVEAGAQGEHKIQRGYLPVTTYSCHYLIDEEFREAIQDFLIREAAQVKLVIKLLHDSGPFKEGIL

SEQ ID NO: 5269 - DNA, 1392 bp, Glycine max
  misc_feature (1)..(1392): Ceres Seq. ID no. 14307736
tctcttctcgtatcacacgatccatctacacggtcaaaaagaaaatcgttttccttgagaaaatacggacacagagacagagagagggagagagagaaggaaatgggaagcacaaagtttctattgttggtgatggtgtttctcgcagtgtgcgtggggacatgcaggccttggggtgatgatgtagttgaagatggagaggaggccaaacattttgcagcaaaagccgtgcatgatgtcgaggaagagacccgctcttgggctgattgggctcaagacaagttctccaaaagtttcggggccgaagaggatcatgaaaaacaagcgactcaaaacatgaagtatcaagctgaagatgctgcttcaagggccacggagagagtgaaatctgcagcatcaggagcctcggactatgcttctcaaaaggctacggatgctaagtaagcagtttcaggtgctaaggtcatcaaaatgccaacagatagcattaacaatgcaaaacacacaatgggagatacctacgaggatgctaagcaaaaaatgaacacagcttcagataaggcttcaagtatggctcacaatgccaaagataacacggctgagtccatggaatatggaaaagatatagcagccaatgcctatgaccagggtaagcaaaaaataaacattgcttcagatacagcatcagagaaattctatgatgccaaggacaaggcaagtgatgttaggcataaagtgaaaggagccatgggttgtggaggagataaggccaataatgatgctaaaaataacatgggcgtgaaaatggaacatggaagggacaaagtagccgaaacttttgaccaggctaaacgtgaagtgggtgaagcatatgtatcagcaaagaataccatgactgaagaggccaaagctaagtacgaggctgcaaaggagaaggcttcggatgcaacaggtgatttaggagctaagatgaggaacaccccaaacgtataagcgcatggttagtttaccgcttattcttaactatgacaacctctattagtttttagctctagtttccacaagttatcgtttatattgtgctttaatctcttgtaatgtgttagtcttttacacgttcttgtatgcttttctctttaatagagatgcaaaaaatacttgttagacattatgaaaaagtcattacgtacaaatctattctccataatgataggagagagcctgaaaggtcccacggttaggttcttctatgatctatcacgatgccaggtagattcatatacagggtgctgccccataatgttgtagggactttgcagcttatatatagtaggctatatgtatgtgtaattataacattttgcagttagtggatcctctcacgattggtac

SEQ ID NO: 5270 - protein, 173 aa, Glycine max
  misc_feature (1)..(173): Ceres Seq. ID no. 14307737
MPTDSINNAKHTMGDTYEDAKQKMNTASDKASSMAHNAKDNTAESMEYGKDIAANAYDQGKQKINIASDTASEKFYDAKDKASDVRHKVKGAMGCGGDKANNDAKNNMGVKMEHGRDKVAETFDQAKREVGEAYVSAKNTMTEEAKAKYEAAKEKASDATGDLGAKMRNTPNV

SEQ ID NO: 5271 - protein, 161 aa, Glycine max
  misc_feature (1)..(161): Ceres Seq. ID no. 14307738
MGDTYEDAKQKMNTASDKASSMAHNAKDNTAESMEYGKDIAANAYDQGKQKINIASDTASEKFYDAKDKASDVRHKVKGAMGCGGDKANNDAKNNMGVKMEHGRDKVAETFDQAKREVGEAYVSAKNTMTEEAKAKYEAAKEKASDATGDLGAKMRNTPNV

SEQ ID NO: 5272 - protein, 150 aa, Glycine max
  misc_feature (1)..(150): Ceres Seq. ID no. 14307739
MNTASDKASSMAHNAKDNTAESMEYGKDIAANAYDQGKQKINIASDTASEKFYDAKDKASDVRHKVKGAMGCGGDKANNDAKNNMGVKMEHGRDKVAETFDQAKREVGEAYVSAKNTMTEEAKAKYEAAKEKASDATGDLGAKMRNTPNV

SEQ ID NO: 5273 - DNA, 1130 bp, Glycine max
  misc_feature (1)..(1130): Ceres Seq. ID no. 14307760
gtttagttctctcttctctctctctcaaacctgaattcggttgtgatataaacctgcgttgcgctaaacgacaccgttttcactgtctctgagaatggaggcactaagtcgctttgtggaagaaatattcgaggatttccagggccgaagagccggcatcatcaaagcccttaccaccgatgttgaagatttctacagccaatgtgatcctgagaaggagaatttgtgcttatatggatttcctaatgagcaatgggaggtaaatttacccgttgaagaagttcctccagagcttcctgagcctgtcctaggcattaactttgctagggatggcatgctggaaaaagactggttatcattagttgctgttcatagtgatacatggttacttgcccttgccttttattttggagccagatttggatttgataaaactgacaggaaacgactattcggtatgatcaatgaactaccaacaatatttgaagttgttactggtgaagcaaagaaacaagttaaagagaagtcttcggtttcaaacaacagtggcaacaaatctaagtctaactctcaagcgcaggcttccgaaacccagggcagacagtcaaaggcattacaaacaaaagatgaggatgaagaactagaagagcaagataacgatgaacatggagataccttgtgtggggcatgtggtgagaattatggtactgatgaattctggatttgctgtgacatctgtgagaagtggttccatggcaaatgtgtgaagatcacccctgctagagcagagcttatcaagcaatacaagtgcccatcatgcagtaacaagagagctcgctaagcaaatttccatcagggacaataaaccatttgagtcttaacgaatctgattaatattttttttttctagatgtagctgatggatagtttttatgtttgacacatgtagatttcttgtctttctgtgggatttatgctgtgttggttgtctgggggaagttcattctttttccaagccttgtcctagctatggatccacatcggcataagcttcatatgaatggggttgaaaccataatctcctggccaccttaatactatggaaatgaaagtacttcgacatttgcacc

SEQ ID NO: 5274 - protein, 248 aa, Glycine max
  misc_feature (1)..(248): Ceres Seq. ID no. 14307761
MEALSRFVEEIFEDFQGRRAGIIKALTTDVEDFYSQCDPEKENLCLYGFPNEQWEVNLPVEEVPPELPEPVLGINFARDGMLEKDWLSLVAVHSDTWLLALAFYFGARFGFDKTDRKRLFGMINELPTIFEVVTGEAKKQVKEKSSVSNNSGNKSKSNSQAQASETQGRQSKALQTKDEDEELEEQDNDEHGDTLCGACGENYGTDEFWICCDICEKWFHGKCVKITPARAELIKQYKCPSCSNKRAR

SEQ ID NO: 5275 - protein, 168 aa, Glycine max
  misc_feature (1)..(168): Ceres Seq. ID no. 14307762
MLEKDWLSLVAVHSDTWLLALAFYFGARFGFDKTDRKRLFGMINELPTIFEVVTGEAKKQVKEKSSVSNNSGNKSKSNSQAQASETQGRQSKALQTKDEDEELEEQDNDEHGDTLCGACGENYGTDEFWICCDICEKWFHGKCVKITPARAELIKQYKCPSCSNKRAR

SEQ ID NO: 5276 - protein, 127 aa, Glycine max
  misc_feature (1)..(127): Ceres Seq. ID no. 14307763
MINELPTIFEVVTGEAKKQVKEKSSVSNNSGNKSKSNSQAQASETQGRQSKALQTKDEDEELEEQDNDEHGDTLCGACGENYGTDEFWICCDICEKWFHGKCVKITPARAELIKQYKCPSCSNKRAR

SEQ ID NO: 5277 - DNA, 1584 bp, Glycine max
  misc_feature (1)..(1584): Ceres Seq. ID no. 14307776
aactcaagatagaatggcacaggcacaacatgaagagaggatccatgaaaaccaaaaagaaaaggaaacccaagaaacaggaaactctagcttcaaattcaatgcccaagcacctgaatttgttccaagatcacatacccagatgccagtttcaggttattactacccttgcttccaaatttttggtgggtctagtgagtcagctgattggttctttgttggggaccaagatccttcttgtttgatccctactcccaatgttgcacaacccaattcctccaagaatattcttacccctgatcttcaacaaaagatcgttaaacaggtggagtatcagttcagtgacatgagtttgttagcaaatgaatcctttcataaacagatgaataaagatcctgaaggttatgttccaataaccgtaattgcttctaccaaaaaggttaaatctcttgttagtaacattaatatgcttactcaagctatacgttcatcttcaaaacttgttttgagtgttgatggaaaaaaggttaagcgtaaacatccttacactgaaaaggaaaaagaggacttgctggctcgcactgttgtggcagagaatttacctgacgatcattcccatcagaatcttcaaaaaatctttggtatagttgggagcgtgaaaacgatcagaatatgccatccccaagagcctaattcttctcgcccaaaatctgatttcatcgtcagtaataagctccatgcactagtggagtatgagacatcagatatagccgagaaagctgctgagaagttaaatgatgaaagaaattggaggaaagggatgcgtgtaaggttgttccttagatgctcgccaaaatctgttctgaagagtagaaagtcagaatttgatggatatctagatgatgacgagattataaattttgaatctgttgaggattcttctccttctcactcaaacaatgctgaattgtttgagacaaatgttgatgaaaattgggtaggatgtaagaaaggatgggctggtagaggacgtggaaagggtagagggcgcactcaaggacgtggcctacttgccccaccctctcaatcaagcagtactatcctttgtgatgcacacacaaaacacaacactaagggcccaagaatgccagatggaacaagaggcttcaccatgggacgtggcaagccaattagtccttcttctcatgtcacttcacctaaagagtgatggatatttcttaagtttttcctttggctacatatagtgaacttaggagaattctttgcatttcttcaccacagttatttaaaatcagcaaaagtgttttagaagaccctattatgtgggctactagacgggtagtcccaattttttagatttgaccagtttagtaataattcatgatgtatagtgtgatatggtatggcaatccttatgataatggccacgaagattttaaatcttacttagctttcaatttagtgaggggtattgtttttaatgtcggaaataagtgcttattgttattgtacactaaattgtttttgggattgaataagagacttaggagtcaaattctcccc

SEQ ID NO: 5278 - protein, 408 aa, Glycine max
  misc_feature (1)..(408): Ceres Seq. ID no. 14307777
TQDRMAQAQHEERIHENQKEKETQETGNSSFKFNAQAPEFVPRSHTQMPVSGYYYPCFQIFGGSSESADWFFVGDQDPSCLIPTPNVAQPNSSKNILTPDLQQKIVKQVEYQFSDMSLLANESFHKQMNKDPEGYVPITVIASTKKVKSLVSNINMLTQAIRSSSKLVLSVDGKKVKRKHPYTEKEKEDLLARTVVAENLPDDHSHQNLQKIFGIVGSVKTIRICHPQEPNSSRPKSDFIVSNKLHALVEYETSDIAEKAAEKLNDERNWRKGMRVRLFLRCSPKSVLKSRKSEFDGYLDDDEIINFESVEDSSPSHSNNAELFETNVDENWVGCKKGWAGRGRGKGRGRTQGRGLLAPPSQSSSTILCDAHTKHNTKGPRMPDGTRGFTMGRGKPISPSSHVTSPKE

SEQ ID NO: 5279 - protein, 404 aa, Glycine max
  misc_feature (1)..(404): Ceres Seq. ID no. 14307778
MAQAQHEERIHENQKEKETQETGNSSFKFNAQAPEFVPRSHTQMPVSGYYYPCFQIFGGSSESADWFFVGDQDPSCLIPTPNVAQPNSSKNILTPDLQQKIVKQVEYQFSDMSLLANESFHKQMNKDPEGYVPITVIASTKKVKSLVSNINMLTQAIRSSSKLVLSVDGKKVKRKHPYTEKEKEDLLARTVVAENLPDDHSHQNLQKIFGIVGSVKTIRICHPQEPNSSRPKSDFIVSNKLHALVEYETSDIAEKAAEKLNDERNWRKGMRVRLFLRCSPKSVLKSRKSEFDGYLDDDEIINFESVEDSSPSHSNNAELFETNVDENWVGCKKGWAGRGRGKGRGRTQGRGLLAPPSQSSSTILCDAHTKHNTKGPRMPDGTRGFTMGRGKPISPSSHVTSPKE

SEQ ID NO: 5280 - protein, 361 aa, Glycine max
  misc_feature (1)..(361): Ceres Seq. ID no. 14307779
MPVSGYYYPCFQIFGGSSESADWFFVGDQDPSCLIPTPNVAQPNSSKNILTPDLQQKIVKQVEYQFSDMSLLANESFHKQMNKDPEGYVPITVIASTKKVKSLVSNINMLTQAIRSSSKLVLSVDGKKVKRKHPYTEKEKEDLLARTVVAENLPDDHSHQNLQKIFGIVGSVKTIRICHPQEPNSSRPKSDFIVSNKLHALVEYETSDIAEKAAEKLNDERNWRKGMRVRLFLRCSPKSVLKSRKSEFDGYLDDDEIINFESVEDSSPSHSNNAELFETNVDENWVGCKKGWAGRGRGKGRGRTQGRGLLAPPSQSSSTILCDAHTKHNTKGPRMPDGTRGFTMGRGKPISPSSHVTSPKE

SEQ ID NO: 5281 - DNA, 1450 bp, Glycine max
  misc_feature (1)..(1450): Ceres Seq. ID no. 14307780
ggattctagtgcaatagcaaagcatgcaaagttttgcggagatgaagttgaaatggttgtcccatttgaggggaccaactcagtagagttaaaggtgaagtttgtagtaaaagagtggcagttttctgatggttcgcatagcttgaacagcctccgttctaattctcagcgatcacttattggatcatcaagtcttctgtcaaaaactggaaggaaacttaagataactgttgtagaagcaaaggatctcgctgcaaaagacaaatctgaaaaaattaacccatacattaaattgctatatggaaaggttgtcaagaaaacaaaggttgctcttactactactagtactactacaaatcctgtctggaatcaatcatttgaatttgatgagaatgatggtgatgaatacctaaatgtaaaatgctttagtgaagaaatttttggagatgaaaatattggtagtgcaaatgtaaatttggaaggactgggggatgggtcaatcaaggttgaatggatccctcttgaaggagtgagttcgggtgaattgaagcttaaaattgaagtagttaaggtggaggaccaagaaggatcaaggggttcaactaatggttggatagaacttgttgtgattgaagcgagggatcttattgctgctgatcttcgagggacaagtgatccttatgtgagggtaaactacggaaactcgaagaaaaggacaaaggttatacacaaaacactcaaccctcgttggaaccagacattagagttccttgacgatggcagtcccttgatactgcatgttaaggaccacaatgctttactacccgaatcaagtataggcgaaggtgttgtagaatatcaaaggttgcctccaaaccagatgtctgacaagtggatacctctgcaaggggtgaaaagtggtgagatccacatccaaattacaagaaaagttccagaaatgcaaacaagacatactctagactctcaaccctcttcgttaagtaaatcacaccaaattcctacccagatgagagagatgatgaaaaagtttcgatcattaatagaggatgaaaatcttgaaggattaacaacaactttgagtgagttagaaagtctagaggatacacaggaagggtatataacacagttggagacagagcaaatgcttctactcagcaaaataaatgaactgggtcgggagatcatcaattcttcttcccgcgctagtagtagtccttctcaaagtggaatttgaccctcatgagcatcatctacctaacgttatccgtagttgatactttgactttcccatgcaaaatattgctcatgggaatgggaatcataacgtacagactttttttattttatccaagaattcttgtgtagttgcccctcacatagcaacggtatatgtttaattgatcaataaattgcaacgagtttatgtttc

SEQ ID NO: 5282 - protein, 417 aa, Glycine max
  misc_feature (1)..(417): Ceres Seq. ID no. 14307781
DSSAIAKHAKFCGDEVEMVVPFEGTNSVELKVKFVVKEWQFSDGSHSLNSLRSNSQRSLIGSSSLLSKTGRKLKITVVEAKDLAAKDKSEKINPYIKLLYGKVVKKTKVALTTTSTTTNPVWNQSFEFDENDGDEYLNVKCFSEEIFGDENIGSANVNLEGLGDGSIKVEWIPLEGVSSGELKLKIEVVKVEDQEGSRGSTNGWIELVVIEARDLIAADLRGTSDPYVRVNYGNSKKRTKVIHKTLNPRWNQTLEFLDDGSPLILHVKDHNALLPESSIGEGVVEYQRLPPNQMSDKWIPLQGVKSGEIHIQITRKVPEMQTRHTLDSQPSSLSKSHQIPTQMREMMKKFRSLIEDENLEGLTTTLSELESLEDTQEGYITQLETEQMLLLSKINELGREIINSSSRASSSPSQSGI

SEQ ID NO: 5283 - protein, 400 aa, Glycine max
  misc_feature (1)..(400): Ceres Seq. ID no. 14307782
MVVPFEGTNSVELKVKFVVKEWQFSDGSHSLNSLRSNSQRSLIGSSSLLSKTGRKLKITVVEAKDLAAKDKSEKINPYIKLLYGKVVKKTKVALTTTSTTTNPVWNQSFEFDENDGDEYLNVKCFSEEIFGDENIGSANVNLEGLGDGSIKVEWIPLEGVSSGELKLKIEVVKVEDQEGSRGSTNGWIELVVIEARDLIAADLRGTSDPYVRVNYGNSKKRTKVIHKTLNPRWNQTLEFLDDGSPLILHVKDHNALLPESSIGEGVVEYQRLPPNQMSDKWIPLQGVKSGEIHIQITRKVPEMQTRHTLDSQPSSLSKSHQIPTQMREMMKKFRSLIEDENLEGLTTTLSELESLEDTQEGYITQLETEQMLLLSKINELGREIINSSSRASSSPSQSGI

SEQ ID NO: 5284 - DNA, 1117 bp, Glycine max
  misc_feature (1)..(1117): Ceres Seq. ID no. 14307797
gacacgcatctatacttgtccagaagaagtaagatccatgaactaacattcccacacgctcgcttcaccatatttgccacccttttaacctcacttcttagggttattttgctcccttttccttgtttgggaattgggtttggtttggtttttcttggttgtaaaaggaaacaaagaaagaactaagatgggaagaggtagggtacagctgaagaggatagagaacaagatcaatcgccaggtaactttctccaaaaggagaggtgggttgctcaagaaagctcatgaaatatctgtactctgtgatgctgaggtagctttgattatcttctctcacaaaggaaagctctttgagtatgctactgattcatgcatggagaagatactggaacgccatgaaaggtatgcctatgcagagaggcagctagtagcaaatgattctgagacacaggaaaactggaccattgaatacactagactgaaggcaaaaattgaccttttacagagaaaccacaggcactatatgggagaagatttggcttcaatgagcctcaaagagcttcagagtttggagcagcagttggttactggtatcaaaaacatccgcacaaggaggaatgatctcatgtccgagtccatttctgagcttcagaaaaaggagaaaaggatacaagaggagaataacacccttgcaaagaagatcaaggagaaagagcaggctgtagcacagcaagctgcacaatgggagcagccaaactacagggttgatacatctttcatgccacagcagcaaccccttcccaccagtttgaacatatgtggcaataattactgccaggaagctgcaccagaactaggaaggaacggtctagacctgaccctggaaccactctattcttgcaaccttggatgcttctgaaaagttgtttcttctgagttggattatattatataagtgctggcatatatgaactactataagtagtctgtttgaatgttttatatgtattttggtctatggcttttccctctactttgaagacattattttgaattgcttctgttgtaaacaaattgaatttgaaatctaattgtgtatttttgaaatatgttaaag

SEQ ID NO: 5285 - protein, 243 aa, Glycine max
  misc_feature (1)..(243): Ceres Seq. ID no. 14307798
MGRGRVQLKRIENKINRQVTFSKRRGGLLKKAHEISVLCDAEVALIIFSHKGKLFEYATDSCMEKILERHERYAYAERQLVANDSETQENWTIEYTRLKAKIDLLQRNHRHYMGEDLASMSLKELQSLEQQLVTGIKNIRTRRNDLMSESISELQKKEKRIQEENNTLAKKIKEKEQAVAQQAAQWEQPNYRVDTSFMPQQQPLPTSLNICGNNYCQEAAPELGRNGLDLTLEPLYSCNLGCF

SEQ ID NO: 5286 - protein, 181 aa, Glycine max
  misc_feature (1)..(181): Ceres Seq. ID no. 14307799
MEKILERHERYAYAERQLVANDSETQENWTIEYTRLKAKIDLLQRNHRHYMGEDLASMSLKELQSLEQQLVTGIKNIRTRRNDLMSESISELQKKEKRIQEENNTLAKKIKEKEQAVAQQAAQWEQPNYRVDTSFMPQQQPLPTSLNICGNNYCQEAAPELGRNGLDLTLEPLYSCNLGCF

SEQ ID NO: 5287 - protein, 131 aa, Glycine max
  misc_feature (1)..(131): Ceres Seq. ID no. 14307800
MGEDLASMSLKELQSLEQQLVTGIKNIRTRRNDLMSESISELQKKEKRIQEENNTLAKKIKEKEQAVAQQAAQWEQPNYRVDTSFMPQQQPLPTSLNICGNNYCQEAAPELGRNGLDLTLEPLYSCNLGCF

SEQ ID NO: 5288 - DNA, 1478 bp, Glycine max
  misc_feature (1)..(1478): Ceres Seq. ID no. 14307813
gattgattttacttccttatcctctcttcttcttcttctcccgctcgcgccttctgtctcaatctcaatccaccagaaatggcaacaatagttagccaccaccaccgcctattctccgccgccacgcgcttcaattccactggcagagactcgcggcggcaaaggagcggcgcaaactcggtccggtgcgctgacgtaagcacggtcacgagcgagaatcagcgagtgacggtgagtaacaggagcgattcgctggagatatgccgcgtgctgaacggaatgtggcagaccagcggcggatggggccgaatcgaccgagacgacgccgtcgaggctatgcttcgctacgccgacgccggcctaactaccttcgacatggccgatcactatggacctgctgaagatctatatgggattttcattaatcgagttcgtcgagagcgtcctgctgaattgttggaacaggtcagaggtctcactaagtgggttcctccgccagttaagatgactagtagctatgtaagagacagcatcaatgtttcaaggaagagaatggatgtggaatccttggacatgcttcagtttcattggtgggattactcgaatccaggctacctggatgcactaaaacacctaacagatttgaaagaagaaggtaaaatcaagactgtggctctgacaaattttgatacggagagattacaaattattcttgaaaatgaggttcctgttgtaagcaatcaggtgcaacattcccttgttgatatgcgtccccaacagagaatggcagagctttgtcagcatacaggagtcaaacttataacgtatggaacagtaatgggtggtctgttgtctgagaagttccttgacaccaacatagctattccttttgctggtcctgcaataaacactccctccctccaaaagtacaaaaggatggtagatgcttggggaggatggagtttgttccagggactgcttcggactcttaaacaagtagcttctaaacatggcgtatcgatcgcaactgttgctgtgaagtatatactagatcagcctgcagtagcaggatcaatggttggtgtcagacttggcttggcagaacatattcaagataccaatgctatcttttcacttgttctcgatgaagatgacgtgaacagcataagagaagccacagcgaaaggaaaggatctgcttaaagtgattggtgattgtggagatgagtacaggcgtgcatgagtcatgttggcttatcaacctggtgaagtgctttaatttatataggacaaggggatggaaaaaaagggagggggacacaggaaaagtgttcaagctcaattttttgtcagttgaagaatttgtgtgtaatacttttatggattacccagtaatgatcaaaagacaaaatagatgaaaggaggaagtaatgtattctgtagtatatatcttgtgagatttatgcaaactttcctcac

SEQ ID NO: 5289 - protein, 387 aa, Glycine max
  misc_feature (1)..(387): Ceres Seq. ID no. 14307814
MATIVSHHHRLFSAATRFNSTGRDSRRQRSGANSVRCADVSTVTSENQRVTVSNRSDSLEICRVLNGMWQTSGGWGRIDRDDAVEAMLRYADAGLTTFDMADHYGPAEDLYGIFINRVRRERPAELLEQVRGLTKWVPPPVKMTSSYVRDSINVSRKRMDVESLDMLQFHWWDYSNPGYLDALKHLTDLKEEGKIKTVALTNFDTERLQIILENEVPVVSNQVQHSLVDMRPQQRMAELCQHTGVKLITYGTVMGGLLSEKFLDTNIAIPFAGPAINTPSLQKYKRMVDAWGGWSLFQGLLRTLKQVASKHGVSIATVAVKYILDQPAVAGSMVGVRLGLAEHIQDTNAIFSLVLDEDDVNSIREATAKGKDLLKVIGDCGDEYRRA

SEQ ID NO: 5290 - protein, 320 aa, Glycine max
  misc_feature (1)..(320): Ceres Seq. ID no. 14307815
MWQTSGGWGRIDRDDAVEAMLRYADAGLTTFDMADHYGPAEDLYGIFINRVRRERPAELLEQVRGLTKWVPPPVKMTSSYVRDSINVSRKRMDVESLDMLQFHWWDYSNPGYLDALKHLTDLKEEGKIKTVALTNFDTERLQIILENEVPVVSNQVQHSLVDMRPQQRMAELCQHTGVKLITYGTVMGGLLSEKFLDTNIAIPFAGPAINTPSLQKYKRMVDAWGGWSLFQGLLRTLKQVASKHGVSIATVAVKYILDQPAVAGSMVGVRLGLAEHIQDTNAIFSLVLDEDDVNSIREATAKGKDLLKVIGDCGDEYRRA

SEQ ID NO: 5291 - protein, 301 aa, Glycine max
  misc_feature (1)..(301): Ceres Seq. ID no. 14307816
MLRYADAGLTTFDMADHYGPAEDLYGIFINRVRRERPAELLEQVRGLTKWVPPPVKMTSSYVRDSINVSRKRMDVESLDMLQFHWWDYSNPGYLDALKHLTDLKEEGKIKTVALTNFDTERLQIILENEVPVVSNQVQHSLVDMRPQQRMAELCQHTGVKLITYGTVMGGLLSEKFLDTNIAIPFAGPAINTPSLQKYKRMVDAWGGWSLFQGLLRTLKQVASKHGVSIATVAVKYILDQPAVAGSMVGVRLGLAEHIQDTNAIFSLVLDEDDVNSIREATAKGKDLLKVIGDCGDEYRRA

SEQ ID NO: 5292 - DNA, 1562 bp, Glycine max
  misc_feature (1)..(1562): Ceres Seq. ID no. 14307879
tcctttaagccagcacgccaaaaagaacttctttgcaaaacacgactgaggaccttgcaacaccggcgtctccctccttcctctcctctctctgcctttacctttgattgtaggtttttcattatttggcggcgaaacagggttgaatatttttgttttagcgtctgagctttgaattacagagcaaagtgaagcgtgaacatggtgatgcatctaaacgggacaccgtgcgctctcggattccacatgcctgcggagtgggaaacccacgcgcagtgctggatgggttggcctgaacgtgccgataactggcgtgacggcgccgttcacgcccaacgcgtgtttgcgagggtagcgtcagcaatctcaagattcgagtctgtaacagtttgtgttagttctgcacagtgggagaacgcgcggagtcagctaccggagcatatcagggtcgttgagatgaacatgaacgattcttggttccgtgatattggacctacttttgttatgagaagaagcaccacgccggaatctggtgatgcagtgagcaggattgcagggattgactggaattttaatagttggggaggcttagaagatggatgttactgtgattggagtcttgatttgcttgtggctaagaagattttgggaattgagaagattcctagattttcacattcgatggtgcttgaaggtggaagcatccatgtggatggagaaggaacttgtcttaccacagaagagtgcctcttgaacaagaacaggaaccctcacttgagtaagaaccaaatagaggatgaacttaagacatatcttggaatccggaaggttatatggttgcctcgtggattatatggagatgatgacacaaatggtcatattgataacatgtgctgttttgtgaggcctggtgtggttatgctgtcttggattgatgatgaaactgatcctcagtatgaaagatctgtagaagcatattctttgctttcaaatgaaacagatgctaatggtagaaagtttgaaatcattaaactccatgttcccagtccactctatatgacagaggacgaggctgctggggtttctctggataatgaggctaagccaagacttccaggtactaggcttgctgcttcctatgtaaacttttacattgcaaataaagctatcattgcaccacaatttggagataaaaagtgggatgatgaagctgtccgagtcctatctaaggccttccctcatcatgaagttgtgggaattgaaggtgccagggagattgttttggccggtggaaatatacattgcattactcagcaacaaccagccatttgagcggcggcactctcgatattcgttgataggtgttgtattgttgcttatgggtttccagaataaattgatttggttaaattgcttggttagttagttggtttgctccaattgggcatgtatgctaatttttggagattagcaaaatccaataattgcagcctggatgaaagtgtatgcaaatagatggaaaaccgttgaaaatataaaacctaatttatatttaaattggc

SEQ ID NO: 5293 - protein, 376 aa, Glycine max
  misc_feature (1)..(376): Ceres Seq. ID no. 14307880
MVMHLNGTPCALGFHMPAEWETHAQCWMGWPERADNWRDGAVHAQRVFARVASAISRFESVTVCVSSAQWENARSQLPEHIRVVEMNMNDSWFRDIGPTFVMRRSTTPESGDAVSRIAGIDWNFNSWGGLEDGCYCDWSLDLLVAKKILGIEKIPRFSHSMVLEGGSIHVDGEGTCLTTEECLLNKNRNPHLSKNQIEDELKTYLGIRKVIWLPRGLYGDDDTNGHIDNMCCFVRPGVVMLSWIDDETDPQYERSVEAYSLLSNETDANGRKFEIIKLHVPSPLYMTEDEAAGVSLDNEAKPRLPGTRLAASYVNFYIANKAIIAPQFGDKKWDDEAVRVLSKAFPHHEVVGIEGAREIVLAGGNIHCITQQQPAI

SEQ ID NO: 5294 - protein, 374 aa, Glycine max
  misc_feature (1)..(374): Ceres Seq. ID no. 14307881
MHLNGTPCALGFHMPAEWETHAQCWMGWPERADNWRDGAVHAQRVFARVASAISRFESVTVCVSSAQWENARSQLPEHIRVVEMNMNDSWFRDIGPTFVMRRSTTPESGDAVSRIAGIDWNFNSWGGLEDGCYCDWSLDLLVAKKILGIEKIPRFSHSMVLEGGSIHVDGEGTCLTTEECLLNKNRNPHLSKNQIEDELKTYLGIRKVIWLPRGLYGDDDTNGHIDNMCCFVRPGVVMLSWIDDETDPQYERSVEAYSLLSNETDANGRKFEIIKLHVPSPLYMTEDEAAGVSLDNEAKPRLPGTRLAASYVNFYIANKAIIAPQFGDKKWDDEAVRVLSKAFPHHEVVGIEGAREIVLAGGNIHCITQQQPAI

SEQ ID NO: 5295 - protein, 361 aa, Glycine max
  misc_feature (1)..(361): Ceres Seq. ID no. 14307882
MPAEWETHAQCWMGWPERADNWRDGAVHAQRVFARVASAISRFESVTVCVSSAQWENARSQLPEHIRVVEMNMNDSWFRDIGPTFVMRRSTTPESGDAVSRIAGIDWNFNSWGGLEDGCYCDWSLDLLVAKKILGIEKIPRFSHSMVLEGGSIHVDGEGTCLTTEECLLNKNRNPHLSKNQIEDELKTYLGIRKVIWLPRGLYGDDDTNGHIDNMCCFVRPGVVMLSWIDDETDPQYERSVEAYSLLSNETDANGRKFEIIKLHVPSPLYMTEDEAAGVSLDNEAKPRLPGTRLAASYVNFYIANKAIIAPQFGDKKWDDEAVRVLSKAFPHHEVVGIEGAREIVLAGGNIHCITQQQPAI

SEQ ID NO: 5296 - DNA, 1215 bp, Glycine max
  misc_feature (1)..(1215): Ceres Seq. ID no. 14308077
ggaatagagccacacatagggcgaagaggtgtcagcgggaagaggtgccacgtgtaggattttgccctcgctcattgcacttcccagtgagtgacttgactctctttctcacacctccttttttccccgatgctaactctacaagcttcgtctcgtaaagaaaattcgaaagctcaatagagagaactcaattgaatcatcaaatgaggacagtgatttcgcgcttgatccattccacgccttccatttccaggctcaatgccacggtagtgtcaatcagcgggagaaatctctgcacagattctaacaaagttgatgggccattcaaagttgaagaagcagagactgtaaatgtgcctccactcccaacagaaaagttgcttgtgttgggagggaatgggtttgttggatcacacatttgtagagaagccttagaccgtgatttgtctgttgcgagtcttagcaggtctggtaggtcatccctgcatgattcctgggctaccaatgttgcttggtataaagggaatctcctttcaactgattcattgaaagaagctctgaatggggtcactgctgttatctcatgtgttggtggttttggctccaactcttacatgtacaaaattaatgggactgctaacatcaatgcaattagagcagcttcagatcaaggtgttaaaagatttgtctatatctctgcagctgactttggtgtagtaaattacttactgcgggggtattatgaaggaaagagagcttctgaaacagagctcctgaccagattcccatatggaggagtaattctgaggccaggatttatttatggtactcgaagtgttgggagtatgaagataccccttggtgtaattggatctccattggaaatggttctccaagttgctaaaccattgaaccagatcccacttgttgggcctctattgacacctcctgtcaatgttactgcggtggcaaaagttgctgttagagctgctactgatcctgtttttcccccggggatcattgatgcttatggaatacaacgttacagtcagcataaatcaaactagaaaattatctatattttgttttctgggtaaatctaatatggggcgatttgcctctgaatatctgtgttttagtattgttaaactgagaatatttcttcattccatatccttgagagaataaaatctgaaagtgcgagcatgtagccat

SEQ ID NO: 5297 - protein, 287 aa, Glycine max
  misc_feature (1)..(287): Ceres Seq. ID no. 14308078
MRTVISRLIHSTPSISRLNATVVSISGRNLCTDSNKVDGPFKVEEAETVNVPPLPTEKLLVLGGNGFVGSHICREALDRDLSVASLSRSGRSSLHDSWATNVAWYKGNLLSTDSLKEALNGVTAVISCVGGFGSNSYMYKINGTANINAIRAASDQGVKRFVYISAADFGVVNYLLRGYYEGKRASETELLTRFPYGGVILRPGFIYGTRSVGSMKIPLGVIGSPLEMVLQVAKPLNQIPLVGPLLTPPVNVTAVAKVAVRAATDPVFPPGIIDAYGIQRYSQHKSN

SEQ ID NO: 5298 - protein, 150 aa, Glycine max
  misc_feature (1)..(150): Ceres Seq. ID no. 14308079
MYKINGTANINAIRAASDQGVKRFVYISAADFGVVNYLLRGYYEGKRASETELLTRFPYGGVILRPGFIYGTRSVGSMKIPLGVIGSPLEMVLQVAKPLNQIPLVGPLLTPPVNVTAVAKVAVRAATDPVFPPGIIDAYGIQRYSQHKSN

SEQ ID NO: 5299 - DNA, 1285 bp, Glycine max
  misc_feature (1)..(1285): Ceres Seq. ID no. 14308080
gtgcagaccactgtctccccttttgctctcttcattttccattcgtagacgccaagaaccctaacaggagaatgcagtggacctggataatttgtgaggatatttaacatcgtgtacattgtgctcctttaattattttcatcagttggtgttgtgatggatggtaataatggtcttaacatacgtaattggggttactatgaacccgctacgtcgtttaagagccacctggggctgcagctgatgtcatccttgccggaaaaacctttaattggagggcgcaatgctgtggttttagctggcactgatggggcatttcaccatagggacattggtggtatgccccaagctacataccctatcgaatacatgagggatacatggattagtcagagagacaaatatatgaatatgatacctacaaaccataattatggtggtattccggagacatcttcagcacatcaaattcaaatgattcaagcaccggaattgccaaaggaagaaaagccagtggaagaagcacctgtcgtcaagaaggcaaatggaactcgtaagaaaagacaggggcccaaggttcccaaatctcccaaggctaagaagccaaagagggtgcctcgtgcgccaaaggatgagaatgctcctgcagttcaacgtgcaagggttccgaagaaaactactgaaattgtaataaatgggattgatatggatatttctcgcattccaattccagtttgttcatgcaccggggcaacgcaacagtgttataaatggggatctggtggttggcagtctgcatgttgcacaacaggcatgtcggtatatcctttgcctatgagtaccaagcggcgtggtgctaggattgctggaaggaaaatgagtataggagcatttaagaaagtgttagagaaactcgccgccgagggttataacttttctaatccgattgatttgaggacttattgggcaaaacatggcaccaacaagtttgtcaccatcaggtagatctagtctgtggccatctggcctgttatgtcttttagcctgtttgtgatgtatatacatgcgtatttggccagagacagactttttagctggtttgtagtacaacaattttcaaattcattagacatcttgttttgtcttctaactctctttgttagtatcttcactttattggatgtagtacatgggaactcatctatcggttggttggttcagattgggaactacctgatgaggtcttgttttattaatatttagtaggagaatttaattggttcac

SEQ ID NO: 5300 - protein, 282 aa, Glycine max
  misc_feature (1)..(282): Ceres Seq. ID no. 14308081
MDGNNGLNIRNWGYYEPATSFKSHLGLQLMSSLPEKPLIGGRNAVVLAGTDGAFHHRDIGGMPQATYPIEYMRDTWISQRDKYMNMIPTNHNYGGIPETSSAHQIQMIQAPELPKEEKPVEEAPVVKKANGTRKKRQGPKVPKSPKAKKPKRVPRAPKDENAPAVQRARVPKKTTEIVINGIDMDISRIPIPVCSCTGATQQCYKWGSGGWQSACCTTGMSVYPLPMSTKRRGARIAGRKMSIGAFKKVLEKLAAEGYNFSNPIDLRTYWAKHGTNKFVTIR

SEQ ID NO: 5301 - protein, 253 aa, Glycine max
  misc_feature (1)..(253): Ceres Seq. ID no. 14308082
MSSLPEKPLIGGRNAVVLAGTDGAFHHRDIGGMPQATYPIEYMRDTWISQRDKYMNMIPTNHNYGGIPETSSAHQIQMIQAPELPKEEKPVEEAPVVKKANGTRKKRQGPKVPKSPKAKKPKRVPRAPKDENAPAVQRARVPKKTTEIVINGIDMDISRIPIPVCSCTGATQQCYKWGSGGWQSACCTTGMSVYPLPMSTKRRGARIAGRKMSIGAFKKVLEKLAAEGYNFSNPIDLRTYWAKHGTNKFVTIR

SEQ ID NO: 5302 - protein, 221 aa, Glycine max
  misc_feature (1)..(221): Ceres Seq. ID no. 14308083
MPQATYPIEYMRDTWISQRDKYMNMIPTNHNYGGIPETSSAHQIQMIQAPELPKEEKPVEEAPVVKKANGTRKKRQGPKVPKSPKAKKPKRVPRAPKDENAPAVQRARVPKKTTEIVINGIDMDISRIPIPVCSCTGATQQCYKWGSGGWQSACCTTGMSVYPLPMSTKRRGARIAGRKMSIGAFKKVLEKLAAEGYNFSNPIDLRTYWAKHGTNKFVTIR

SEQ ID NO: 5303 - DNA, 1688 bp, Glycine max
  misc_feature (1)..(1688): Ceres Seq. ID no. 14308091
gaaacaaagtagagagcaaaagaatggtgggaacagaggcagcagaaaaaatgagtgtcaatgaagaaaaagatttgattagcactcttcctgattcagttcttgtctctatcatttctctccttccctgcaacgaaggcgtgagaacctgtgttctttccaaccgatggaaaaccatgtggaaacatgttcctcaccttagcttggatcagagcaaaatgttgaagcttttgatccgagcttatcttcgcgggctataccttagcacgcgtcttgaaatggcttataatcgtcgtaggggagatcaagaaaaagattttgaagacttggatgaaattgctaaagcagaggtgttgattgattcagtgttggattcacacgttgtttctttggaaagttgtactattcggcacctgccagaaagttgtgctagtggcaaagctgttatgtggatcgagaaactccttaagcaaaataaggtgaagaagctttcaatggagcgagatgacactgattatttgggctctgaggaaagtttgccacgggttctgagatatcatggaaggactctagacttgccttttaagattttctcaggctttgaggcacttgagttgaagaactattttctcaagacttcgccctcgagtaatgattcttgccaggttcttacaactttagcctttaggaacatgagtgttaagaaggatgcttgggaagggattttgtcttgttgcctgtgtcttgaaaatttaacacttgaaaatttaacacatgataactgcaagttgatgagagaggttactatcaatagtccaagactcaaatttctcagaatttgtagaatgcagatgaatgggtttaaggtttctgctgtgaaccttgaggtctttgagattgatactgttgtttgtatgccgaaaagactacttacttttgaaatcccaaaggttcatctgcttcgatctcgctctgatttgaaaattagagggcaatatatttgttgggttgggagcaaactgttgcagtcgagaaatattctacacactagcagccagagtcatcaaggaacaacttcgagctttgctggaatatttgagaacctggctactctatgtattgattttgatttgaaaacagtaaaaaatgccataaccctcttttcagctcttaaggcatgcccaaagttgcaaaatcttgaaattaatagcgagattaatgacaacgcagtggattactatgatcaacatgatgaggatgatgcaatggaatactaccgtagaaaggagccatgtgagtgcatcgatcaacaactaaagacccttagcataatgggatttgcaggaaaaaaactgaggtggaattccttaaatatgtaataacaaatggtgaagtaatgaagaagattacaatttggtttgttgatgattgctcatggattcatgccgctgaaactggatgtttgctatcatttcagacagcctctccaaacttgtccatcattctcaatcctgggccattttacatggcaaatgtgggtgggaactttgaaacatggctctcaactctaagggagtaggaaatttaccggtgaccatggccaaactatgtgtttcaaattctattttagtcttgaactttgaatatttctagtattacgtttataacactaaagacagattagtggc

SEQ ID NO: 5304 - protein, 458 aa, Glycine max
  misc_feature (1)..(458): Ceres Seq. ID no. 14308092
NKVESKRMVGTEAAEKMSVNEEKDLISTLPDSVLVSIISLLPCNEGVRTCVLSNRWKTMWKHVPHLSLDQSKMLKLLIRAYLRGLYLSTRLEMAYNRRRGDQEKDFEDLDEIAKAEVLIDSVLDSHVVSLESCTIRHLPESCASGKAVMWIEKLLKQNKVKKLSMERDDTDYLGSEESLPRVLRYHGRTLDLPFKIFSGFEALELKNYFLKTSPSSNDSCQVLTTLAFRNMSVKKDAWEGILSCCLCLENLTLENLTHDNCKLMREVTINSPRLKFLRICRMQMNGFKVSAVNLEVFEIDTVVCMPKRLLTFEIPKVHLLRSRSDLKIRGQYICWVGSKLLQSRNILHTSSQSHQGTTSSFAGIFENLATLCIDFDLKTVKNAITLFSALKACPKLQNLEINSEINDNAVDYYDQHDEDDAMEYYRRKEPCECIDQQLKTLSIMGFAGKKLRWNSLNM

SEQ ID NO: 5305 - protein, 451 aa, Glycine max
  misc_feature (1)..(451): Ceres Seq. ID no. 14308093
MVGTEAAEKMSVNEEKDLISTLPDSVLVSIISLLPCNEGVRTCVLSNRWKTMWKHVPHLSLDQSKMLKLLIRAYLRGLYLSTRLEMAYNRRRGDQEKDFEDLDEIAKAEVLIDSVLDSHVVSLESCTIRHLPESCASGKAVMWIEKLLKQNKVKKLSMERDDTDYLGSEESLPRVLRYHGRTLDLPFKIFSGFEALELKNYFLKTSPSSNDSCQVLTTLAFRNMSVKKDAWEGILSCCLCLENLTLENLTHDNCKLMREVTINSPRLKFLRICRMQMNGFKVSAVNLEVFEIDTVVCMPKRLLTFEIPKVHLLRSRSDLKIRGQYICWVGSKLLQSRNILHTSSQSHQGTTSSFAGIFENLATLCIDFDLKTVKNAITLFSALKACPKLQNLEINSEINDNAVDYYDQHDEDDAMEYYRRKEPCECIDQQLKTLSIMGFAGKKLRWNSLNM

SEQ ID NO: 5306 - protein, 442 aa, Glycine max
  misc_feature (1)..(442): Ceres Seq. ID no. 14308094
MSVNEEKDLISTLPDSVLVSIISLLPCNEGVRTCVLSNRWKTMWKHVPHLSLDQSKMLKLLIRAYLRGLYLSTRLEMAYNRRRGDQEKDFEDLDEIAKAEVLIDSVLDSHVVSLESCTIRHLPESCASGKAVMWIEKLLKQNKVKKLSMERDDTDYLGSEESLPRVLRYHGRTLDLPFKIFSGFEALELKNYFLKTSPSSNDSCQVLTTLAFRNMSVKKDAWEGILSCCLCLENLTLENLTHDNCKLMREVTINSPRLKFLRICRMQMNGFKVSAVNLEVFEIDTVVCMPKRLLTFEIPKVHLLRSRSDLKIRGQYICWVGSKLLQSRNILHTSSQSHQGTTSSFAGIFENLATLCIDFDLKTVKNAITLFSALKACPKLQNLEINSEINDNAVDYYDQHDEDDAMEYYRRKEPCECIDQQLKTLSIMGFAGKKLRWNSLNM

SEQ ID NO: 5307 - DNA, 1585 bp, Glycine max
  misc_feature (1)..(1585): Ceres Seq. ID no. 14308099
ccccccgagaacagagtgtgataatagtaagacagagcacctactcactcgtaaatggcgaggaagaagatcagagagtaccactccaagaggcttctcaaggagcatctcaaacgtctcgcctctatcgacctccaaatcctctcagctcaggtgacagaatctacggatttcactgagctgacagaccagcatccatggctttcgtcaaccagattggtcgtcaagccagacatgctgttcgggaagcgcggcaagagtggcttagttgctctcaatttagacatagctcaagtcgccgagttcgtcaaagcacgcctcggcgttgaggttgagatgggaggttgcaaggcgcctataaccacttttattgtcgaaccgtttgttcctcacgaccaagagttttatctgtctattgtttctgaaaggcttggctccactatcagcttctccgaatgtggcggcattgaaattgaagagaattgggataaggtcaaaactatattccttccgacggaaaaaccattgactccggaggcatgtgcgccattgattgctatacttcctttggagattagggggacaattggcgatttcataatgggtgtgtttgctgtcttcaaagatctggacttcagttttttagagatgaatccatttacactggtgaatgaaaagccatatccactggatatgagaggggaattggatgacactgccgcattcaagaacttcaacaagtggggtaatatagaatttccattgccttttggaagaattctgagccctacagaaagcttcattcattccttggatgataagacaagtgcatcattgaaatttactatattgaatccgaaaggacgcatatggacaatggtagcaggaggtggtgcaagtgtaatttatgctgatacggttggagatttaggctatgcatcagagcttggaaactatgctgagtatagtggagctccgaatgaggaggaggtgttgcagtatgcaagagttgtaattgattgtgctactgaagaccccgatggccgtaagagagcccttcttattggaggtggcatagcaaacttcactgatgttgctgccacattcaacgggattattcgagccctgaaagagaaggaatcaaagcttaaagcagcgcaaatgcacatatatgtcagaagaggtggtccaaactaccagactggtttggcaaagatgcgtgcattgggggaggagttgggagtaccaattcaggtttatggaccggaggccacgatgacgggtatctgcaaacaagctattgattgcatcatgtccgaagcataaagaagattaatttttgtctcatcatgtttcatttgtgaaactaatttggtggtgttttgatggatatattgatataagtccataatctgaaccaaagcaaagagtaataaggtgaagatgatagatgttacaagcctgaaactgttaaattcttatcttttcttcctattgtgattttattgttatattttgactaaacattataaaaatccccaatagtatccgtgaaaaatgtaatcttagttggcgatttttcctc

SEQ ID NO: 5308 - protein, 423 aa, Glycine max
  misc_feature (1)..(423): Ceres Seq. ID no. 14308100
MARKKIREYHSKRLLKEHLKRLASIDLQILSAQVTESTDFTELTDQHPWLSSTRLVVKPDMLFGKRGKSGLVALNLDIAQVAEFVKARLGVEVEMGGCKAPITTFIVEPFVPHDQEFYLSIVSERLGSTISFSECGGIEIEENWDKVKTIFLPTEKPLTPEACAPLIAILPLEIRGTIGDFIMGVFAVFKDLDFSFLEMNPFTLVNEKPYPLDMRGELDDTAAFKNFNKWGNIEFPLPFGRILSPTESFIHSLDDKTSASLKFTILNPKGRIWTMVAGGGASVIYADTVGDLGYASELGNYAEYSGAPNEEEVLQYARVVIDCATEDPDGRKRALLIGGGIANFTDVAATFNGIIRALKEKESKLKAAQMHIYVRRGGPNYQTGLAKMRALGEELGVPIQVYGPEATMTGICKQAIDCIMSEA

SEQ ID NO: 5309 - protein, 363 aa, Glycine max
  misc_feature (1)..(363): Ceres Seq. ID no. 14308101
MLFGKRGKSGLVALNLDIAQVAEFVKARLGVEVEMGGCKAPITTFIVEPFVPHDQEFYLSIVSERLGSTISFSECGGIEIEENWDKVKTIFLPTEKPLTPEACAPLIAILPLEIRGTIGDFIMGVFAVFKDLDFSFLEMNPFTLVNEKPYPLDMRGELDDTAAFKNFNKWGNIEFPLPFGRILSPTESFIHSLDDKTSASLKFTILNPKGRIWTMVAGGGASVIYADTVGDLGYASELGNYAEYSGAPNEEEVLQYARVVIDCATEDPDGRKRALLIGGGIANFTDVAATFNGIIRALKEKESKLKAAQMHIYVRRGGPNYQTGLAKMRALGEELGVPIQVYGPEATMTGICKQAIDCIMSEA

SEQ ID NO: 5310 - protein, 329 aa, Glycine max
  misc_feature (1)..(329): Ceres Seq. ID no. 14308102
MGGCKAPITTFIVEPFVPHDQEFYLSIVSERLGSTISFSECGGIEIEENWDKVKTIFLPTEKPLTPEACAPLIAILPLEIRGTIGDFIMGVFAVFKDLDFSFLEMNPFTLVNEKPYPLDMRGELDDTAAFKNFNKWGNIEFPLPFGRILSPTESFIHSLDDKTSASLKFTILNPKGRIWTMVAGGGASVIYADTVGDLGYASELGNYAEYSGAPNEEEVLQYARVVIDCATEDPDGRKRALLIGGGIANFTDVAATFNGIIRALKEKESKLKAAQMHIYVRRGGPNYQTGLAKMRALGEELGVPIQVYGPEATMTGICKQAIDCIMSEA

SEQ ID NO: 5311 - DNA, 1234 bp, Glycine max
  misc_feature (1)..(1234): Ceres Seq. ID no. 14308120
gatcagaagttagctgcataacccagagaaaagtaaacactgcaataggaagagttttcaaatggcagagggaaaaggtagagtttgtgtcactggaggcactgggttccttggttcatggatcatcaagagactccttgaagatggatatgctgttaacaccactattagatctgacccaggacgaaagagagatgttagcttcctcacaaacctaccaggcgcatccgaaaagctaaaaattttcaacgctgatctcagcgaccctgaaagttttgatccagcagttgagggatgtgttggaattttccacacagccacgccaattgattttgcagtgaacgagcctgaggaagtggtaaccaaaagagccatcgatggagcactaggcataatgaaagcaggcctaaaagcaaagacagtgaagagggttgtttacacttctagtggctccaccgtttccttcagcagccttgaagaaaaagatgtggtggatgagagtgtttggagtgatgtggatatgcttaggagtgtaaagccttttggttggtcctatgcagtttcaaaggtgttgactgagaaggctgtgcttgaatttggagaacataatgggttggaagttgcaactgttattgctccttttattgttggtccttttgtttgtcccaagcttcctgactctattgaaaaagctctgcttatggtgttgggcaaaaaagaagaaattggtgtcattcgttaccatatggtacatgtggatgatgtggctagagcacatatcttcctgcttgagcatcctaatccaaaagggagatataattgctcaccattcattgtacccattgaagagatgggtgaacttctttcagccaaatacccggaatttcaactaccaacagtagacgagctgaagggaattaaaggtgccaagcaaccacatttaacctccaagaaacttgttgatgctggttttgagttcaagtatagcttagaggacatgtttcaggatgcaattgaatgctgcaaggaaaagggttatctttaatcgaatttagccatgaagttgacaaaataaaattgatgcatatggttgttagtttgaactatttcagatcgatggcaatcatggctaatgacatatatgtacatctaggaatgcatgatgttactcgtaatagatgaatgaggaaaataatcttcttcgtttgtctaaatgctaaataaaccatttaac

SEQ ID NO: 5312 - protein, 327 aa, Glycine max
  misc_feature (1)..(327): Ceres Seq. ID no. 14308121
MAEGKGRVCVTGGTGFLGSWIIKRLLEDGYAVNTTIRSDPGRKRDVSFLTNLPGASEKLKIFNADLSDPESFDPAVEGCVGIFHTATPIDFAVNEPEEVVTKRAIDGALGIMKAGLKAKTVKRVVYTSSGSTVSFSSLEEKDVVDESVWSDVDMLRSVKPFGWSYAVSKVLTEKAVLEFGEHNGLEVATVIAPFIVGPFVCPKLPDSIEKALLMVLGKKEEIGVIRYHMVHVDDVARAHIFLLEHPNPKGRYNCSPFIVPIEEMGELLSAKYPEFQLPTVDELKGIKGAKQPHLTSKKLVDAGFEFKYSLEDMFQDAIECCKEKGYL

SEQ ID NO: 5313 - protein, 216 aa, Glycine max
  misc_feature (1)..(216): Ceres Seq. ID no. 14308122
MKAGLKAKTVKRVVYTSSGSTVSFSSLEEKDVVDESVWSDVDMLRSVKPFGWSYAVSKVLTEKAVLEFGEHNGLEVATVIAPFIVGPFVCPKLPDSIEKALLMVLGKKEEIGVIRYHMVHVDDVARAHIFLLEHPNPKGRYNCSPFIVPIEEMGELLSAKYPEFQLPTVDELKGIKGAKQPHLTSKKLVDAGFEFKYSLEDMFQDAIECCKEKGYL

SEQ ID NO: 5314 - protein, 174 aa, Glycine max
  misc_feature (1)..(174): Ceres Seq. ID no. 14308123
MLRSVKPFGWSYAVSKVLTEKAVLEFGEHNGLEVATVIAPFIVGPFVCPKLPDSIEKALLMVLGKKEEIGVIRYHMVHVDDVARAHIFLLEHPNPKGRYNCSPFIVPIEEMGELLSAKYPEFQLPTVDELKGIKGAKQPHLTSKKLVDAGFEFKYSLEDMFQDAIECCKEKGYL

SEQ ID NO: 5315 - DNA, 1469 bp, Glycine max
  misc_feature (1)..(1469): Ceres Seq. ID no. 14308136
gaaaactgaaacagagaaaggttgctgggcacacaatattgtcccctactgagaacacagatgccatagaaaatcttcatatatcttccactatgcatggaagaagtactttatcaaaacaggtttcttcttcaagttccaaatcacaactgaaagttgtgtgcagtgagattgggattggtaatgcccaactagcatcaagctctcgaccttcccttcttgatcatgtccattcaaaagaagctgacatattagctatttcagagttgaattgtgctctagacaaaaaggaacgtgtattgtctgaactgaagcacatgaatgatggggtatcagagagccagaaatatggagacaactcagtaaaggattcagaaccttttaagaggaattatgcttcagtactaaagcaattaactgaagcaaatgaacaggtttcttctgccttgttttgcttgaggcaacgcaacacatatcaagcaagctcctctgttttgtcattaaagcccctggctaattttgatgatccaagtggtcaggccagctcttccaattgttcggcttgccacaaccaagaatctatatctcaaagtcatatagctgagattgtcgaaagttctagaagaaaagctagaacaatggttgttgaagccacacaggcaatgtcaagtttaagaaagacagaaagtaaggttgaaagaattgaggatgcaataaattttatcaatagccagctttcagtggacgaacctactgcttcagctacaacatttcttcctgcagattctttttctctggcttctcaggatcaattgactgccaacatattgaatccgttggcaagttgtcatgtacaagatgctgaacttaatagttcatctgatcaaaatgaaatgaaaattccctcagaactcatatctcattgcctagctacattgttcatgattcagaagtgtacggaacgactatttcccccagctgatgttgctcaggtactagattctgctgtcaccagtttgcagccattatcttcaaagaatcttccagtatatggtgagatacagaaatgcatgggcatcataagaaatcagatattggctctcataccgacatagcttggactctttcctcctttgttgtttgtaaatctgcaatgctctggtatttggctggttcaactcttgctgacgtgatctctatggagcgtcgtgagaccatacctacatccactgggacccagatatttcgtaattaacgcgggggagggtgggggggactatttataaaactgtttatacaattgtagccggaagaaaagggaaggttctacatattctcttttctgatgtacatatttttaaagatcaaatcatagtgagggactagcatgtcctattcagaaccagtaatgtgtattatgtattatgtcataatgttaaatgccataagctttatgaatgctattgcct

SEQ ID NO: 5316 - protein, 370 aa, Glycine max
  misc_feature (1)..(370): Ceres Seq. ID no. 14308137
KLKQRKVAGHTILSPTENTDAIENLHISSTMHGRSTLSKQVSSSSSKSQLKVVCSEIGIGNAQLASSSRPSLLDHVHSKEADILAISELNCALDKKERVLSELKHMNDGVSESQKYGDNSVKDSEPFKRNYASVLKQLTEANEQVSSALFCLRQRNTYQASSSVLSLKPLANFDDPSGQASSSNCSACHNQESISQSHIAEIVESSRRKARTMVVEATQAMSSLRKTESKVERIEDAINFINSQLSVDEPTASATTFLPADSFSLASQDQLTANILNPLASCHVQDAELNSSSDQNEMKIPSELISHCLATLFMIQKCTERLFPPADVAQVLDSAVTSLQPLSSKNLPVYGEIQKCMGIIRNQILALIPT

SEQ ID NO: 5317 - protein, 340 aa, Glycine max
  misc_feature (1)..(340): Ceres Seq. ID no. 14308138
MHGRSTLSKQVSSSSSKSQLKVVCSEIGIGNAQLASSSRPSLLDHVHSKEADILAISELNCALDKKERVLSELKHMNDGVSESQKYGDNSVKDSEPFKRNYASVLKQLTEANEQVSSALFCLRQRNTYQASSSVLSLKPLANFDDPSGQASSSNCSACHNQESISQSHIAEIVESSRRKARTMVVEATQAMSSLRKTESKVERIEDAINFINSQLSVDEPTASATTFLPADSFSLASQDQLTANILNPLASCHVQDAELNSSSDQNEMKIPSELISHCLATLFMIQKCTERLFPPADVAQVLDSAVTSLQPLSSKNLPVYGEIQKCMGIIRNQILALIPT

SEQ ID NO: 5318 - protein, 265 aa, Glycine max
  misc_feature (1)..(265): Ceres Seq. ID no. 14308139
MNDGVSESQKYGDNSVKDSEPFKRNYASVLKQLTEANEQVSSALFCLRQRNTYQASSSVLSLKPLANFDDPSGQASSSNCSACHNQESISQSHIAEIVESSRRKARTMVVEATQAMSSLRKTESKVERIEDAINFINSQLSVDEPTASATTFLPADSFSLASQDQLTANILNPLASCHVQDAELNSSSDQNEMKIPSELISHCLATLFMIQKCTERLFPPADVAQVLDSAVTSLQPLSSKNLPVYGEIQKCMGIIRNQILALIPT

SEQ ID NO: 5319 - DNA, 1426 bp, Glycine max
  misc_feature (1)..(1426): Ceres Seq. ID no. 14308148
aatttttttttcattcaaggacaacatgtagagtttttttatagcaactacgggccagaaaaatgtagagtaaacattatggatcaattcataaacattttttcacgtggggaggaaaatgtgagttgtgatttagtgaataaaattttaacaatatatcaaattgttacacaactgatcatggaccttgcctgagcctgaaccatcattttttttaagttagagctttaagaatacagcaggacataatgtttttcttggagtaggagaatgtgaggttggcagtggaaagatgcctgttgcatttactgtctcttgatctgtgattgttttttggtccctttattaataaaattgagttgagagtcatgactacaggagctgaaactattcactgagcagtcttagtaatatatacattaacaaaaggtaatatacgtatacagactttatatttttattttttcaatttaagcgtcctatacttcagtgacagactagtgtgtggttttttataacttccaatttatcttccgagcttgaccgttgattctacattgcagagggaaaaatcccatgaattggttagagtgacaagtcccatggtctactagtctttattctttaccaagtaacatacatagtatcttcaacaaggacttatctgcatacattgtggcactaaaattcattttatatcgtaaatttgaaacccaagacatgtatagacatctcagctgcacagtgagactaatggtgggtaagcattctcacatgcgtgggagaaaaaaggaaagatttacttgttttaagtatatattaatttatttggtctctccttttaaaatcttctcccagggagcaaattttgctgatgttatacaaatgactgacatctttgaggggagtattattcggagtgctagaaggcttgacgagtttttgaatcagttgcgtgctgctgctaatgcagttggagaggctgacttggagaagaaatttgcagctgcaagtgaaagccttcgacgaggtattatgtttgcaaattctttgtatctgtgacttgtttttctccagaccttacgttatatctcacggtcattccggctggctgaaagtttactttcccatccaaccttttggcatgcacccacttccttctcttaaaagctttctggtgtaaatatttgtatgctgtcactaatggtaaagggtgtgaatatagagtgatagaaaaatctggtcaatagatagaaaattccggtcaataaaggttcatcttgagagtcgcagatcattcatttatttaccttcagaacctctagtctgtctggggcttgaggagtgagggtgccgaagatatttgtttgtaatttgctgaaaaattttcaatacaaattttgattgatagttcattattttagtg

SEQ ID NO: 5320 - protein, 113 aa, Glycine max
  misc_feature (1)..(113): Ceres Seq. ID no. 14308149
MYRHLSCTVRLMVGKHSHMRGRKKERFTCFKYILIYLVSPFKIFSQGANFADVIQMTDIFEGSIIRSARRLDEFLNQLRAAANAVGEADLEKKFAAASESLRRGIMFANSLYL

SEQ ID NO: 5321 - protein, 102 aa, Glycine max
  misc_feature (1)..(102): Ceres Seq. ID no. 14308150
MVGKHSHMRGRKKERFTCFKYILIYLVSPFKIFSQGANFADVIQMTDIFEGSIIRSARRLDEFLNQLRAAANAVGEADLEKKFAAASESLRRGIMFANSLYL

SEQ ID NO: 5322 - protein, 95 aa, Glycine max
  misc_feature (1)..(95): Ceres Seq. ID no. 14308151
MRGRKKERFTCFKYILIYLVSPFKIFSQGANFADVIQMTDIFEGSIIRSARRLDEFLNQLRAAANAVGEADLEKKFAAASESLRRGIMFANSLYL

SEQ ID NO: 5323 - DNA, 1415 bp, Glycine max
  misc_feature (1)..(1415): Ceres Seq. ID no. 14308156
aaacagagtgctatttgaaaaattgttctctcaccgtgaaagagagagagaggttaggctatggctgatgagagcgttgttgagtccccagtgaagaggcagagagatgatggtgaagaaaatggtgtctctgtttccatggacgcggagggtggcaaagaccctcttagtaacggtttatcatctgtgattcctgggtggttctctgaaatcagtgcaatgtggcctggagaggctcactccttgaaggtggaaaagattttgtttcaaggaaagtcagaataccaaaatgtcatggtcttccagtcatcaacatatggcaaggttcttgttttggatggagtaattcagctaacagaaagggatgaatgtgcctaccaagaaatgatcactcatcttcctctttgctctattccaaaccctaaaaaggttttggttatcggtggaggtgatggaggggtcatacgagaagtagcacgccattcttcagttgaaaagatagacatttgtgaaattgacaagatggttgttgatgtctccaaacaatacttccctgatgtagctgttgggtatgatgatcctcgtgtgacacttcatattggtgatggagttgcatttttgaaggaagttccagaaggaacttatgatgctgttatagtggattcatccgaccctattggtcctgctcaggagctttttgaaaagcccttctttgcgtcagttgcaaaggctctttgtcccggtggagttgtgtgtactcaggcagaaagcatttggcttcatatggatataattgaggacattgtggccaattgtcgccagatttttaaaggctctgtcaactatgcttggactactgttcctacatacccaagtgggatgattggttttatgctttgctcaactgagggaccacctgttgatttcaagcatccagttaatcccatagatgaaaatgagagtcagaagtcagtaagaccactgaaattttacaactctgagattcatacagcagctttctgtttgccgtcatttgcaaagaggaagattagttctaaagcaaattaaaaagattttcagaacctttgaaggagctcaagtggctgttgtagaagtccaacattcatccttgctgtattggtccatctatcaatgagccttggaataagtcagattaaatttggcattgaatagttaagtttatttctggaaatcaattagcaatcggattaagagtctaggcaatcctaaacggggtttaaaagtgatggcaattatcattatcaacccaagaattacctgttttataatctatctttatattcttattaataagttggagaggggaccaatcgattgacatgattaaatcaactttgaatgccgatcactatcaattggatgccataattttc

SEQ ID NO: 5324 - protein, 335 aa, Glycine max
  misc_feature (1)..(335): Ceres Seq. ID no. 14308157
MADESVVESPVKRQRDDGEENGVSVSMDAEGGKDPLSNGLSSVIPGWFSEISAMWPGEAHSLKVEKILFQGKSEYQNVMVFQSSTYGKVLVLDGVIQLTERDECAYQEMITHLPLCSIPNPKKVLVIGGGDGGVIREVARHSSVEKIDICEIDKMVVDVSKQYFPDVAVGYDDPRVTLHIGDGVAFLKEVPEGTYDAVIVDSSDPIGPAQELFEKPFFASVAKALCPGGVVCTQAESIWLHMDIIEDIVANCRQIFKGSVNYAWTTVPTYPSGMIGFMLCSTEGPPVDFKHPVNPIDENESQKSVRPLKFYNSEIHTAAFCLPSFAKRKISSKAN

SEQ ID NO: 5325 - protein, 309 aa, Glycine max
  misc_feature (1)..(309): Ceres Seq. ID no. 14308158
MDAEGGKDPLSNGLSSVIPGWFSEISAMWPGEAHSLKVEKILFQGKSEYQNVMVFQSSTYGKVLVLDGVIQLTERDECAYQEMITHLPLCSIPNPKKVLVIGGGDGGVIREVARHSSVEKIDICEIDKMVVDVSKQYFPDVAVGYDDPRVTLHIGDGVAFLKEVPEGTYDAVIVDSSDPIGPAQELFEKPFFASVAKALCPGGVVCTQAESIWLHMDIIEDIVANCRQIFKGSVNYAWTTVPTYPSGMIGFMLCSTEGPPVDFKHPVNPIDENESQKSVRPLKFYNSEIHTAAFCLPSFAKRKISSKAN

SEQ ID NO: 5326 - protein, 282 aa, Glycine max
  misc_feature (1)..(282): Ceres Seq. ID no. 14308159
MWPGEAHSLKVEKILFQGKSEYQNVMVFQSSTYGKVLVLDGVIQLTERDECAYQEMITHLPLCSIPNPKKVLVIGGGDGGVIREVARHSSVEKIDICEIDKMVVDVSKQYFPDVAVGYDDPRVTLHIGDGVAFLKEVPEGTYDAVIVDSSDPIGPAQELFEKPFFASVAKALCPGGVVCTQAESIWLHMDIIEDIVANCRQIFKGSVNYAWTTVPTYPSGMIGFMLCSTEGPPVDFKHPVNPIDENESQKSVRPLKFYNSEIHTAAFCLPSFAKRKISSKAN

SEQ ID NO: 5327 - DNA, 1476 bp, Glycine max
  misc_feature (1)..(1476): Ceres Seq. ID no. 14308168
aaagtagagagaagagaagcaattaccccttttcataaaaccctagcaagtaaaaaccgtcccttttcgtttctgttctctgtgcttcgaaaaccctaactaaactcgcgtggtagctccaatgggaggaaagaggaagaagagcgatgatgatgatgacgtggaagcagaagcagaagcttcaggttggaagaagaaaacgagaacgacgtcggagagagagaaggagaagaaggagccattgcgtccttcgatgataaagaacaaggagaagcgatcggagctgcacgcgaaactgaagcaccagaagaagctcgagaagcgcgccaaggccaaggctcgggacgctgctctcaagaaagctctcgagctcggcgaggagcctccagagaagaaggtccctcgcactatcgagaacacgagggaactcgacgagaccgtttgcaagcccgatgacgaagagttatttgctggaaatgatgctgatgaatttggtccaattttgaatcagcaacaaactcccaagatattaatcaccacttgccgcttccattctactaggggacctgcttttatatcagagttgctttcagttataccaaatgcacattacttcaagagaggaacatatgatctgaaaaagattgtagaatatgcaaagaagaaggacttcacttctattatagttgttcacaccaatcgtagggaaccagatgctcttttaatcataggtgtacctgatgggcctactgctcatttcaagctctcgaaacttgttttgcgcaaggatatcaagaatcatggaaatccaaccggtcacaagcccgagcttgtattgaataacttcacaacacgtctagggcatcgagttggaaggttgatacagtcacttttcccacaagatccagaatttaaaggccggcgagtagtcactttccacaaccagagagacttcatattcttccggcatcatcggtatatttttgaaaccaaagaagttaaaaaagcagagtccaaaggtaaaaaggacaaagatggcgagagtgagaatgttcctgaacagaaaacaattgcccgacttcaggaatgtggtcctcgtttcacattaaaattgattagcctgcagcatggaacatttgacaccaagggtggggaatatgagtgggttcacaagccggaaatggacactagccgaaggaggttcttcctatgacttgtttgggaaggttgcattttggacatcttttttgctggaaataggttttatccggtgaagagggttaattatcttgaggttgttgggatctttcaacttaattctggtgtatcatttttttatttttttttattgggggctaaagtcctatcatctctgtaagccgtgagcaattttgaccttacatctattggtggttgaggaagagataacaaaggtttcttataagcaaatatataagcaattttgtattatggtcc

SEQ ID NO: 5328 - protein, 363 aa, Glycine max
  misc_feature (1)..(363): Ceres Seq. ID no. 14308169
MGGKRKKSDDDDDVEAEAEASGWKKKTRTTSEREKEKKEPLRPSMIKNKEKRSELHAKLKHQKKLEKRAKAKARDAALKKALELGEEPPEKKVPRTIENTRELDETVCKPDDEELFAGNDADEFGPILNQQQTPKILITTCRFHSTRGPAFISELLSVIPNAHYFKRGTYDLKKIVEYAKKKDFTSIIVVHTNRREPDALLIIGVPDGPTAHFKLSKLVLRKDIKNHGNPTGHKPELVLNNFTTRLGHRVGRLIQSLFPQDPEFKGRRVVTFHNQRDFIFFRHHRYIFETKEVKKAESKGKKDKDGESENVPEQKTIARLQECGPRFTLKLISLQHGTFDTKGGEYEWVHKPEMDTSRRRFFL

SEQ ID NO: 5329 - protein, 319 aa, Glycine max
  misc_feature (1)..(319): Ceres Seq. ID no. 14308170
MIKNKEKRSELHAKLKHQKKLEKRAKAKARDAALKKALELGEEPPEKKVPRTIENTRELDETVCKPDDEELFAGNDADEFGPILNQQQTPKILITTCRFHSTRGPAFISELLSVIPNAHYFKRGTYDLKKIVEYAKKKDFTSIIVVHTNRREPDALLIIGVPDGPTAHFKLSKLVLRKDIKNHGNPTGHKPELVLNNFTTRLGHRVGRLIQSLFPQDPEFKGRRVVTFHNQRDFIFFRHHRYIFETKEVKKAESKGKKDKDGESENVPEQKTIARLQECGPRFTLKLISLQHGTFDTKGGEYEWVHKPEMDTSRRRFFL

SEQ ID NO: 5330 - DNA, 1508 bp, Glycine max
  misc_feature (1)..(1508): Ceres Seq. ID no. 14308194
ttcagacgttttatgatttatgttcatgccaaaggaatggtagttgatgacgaatacgtaattattggatcagcaaacattaaccagagatccttagatggttcaagggacacagaaatagctatgggtgcctatcaaccaaaatatacatggacagaaaagaatgctcatccacgtggccaggtgtatggatacagaatgtcactgtgggctgagcaccttggcagtcttgatcattgttttgctgaacctcacaacctggaatgtgtcagacatgtcaacaaaattgccaaacgaaactgggacatatatgtgtctgaggaagagaatcggatgaggggacacttgatgcaatatccagttaagatcagcagggatggaaaagtcagtgcacttgatgattatgaatcctttcctgatgttggtggcaaaattcttggatcaccaaattcacttccggatgcattaaccacctgattaaccaaagtcttagaatattcgcctacagatatatatagccgctaagaattgcagctcaaaaaattggtaatgatggtaaagccaatttatatacacttaaaattaccttttgtatgtaaatttctgtatttgatagtgagtgcatagatctcttttaatatatatataggtgcgagtatgggactagttgagtactagactagtagtactcgttcctgcatgcatcccattaaattttgtggtaaatagccagaccctgatctgttcccattgagcgggtatccatagagtctggatataatatctatccctaattgtcatataaaaatctttagactgacaatgtatcaaaataaagctctaaatgaaagtagtacaatttaaatttgtagctagtatgaactagatgtatcgagggcttttgctactcataatcgacgtgtctgtacattagggacatgtaagtttttgtctcacgcaactgattaaaaatggatttcagccttcctgcacagttatatttaccgttgtgggaacaatagatacattatggtcagagaacaatcaagaggaagatggagcttggagcttggaaaatatagatgatgtggtcacattctgcatgagtgctctaatttcctaattgagtctgcttttgacgtacttggttggctggtgcattgagtaacatctataatgtggtagcatatgcacatgtataatgccaggggtaagcagagcagtagattcagttgatgcatgaaatgtattttttggatcatggtttttcctttcacgtgtagcaattttaatttagttgctagtttggtggctttttaatatacgggatgaagatgaggaatggaaaaagagttgggaacttaagatattcttgctgcataatacatgacatcattgattatgcataacatacagttcttgtatttctgtcccctatactgtaaatctgtaatctagatatgattttcattcaatttgaagaatttgaagttgttaagttgggattt

SEQ ID NO: 5331 - protein, 158 aa, Glycine max
  misc_feature (1)..(158): Ceres Seq. ID no. 14308195
FRRFMIYVHAKGMVVDDEYVIIGSANINQRSLDGSRDTEIAMGAYQPKYTWTEKNAHPRGQVYGYRMSLWAEHLGSLDHCFAEPHNLECVRHVNKIAKRNWDIYVSEEENRMRGHLMQYPVKISRDGKVSALDDYESFPDVGGKILGSPNSLPDALTT

SEQ ID NO: 5332 - protein, 154 aa, Glycine max
  misc_feature (1)..(154): Ceres Seq. ID no. 14308196
MIYVHAKGMVVDDEYVIIGSANINQRSLDGSRDTEIAMGAYQPKYTWTEKNAHPRGQVYGYRMSLWAEHLGSLDHCFAEPHNLECVRHVNKIAKRNWDIYVSEEENRMRGHLMQYPVKISRDGKVSALDDYESFPDVGGKILGSPNSLPDALTT

SEQ ID NO: 5333 - protein, 146 aa, Glycine max
  misc_feature (1)..(146): Ceres Seq. ID no. 14308197
MVVDDEYVIIGSANINQRSLDGSRDTEIAMGAYQPKYTWTEKNAHPRGQVYGYRMSLWAEHLGSLDHCFAEPHNLECVRHVNKIAKRNWDIYVSEEENRMRGHLMQYPVKISRDGKVSALDDYESFPDVGGKILGSPNSLPDALTT

SEQ ID NO: 5334 - DNA, 1475 bp, Glycine max
  misc_feature (1)..(1475): Ceres Seq. ID no. 14308205
atctgaatacaatcctgcaaagctgttgcttaatggggttggatggtcaattccacaatcccaaggaagaagtgccaaaaatttgatccctcaaagacgaccatttaaagttcatcaaagtccagtagcagtgcatgaaggaatgtcataccaaatgaaccatgaaccctggttttggttccctagtccagccaccatctgggatgggcctgaatttcttgggagggtgggggttcagaaagacgaacttccatggaagatcagagcatctgttatatactctatacgtgcacatcatggagcagtgaggtctctggctgttaaccaagatgaatgtactgtttttactgcaggaattggccaaggatataaaggaactgttcagaaatgggaattgagccgaactaactgtctgtccggctaccatggccatgaggaggttgtgaatgatatttacatcttatcatctagtggaagagtggcttcttgtgatggaacaattcacatttggaatagtcaaacagggaagcagatattagtatttgctgagtcccaaacagaatctggccatcctacaagccatccatcctctgcatcaaaaattaacagtgaccaggcaaatgtgcttaatatgaatacactatccaatggaatattgtctagtgcttttgactcaagcctttatacttgtatgcatctattaaactccactgaaactcttgtagttggaactggaaatggttctctgaggtgaaattaattctttgtttttgaatgccatttcaatcagataattaaaaaatatgtcaatgcctgccaacttttgaatctttgctgtactgtacaggttcattgatgttgctcgaggtcaaaagcttcatatctggagaggcgaatctactgtatctagttttccttcacttatttctgccatttgttccactggctctgacaagatgcaagcaggtggaatttccactttgccatcttttattgcagctggactaagttctggtcactgtaaattatttgatgcaaagagtggaaatgtaatttcctcttggcgagctcatgatgcatatgtgacaaagttggcagcacctgaggaacatctacttgtttccagctctctggacagaactttacgagtctgggacttaagaatgaatctgccattgcagcccattattttcagaggtcattcagatggcatatccagtttctccgtttggggccaagatgttatttcaatttcccggaatagaatcgggcttctctccttgtctaaatctgccaatgaaacagatgggcagcatcacattagcccccagaaactatatatttctgataatggtcagagaagcttgtcagcgttatcaagtattagtatacttccattctctcgattgtttctcattggaaccgaagatggttatctgagaatctgttgttaaatatgcttcattgttttcctt

SEQ ID NO: 5335 - protein, 250 aa, Glycine max
  misc_feature (1)..(250): Ceres Seq. ID no. 14308206
SEYNPAKLLLNGVGWSIPQSQGRSAKNLIPQRRPFKVHQSPVAVHEGMSYQMNHEPWFWFPSPATIWDGPEFLGRVGVQKDELPWKIRASVIYSIRAHHGAVRSLAVNQDECTVFTAGIGQGYKGTVQKWELSRTNCLSGYHGHEEVVNDIYILSSSGRVASCDGTIHIWNSQTGKQILVFAESQTESGHPTSHPSSASKINSDQANVLNMNTLSNGILSSAFDSSLYTCMHLLNSTETLVVGTGNGSLR

SEQ ID NO: 5336 - protein, 203 aa, Glycine max
  misc_feature (1)..(203): Ceres Seq. ID no. 14308207
MSYQMNHEPWFWFPSPATIWDGPEFLGRVGVQKDELPWKIRASVIYSIRAHHGAVRSLAVNQDECTVFTAGIGQGYKGTVQKWELSRTNCLSGYHGHEEVVNDIYILSSSGRVASCDGTIHIWNSQTGKQILVFAESQTESGHPTSHPSSASKINSDQANVLNMNTLSNGILSSAFDSSLYTCMHLLNSTETLVVGTGNGSLR

SEQ ID NO: 5337 - protein, 199 aa, Glycine max
  misc_feature (1)..(199): Ceres Seq. ID no. 14308208
MNHEPWFWFPSPATIWDGPEFLGRVGVQKDELPWKIRASVIYSIRAHHGAVRSLAVNQDECTVFTAGIGQGYKGTVQKWELSRTNCLSGYHGHEEVVNDIYILSSSGRVASCDGTIHIWNSQTGKQILVFAESQTESGHPTSHPSSASKINSDQANVLNMNTLSNGILSSAFDSSLYTCMHLLNSTETLVVGTGNGSLR

SEQ ID NO: 5338 - DNA, 776 bp, Glycine max
  misc_feature (1)..(776): Ceres Seq. ID no. 14308247
aaagtgtattcaggtaaaaaaaacatggttctaagtgaaatatggtactcgtctcatttggcagacaattaaattgaaagaaaacagtgtgtggatactgcaagatagctgcacaaacctttatgagtcaatggtggcatatgcttgtgtggacattactggcattcagtctgtgatgacaggatgtgattctagcaatcttgccatactgccctcaggattctccattattcctgatggtcttgagtcaaggccattggtgattagttcaaggcaggaagaaaaaaatactgagggaggatctttgtttacaatggcattccagattcttaccaatgcttctcccacagccaagttaacattggaatctgtggactcggtcaacactcttgtatcttgtacattgagaaatatcagaacaagtttacaatgtgaagatggttagttaaaatcagataatcacttgatagagagccatagactttaattagctgtgataatcttgggctctgtattccctttttggatggtattcggtttggcaaaaatagcttgcgtttgtccccttattctgttctgggttagttttaatcattattccattaccaaggagggttggttgagtttgtatatctgtatctgcagttctgtaggtggaaagatagacaagaagcttttagaacctagatattaagtatggcgagtatagaaattatcatttgttaattcctcatgcagttggtattttttgtagtaattttgattattcctgcctt

SEQ ID NO: 5339 - protein, 104 aa, Glycine max
  misc_feature (1)..(104): Ceres Seq. ID no. 14308248
MVAYACVDITGIQSVMTGCDSSNLAILPSGFSIIPDGLESRPLVISSRQEEKNTEGGSLFTMAFQILTNASPTAKLTLESVDSVNTLVSCTLRNIRTSLQCEDG

SEQ ID NO: 5340 - protein, 89 aa, Glycine max
  misc_feature (1)..(89): Ceres Seq. ID no. 14308249
MTGCDSSNLAILPSGFSIIPDGLESRPLVISSRQEEKNTEGGSLFTMAFQILTNASPTAKLTLESVDSVNTLVSCTLRNIRTSLQCEDG

SEQ ID NO: 5341 - protein, 55 aa, Glycine max
  misc_feature (1)..(55): Ceres Seq. ID no. 14308250
MVFGLAKIACVCPLILFWVSFNHYSITKEGWLSLYICICSSVGGKIDKKLLEPRY

SEQ ID NO: 5342 - DNA, 1123 bp, Glycine max
  misc_feature (1)..(1123): Ceres Seq. ID no. 14308255
tgcaaaccctgctgggtttcctgaattctattatttcccaacgctacaatttgaaccctttgggggcatgccatttttcacacatgcacctcctcctgcaatgttcttcccagttgcagaaactcctctcaccaatacaatagccaaccaaattgattattactttagtgatgctaatttagtgaaggatgagtatttaaggtccaacatggatgaacagggatgggttcctattactctgattgcaagcttcccaagggttagaagtttgacaagcaacattaagttgatattggattcattgagaacttccactgtcgtggaagtgcagggggacaagttaaggaggtgcaatgagtggatgaagtggcttccctccgcccagcttcgggccaactctggttcaatatcccctagcggatcaagttctaataacctagcagctgattttgaaaagatcacagtggatgaagctatttcacataaagttaacactgagcctaccacaaatgaagatgctgcaggagagtcctcaactcagtcccaagtcccaaatgatgctactgtgagcagcaattaaaactcaactcagtttatcttcctcatcccaaaatacttggcccattctagtttttggccctgtgcgactcttgattttgaaagggtttttttggaggggatggtaggataggttgattcctttctacggtgactgagatcgattttggtagcaattgaatcaaatagggaaataaataagaattctttggaattattatggcctaaaaagataaagaaagttaacgagacacaagaaatctagaattttgatggaggtgaattgagttttgggttttgtatagtttttttttgctgcggatgatttattctttattttctggtggcttatggtggtatgtgtgggtaaagtatttgttatgaattgaattgaattgaattgagcacttgagttcgcttgtgccaagttgccctgccattttaacaaattaggccttgatgtttgctctgtcacctctgtgtgctcacataaataggtggtagattgtttgatggtcttgcccgtttatacttgttgccctaagtaatttcttcgttcgttacg

SEQ ID NO: 5343 - protein, 192 aa, Glycine max
  misc_feature (1)..(192): Ceres Seq. ID no. 14308256
ANPAGFPEFYYFPTLQFEPFGGMPFFTHAPPPAMFFPVAETPLTNTIANQIDYYFSDANLVKDEYLRSNMDEQGWVPITLIASFPRVRSLTSNIKLILDSLRTSTVVEVQGDKLRRCNEWMKWLPSAQLRANSGSISPSGSSSNNLAADFEKITVDEAISHKVNTEPTTNEDAAGESSTQSQVPNDATVSSN

SEQ ID NO: 5344 - protein, 170 aa, Glycine max
  misc_feature (1)..(170): Ceres Seq. ID no. 14308257
MPFFTHAPPPAMFFPVAETPLTNTIANQIDYYFSDANLVKDEYLRSNMDEQGWVPITLIASFPRVRSLTSNIKLILDSLRTSTVVEVQGDKLRRCNEWMKWLPSAQLRANSGSISPSGSSSNNLAADFEKITVDEAISHKVNTEPTTNEDAAGESSTQSQVPNDATVSSN

SEQ ID NO: 5345 - protein, 159 aa, Glycine max
  misc_feature (1)..(159): Ceres Seq. ID no. 14308258
MFFPVAETPLTNTIANQIDYYFSDANLVKDEYLRSNMDEQGWVPITLIASFPRVRSLTSNIKLILDSLRTSTVVEVQGDKLRRCNEWMKWLPSAQLRANSGSISPSGSSSNNLAADFEKITVDEAISHKVNTEPTTNEDAAGESSTQSQVPNDATVSSN

SEQ ID NO: 5346 - DNA, 680 bp, Glycine max
  misc_feature (1)..(680): Ceres Seq. ID no. 14308267
aaatagcaagaatttcagaaatattttacatcatcacataaatggacgccggattcaagaccaccgaagaatgtattcaagctttcgacaagctcaagatgcataagaacgttagataccttgttttcaaagttgtcggcagtgaagtcgttttggaatcccaaggtgaaagaaacactgattgggaagaattcgttaaagccttacccagagaacaatccagatacgttgtctatgacttcagctacaagaccgaagacaagccccctagagacgtcagcaagttgatcttcatctactggtctcccgatgaggcacccgcaaaggataagatgctctccgccactgctaagggagctttcagaaaggctcttatgggagttgctagagatttccaagcaaaagatattagcgatctcgaatacaaggaagtcagagaaaagttgtaagtgtgaatatgggaatatttcacataaatatcctatgagatgaatcttggaggatttatttgtcttcttacggaagagtaatataaaaaccatttatttgaaactttgagatatatatgctataatcttatatgatacagtcttgcatacagtaaattttttgcaaggctcttatataagtatcctctctccctaaatctctcatgttaaaaaaagataaccctctaatac

SEQ ID NO: 5347 - protein, 135 aa, Glycine max
  misc_feature (1)..(135): Ceres Seq. ID no. 14308268
MDAGFKTTEECIQAFDKLKMHKNVRYLVFKVVGSEVVLESQGERNTDWEEFVKALPREQSRYVVYDFSYKTEDKPPRDVSKLIFIYWSPDEAPAKDKMLSATAKGAFRKALMGVARDFQAKDISDLEYKEVREKL

SEQ ID NO: 5348 - protein, 116 aa, Glycine max
  misc_feature (1)..(116): Ceres Seq. ID no. 14308269
MHKNVRYLVFKVVGSEVVLESQGERNTDWEEFVKALPREQSRYVVYDFSYKTEDKPPRDVSKLIFIYWSPDEAPAKDKMLSATAKGAFRKALMGVARDFQAKDISDLEYKEVREKL

SEQ ID NO: 5349 - DNA, 1388 bp, Glycine max
  misc_feature (1)..(1388): Ceres Seq. ID no. 14308274
gaagaaaacatctagctgaagattccaatcggagctcagaaaaaagaaacctaatcgccgatcgcgtcgccgtcgcgccgaaagtcaccggactactgcctgcttctaaatagcttataatcttatctgaagatagagatatcatcatgggagaggtggcagtaatgcattctgagcctctgcagtttgattgcaatgacatgaagcatatcactgagaaagatgtatataatctattgtcaaacgaagagcacatacttggagaagaatcaagtcaatcatcaaatgacaaaaagatcaatgatttgagagagagaggatacatgaagtatggatgtcaacattaccgaagaagatgccgtattagggccccctgttgtgatgagatttttgattgccgccattgtcacaatgaggcaaaaaataatatcaacattgaccagaagcatagacacgatattccccgccatcaagttaaacaggtgatatgttctctttgtgagacagaacaagaggttcagcaaaattgtattaactgtggcgtttgtatgggcaagtacttctgtgggacgtgtaagctctttgatgatgatgtatctaagcagcagtatcattgcagtggctgtggaatttgcagaactggaggatgtgaaaatttcttccactgccacaaatgtggttgttgctactcaactcagctgaaaaacagccacccttgcgtggaaggagcaatgcatcatgattgccccatttgctttgagtatttgtttgaatctgtgaatgatgtcactgttctgctctgtggacatacaatacataagagctgcctaaaggaaatgagggaacatttccagtatgcatgccctctctgcttgaagtcggtttgtgatatgtcaaaggtttgggagaaatttgacttggagattgctgctacaccaatgcctgaaccgtatcaaaacaaaatggtttggatcctttgcaatgattgtggcaaaagttctcacgtgcagttccatcttgttgctcaaaagtgcttgaactgcaagtcctacaacacacgggaaacaagaggctgagcaagtggtaatggttatttataggaccacttttgctctcacttcattgctgtgtaggtgtagtggcaatccaagtgcatcctttattgaggaaaatgcatgtgggaattgtcatttaattgcaggcaggccgaaccacatccaagagaaaaacggtttatcacgttgatgtggtgtcgagggtagtgtagagtcagcaattgtcgtgttggttatttcgtgttggggaaacccttttagtgttccagtgttcactcctgtaatgtttgtttgggattaatgccaactttcaaattagctgttactttatag

SEQ ID NO: 5350 - protein, 309 aa, Glycine max
  misc_feature (1)..(309): Ceres Seq. ID no. 14308275
MGEVAVMHSEPLQFDCNDMKHITEKDVYNLLSNEEHILGEESSQSSNDKKINDLRERGYMKYGCQHYRRRCRIRAPCCDEIFDCRHCHNEAKNNINIDQKHRHDIPRHQVKQVICSLCETEQEVQQNCINCGVCMGKYFCGTCKLFDDDVSKQQYHCSGCGICRTGGCENFFHCHKCGCCYSTQLKNSHPCVEGAMHHDCPICFEYLFESVNDVTVLLCGHTIHKSCLKEMREHFQYACPLCLKSVCDMSKVWEKFDLEIAATPMPEPYQNKMVWILCNDCGKSSHVQFHLVAQKCLNCKSYNTRETRG

SEQ ID NO: 5351 - protein, 303 aa, Glycine max
  misc_feature (1)..(303): Ceres Seq. ID no. 14308276
MHSEPLQFDCNDMKHITEKDVYNLLSNEEHILGEESSQSSNDKKINDLRERGYMKYGCQHYRRRCRIRAPCCDEIFDCRHCHNEAKNNINIDQKHRHDIPRHQVKQVICSLCETEQEVQQNCINCGVCMGKYFCGTCKLFDDDVSKQQYHCSGCGICRTGGCENFFHCHKCGCCYSTQLKNSHPCVEGAMHHDCPICFEYLFESVNDVTVLLCGHTIHKSCLKEMREHFQYACPLCLKSVCDMSKVWEKFDLEIAATPMPEPYQNKMVWILCNDCGKSSHVQFHLVAQKCLNCKSYNTRETRG

SEQ ID NO: 5352 - protein, 291 aa, Glycine max
  misc_feature (1)..(291): Ceres Seq. ID no. 14308277
MKHITEKDVYNLLSNEEHILGEESSQSSNDKKINDLRERGYMKYGCQHYRRRCRIRAPCCDEIFDCRHCHNEAKNNINIDQKHRHDIPRHQVKQVICSLCETEQEVQQNCINCGVCMGKYFCGTCKLFDDDVSKQQYHCSGCGICRTGGCENFFHCHKCGCCYSTQLKNSHPCVEGAMHHDCPICFEYLFESVNDVTVLLCGHTIHKSCLKEMREHFQYACPLCLKSVCDMSKVWEKFDLEIAATPMPEPYQNKMVWILCNDCGKSSHVQFHLVAQKCLNCKSYNTRETRG

SEQ ID NO: 5353 - DNA, 1148 bp, Glycine max
  misc_feature (1)..(1148): Ceres Seq. ID no. 14308282
tatgagagcaaaagtggtgactattctaatccatggagactttgcaccgtgacacaggtggaagaattgaaaagtttgattcacatgtttccaatttgggctactgggatcatttttgctgcggtttatgcccagatgtcaacgttgtttgtggagcaaggaacaatgatgaacacatgtattggttccttcaaactacccccagcttccctctcaatttttgatgtcataagtgtggttttgtgggtccctctctatgacaggataattgttccaatcttaaggaagttcacaggcaaagaaaggggcctctcaatgctgcaaagaatgggaattggccttttcatttcagtcctgtgcatgttagcagctgctgttgttgagattatgcgtctgcagcttgcaagagagcttgaccttgttgataaacctgttgatgtgccccttagtgtactttggcaaatccctcagtatttctttttaggggcagcagaagtattcacatttgtggggcagcttgagttcttatatgaccaatctccatatggtatgaagactttaggtactgcactgacacttctgaatttttcattgggaaattacttgagctctttcattcttactatggtaacttacttcaccacactagatggaaagcctggttggattccagataacttgaacaaaggtcatctcgattactttttcttgcttttagctggacttagcttcttaaatatgtctttgtacatagttgctgccaaaaggtacaagcagaagaaggcttgttaagatttttcagggagtggaagcatgttctgaaatttccttctgtcattgattgttctgtttgtatatatgctacgcataaaagtaaacttggcttctctcaagagcctctaagggtgtatttggttcagaggagaaaaatagaagaattttttttaattaaaatagaatggaagaggtgtgagtctcaaaataaaatacaaaatttctcttgtatattatttctctccttcaaaacaaatacaccctaagtgagaaggttcacataggtaaattgttggcagtaaatgttcacattctgtacggtgcaaaactcacatatgtaacttgtatatggcatcagattatttgagctcagc

SEQ ID NO: 5354 - protein, 263 aa, Glycine max
  misc_feature (1)..(263): Ceres Seq. ID no. 14308283
YESKSGDYSNPWRLCTVTQVEELKSLIHMFPIWATGIIFAAVYAQMSTLFVEQGTMMNTCIGSFKLPPASLSIFDVISVVLWVPLYDRIIVPILRKFTGKERGLSMLQRMGIGLFISVLCMLAAAVVEIMRLQLARELDLVDKPVDVPLSVLWQIPQYFFLGAAEVFTFVGQLEFLYDQSPYGMKTLGTALTLLNFSLGNYLSSFILTMVTYFTTLDGKPGWIPDNLNKGHLDYFFLLLAGLSFLNMSLYIVAAKRYKQKKAC

SEQ ID NO: 5355 - protein, 235 aa, Glycine max
  misc_feature (1)..(235): Ceres Seq. ID no. 14308284
MFPIWATGIIFAAVYAQMSTLFVEQGTMMNTCIGSFKLPPASLSIFDVISVVLWVPLYDRIIVPILRKFTGKERGLSMLQRMGIGLFISVLCMLAAAVVEIMRLQLARELDLVDKPVDVPLSVLWQIPQYFFLGAAEVFTFVGQLEFLYDQSPYGMKTLGTALTLLNFSLGNYLSSFILTMVTYFTTLDGKPGWIPDNLNKGHLDYFFLLLAGLSFLNMSLYIVAAKRYKQKKAC

SEQ ID NO: 5356 - protein, 218 aa, Glycine max
  misc_feature (1)..(218): Ceres Seq. ID no. 14308285
MSTLFVEQGTMMNTCIGSFKLPPASLSIFDVISVVLWVPLYDRIIVPILRKFTGKERGLSMLQRMGIGLFISVLCMLAAAVVEIMRLQLARELDLVDKPVDVPLSVLWQIPQYFFLGAAEVFTFVGQLEFLYDQSPYGMKTLGTALTLLNFSLGNYLSSFILTMVTYFTTLDGKPGWIPDNLNKGHLDYFFLLLAGLSFLNMSLYIVAAKRYKQKKAC

SEQ ID NO: 5357 - DNA, 1519 bp, Glycine max
  misc_feature (1)..(1519): Ceres Seq. ID no. 14308363
aggttgcttatcgatagccaggatgcgctggagctgaaacttacttgggaagaggctcaagatttgctccgtcctcctccaactgttaagccaagcattgtcatgattgaggatcatgtatttgaagaatatgaagaacctcctgtctttggaaagaggagtatattcgtagttcgatcaactgggtaagatgagtattgtacattagagttttcttctttttatttcttgtgtcaagttttccctcttttaccatcctcttattttctatttaaccttatgaattcttttacaagttatagcaatgcataaatttatatattttgattatttcaatttggagtgcgatgggatctcagggtaaatgagcagtggatgcagtgtgatagttgctcaaaatggcggaagttgcctgttgatgcacttattcccccaaagtggacatgtgtggagaatttatgggatcagagcaggtgttcatgtgctgctcccaatgaattgaacccaagggaactggataatcttctgaggctgaataaagaattcaagaaacaaagactggcagcaagccagagaccggccctggaatgtgaatcttcaggactggatgctttggcaaatgcagcaatactgggagatgatgcaagtgactctggcagaacaccagttgttaccaccacaaaacatcctcggcatagacctgggtgctcttgcattgtttgtatccagccaccaagtgggaagggcaaacacaaacctacatgcacctgcaatgtgtgcatgacagttaaacgtcggtttaaaaccctgatgatgcgaaagaagaagcggcaatccgaacgtgaagcagagattgctcagagaaatcagttatcatggcggacgaaagatgaatcagaagtagatagcacctctcgccatttaactccagttgacggtttggagaatgaagtaagggtgcaaaatgaattagattcaaggagtccagacgatgcggtggctgaagctgccaagggacaattagacttgaattgccaacctgatcgagaagatgtgcaagctgggccgaacagcttgagcatgacaagtcttcttgaagaagcaaatctcccgctggagacctatctgaagcaaaatggccttactagcttgataacagagcagcaaacaaattcagcttcaaatgtgcaggcacagacaaccaatgatagtgaggtgaaacacaatgaggattgcggaaccgcttcggttattcatgcgcaggaaagcagtcctgaagagaacagtgggcaagataaagagcaaaacaattaactcatgaaatcttgccagttacattttcttttttccttttttttttactccgaaatcattttacaagaatccttgcttaagttataaaattataagagcttcatttgtatgtgtatatatattttctgttgttgtctgtgtcttgtggttgtgaaatttccccccaaaactcaataacatatatacgccaaagcttgtgttttag

SEQ ID NO: 5358 - protein, 312 aa, Glycine max
  misc_feature (1)..(312): Ceres Seq. ID no. 14308364
MQCDSCSKWRKLPVDALIPPKWTCVENLWDQSRCSCAAPNELNPRELDNLLRLNKEFKKQRLAASQRPALECESSGLDALANAAILGDDASDSGRTPVVTTTKHPRHRPGCSCIVCIQPPSGKGKHKPTCTCNVCMTVKRRFKTLMMRKKKRQSEREAEIAQRNQLSWRTKDESEVDSTSRHLTPVDGLENEVRVQNELDSRSPDDAVAEAAKGQLDLNCQPDREDVQAGPNSLSMTSLLEEANLPLETYLKQNGLTSLITEQQTNSASNVQAQTTNDSEVKHNEDCGTASVIHAQESSPEENSGQDKEQNN

SEQ ID NO: 5359 - protein, 177 aa, Glycine max
  misc_feature (1)..(177): Ceres Seq. ID no. 14308365
MTVKRRFKTLMMRKKKRQSEREAEIAQRNQLSWRTKDESEVDSTSRHLTPVDGLENEVRVQNELDSRSPDDAVAEAAKGQLDLNCQPDREDVQAGPNSLSMTSLLEEANLPLETYLKQNGLTSLITEQQTNSASNVQAQTTNDSEVKHNEDCGTASVIHAQESSPEENSGQDKEQNN

SEQ ID NO: 5360 - protein, 167 aa, Glycine max
  misc_feature (1)..(167): Ceres Seq. ID no. 14308366
MMRKKKRQSEREAEIAQRNQLSWRTKDESEVDSTSRHLTPVDGLENEVRVQNELDSRSPDDAVAEAAKGQLDLNCQPDREDVQAGPNSLSMTSLLEEANLPLETYLKQNGLTSLITEQQTNSASNVQAQTTNDSEVKHNEDCGTASVIHAQESSPEENSGQDKEQNN

SEQ ID NO: 5361 - DNA, 1430 bp, Glycine max
  misc_feature (1)..(1430): Ceres Seq. ID no. 14308423
acatttgtcagttagttagcagagtgcagtgacttgagaatggccttgccagtggtcgtcgacgcagagtacctcaaagaggtcgacaaggctcgccgcgatctccgcgcactcatcgctaacaggaactgcgctcctctcatgcttcgattggcctggcacgatgccggaacttacgatgctaagaccaagactggtggacctaacggttcgatccgtaacgaggaagagtattctcacggcgccaacaatggcttgaagaaggctattgatttctgtgaggaagtgaaggaaaaacatcctaaaattacatatgcagatctctaccagtgcccacaaatctctatcagctcaaaagggagggggaacaaatccctaaaacaagaattctgggtagctatatctattttgtattagtagcagtaatacacctagaggttgctagttaaggagtgtacaggagtacaattgaagttcaagcttctatcttgcgggtgttgttgcagttgaggttaccgggggtcccacaattgatttcgctcctggtagaagggattcaaaaatatctcctaatgaagggcggcttcctgatgctaaaaaaggtgtttttaaatttttttcagtgataaaactattctcttcacctggactgtgaaagatgttctattttttgtattcccttcacaatggacgaggttatgaatgcgatatgaaagcataaaaatatgtcaatgctgttgttaggtgtttcacatctccatgatatcttttatcgaatgggcttgactgaccgagatattgttgcactatctggaggacatacactggggagagcacatccagagagatcagggtttgatggcccttggacagaggaccctctgaagtttgataactcatactttgtggaacttttgaaagaagattctgctgggctgcttaaacttccaacagacaaggctttattggaggatgctgaatttcgccgttatgttgagctatatgcaaaggacgaggatgcattttttcgagattatgctgaatcacataagaaactttcagagctaggctttgtgccaagttcaaagccgatttctattaaggatgggaccatactggcacaaggtgctgtaggagttgtagttactgccgcagtggtgatcatcagttacttgtatgaagttcgcaaaagagggaagtaaactggacttgttcatttcacttggctgttacgtttgcgtgaccctgacccataatgtgaaaacagggttcatttttgcagcttcagattctgtttacttagtaccaataaagaataatgccacagccattcagacttttttttatatgaatagactaaaactatccctaaatactcaatttggtagcaacttcctaatatgttaatacaaattttagcattcccagtc

SEQ ID NO: 5362 - protein, 158 aa, Glycine max
  misc_feature (1)..(158): Ceres Seq. ID no. 14308424
MSMLLLGVSHLHDIFYRMGLTDRDIVALSGGHTLGRAHPERSGFDGPWTEDPLKFDNSYFVELLKEDSAGLLKLPTDKALLEDAEFRRYVELYAKDEDAFFRDYAESHKKLSELGFVPSSKPISIKDGTILAQGAVGVVVTAAVVIISYLYEVRKRGK

SEQ ID NO: 5363 - protein, 156 aa, Glycine max
  misc_feature (1)..(156): Ceres Seq. ID no. 14308425
MLLLGVSHLHDIFYRMGLTDRDIVALSGGHTLGRAHPERSGFDGPWTEDPLKFDNSYFVELLKEDSAGLLKLPTDKALLEDAEFRRYVELYAKDEDAFFRDYAESHKKLSELGFVPSSKPISIKDGTILAQGAVGVVVTAAVVIISYLYEVRKRGK

SEQ ID NO: 5364 - protein, 141 aa, Glycine max
  misc_feature (1)..(141): Ceres Seq. ID no. 14308426
MGLTDRDIVALSGGHTLGRAHPERSGFDGPWTEDPLKFDNSYFVELLKEDSAGLLKLPTDKALLEDAEFRRYVELYAKDEDAFFRDYAESHKKLSELGFVPSSKPISIKDGTILAQGAVGVVVTAAVVIISYLYEVRKRGK

SEQ ID NO: 5365 - DNA, 1402 bp, Glycine max
  misc_feature (1)..(1402): Ceres Seq. ID no. 14308433
gtcacaagttctttcactggaaggagaacaagaagaaaaaaccgacacaaagatctagtcctagctagaatcaaacaggggcgatctcaccttcaagaacacatcgccatggcaaggaacttgcttcttgtgctttttgcagtagccaccctcctccatggctcagcagcccaaaccagacacatggtcggtgatgccacgggctggatcatccctgctggcggcgctgccacctacaccgcctgggcttccaacaaaaccttcaccgtaaacgacactctcgtgttcaacttcgccaccggccaacacaacgtggccaaggtaacgaaatcggctttcgacgcgtgcaacggcgggagcgccgttttcaccctgacctccggtccagcgaccgtgaccctgaacgaaacaggggagcaatactacatttgctccgttggatcacactgttccgctggccagaaactggcaattaacgttaacagagcttcttctaccggtccttcccctgcacctcaacccagaggaagtggttctccaccaagggctagccctgtccccacacaagcaccacaagccagtagccccactcctccaccaaggtctgcaccagcacctgcttttggtccatcctctgaaccagctactttcattgttggagaaaccgctggctggattgttcctggcaacgcttccttttacacagcttgggcctctggcaaaaacttcagggttggagacgtccttgtgttcaactacgcatcaaatacacacaacgtagaggaggttacaaaggccaacttcgatgcttgcagctcagcctctcctattgccactttcaccactccacctgcgagagtgaccctcaacaaatctggtcaacatttcttcatctgtggaattccagggcactgtttgggaggtcaaaagcttgccatcaacgtcaccggcagcagcaccgccaccccaccttccgccgcggccccccccaccactccttctagcccttctccagccggtgctgtcactcctcccccacagaactctggtgctgcatctcttggagttgttggagtatttgccaccctgctttcagttgccgccacttttttctattagatactccacgagattattctagtcaggagcttccgagtcatcatcatcgctctttgattgtgtttcatgaattcagtttttttcttatttttttgaggatgacaataaagttagctttaatttaatttctcttcatcggctacagttttggttttttgttatgtttttgagtaaaaataaattggtacggtgtgaatatgttaacaagtgtatttctttgatagttaacatcgttgtattacagtgcatatatttggaattggagataaaaaatatttgtgac

SEQ ID NO: 5366 - protein, 372 aa, Glycine max
  misc_feature (1)..(372): Ceres Seq. ID no. 14308434
VTSSFTGRRTRRKNRHKDLVLARIKQGRSHLQEHIAMARNLLLVLFAVATLLHGSAAQTRHMVGDATGWIIPAGGAATYTAWASNKTFTVNDTLVFNFATGQHNVAKVTKSAFDACNGGSAVFTLTSGPATVTLNETGEQYYICSVGSHCSAGQKLAINVNRASSTGPSPAPQPRGSGSPPRASPVPTQAPQASSPTPPPRSAPAPAFGPSSEPATFIVGETAGWIVPGNASFYTAWASGKNFRVGDVLVFNYASNTHNVEEVTKANFDACSSASPIATFTTPPARVTLNKSGQHFFICGIPGHCLGGQKLAINVTGSSTATPPSAAAPPTTPSSPSPAGAVTPPPQNSGAASLGVVGVFATLLSVAATFFY

SEQ ID NO: 5367 - protein, 336 aa, Glycine max
  misc_feature (1)..(336): Ceres Seq. ID no. 14308435
MARNLLLVLFAVATLLHGSAAQTRHMVGDATGWIIPAGGAATYTAWASNKTFTVNDTLVFNFATGQHNVAKVTKSAFDACNGGSAVFTLTSGPATVTLNETGEQYYICSVGSHCSAGQKLAINVNRASSTGPSPAPQPRGSGSPPRASPVPTQAPQASSPTPPPRSAPAPAFGPSSEPATFIVGETAGWIVPGNASFYTAWASGKNFRVGDVLVFNYASNTHNVEEVTKANFDACSSASPIATFTTPPARVTLNKSGQHFFICGIPGHCLGGQKLAINVTGSSTATPPSAAAPPTTPSSPSPAGAVTPPPQNSGAASLGVVGVFATLLSVAATFFY

SEQ ID NO: 5368 - protein, 311 aa, Glycine max
  misc_feature (1)..(311): Ceres Seq. ID no. 14308436
MVGDATGWIIPAGGAATYTAWASNKTFTVNDTLVFNFATGQHNVAKVTKSAFDACNGGSAVFTLTSGPATVTLNETGEQYYICSVGSHCSAGQKLAINVNRASSTGPSPAPQPRGSGSPPRASPVPTQAPQASSPTPPPRSAPAPAFGPSSEPATFIVGETAGWIVPGNASFYTAWASGKNFRVGDVLVFNYASNTHNVEEVTKANFDACSSASPIATFTTPPARVTLNKSGQHFFICGIPGHCLGGQKLAINVTGSSTATPPSAAAPPTTPSSPSPAGAVTPPPQNSGAASLGVVGVFATLLSVAATFFY

SEQ ID NO: 5369 - DNA, 1943 bp, Glycine max
  misc_feature (1)..(1943): Ceres Seq. ID no. 14308477
tctctatccttctcccccttcctccaaaactgaccaagtcccatactcttccgccatatcactacttttcaacacgctctaatttaaacaatactcccactaccgcacatggatattttcacttcctatacataaccctattccgccatctcttttttcacacttcatttccttcttcttctctgattttggttcatggcgtgggcgaagaagccaggtgactcaaataatgtaggctttatgagatggttagcgttggtgttggtgttggtgttgttatcgggcttttggtgtgtttcgggtgtgaaagaaggaaaaaggaatgcgtacgcgacaatgatgtacgtaggtacgccgagggactacgaattctacatagccatacgcgtgcttctgaaatcgctggctacgctcgacgctcaagccgatcttgttgtcattgcttcccttgatgttcctcctcgctggattcgtgctcttgaaaaggaagatggtgcgaaagtagtgagagtggaaaatctggacaacccctacaagcatcaagataattttgacaagaggttcaagttatcgttgaacaaactctacgcatggagcttagtggactatgacagggtggtgatgttggacgctgataacctcttccttcaaaacacggacgagttgtttcaatgtggacaattctgtgcggtctttatcaatccttgtgtgttccacacaggactcttcgtcttgcagccatcgatgaccgtgttcaaggacatggttcatgaattacgtaatgggagagaaaatcctgatggtgcagaccagggtttcatagctagctatttcccagagttacttgataagccaatgtttcacccaccacctaatggcaccaagcttgatggaacatataggcttcctttgggttatcagatggatgcttcttactattatcttaaacttcgctggagcataccctgtggaccaaatagtgtgatcacattcccaggggcaccatggttgaagccatggtattggtggtcctggcctgttctgccattaggcctccagtggcatgataaacgtcgccaaactttagggtatggtgcggagatggctgtgatacttattcaatcggcaatatatttgggaataatagcaatgactcgttttgcaaggccaagtctctcaaagctatgctataggcgctctgacaagagcatcaacttggtgcagaacatcctcaaattggtggcattgtggagcatccttgcggcttacacaacacccttcttcatcattcctcacacggttcaccctttgttaggatggcctctctacttgcttggtgtctttgcattgtgctctattgcagtcaatgcctttctgctgccaatgttgccggttctgatgccgtggctcgggatcaccggtgctttgattgtcatggcttttccttggtattcagatggggtggtgagagcattgtgcgtttttggttatgcattctgtgctgcaccgtgtgtgtgggcatctatgactaggataatggcagggcttcaccagtctctagaaagggaagcttttttgccaagattaggagaatcttcaccaccctcttggtttaacaagttatattgagctgtctgattgagcatgattgaatgcttggggacatagatgacaagctcattggaaactgaaggggaggaagtgccatggatttagaaccattatgatgttacggtcgaaattatatacatttttcttggagcgagatggccatgttgcacttactaggaggaggaacaacgcggagttagtgtgtgtatataaagataaagattgttttgctatttttcacatacatatgtatcaattattgcacgattggttcttgtattcaaatttttaaacttgttagacagtgagataagatcagagagttcggcatc

SEQ ID NO: 5370 - protein, 477 aa, Glycine max
  misc_feature (1)..(477): Ceres Seq. ID no. 14308478
MAWAKKPGDSNNVGFMRWLALVLVLVLLSGFWCVSGVKEGKRNAYATMMYVGTPRDYEFYIAIRVLLKSLATLDAQADLVVIASLDVPPRWIRALEKEDGAKVVRVENLDNPYKHQDNFDKRFKLSLNKLYAWSLVDYDRVVMLDADNLFLQNTDELFQCGQFCAVFINPCVFHTGLFVLQPSMTVFKDMVHELRNGRENPDGADQGFIASYFPELLDKPMFHPPPNGTKLDGTYRLPLGYQMDASYYYLKLRWSIPCGPNSVITFPGAPWLKPWYWWSWPVLPLGLQWHDKRRQTLGYGAEMAVILIQSAIYLGIIAMTRFARPSLSKLCYRRSDKSINLVQNILKLVALWSILAAYTTPFFIIPHTVHPLLGWPLYLLGVFALCSIAVNAFLLPMLPVLMPWLGITGALIVMAFPWYSDGVVRALCVFGYAFCAAPCVWASMTRIMAGLHQSLEREAFLPRLGESSPPSWFNKLY

SEQ ID NO: 5371 - protein, 462 aa, Glycine max
  misc_feature (1)..(462): Ceres Seq. ID no. 14308479
MRWLALVLVLVLLSGFWCVSGVKEGKRNAYATMMYVGTPRDYEFYIAIRVLLKSLATLDAQADLVVIASLDVPPRWIRALEKEDGAKVVRVENLDNPYKHQDNFDKRFKLSLNKLYAWSLVDYDRVVMLDADNLFLQNTDELFQCGQFCAVFINPCVFHTGLFVLQPSMTVFKDMVHELRNGRENPDGADQGFIASYFPELLDKPMFHPPPNGTKLDGTYRLPLGYQMDASYYYLKLRWSIPCGPNSVITFPGAPWLKPWYWWSWPVLPLGLQWHDKRRQTLGYGAEMAVILIQSAIYLGIIAMTRFARPSLSKLCYRRSDKSINLVQNILKLVALWSILAAYTTPFFIIPHTVHPLLGWPLYLLGVFALCSIAVNAFLLPMLPVLMPWLGITGALIVMAFPWYSDGVVRALCVFGYAFCAAPCVWASMTRIMAGLHQSLEREAFLPRLGESSPPSWFNKLY

SEQ ID NO: 5372 - protein, 430 aa, Glycine max
  misc_feature (1)..(430): Ceres Seq. ID no. 14308480
MMYVGTPRDYEFYIAIRVLLKSLATLDAQADLVVIASLDVPPRWIRALEKEDGAKVVRVENLDNPYKHQDNFDKRFKLSLNKLYAWSLVDYDRVVMLDADNLFLQNTDELFQCGQFCAVFINPCVFHTGLFVLQPSMTVFKDMVHELRNGRENPDGADQGFIASYFPELLDKPMFHPPPNGTKLDGTYRLPLGYQMDASYYYLKLRWSIPCGPNSVITFPGAPWLKPWYWWSWPVLPLGLQWHDKRRQTLGYGAEMAVILIQSAIYLGIIAMTRFARPSLSKLCYRRSDKSINLVQNILKLVALWSILAAYTTPFFIIPHTVHPLLGWPLYLLGVFALCSIAVNAFLLPMLPVLMPWLGITGALIVMAFPWYSDGVVRALCVFGYAFCAAPCVWASMTRIMAGLHQSLEREAFLPRLGESSPPSWFNKLY

SEQ ID NO: 5373 - DNA, 1286 bp, Glycine max
  misc_feature (1)..(1286): Ceres Seq. ID no. 14308536
aaaacccaaaacctcttcttcttactctcttacgttaattcttcgttgtctatgatggcattggatatgattgatgttgttcccaggacgaggatggaagaagaaaatatagcaatacaagaagcagcttccgctgggttaaagagcatggagcatctcattcgtctcctttctccttcttcttctcttcacaacaacgttaataatctcaatctcaaccacctcgactgctccgaaatcaccggcttcactgtctccaagttcaaacaagtcatcaaccttctcaaccgcaccggccacgcccgcttccgccgctctccaccccaagcccaagcccaagcccaagcccaagcccaagcccaaactaatcctcaaccacaacctcagatccaacaacaagggttcagtttagatttcgtgaagcccaccattctaaactcaaagcccatcaacaaagacgaaactttgactctttcaacaacctcttcttccttcatgtcctccgtcaccaacgacgccagcgtctccgacggcaagatcggacctttcctccctccctccgccgccaaaccccctctctcctccgcccaccggaaaaagtgccgcgacgccgccgcagcactctccgccaaaccctcctgccactgctccaagaaaaggaaatcacgcgtgaaacgaacgattcgggtgccggcgataagctcaaagatcgcagatatcccaccggacgagtattcgtggagaaaatacggtcaaaaaccgatcaagggctcaccttaccctcgagggtactacaagtgcagcaccgtgagagggtgtccggcgaggaagcacgtggagcgagcgcaggatgaccccaagatgctaatagtgacttacgagggtgagcaccgtcacgtgctgccgttaacttccgccgccggcgttagtttcggccattgagttaatcgacggcgtcttttggaaacttgacgggggacgttaaatgagcgtcggatcgtgaagtaacggcggatgcgaacaaggatcgattcggttcgaggacggaaaaagaaaagtggcaactaaagtcaactttcgcgttgtggaatgattttgttgacgaggacttttgtgtaaatttgaccccaagtaaagtagtgcaggtctcaaagaatgaaaattatagtgatctcatctgtttttctttatttctattttttttttaaaagagacatttatttatttatttatttgatgttagagttgaattggttgaaggatggggctgcaataattttcttggt

SEQ ID NO: 5374 - protein, 313 aa, Glycine max
  misc_feature (1)..(313): Ceres Seq. ID no. 14308537
KTQNLFFLLSYVNSSLSMMALDMIDVVPRTRMEEENIAIQEAASAGLKSMEHLIRLLSPSSSLHNNVNNLNLNHLDCSEITGFTVSKFKQVINLLNRTGHARFRRSPPQAQAQAQAQAQAQTNPQPQPQIQQQGFSLDFVKPTILNSKPINKDETLTLSTTSSSFMSSVTNDASVSDGKIGPFLPPSAAKPPLSSAHRKKCRDAAAALSAKPSCHCSKKRKSRVKRTIRVPAISSKIADIPPDEYSWRKYGQKPIKGSPYPRGYYKCSTVRGCPARKHVERAQDDPKMLIVTYEGEHRHVLPLTSAAGVSFGH

SEQ ID NO: 5375 - protein, 296 aa, Glycine max
  misc_feature (1)..(296): Ceres Seq. ID no. 14308538
MMALDMIDVVPRTRMEEENIAIQEAASAGLKSMEHLIRLLSPSSSLHNNVNNLNLNHLDCSEITGFTVSKFKQVINLLNRTGHARFRRSPPQAQAQAQAQAQAQTNPQPQPQIQQQGFSLDFVKPTILNSKPINKDETLTLSTTSSSFMSSVTNDASVSDGKIGPFLPPSAAKPPLSSAHRKKCRDAAAALSAKPSCHCSKKRKSRVKRTIRVPAISSKIADIPPDEYSWRKYGQKPIKGSPYPRGYYKCSTVRGCPARKHVERAQDDPKMLIVTYEGEHRHVLPLTSAAGVSFGH

SEQ ID NO: 5376 - protein, 295 aa, Glycine max
  misc_feature (1)..(295): Ceres Seq. ID no. 14308539
MALDMIDVVPRTRMEEENIAIQEAASAGLKSMEHLIRLLSPSSSLHNNVNNLNLNHLDCSEITGFTVSKFKQVINLLNRTGHARFRRSPPQAQAQAQAQAQAQTNPQPQPQIQQQGFSLDFVKPTILNSKPINKDETLTLSTTSSSFMSSVTNDASVSDGKIGPFLPPSAAKPPLSSAHRKKCRDAAAALSAKPSCHCSKKRKSRVKRTIRVPAISSKIADIPPDEYSWRKYGQKPIKGSPYPRGYYKCSTVRGCPARKHVERAQDDPKMLIVTYEGEHRHVLPLTSAAGVSFGH

SEQ ID NO: 5377 - DNA, 1189 bp, Glycine max
  misc_feature (1)..(1189): Ceres Seq. ID no. 14308600
gagcagccagtgtgaaccagtctcacctcattgattcattctccgtcagaaatacctttcctttgcgaaagagaagagatctgaaaccctaaccctaaccctaaccagaggtaatggattcagtgcctcgaagaagcagaggaggaggcgttttggaaaacctcgacaaggtcctaatgcgtcgcaactgagtctacgtcaccttcgtcatcgcaggcgccttcctcggagaacgggctgtggattacggagctcacaagatcggggagcacaataacgttgggtccaaatggcacctagatggaaaggaaaagatgcaaaagctaaaaaggatgcacaagctgaagcgctcaaggaacccatgtcaaagattgtatctcaacttcagtcttctctagttcaatcaaatacttgtggatttctctctggtagtagtgtacacttagcagtgggagcagaacaacttcatttgctcgataaagcatgctttggctcacctgtgagaacagttgaaaaggacaaacctcggtttcaattaagctttgaggaggcattctacctatgctattccttgaaatgccttaagattaataatgacagtgatgatactagtccccaaaacagtgaagagctgtggcattacatgaagtcaaagaaagaaacattcccttgtttctacaaggcttattcccacctgagaatgaaaaactgggtagtgaggtcaggagctcagtatggtgcagatttcgttgtctattgtcaccatccagctcgggtccattccgagtatggtgtgcttgttttatcagatggagaagataaagatctaaatggaaggttgagagtatggtctgatgttcattgcacaactcgacttcttggaggtgttgcaaaaatcttattggttttgtatgtcaatagaaatggtagcagcaatgagtctccattatgtttggcaaactacaccattgaagagcacacaatcaccagatggaatccagaacagtgccgcgaaaagatggtaattcatgctaattctgataatggaactgggtaaatacttcatcatatggacgcaacaaaatatatcaaacatgaaaaaaaaagtattttttttattgtctttgtccaaagatattagttattcaagcataacaatattcttaaagatttgattccttttccgttt

SEQ ID NO: 5378 - protein, 255 aa, Glycine max
  misc_feature (1)..(255): Ceres Seq. ID no. 14308601
MAPRWKGKDAKAKKDAQAEALKEPMSKIVSQLQSSLVQSNTCGFLSGSSVHLAVGAEQLHLLDKACFGSPVRTVEKDKPRFQLSFEEAFYLCYSLKCLKINNDSDDTSPQNSEELWHYMKSKKETFPCFYKAYSHLRMKNWVVRSGAQYGADFVVYCHHPARVHSEYGVLVLSDGEDKDLNGRLRVWSDVHCTTRLLGGVAKILLVLYVNRNGSSNESPLCLANYTIEEHTITRWNPEQCREKMVIHANSDNGTG

SEQ ID NO: 5379 - protein, 231 aa, Glycine max
  misc_feature (1)..(231): Ceres Seq. ID no. 14308602
MSKIVSQLQSSLVQSNTCGFLSGSSVHLAVGAEQLHLLDKACFGSPVRTVEKDKPRFQLSFEEAFYLCYSLKCLKINNDSDDTSPQNSEELWHYMKSKKETFPCFYKAYSHLRMKNWVVRSGAQYGADFVVYCHHPARVHSEYGVLVLSDGEDKDLNGRLRVWSDVHCTTRLLGGVAKILLVLYVNRNGSSNESPLCLANYTIEEHTITRWNPEQCREKMVIHANSDNGTG

SEQ ID NO: 5380 - protein, 137 aa, Glycine max
  misc_feature (1)..(137): Ceres Seq. ID no. 14308603
MKSKKETFPCFYKAYSHLRMKNWVVRSGAQYGADFVVYCHHPARVHSEYGVLVLSDGEDKDLNGRLRVWSDVHCTTRLLGGVAKILLVLYVNRNGSSNESPLCLANYTIEEHTITRWNPEQCREKMVIHANSDNGTG

SEQ ID NO: 5381 - DNA, 1381 bp, Glycine max
  misc_feature (1)..(1381): Ceres Seq. ID no. 14308625
tgtaactcccgtagtcccgctgtatgttgtgttgaattgcttgctcaggcagcttgaaggagcacattgctaaggttaaaatagctgaaattgcatttatggtgcaattatgcaatttgctgtaagcagtgttgtggtagtaatgttctaaatcttgaaagtgttgtttcctaggtttatagcatctatttaaggactcatgagaaatcccagtttattggaacatgtttgtctcgctgacatctatctgctgtagcattcaactagtctgtgttttggtaactgtgtggacatgccattcaatccctgagtaaaatgtgaaaacattttacatttattgccactgctaatagtttccaaggataacgaaagcaataatctaattttgtttttgtaccctctactctagaaggtacaaagaaaatgcatgcttgaataaatttttaattgttctcatttgtagaaaaaagttggaattccattttacttgaagatgtttgagctaataacttctcttctaagttcgaacttacatggtttcttaaatggcaatcacaggcagcattgcatgctctaggaaacatctcgggagaaaccagatctgagaacaacatcatactcaatgccgaagaagaagaaaacctgcgacgcttaatttatgaaacagcatccagaagctcaaagctgactccatcgggtctttttctgtcagtattgcagcaggattcagaaatacgtctagcgggctatagaatgctaagtggattggttgcccgaccatggtgcttgatggagatatgttcaaaacaagagattataaataaagttacggacccaagtactgaaacgacaaaaataggtatggaaggcagatataactgctgcaaggcaatacacaaatcattgacagtgtctagtagagtttctgctaatcctgcttttgcaggaatagctgcaaagtttcaggaagctgttggaatgggtccatatcttgttaaaaggcatgttgaagctcaacctgctgtgataacggctgatagattttagttttcacacctgagtggtcaagcaatacctgtaatggagcagttttttttctcttctcaaatacaatgtggagtgttatagaacaaaaaccttttccccctcaaatgttgaaacttgatggaatgagtatattaatcatagttttttagtgtattatatttcaatggcttttgtcaactctagcaaatagatattctttttggctttggatgtgtgttgcatgtgtgaagtagtagtctttgtcaacaattacattgtctactaactggcatatatactgaacttgcattcagctataatttagcttattcaagttcgactgcagcatgttgtt

SEQ ID NO: 5382 - protein, 97 aa, Glycine max
  misc_feature (1)..(97): Ceres Seq. ID no. 14308626
MLSGLVARPWCLMEICSKQEIINKVTDPSTETTKIGMEGRYNCCKAIHKSLTVSSRVSANPAFAGIAAKFQEAVGMGPYLVKRHVEAQPAVITADRF

SEQ ID NO: 5383 - protein, 85 aa, Glycine max
  misc_feature (1)..(85): Ceres Seq. ID no. 14308627
MEICSKQEIINKVTDPSTETTKIGMEGRYNCCKAIHKSLTVSSRVSANPAFAGIAAKFQEAVGMGPYLVKRHVEAQPAVITADRF

SEQ ID NO: 5384 - protein, 61 aa, Glycine max
  misc_feature (1)..(61): Ceres Seq. ID no. 14308628
MEGRYNCCKAIHKSLTVSSRVSANPAFAGIAAKFQEAVGMGPYLVKRHVEAQPAVITADRF

SEQ ID NO: 5385 - DNA, 1215 bp, Glycine max
  misc_feature (1)..(1215): Ceres Seq. ID no. 14308632
agcaatacatgtaacaaagcttcagttcaaattgaagccagaaaatcaggtgcagtttctagtgcttctgagaaatatgattgccatagagactatgcagacaggggaatggttgattcttttcaaggttcaattcagtcatcagagcaagcatcatccaagaatgggtccatgtttatcaaggaaaagaagagggaaatgttggtcaatggtggtgtcagtggttcttcctcaagagcatcaaatcttgatggtgctgttcatggtggagtgaagggaaagagaagcgagagggagaggaatcaaagccgggatcagagcagacaaaattctattggcagagctggacgcatgtcactggacagtagccaaaatgagaacaaaccaaaagctaagaagcaaaagagtactgctagtggacatgataggtttatggaagcaaaggaatctgctcgtttaccaattcatgatacaatcaataatgatagcaaagatggggctacgttatctggtaaccaggacacttctcaaataaaggaatccaatgactttgggaatttgccgctacctgacttaagttcaatagaagaatttggtggtgcgcaagatcttagttcatggttgaactttgaagaagatggtttgccagaccatgattctattggccttgatattccaatggatgacctatcggatttaaatatgcttatgtgaagggatgtacacgtgttatatctgaaggagagtttgtatgtactcagtgaaccttgtggggcgtcaagatcttgatggtatacttgggtttctctggaggggaaatttttgtgattggaattatgaattttgacacatttatagggtgaacgggagatggggagtgacttaaaattgcaatttgatatttttgtggacgttgtatagaggaagctacaatcatggatttcatgaaattgctgtcagatatctcccttctcccatgaatcaaactagttttgctgtgttaaagtcatgatctcagaaatggcttttctataggagattagattaattaaagtgctatagcctgagagtggtttcatttctgaagctgtgacttcagctaccatactatgtaaaatgtttattgttcttgtagaccgaaactcgcacaattttgattgttttctcctgaataatggagaatgagtttttaattaagtttttctaggattaaag

SEQ ID NO: 5386 - protein, 237 aa, Glycine max
  misc_feature (1)..(237): Ceres Seq. ID no. 14308633
SNTCNKASVQIEARKSGAVSSASEKYDCHRDYADRGMVDSFQGSIQSSEQASSKNGSMFIKEKKREMLVNGGVSGSSSRASNLDGAVHGGVKGKRSERERNQSRDQSRQNSIGRAGRMSLDSSQNENKPKAKKQKSTASGHDRFMEAKESARLPIHDTINNDSKDGATLSGNQDTSQIKESNDFGNLPLPDLSSIEEFGGAQDLSSWLNFEEDGLPDHDSIGLDIPMDDLSDLNMLM

SEQ ID NO: 5387 - protein, 201 aa, Glycine max
  misc_feature (1)..(201): Ceres Seq. ID no. 14308634
MVDSFQGSIQSSEQASSKNGSMFIKEKKREMLVNGGVSGSSSRASNLDGAVHGGVKGKRSERERNQSRDQSRQNSIGRAGRMSLDSSQNENKPKAKKQKSTASGHDRFMEAKESARLPIHDTINNDSKDGATLSGNQDTSQIKESNDFGNLPLPDLSSIEEFGGAQDLSSWLNFEEDGLPDHDSIGLDIPMDDLSDLNMLM

SEQ ID NO: 5388 - protein, 180 aa, Glycine max
  misc_feature (1)..(180): Ceres Seq. ID no. 14308635
MFIKEKKREMLVNGGVSGSSSRASNLDGAVHGGVKGKRSERERNQSRDQSRQNSIGRAGRMSLDSSQNENKPKAKKQKSTASGHDRFMEAKESARLPIHDTINNDSKDGATLSGNQDTSQIKESNDFGNLPLPDLSSIEEFGGAQDLSSWLNFEEDGLPDHDSIGLDIPMDDLSDLNMLM

SEQ ID NO: 5389 - DNA, 1060 bp, Glycine max
  misc_feature (1)..(1060): Ceres Seq. ID no. 14308640
attttgctgtggaagaagaataagaccaaggttttaattagagcctcgtttgtgcaagtgaaaaataggatcacattgacctattcttttttcaagctcttttaattgtcttgggaagaaaatgaacccagaaatgaatggggttgaggctgagaagaggcaagagaatggacatgagaaagtggattatgatgtgcaagagaaaatagactatgtttttaaggtggtggtgataggggactcagcagttggaaagactcaaatactctcaaggtttgcaaagaatgagttctgctttgactcaaagtccaccattggggttgaattccagactaggactgtcactattaatgccaaagtcatcaaagctcagatctgggacactgctggccaggaaaggtacagggctgtaacaagtgcatactacagaggtgcattaggggcaatgcttgtctacgacataacgaagaggcaatcgtttgatcatgtagcgagatgggtggaggagctgcgtgcgcacgcagatagctccattgtgatcatgttggttgggaacaaagctgatcttgtggaccagagaatggtaccaactgaggatgcagtggagtttgctgaggaccaaggcctcttcttctccgagacttcagctctcagtggtgacaatgtggagagtgcatttctcaaattgctagaagagatcaatagggtagtgtccaaaaaggctttggaatgtggtttagggaaggagaatggtgacaccaatgttgcctcactcaaaggaacaaaggttgatataatcttaggtcctgaattggaaattagtgagatgaagaaattgtcttcgtgctcttgttaatattggtagtgagatttaagtttgtgtattttgattttgagtttgggaaaaagagcagagtgagtgaaaagtatatatacatgagtatccttaacggtgagtgtggaaggctaagttgattttatttgctattgctttccatgctgagttgaagagtaatagttatcctgtttcgttatgattatgaattattacagttatggc

SEQ ID NO: 5390 - protein, 244 aa, Glycine max
  misc_feature (1)..(244): Ceres Seq. ID no. 14308641
MNPEMNGVEAEKRQENGHEKVDYDVQEKIDYVFKVVVIGDSAVGKTQILSRFAKNEFCFDSKSTIGVEFQTRTVTINAKVIKAQIWDTAGQERYRAVTSAYYRGALGAMLVYDITKRQSFDHVARWVEELRAHADSSIVIMLVGNKADLVDQRMVPTEDAVEFAEDQGLFFSETSALSGDNVESAFLKLLEEINRVVSKKALECGLGKENGDTNVASLKGTKVDIILGPELEISEMKKLSSCSC

SEQ ID NO: 5391 - protein, 240 aa, Glycine max
  misc_feature (1)..(240): Ceres Seq. ID no. 14308642
MNGVEAEKRQENGHEKVDYDVQEKIDYVFKVVVIGDSAVGKTQILSRFAKNEFCFDSKSTIGVEFQTRTVTINAKVIKAQIWDTAGQERYRAVTSAYYRGALGAMLVYDITKRQSFDHVARWVEELRAHADSSIVIMLVGNKADLVDQRMVPTEDAVEFAEDQGLFFSETSALSGDNVESAFLKLLEEINRVVSKKALECGLGKENGDTNVASLKGTKVDIILGPELEISEMKKLSSCSC

SEQ ID NO: 5392 - protein, 136 aa, Glycine max
  misc_feature (1)..(136): Ceres Seq. ID no. 14308643
MLVYDITKRQSFDHVARWVEELRAHADSSIVIMLVGNKADLVDQRMVPTEDAVEFAEDQGLFFSETSALSGDNVESAFLKLLEEINRVVSKKALECGLGKENGDTNVASLKGTKVDIILGPELEISEMKKLSSCSC

SEQ ID NO: 5393 - DNA, 1407 bp, Glycine max
  misc_feature (1)..(1407): Ceres Seq. ID no. 14308679
gagaagaaacgagagcgagagagagaaagaaatggcgaccaacattgggatcatggatgcggcttacttcgtcggcagatctgagattctttcttggatcaactcaactctgcaactcaatctctccaaagtcgaagaggcttgttccggcgccgttcattgtcagcttctcgatgccgctcatccagggatcgtgcctatgcacaaggtcaatttcgacgccaagagcgagtacgagatgattcagaactacaaggtccttcaagatgtcttcaacaaactcaaaatcaccaagcacatcgaggtcagcaagctggtgaaaggaaggccactggataacctcgagttcatgcaatggatgaaacgatactgcgattctgtcgattccggccttcagtacaattataatcctctggagaggagagaggtttgcaaaggaggaagagaaacgagcaagaaatctgcaaactcccaagcctcaaccaagggttctactgcacagagacctcattcttctcataatgctcgaagaaatgaggtttctaatgcaaaccctacaaatcaggctgcaaaggttgcgagagcagcaccttctgctggaaaccctgctcctgtgtatgaagaaaagataacagagttgaagttgtccattgatagccttgagaaggaacgagatttctacttcgcaaagctgagagatattgagatactgtgccagactcctgagatagaacactcaccgattgttgcggcaatacagaagatattatatgctacagatgacaatggaatggctgtggtcgaagctcaagctatgatttctgttggtcgtaaggaaatagagggattaagccccattgctgaggtttcggaggagaagagcagttcagaaactcataagagaaagaatattgccaatattgattttgatgttgctggcctcgcaacgttgtctcccagacagaggctttctgatgtttcagatgttcattgtagcgagtcacctcttatgacttgttagggaggaggaaggatcaccttctgttgttaattcagttagcaacatgttaaaaccgttttggtcacagtaattcctgttacaagtgtgaattgacagggttattcataatggttaggggttttagggagactattctgttatcaagtatcaagtatcgggtatcgggtatcagcccagaaaaatgtagccagatatattttgcctttagaatttgcttgttgtctcaacaatgtttctgaatccagtcatgtaatttctggctagtgctttgagcaacactatttcattttcagcatttttttcatttattatgtgatgatcaaattgtttacaattcagggaaaattacatatcggaatttgtaattaatttctgaattcggtctt

SEQ ID NO: 5394 - protein, 339 aa, Glycine max
  misc_feature (1)..(339): Ceres Seq. ID no. 14308680
RRNESEREKEMATNIGIMDAAYFVGRSEILSWINSTLQLNLSKVEEACSGAVHCQLLDAAHPGIVPMHKVNFDAKSEYEMIQNYKVLQDVFNKLKITKHIEVSKLVKGRPLDNLEFMQWMKRYCDSVDSGLQYNYNPLERREVCKGGRETSKKSANSQASTKGSTAQRPHSSHNARRNEVSNANPTNQAAKVARAAPSAGNPAPVYEEKITELKLSIDSLEKERDFYFAKLRDIEILCQTPEIEHSPIVAAIQKILYATDDNGMAVVEAQAMISVGRKEIEGLSPIAEVSEEKSSSETHKRKNIANIDFDVAGLATLSPRQRLSDVSDVHCSESPLMTC

SEQ ID NO: 5395 - protein, 329 aa, Glycine max
  misc_feature (1)..(329): Ceres Seq. ID no. 14308681
MATNIGIMDAAYFVGRSEILSWINSTLQLNLSKVEEACSGAVHCQLLDAAHPGIVPMHKVNFDAKSEYEMIQNYKVLQDVFNKLKITKHIEVSKLVKGRPLDNLEFMQWMKRYCDSVDSGLQYNYNPLERREVCKGGRETSKKSANSQASTKGSTAQRPHSSHNARRNEVSNANPTNQAAKVARAAPSAGNPAPVYEEKITELKLSIDSLEKERDFYFAKLRDIEILCQTPEIEHSPIVAAIQKILYATDDNGMAVVEAQAMISVGRKEIEGLSPIAEVSEEKSSSETHKRKNIANIDFDVAGLATLSPRQRLSDVSDVHCSESPLMTC

SEQ ID NO: 5396 - protein, 322 aa, Glycine max
  misc_feature (1)..(322): Ceres Seq. ID no. 14308682
MDAAYFVGRSEILSWINSTLQLNLSKVEEACSGAVHCQLLDAAHPGIVPMHKVNFDAKSEYEMIQNYKVLQDVFNKLKITKHIEVSKLVKGRPLDNLEFMQWMKRYCDSVDSGLQYNYNPLERREVCKGGRETSKKSANSQASTKGSTAQRPHSSHNARRNEVSNANPTNQAAKVARAAPSAGNPAPVYEEKITELKLSIDSLEKERDFYFAKLRDIEILCQTPEIEHSPIVAAIQKILYATDDNGMAVVEAQAMISVGRKEIEGLSPIAEVSEEKSSSETHKRKNIANIDFDVAGLATLSPRQRLSDVSDVHCSESPLMTC

SEQ ID NO: 5397 - DNA, 1228 bp, Glycine max
  misc_feature (1)..(1228): Ceres Seq. ID no. 14308683
gttttatggcagaaataggtgcacggcaggcatgggtttcagcttttgtgactcaatcacccaccataaccattattatcagtacatagtactagttaatctcagtcatgcctattcctaggtttatgctcttttcatcccagcatcgctccactgctgcggccctcgctcttcttcgaaggtgcgttccctctacgacaactcaatctgttaggtattcaaaatcaacaagtcacggtaaaacaaaacattatcttcatcctgtattccaaccagaatccagctccgcctcccaggtttctcgctcatggggtgcctatgttgttccagctgctgttcttggatttgctgggcttgcagctttttttcactataatgatgagagaagagcggttcccaaaggtcatcagggtggtggcctcagaaatgttgccaatggacccataattgggggtccatttacactaattaatacagagaaacaagcaattacagaacgtaattttcttgggaattgggtcctcctctactttggttatacctcatcccccgatcttgggccagagcaagtccaaattatggccaacgcaattgatatattagaatcaaaacagaatctcaagattctaccagtatttgtttccattgatcctcaacgtgatactccctcacaacttcgtgcttaccttaaagagtttgattcaagaatcataggattaactggacctgttgcagctattaggcagatggctcaagaatatcgtgtttactttaaaaaggtagaagaggatggcaatgattatcttgttgactgttcccacaacatgtatttgctgaatcctaaattggaggttacgagatgctttggagtcgagtatagtgcagaggagttgtcagaagcgatagtgaaagagctgaacagaaacccctcttgaatggttacgagatgctttggagtcgagtatagtgcggaggagatgtttctgtttttcgttttcttttaattagatcacagaataatttacatgtgatgaattaagttttactttagacgattggatttagctttgctttattttcaactagacttgcagaaaaatgtagtggcaatctgagcttcattttaagtttcgcgggcatttagttcttggctaacatcttagatggatgttttatacctgaatgttttcacattcaccttcatctaacaagcactttggttttagtt

SEQ ID NO: 5398 - protein, 275 aa, Glycine max
  misc_feature (1)..(275): Ceres Seq. ID no. 14308684
MPIPRFMLFSSQHRSTAAALALLRRCVPSTTTQSVRYSKSTSHGKTKHYLHPVFQPESSSASQVSRSWGAYVVPAAVLGFAGLAAFFHYNDERRAVPKGHQGGGLRNVANGPIIGGPFTLINTEKQAITERNFLGNWVLLYFGYTSSPDLGPEQVQIMANAIDILESKQNLKILPVFVSIDPQRDTPSQLRAYLKEFDSRIIGLTGPVAAIRQMAQEYRVYFKKVEEDGNDYLVDCSHNMYLLNPKLEVTRCFGVEYSAEELSEAIVKELNRNPS

SEQ ID NO: 5399 - protein, 269 aa, Glycine max
  misc_feature (1)..(269): Ceres Seq. ID no. 14308685
MLFSSQHRSTAAALALLRRCVPSTTTQSVRYSKSTSHGKTKHYLHPVFQPESSSASQVSRSWGAYVVPAAVLGFAGLAAFFHYNDERRAVPKGHQGGGLRNVANGPIIGGPFTLINTEKQAITERNFLGNWVLLYFGYTSSPDLGPEQVQIMANAIDILESKQNLKILPVFVSIDPQRDTPSQLRAYLKEFDSRIIGLTGPVAAIRQMAQEYRVYFKKVEEDGNDYLVDCSHNMYLLNPKLEVTRCFGVEYSAEELSEAIVKELNRNPS

SEQ ID NO: 5400 - DNA, 1284 bp, Glycine max
  misc_feature (1)..(1284): Ceres Seq. ID no. 14308705
aaaaccctaaagcccacaaaagcgacgaagcggacacgtcctgtgtcgcgaaaaggaagtcaaagaggtagccactgatctcggcgtcgatggagaacggcaacggcctgtctcctgcgagcttggcctccaccgatctcgacatcgatggagaacggcaacgacgtttggaggtaggtgtagttgcggtggagaatggtggtgacatggttcctatagaggccccactccatacccttcgtcctcgccttcttcctcttcctcgcgtagatctcactcggcctccaatgtgcgtcctactcctatgcgccccctcactcctcccactcagacattagggccaacctcattaggttcgacgcttccaaggtcgcaaaggacaagcacggcggagcagtgacgtgtggatcgcttcacatgggagaaattagggttgggaacaaaagagcgaatcaaagacaccacatttgtaatgagactttccttatttggggtgctactaccaagtttaggatgggacgtgttgatggacacaatcctcatatcaggaaggatttgcccttgacttggactaatgtctatgaggaggccactaattcatctgtatcattaatgttgctttggtaggtatgttggcaccctatgctcgaatagggaaaccatcaatatctagtgggttccttggtagaatacataaagcttatgcagccttgcctagcagtgtatttgaagtagaaagtccaggaaataggttttctgtataacagagacttagaacatacttctacaagggtataatgtatggagctgatggatttggatgtggtattataggccaaggcattgcaaatttgatcttgactgcaaaatggagcataaagacataagaagaagacatacatgtgccaccacttgtgaagagtgttgctctttgtggtatgatcttggtaataaagacataaaatcgtcttagaagacatacatgtgccatcacatgacctcgcaattttgggaagacaaaaaaagtttcagtgtggggtgctctaaaacattgcactgggatggctttcttctgcataggttggtgacatatacttttttattttaaatttaatctattatttaaatgaaaataaaattttacttagaaaccattatattgatatctagttatattcattgaacaactaacatattataattgtttagaaacttttacttatctatttaaaactgcttggttcaattagactggtagaaagtactagatattatctctttccg

SEQ ID NO: 5401 - protein, 82 aa, Glycine max
  misc_feature (1)..(82): Ceres Seq. ID no. 14308706
MENGNGLSPASLASTDLDIDGERQRRLEVGVVAVENGGDMVPIEAPLHTLRPRLLPLPRVDLTRPPMCVLLLCAPSLLPLRH

SEQ ID NO: 5402 - protein, 69 aa, Glycine max
  misc_feature (1)..(69): Ceres Seq. ID no. 14308707
MGEIRVGNKRANQRHHICNETFLIWGATTKFRMGRVDGHNPHIRKDLPLTWTNVYEEATNSSVSLMLLW

SEQ ID NO: 5403 - protein, 50 aa, Glycine max
  misc_feature (1)..(50): Ceres Seq. ID no. 14308708
MWYYRPRHCKFDLDCKMEHKDIRRRHTCATTCEECCSLWYDLGNKDIKSS

SEQ ID NO: 5404 - DNA, 1240 bp, Glycine max
  misc_feature (1)..(1240): Ceres Seq. ID no. 14308709
tttcaattttgttttgcacactactatcaattattgggaggtaagggctagaaaacaagttgtatcaattccaattgtggacaccattatacatacatcaaattttgcatgtcacgtgtattcacagtttgaccttagtattcaattattgggaggggaggaaaggaaaacaaagttatttcaattccaattgttgacactactatacatataatttcacatttcatatttgtttatgaatttaatggtgatatgctaacaatataaaatagttttacactttcatccaatcatagatcaccatctacatgacttctacgatagttttgtaaaaatcaacaaacttattacaaattatagattataaatggatgacaatgtaaattagttttacacttttacattgtcaatacatatctttttctctcttcatttattgacattaattttcaattaaatttgcagtttttacctggggcatgtttgatatccaatgatggcacaaagaagatgtgtggtgatgatcatagggcatggtacactagggggtgtcctagcaaatatggttgggctgctctaataggccttgctctttacatcatattcttctcacctggcatgggaactgttccatgggttgtgaactcagagatctatcccttgaggtacagaggggtttgtggaggaatagcatccacaactgtttggatttccaacctcattgtttctgagtccttcttgtccctcacaaaagctctagggacagcatggacattcatgatgtttggaattgtggccattgtggcaatcttctttgtcattatttttgtgcctgagaccaaaggggttcctatggaggaagtggagaagatgctagaacaaagatctgtgcagttcaagttttgggagaagagagattctggctctgagaagcattgactcaaagaacaaaaaaaaaagcaaaattgtttgagtcatttttattagttttatagcttaaaatagtgaaattaagtggcttgtgaagttatggttatttgatgacaatgattgttctctctgggtaagatttggtgatagttagcattttagctctaatgtgtatgtagttgtctagatgattagttggattgatgaaaatccttatgaaattccttagaggattggaatatgagaattggtaataagctcttatttgtgatataatgaagaaaaaaagtgtatcaagaatttgatcttt

SEQ ID NO: 5405 - protein, 142 aa, Glycine max
  misc_feature (1)..(142): Ceres Seq. ID no. 14308710
MCGDDHRAWYTRGCPSKYGWAALIGLALYIIFFSPGMGTVPWVVNSEIYPLRYRGVCGGIASTTVWISNLIVSESFLSLTKALGTAWTFMMFGIVAIVAIFFVIIFVPETKGVPMEEVEKMLEQRSVQFKFWEKRDSGSEKH

SEQ ID NO: 5406 - protein, 106 aa, Glycine max
  misc_feature (1)..(106): Ceres Seq. ID no. 14308711
MGTVPWVVNSEIYPLRYRGVCGGIASTTVWISNLIVSESFLSLTKALGTAWTFMMFGIVAIVAIFFVIIFVPETKGVPMEEVEKMLEQRSVQFKFWEKRDSGSEKH

SEQ ID NO: 5407 - DNA, 1282 bp, Glycine max
  misc_feature (1)..(1282): Ceres Seq. ID no. 14308735
atttaatcttttattatgaatcacgtggtcattttgaagaattgattgaattattagagaaaggattgggattggaacgtgcacataccggtatctttaccgaattaggtgtattgtatgccaaatacaaaccagaaaacttgatgaagcacattcaaatgtactatcgtcgtagtaacattccaaaattattaaatgcatgtgaaatggctcatttatgggctgaaatgagattcttgtactgtcatcatgatgaatatgataatgcaatcaaattaatgattgaacattcacctgaagcatgggatcatgcaatctttattgataccattactaaagaatctttaatcaatattgaattgtactacaaggccattcaattctacttggatgagcaaccatcacacattactgacttgttaacacacttgacaccaaaattagatcatgaacgtgttgcacgtgaagtgaaaaatcgtgatcgtgacaatctccctctcattaagaagtatttggagaatgttcaagaaaatgatttgactcaagtcaatgaagtgttaaatcaattgtacattgatgaagaagattacgaatcgttacgtcaatctattgacaagtatcgtaactttgatcaaagtggtttagccaagcaattggagaaccatgagttgttagaattcagacgcatcagtgcctacttgtataaactaaataaacaatgggaaaattctattagtttgagcaagaaggattcattatacttggatgcaatggaaactgctgcacaaagcaagaaacaaagtgttgctgaggatttactcacattctttgttgaaaagggtctaaaagactgctttgctgcatgcttgtacaattgttacaatttgattagagctgatgttgctatggaattggcatggcgtcacaagattcaagacatgagcatgccatacatgattcaagtagtacgtgagtacactagcaaagttgatgaactatatcaagcacaaaaagagttacaagaacaacaaaaggcacttgaagaagctaagaagaagcaaatggaaagtgttgataactatggtatggatgcaggtgcatacacttatgtaccatctacttatatgcctgcacaaacaattgttgctccaatgggttacatgccttatggatctacaattcctcaacaacaacaaatgcctcaacaatatagcggaatggatatgaaccaaggtgctcaattcttttaaataaaattataataaaaaaggtttaacaattt

SEQ ID NO: 5408 - protein, 415 aa, Glycine max
  misc_feature (1)..(415): Ceres Seq. ID no. 14308736
LIFYYESRGHFEELIELLEKGLGLERAHTGIFTELGVLYAKYKPENLMKHIQMYYRRSNIPKLLNACEMAHLWAEMRFLYCHHDEYDNAIKLMIEHSPEAWDHAIFIDTITKESLINIELYYKAIQFYLDEQPSHITDLLTHLTPKLDHERVAREVKNRDRDNLPLIKKYLENVQENDLTQVNEVLNQLYIDEEDYESLRQSIDKYRNFDQSGLAKQLENHELLEFRRISAYLYKLNKQWENSISLSKKDSLYLDAMETAAQSKKQSVAEDLLTFFVEKGLKDCFAACLYNCYNLIRADVAMELAWRHKIQDMSMPYMIQVVREYTSKVDELYQAQKELQEQQKALEEAKKKQMESVDNYGMDAGAYTYVPSTYMPAQTIVAPMGYMPYGSTIPQQQQMPQQYSGMDMNQGAQFF

SEQ ID NO: 5409 - protein, 368 aa, Glycine max
  misc_feature (1)..(368): Ceres Seq. ID no. 14308737
MKHIQMYYRRSNIPKLLNACEMAHLWAEMRFLYCHHDEYDNAIKLMIEHSPEAWDHAIFIDTITKESLINIELYYKAIQFYLDEQPSHITDLLTHLTPKLDHERVAREVKNRDRDNLPLIKKYLENVQENDLTQVNEVLNQLYIDEEDYESLRQSIDKYRNFDQSGLAKQLENHELLEFRRISAYLYKLNKQWENSISLSKKDSLYLDAMETAAQSKKQSVAEDLLTFFVEKGLKDCFAACLYNCYNLIRADVAMELAWRHKIQDMSMPYMIQVVREYTSKVDELYQAQKELQEQQKALEEAKKKQMESVDNYGMDAGAYTYVPSTYMPAQTIVAPMGYMPYGSTIPQQQQMPQQYSGMDMNQGAQFF

SEQ ID NO: 5410 - protein, 363 aa, Glycine max
  misc_feature (1)..(363): Ceres Seq. ID no. 14308738
MYYRRSNIPKLLNACEMAHLWAEMRFLYCHHDEYDNAIKLMIEHSPEAWDHAIFIDTITKESLINIELYYKAIQFYLDEQPSHITDLLTHLTPKLDHERVAREVKNRDRDNLPLIKKYLENVQENDLTQVNEVLNQLYIDEEDYESLRQSIDKYRNFDQSGLAKQLENHELLEFRRISAYLYKLNKQWENSISLSKKDSLYLDAMETAAQSKKQSVAEDLLTFFVEKGLKDCFAACLYNCYNLIRADVAMELAWRHKIQDMSMPYMIQVVREYTSKVDELYQAQKELQEQQKALEEAKKKQMESVDNYGMDAGAYTYVPSTYMPAQTIVAPMGYMPYGSTIPQQQQMPQQYSGMDMNQGAQFF

SEQ ID NO: 5411 - DNA, 1813 bp, Glycine max
  misc_feature (1)..(1813): Ceres Seq. ID no. 14308747
ggctcgttcgtttacctcaaacctcaaagaaaaaaaaaaacattgagttatcacttgttttcttttttgggaagacaaaaacattgagttcagcttctcacttccatggctgaggccagactctacgctcccccctctcaattggatattaagcaaattattttagaagcacagcatcgatggctacgtccggctgaaatttgtgcaattctcggtaattataagaagtttcgaattgctccagaacctgcacatatgccaccaagtggttcacttttcttatttgatcggaaggtgctgagacacttcagaaaggatggccataactggaggaagaaaaaagatggaaaaacagtgagagaagctcatgagagactaaaggctggaagtgtggatgtgttgcattgctactatgcccatggagaagaaaatgaaaattttcaaagacgcacgtattggttgcttgaagaggaactctctcacattgttctcgtccattatcgacaagtgaagggaaccaaggcgaattttacaagtgctaaagaaaatgaagaatctcttccttatgctcaacaaactgataaaattatgccccaaacagagatggacacttctttatcatctactcttcatccacatagttaccaggttccttcaaaaactgtcgatacaagcatgaacagtgcccaaacatcagaatatgaagaagctgaatctggtatttcttttgtgcgcattaataatttaaaatgttctgttttcaatttttcatatctagagggcattctgagtagcctttttgttgactttgttcttcgtatcactttcttgtgtgtatttaaattttttaactgtgtaatttttacagcattcaataaccatgcaagttctgagttttattctttcctcgagttacaacgccctgttgagaagatttcacctcaacctgctgatttttattctcctcggccactcataagtaaatttcttcattttaaattgtttttgagtttaactttgatgcattgtcagtttgtcactgtaaatttacattaccactctgtcatacattgtcgtatcattaaatgagtatgacttttttgaactaattttaagaatcaaacctttttaaatgttgtgacagtgcatgattgcatgatagtgtaaaaaactttacactaatattgcatcaaaaatcaaataccttgttatatatcttccatacatactggccttaatcaggaaagtctgtacctaacatgaatcatattattgaaactgggacagatgatcaagagaagttacctattattcctggggtgaattatatctcactcactcaagacaataaaaacaaagacattcttaatgctggattgacatatgaatccccaaaaccccttggcttttcctcatgggaaggtatcttagaaaataatgctggaagtcaacatgtgcattttcagcctttatttcctggaacacagcctgataacatgggaatcaatagcaatttttctcaaggagaagagataatggtgccatatttgaccaccagcattgctaagcagcatgagaatggaagtatcattaaagctgaaggaaattggcaggtttatgatgttgattctttacgcatgtccagttggcctatagatagtgcttattcaggctcaacatgtgaggtaagttgtagcaactgtgagcaggaagttaatgatgttgattttcagaaatccttggaacagtgtcttctacattcacacaaacaaaacaaggttctcatgcaaaatgatcttcaagaaaaactttt

SEQ ID NO: 5412 - protein, 327 aa, Glycine max
  misc_feature (1)..(327): Ceres Seq. ID no. 14308748
MAEARLYAPPSQLDIKQIILEAQHRWLRPAEICAILGNYKKFRIAPEPAHMPPSGSLFLFDRKVLRHFRKDGHNWRKKKDGKTVREAHERLKAGSVDVLHCYYAHGEENENFQRRTYWLLEEELSHIVLVHYRQVKGTKANFTSAKENEESLPYAQQTDKIMPQTEMDTSLSSTLHPHSYQVPSKTVDTSMNSAQTSEYEEAESGISFVRINNLKCSVFNFSYLEGILSSLFVDFVLRITFLCVFKFFNCVIFTAFNNHASSEFYSFLELQRPVEKISPQPADFYSPRPLISKFLHFKLFLSLTLMHCQFVTVNLHYHSVIHCRIIK

SEQ ID NO: 5413 - protein, 277 aa, Glycine max
  misc_feature (1)..(277): Ceres Seq. ID no. 14308749
MPPSGSLFLFDRKVLRHFRKDGHNWRKKKDGKTVREAHERLKAGSVDVLHCYYAHGEENENFQRRTYWLLEEELSHIVLVHYRQVKGTKANFTSAKENEESLPYAQQTDKIMPQTEMDTSLSSTLHPHSYQVPSKTVDTSMNSAQTSEYEEAESGISFVRINNLKCSVFNFSYLEGILSSLFVDFVLRITFLCVFKFFNCVIFTAFNNHASSEFYSFLELQRPVEKISPQPADFYSPRPLISKFLHFKLFLSLTLMHCQFVTVNLHYHSVIHCRIIK

SEQ ID NO: 5414 - protein, 184 aa, Glycine max
  misc_feature (1)..(184): Ceres Seq. ID no. 14308750
MNHIIETGTDDQEKLPIIPGVNYISLTQDNKNKDILNAGLTYESPKPLGFSSWEGILENNAGSQHVHFQPLFPGTQPDNMGINSNFSQGEEIMVPYLTTSIAKQHENGSIIKAEGNWQVYDVDSLRMSSWPIDSAYSGSTCEVSCSNCEQEVNDVDFQKSLEQCLLHSHKQNKVLMQNDLQEKL

SEQ ID NO: 5415 - DNA, 1298 bp, Glycine max
  misc_feature (1)..(1298): Ceres Seq. ID no. 14308787
gatcagcaccaattaaagaagaaatatgggaaatgaaggtattatgaatggtgttacccccgggaaggctaccatattagctcttggcaaggctttccctcatcagcttgtcatgcaagagtatttagttgatggatatttcagggacacaaactgtgacagtcctgaactcaagcagaagctcactagactttgcaagacaaccacagtgaaaacaaggtatgtggtaatgtcagaggagatactgaaaaagtatccagaacttgcggctgaaggcatccccacagtaaagcaacgactagagatatgcaatgaggcagtgacagaaatggccattgaagcttcccaagcttgcatcaacaactggggtggatctttatcagacataacacacttagtttatgtgtcatccagtgaagctagattacccggtggtgacctttacctagccaaaggactaggactgagccctgatactcaacgagtcatgctctattttgctggttgttcgggaggcgtggccggcttacgtgttgcgaaagacatagctgagaacaaccctggaagccgagtgctgattgctacctcagaaactacaattattgggttcaagccaccaagtgcagatagaccttatgatctagttggggtggcactctttggggatggtgctggtgcaatgataattggctcagacccaatattggagtctgagaagcctctctttgagcttcacactgcagttcaggagtttttgccacacactgagaagaaaatagatgggaggctgacagaagaaggaataagcttcaagttagcaagggaacttcctcaaataattgaagacaatgttgaaggattctgtgacaagttaataagtgttgttgggtttgagaacaaggagtacaacaagatgttttgggctgttcatccggggggtcctgccatcttgaaccgcattgaaaagaggcttgatttgttgccagagaagctgagtgcaagtagaagggctctcatggattatggcaatgctagcagtaacaccattgtgtatgtgcttgagtatatgatagaggaaggtctcaagattagaaaggatgccagaggagatcttgaatggggcttaatacttgcttttggaccagggattacatttgagggaattcttgccaggaacttgtgtgcttgatgatattattatcacaagatgtgtttatgtgatacgtgactccatcaaaagcatattcaagactataatgatcaaaagaagaaaagtcttaaataaaaactttaaccgt

SEQ ID NO: 5416 - protein, 387 aa, Glycine max
  misc_feature (1)..(387): Ceres Seq. ID no. 14308788
MGNEGIMNGVTPGKATILALGKAFPHQLVMQEYLVDGYFRDTNCDSPELKQKLTRLCKTTTVKTRYVVMSEEILKKYPELAAEGIPTVKQRLEICNEAVTEMAIEASQACINNWGGSLSDITHLVYVSSSEARLPGGDLYLAKGLGLSPDTQRVMLYFAGCSGGVAGLRVAKDIAENNPGSRVLIATSETTIIGFKPPSADRPYDLVGVALFGDGAGAMIIGSDPILESEKPLFELHTAVQEFLPHTEKKIDGRLTEEGISFKLARELPQIIEDNVEGFCDKLISVVGFENKEYNKMFWAVHPGGPAILNRIEKRLDLLPEKLSASRRALMDYGNASSNTIVYVLEYMIEEGLKIRKDARGDLEWGLILAFGPGITFEGILARNLCA

SEQ ID NO: 5417 - protein, 381 aa, Glycine max
  misc_feature (1)..(381): Ceres Seq. ID no. 14308789
MNGVTPGKATILALGKAFPHQLVMQEYLVDGYFRDTNCDSPELKQKLTRLCKTTTVKTRYVVMSEEILKKYPELAAEGIPTVKQRLEICNEAVTEMAIEASQACINNWGGSLSDITHLVYVSSSEARLPGGDLYLAKGLGLSPDTQRVMLYFAGCSGGVAGLRVAKDIAENNPGSRVLIATSETTIIGFKPPSADRPYDLVGVALFGDGAGAMIIGSDPILESEKPLFELHTAVQEFLPHTEKKIDGRLTEEGISFKLARELPQIIEDNVEGFCDKLISVVGFENKEYNKMFWAVHPGGPAILNRIEKRLDLLPEKLSASRRALMDYGNASSNTIVYVLEYMIEEGLKIRKDARGDLEWGLILAFGPGITFEGILARNLCA

SEQ ID NO: 5418 - protein, 358 aa, Glycine max
  misc_feature (1)..(358): Ceres Seq. ID no. 14308790
MQEYLVDGYFRDTNCDSPELKQKLTRLCKTTTVKTRYVVMSEEILKKYPELAAEGIPTVKQRLEICNEAVTEMAIEASQACINNWGGSLSDITHLVYVSSSEARLPGGDLYLAKGLGLSPDTQRVMLYFAGCSGGVAGLRVAKDIAENNPGSRVLIATSETTIIGFKPPSADRPYDLVGVALFGDGAGAMIIGSDPILESEKPLFELHTAVQEFLPHTEKKIDGRLTEEGISFKLARELPQIIEDNVEGFCDKLISVVGFENKEYNKMFWAVHPGGPAILNRIEKRLDLLPEKLSASRRALMDYGNASSNTIVYVLEYMIEEGLKIRKDARGDLEWGLILAFGPGITFEGILARNLCA

SEQ ID NO: 5419 - DNA, 660 bp, Glycine max
  misc_feature (1)..(660): Ceres Seq. ID no. 14308791
tctctctctcagaattttctcctctctccgattccttttattaattggagttttctcgctcctttttctttccctgaaaacatttcatcttcgtattgatgtcggaaaagggtcggccacttcccaaatttggtgaatgggatgtcaatgatccagcctcagctgaggggttcacagtgatttttaataaggccagggatgagaaaaagacaggtggcaacccagagtcaccaggaaagactgctactgatcctcatagcaaacctgcagtagagcctggcaaaactcagactaaaaaatggttttgctgcatgcaaaacccttctgccgaatcatagcatagcaatggttgctcctgtgaaaagcctgaacagaagaacaatgtttatgtgtaactagcgtcacagtattttctcaaagataagagctgtagagccataagcgaattctacggaatttatattttgtgatgtaaaagtgagctgcaatgggggaaagaaaagaagacagactattatttatgtgtgtgtatcaatgttgtggtttattattaggagccagggttgcttcctgttttgccttgtcttgcgctatgagctagagcgttgcttgtcacattgtattgcttgtattatgaaacaaatcctattttatgaaccc

SEQ ID NO: 5420 - protein, 79 aa, Glycine max
  misc_feature (1)..(79): Ceres Seq. ID no. 14308792
MSEKGRPLPKFGEWDVNDPASAEGFTVIFNKARDEKKTGGNPESPGKTATDPHSKPAVEPGKTQTKKWFCCMQNPSAES

SEQ ID NO: 5421 - protein, 44 aa, Glycine max
  misc_feature (1)..(44): Ceres Seq. ID no. 14308793
LSLRIFSSLRFLLLIGVFSLLFLSLKTFHLRIDVGKGSATSQIW

SEQ ID NO: 5422 - protein, 42 aa, Glycine max
  misc_feature (1)..(42): Ceres Seq. ID no. 14308794
MLWFIIRSQGCFLFCLVLRYELERCLSHCIACIMKQILFYEP

SEQ ID NO: 5423 - DNA, 1628 bp, Glycine max
  misc_feature (1)..(1628): Ceres Seq. ID no. 14308813
agtgcagtgtgaagtgcgtataatccatattctcatggcttccgttgcattcagaaacctaaattctaagcgcttccttttctctttgcatttcacaaatgctaattaccattcactctctcgtggaacttgcaccgtcatatcccaaaactgcaataatgcatttcctttggagctcgtttctctacggagatccttagccactttcgctcgaacaaagccccatcttaacgtgggcacaattgggcatgttgatcatgggaaaaccacactgactgctgcaattaccaaggtgctagctgaagaaggtaaagctaaggccattgcctttgaggacatagacaaggctcccgaggagaagaagagagggattactattgcgactgctcatgtagagtacgagacagcaaagaggcactatgcccatgttgattgcccaggacatgcagactatgttaagaacatgataactggagctgcacaaatggatggtggaattcttgtcgtttctgctcctgatgggccaatgcctcaaacaaaggaacatatactgcttgctcgtcaggttggtgtgccatcattggtctgctttctaaataaggttgatgctgttgatgatccagagttgcttgaacttgtggaaatggagcttcgtgaactgcttaatttctacaaatttcctggggatgatattccaattgtacgaggttctgctctggctgcattgcagggaactaatgaagaacttggaaagaaggctatcttaaaactaatggatgctgtggatgaatacatttcggatcctgtgcggcaacttgacaaacctttcttaatgccagtagaagatgttttctcaattcaggggcgtggaactgttgtgactggtcgtgttgaacaaggcaccatcaaagtaggtgaggaggttgaagtattgggactaacacagagtggacctttgaagactactgtaactggtgtggaaatgttcaagaaaattttggatcgaggggaagctggtgataatgtgggacttcttctacgtggtctgaagcgcgatgatgtacagagaggaatggtcgtgaccaagcctggtgcatttaaaacatataagaagtttgaagcagagatttatgttctctcaaaagatgaaggtggccgtcatactgcttttttctctaattataagccacagttttacttgaggactgcagatgttaccggaaaggtggaattaccggaaagtgttaagatggttatgcctggtgataatgtgactgctacttttgagctgatatcacctgttcctcttgaaataggacaaagatttgctttgagagagggaggcagaacagttggtgcaggagttgtttccaaagtgatggcctaggatgttggtctaaattctacaacatcttttgtaatttgtaaataagttgagtagggactgagagctatgttctaggaggattctatggtgtgactattttttgacacttggtgcgctggttccgtttcaatgtgttttgttttgtttattttagagaattatactagttcattatgtttttcgtggaccagagggaaaatggttcaaattttttggtttagttaataatgtcaatttcttc

SEQ ID NO: 5424 - protein, 461 aa, Glycine max
  misc_feature (1)..(461): Ceres Seq. ID no. 14308814
VQCEVRIIHILMASVAFRNLNSKRFLFSLHFTNANYHSLSRGTCTVISQNCNNAFPLELVSLRRSLATFARTKPHLNVGTIGHVDHGKTTLTAAITKVLAEEGKAKAIAFEDIDKAPEEKKRGITIATAHVEYETAKRHYAHVDCPGHADYVKNMITGAAQMDGGILVVSAPDGPMPQTKEHILLARQVGVPSLVCFLNKVDAVDDPELLELVEMELRELLNFYKFPGDDIPIVRGSALAALQGTNEELGKKAILKLMDAVDEYISDPVRQLDKPFLMPVEDVFSIQGRGTVVTGRVEQGTIKVGEEVEVLGLTQSGPLKTTVTGVEMFKKILDRGEAGDNVGLLLRGLKRDDVQRGMVVTKPGAFKTYKKFEAEIYVLSKDEGGRHTAFFSNYKPQFYLRTADVTGKVELPESVKMVMPGDNVTATFELISPVPLEIGQRFALREGGRTVGAGVVSKVMA

SEQ ID NO: 5425 - protein, 450 aa, Glycine max
  misc_feature (1)..(450): Ceres Seq. ID no. 14308815
MASVAFRNLNSKRFLFSLHFTNANYHSLSRGTCTVISQNCNNAFPLELVSLRRSLATFARTKPHLNVGTIGHVDHGKTTLTAAITKVLAEEGKAKAIAFEDIDKAPEEKKRGITIATAHVEYETAKRHYAHVDCPGHADYVKNMITGAAQMDGGILVVSAPDGPMPQTKEHILLARQVGVPSLVCFLNKVDAVDDPELLELVEMELRELLNFYKFPGDDIPIVRGSALAALQGTNEELGKKAILKLMDAVDEYISDPVRQLDKPFLMPVEDVFSIQGRGTVVTGRVEQGTIKVGEEVEVLGLTQSGPLKTTVTGVEMFKKILDRGEAGDNVGLLLRGLKRDDVQRGMVVTKPGAFKTYKKFEAEIYVLSKDEGGRHTAFFSNYKPQFYLRTADVTGKVELPESVKMVMPGDNVTATFELISPVPLEIGQRFALREGGRTVGAGVVSKVMA

SEQ ID NO: 5426 - protein, 307 aa, Glycine max
  misc_feature (1)..(307): Ceres Seq. ID no. 14308816
MITGAAQMDGGILVVSAPDGPMPQTKEHILLARQVGVPSLVCFLNKVDAVDDPELLELVEMELRELLNFYKFPGDDIPIVRGSALAALQGTNEELGKKAILKLMDAVDEYISDPVRQLDKPFLMPVEDVFSIQGRGTVVTGRVEQGTIKVGEEVEVLGLTQSGPLKTTVTGVEMFKKILDRGEAGDNVGLLLRGLKRDDVQRGMVVTKPGAFKTYKKFEAEIYVLSKDEGGRHTAFFSNYKPQFYLRTADVTGKVELPESVKMVMPGDNVTATFELISPVPLEIGQRFALREGGRTVGAGVVSKVMA

SEQ ID NO: 5427 - DNA, 499 bp, Glycine max
  misc_feature (1)..(499): Ceres Seq. ID no. 14308880
ttacctcggaggagactgccaaggtcaaggctgccggcaaggcgtggtacaagaccatgatctcggacagtgactacaccgagtttgagaacttcaccaagtggctcggagtgacgcagtgaagcggcctttgagacctagttaagttttgattagttgtgtcgctgaacttgtattgagacgaaatagtattttatcaatctgtcttatcctgcatcttcacaacaagttacctatctgtggactttaagcctgcatgttcgttttatttctccattgccgtgggagcatagtatttgcatgttcgaaccaattatctggattatggtatggatttgtgcacataatgtctgttcatgatgcttgtggtctagtgccgtttggccttgtagtagtactacttccgtatccgtctcagagataattgatgttttagaaagtaagtgatgttttaggtttgttgaacaatcgactaaatttataagatttttttttgacc

SEQ ID NO: 5428 - protein, 55 aa, Glycine max
  misc_feature (1)..(55): Ceres Seq. ID no. 14308881
MFVLFLHCRGSIVFACSNQLSGLWYGFVHIMSVHDACGLVPFGLVVVLLPYPSQR

SEQ ID NO: 5429 - protein, 39 aa, Glycine max
  misc_feature (1)..(39): Ceres Seq. ID no. 14308882
TSEETAKVKAAGKAWYKTMISDSDYTEFENFTKWLGVTQ

SEQ ID NO: 5430 - DNA, 594 bp, Glycine max
  misc_feature (1)..(594): Ceres Seq. ID no. 14309458
atcccacagagccaactccaaataaattaaatatataaataaaataaattgaactcctatctggggtttcttttacaaatttatttatttaatttatttggaaaataacaaatcattagtaataaatgaggatgtctaaaaatgtcaaagtgttggtctctctagttcttgtagtgttattggctcttgcagcaaccaatattgaggcaagatacataaattatcgcgatcttcgtagtggagatcacagtttggcttgcgataaggcgaatcctagcacctgcacgaagcaagaagtcaatcgttaccaaagaggatgcgagacggccgatcggtgccgtgaatctcgttaatttatacagatgataaccgaagagcataatcatgcatcaaattagtttcctaattactataatagattgacaggcttctaacttggagaacaaatcttggttagtttatagaaatgcaatcctcgtattgatttgagatgatcaaattgatttcctttattatttaattagtctgttattggttttgtattattttaacacgatgatgttacgatcaaacaaatataaatatattgttccc

SEQ ID NO: 5431 - protein, 75 aa, Glycine max
  misc_feature (1)..(75): Ceres Seq. ID no. 14309459
MRMSKNVKVLVSLVLVVLLALAATNIEARYINYRDLRSGDHSLACDKANPSTCTKQEVNRYQRGCETADRCRESR

SEQ ID NO: 5432 - protein, 73 aa, Glycine max
  misc_feature (1)..(73): Ceres Seq. ID no. 14309460
MSKNVKVLVSLVLVVLLALAATNIEARYINYRDLRSGDHSLACDKANPSTCTKQEVNRYQRGCETADRCRESR

SEQ ID NO: 5433 - DNA, 908 bp, Glycine max
  misc_feature (1)..(908): Ceres Seq. ID no. 14309488
acacacttcttccacgcttcctcccccgagctacgacgacgactagccagccagctactcctccgcgcgcaagccagcggcgaagctcgtgaactctcccggtgcccagacatggcggcaagaaggctcctcgaggaggcggtcgccgccggcgcgcagcaggactcgctcaactcggacctggtcctcatcctcgccggcctgctctgcgcgctggtctgcgtcctcggcctcggcctcgtggcgcggtgcgcgtgctcgcgccactgggccagggccgcagacgccccgcccggcgccaacaggggcgtcaagaaggaggtgctgcgcgccctgcccaccgtcaggtacgtcgccgacggcggcgaggcgtcggaatcggacgagtgcgccatctgcctcgccgagttcgaggacggccaggacatgcgggtgctgccgcagtgcagccacgcgttccacacggcctgcgtcgacgcctggctgcgctcgcactcctcgtgcccgtcgtgccggcgggtgctcgtcgccgagctgccgcgcggcgagcggagcggacgctgcggcgcgcggcccggcggcctcgacgcgctcctcaaggccgtgccgctgtgccgctgacgtcgctgtagctcggcattagtggcgtgcgcactctggacaaaaggccaagggaaaagtgtgtcgagggaaattagccggtgcataagctcatcggttagcttcttatttacctttctcttggcttgggggcctgctgggtgttgattctttttaggtgtggctactctggaaatgggaaccattgagcatgaaggcgtgtgtatatacatagttgatggggggatttgtgattgtaacctatttgtacatatgtggaagttgctataaaaacatgcacttgctgg

SEQ ID NO: 5434 - protein, 206 aa, Glycine max
  misc_feature (1)..(206): Ceres Seq. ID no. 14309489
THFFHASSPELRRRLASQLLLRAQASGEARELSRCPDMAARRLLEEAVAAGAQQDSLNSDLVLILAGLLCALVCVLGLGLVARCACSRHWARAADAPPGANRGVKKEVLRALPTVRYVADGGEASESDECAICLAEFEDGQDMRVLPQCSHAFHTACVDAWLRSHSSCPSCRRVLVAELPRGERSGRCGARPGGLDALLKAVPLCR

SEQ ID NO: 5435 - protein, 169 aa, Glycine max
  misc_feature (1)..(169): Ceres Seq. ID no. 14309490
MAARRLLEEAVAAGAQQDSLNSDLVLILAGLLCALVCVLGLGLVARCACSRHWARAADAPPGANRGVKKEVLRALPTVRYVADGGEASESDECAICLAEFEDGQDMRVLPQCSHAFHTACVDAWLRSHSSCPSCRRVLVAELPRGERSGRCGARPGGLDALLKAVPLCR

SEQ ID NO: 5436 - DNA, 943 bp, Glycine max
  misc_feature (1)..(943): Ceres Seq. ID no. 14309549
attcaagttatcactttcctgaattgagtgtaacaggatcattttttttgttatcttatataaaggtcctcaaggaaggtattgtactgagatgactgagacaagggttaatactctcatggtcacgagttccggcaattatggcatgttgcacaacaacaaaattcatttgaattgccaattccttggtctcgggcattccatcaaggaacatggtaggtttgggttagtgtgctcttcatcacttagtggtggtggtaataagatgaaacttagagtgaagaagaaggggaagcaaagttcttcaccaaccatgatggtagctctcaatgagggtcatgaggtcatctctgaggagtccactaccgtgaagctctcggctctggtggctgtgaggaatagtaaagataataacaaggtgtttgcaaatgagatagtgaataaccttctaaccattttctggcctcaaaaccagaccaaaggtgttgttcttcaacttgttagcacacagcttgatcccaggagaatggaagcaaagttgagcaagaaaaccgttttggagttatccgaagaccataaagttgatgagaagggaagaatcagcacctataaagttgaattcattgtggactctgattttgggatccctggtgctgttaccgtggttaacggctttgacaatgagttcttcttggaaagcataaccatggcacaaaatgttcattttgcttgcaaatcttgggttcaaccaaacaagcttgacccagagaagagaattttcttcgttaacaaggtaattaatatacatgcatggtttgttgactcaactgaattttagcaaaattaactagtgtgaggtttggatgtgatgatcatctcttgtaaataggtttggggtaccctatgtgccctatacattttaatagatatctttttcctgatt

SEQ ID NO: 5437 - protein, 248 aa, Glycine max
  misc_feature (1)..(248): Ceres Seq. ID no. 14309550
MTETRVNTLMVTSSGNYGMLHNNKIHLNCQFLGLGHSIKEHGRFGLVCSSSLSGGGNKMKLRVKKKGKQSSSPTMMVALNEGHEVISEESTTVKLSALVAVRNSKDNNKVFANEIVNNLLTIFWPQNQTKGVVLQLVSTQLDPRRMEAKLSKKTVLELSEDHKVDEKGRISTYKVEFIVDSDFGIPGAVTVVNGFDNEFFLESITMAQNVHFACKSWVQPNKLDPEKRIFFVNKVINIHAWFVDSTEF

SEQ ID NO: 5438 - protein, 239 aa, Glycine max
  misc_feature (1)..(239): Ceres Seq. ID no. 14309551
MVTSSGNYGMLHNNKIHLNCQFLGLGHSIKEHGRFGLVCSSSLSGGGNKMKLRVKKKGKQSSSPTMMVALNEGHEVISEESTTVKLSALVAVRNSKDNNKVFANEIVNNLLTIFWPQNQTKGVVLQLVSTQLDPRRMEAKLSKKTVLELSEDHKVDEKGRISTYKVEFIVDSDFGIPGAVTVVNGFDNEFFLESITMAQNVHFACKSWVQPNKLDPEKRIFFVNKVINIHAWFVDSTEF

SEQ ID NO: 5439 - protein, 230 aa, Glycine max
  misc_feature (1)..(230): Ceres Seq. ID no. 14309552
MLHNNKIHLNCQFLGLGHSIKEHGRFGLVCSSSLSGGGNKMKLRVKKKGKQSSSPTMMVALNEGHEVISEESTTVKLSALVAVRNSKDNNKVFANEIVNNLLTIFWPQNQTKGVVLQLVSTQLDPRRMEAKLSKKTVLELSEDHKVDEKGRISTYKVEFIVDSDFGIPGAVTVVNGFDNEFFLESITMAQNVHFACKSWVQPNKLDPEKRIFFVNKVINIHAWFVDSTEF

SEQ ID NO: 5440 - DNA, 918 bp, Glycine max
  misc_feature (1)..(918): Ceres Seq. ID no. 14309569
cattagagtataaggcagtgtttggtagcagagaattaaaaacatggaattctggaaccgcagattgctactacagaacgaggacgttcccctctcgatgccacctctctctcacactcacaccaaacacgccactaacgcatcatcatcctcgccgccgcaatcttcggctttccaattccaaagcccactgcaggtttcgattcctccagttttttcatcgagtgtggcctacgtcttcctcatcctcttcaccaccttcttcttcgtcggcttcgtcttcctctacttccgccagttcgcctccgacgccgccgccgccggatcctaccgccgccgctgggaggagggcgcggcagcggcggcggaggcaaagaagtgcctgccggtggtggcgcactgcggggaggggtgcgcggagtgcgcgatatgcctggaggagctgcgagagggggacgcggtgaagatgattccgtactgcaagcacgtgttccacccgcactgcattgacacgtggctcgataagcatgtcacgtgccccgtgtgccggtgcagtgagctgctatgtggagaagaggtggtggggtcggtgtcagcgagaagacaagaagaagtggttctaaatttggattagaagaactttgaagaagaagatgaaactgtagcgttgcgtgtttcattggacattgcttattatccatatttgctaggtttcaaccaccacttgagagtcttaaccaacgaacgtgttacatattacaagtttcttttgtggttttgttcattcccattattattgccacttgccagtgtcattatttagcagcatttaataattcaataacattctctttcagtttcttttttataaaaataaattgtagtagactcatagtactgctattttgcgttttctcc

SEQ ID NO: 5441 - protein, 196 aa, Glycine max
  misc_feature (1)..(196): Ceres Seq. ID no. 14309570
MEFWNRRLLLQNEDVPLSMPPLSHTHTKHATNASSSSPPQSSAFQFQSPLQVSIPPVFSSSVAYVFLILFTTFFFVGFVFLYFRQFASDAAAAGSYRRRWEEGAAAAAEAKKCLPVVAHCGEGCAECAICLEELREGDAVKMIPYCKHVFHPHCIDTWLDKHVTCPVCRCSELLCGEEVVGSVSARRQEEVVLNLD

SEQ ID NO: 5442 - protein, 178 aa, Glycine max
  misc_feature (1)..(178): Ceres Seq. ID no. 14309571
MPPLSHTHTKHATNASSSSPPQSSAFQFQSPLQVSIPPVFSSSVAYVFLILFTTFFFVGFVFLYFRQFASDAAAAGSYRRRWEEGAAAAAEAKKCLPVVAHCGEGCAECAICLEELREGDAVKMIPYCKHVFHPHCIDTWLDKHVTCPVCRCSELLCGEEVVGSVSARRQEEVVLNLD

SEQ ID NO: 5443 - protein, 153 aa, Glycine max
  misc_feature (1)..(153): Ceres Seq. ID no. 14309572
LEYKAVFGSRELKTWNSGTADCYYRTRTFPSRCHLSLTLTPNTPLTHHHPRRRNLRLSNSKAHCRFRFLQFFHRVWPTSSSSSSPPSSSSASSSSTSASSPPTPPPPDPTAAAGRRARQRRRRQRSACRWWRTAGRGARSARYAWRSCERGTR

SEQ ID NO: 5444 - DNA, 733 bp, Glycine max
  misc_feature (1)..(733): Ceres Seq. ID no. 14309585
ccttttcatagtatatgatctcatctcaaagtccattctacacaattctctctcatcatctttgctattacctctttttccaaactctaaaaatttttagttccacaaaaccaaaccaaaatggcagcagcctcggcctcatccaccatgatatcaacaccagccttatctccaagcacaagcatccaaaagcaccatcatttgaagccatccaacgtgtgctttcaaggccttagacccctcacaaggttcacaaccaaagtgagcagcaccaccaaaagggttattccaaagggtggtgtcggtgttagagctgaactcaactcagcacttgtcataagcctcagcactgggctctccctcttcttggggaggtttgtgttcttcaacttccaaagggagaacgtggcaaagcaagtgcctgagcagaacggactcacacactttgaggctggtgacacacgtgccaaggagtatgtcagcctcctcaaatccaatgaccctgttggattcaacattgttgatgtcttggcttggggctccattggccatgttgttgcttactatatcttggccaccactagcaatggctatgaccctgcattctttggctgattttcatcatgttccattgtctttctttgcttgctttttactatgttataatgtaatcaatgtcatcatgtataggttctctctaagatccaacaagttcagcatatgctaatttgtc

SEQ ID NO: 5445 - protein, 164 aa, Glycine max
  misc_feature (1)..(164): Ceres Seq. ID no. 14309586
MAAASASSTMISTPALSPSTSIQKHHHLKPSNVCFQGLRPLTRFTTKVSSTTKRVIPKGGVGVRAELNSALVISLSTGLSLFLGRFVFFNFQRENVAKQVPEQNGLTHFEAGDTRAKEYVSLLKSNDPVGFNIVDVLAWGSIGHVVAYYILATTSNGYDPAFFG

SEQ ID NO: 5446 - protein, 155 aa, Glycine max
  misc_feature (1)..(155): Ceres Seq. ID no. 14309587
MISTPALSPSTSIQKHHHLKPSNVCFQGLRPLTRFTTKVSSTTKRVIPKGGVGVRAELNSALVISLSTGLSLFLGRFVFFNFQRENVAKQVPEQNGLTHFEAGDTRAKEYVSLLKSNDPVGFNIVDVLAWGSIGHVVAYYILATTSNGYDPAFFG

SEQ ID NO: 5447 - protein, 83 aa, Glycine max
  misc_feature (1)..(83): Ceres Seq. ID no. 14309588
MSASSNPMTLLDSTLLMSWLGAPLAMLLLTISWPPLAMAMTLHSLADFHHVPLSFFACFLLCYNVINVIMYRFSLRSNKFSIC

SEQ ID NO: 5448 - DNA, 854 bp, Glycine max
  misc_feature (1)..(854): Ceres Seq. ID no. 14309614
aaaaaattgtgtcgtgtatatagtagtattttatttataagagctaccccttggaacattcaaaacagatcctacatttgggcaaaaaggaagctcaaccacatccaatacctcagaccacacaacagtgtagaagggagatttgaaagtgcatgtgaagaaacgcattagaagagaaaaaagatgagcaaaaaacagacggtgaaattagacgaggagcaaatcgcagaattgcgcgaaatctttcggtccttcgatcggaacaatgacgggagcctgacgcagttggagctgagttcgcttctgcgctcgcttggtctgaagcccagtgcagaccaactcgagggatttattcagagggcggacaccaacagcaatggcctggtggagttctcggagttcgttgctctggtcgcgccggagcttctgccggccaagtcgccctacacggaagagcagctgaagcagctgttccgaatgttcgatcgtgacgggaacggcctcatcactgcggcggagttggctcactccatggctaggcttggccatgccctcaccgccgaggagctgaccgggatgatcaaagaggccgacaccgacggcgatggcatgatcaactatcaggagttcgctcatgctattacttccgctgcttttgataattgctggccttaaccactctctttctaggtaataatgtaaattcaattttttcgggagaaattacgagattagcgatccatttaataagggagaaactttttattcttatttcaagaatttgagtttatattttgctatattttgatgtacaacgatgataataaagagcaaatctaagtgcttatacatct

SEQ ID NO: 5449 - protein, 163 aa, Glycine max
  misc_feature (1)..(163): Ceres Seq. ID no. 14309615
MSKKQTVKLDEEQIAELREIFRSFDRNNDGSLTQLELSSLLRSLGLKPSADQLEGFIQRADTNSNGLVEFSEFVALVAPELLPAKSPYTEEQLKQLFRMFDRDGNGLITAAELAHSMARLGHALTAEELTGMIKEADTDGDGMINYQEFAHAITSAAFDNCWP

SEQ ID NO: 5450 - DNA, 1413 bp, Glycine max
  misc_feature (1)..(1413): Ceres Seq. ID no. 14309674
gagtgtatgaaatgacccagtactcagaaggtgaagggagtaagtgagaactgagaacttctaagaaacgccgccaatggcgcatcgctcactcttcctctctctcagacgaaatagcggtttagcttgtgtcctgaacagaacaagattcgtgtcttcgggtgctgtgagcagtgatttggtggaagagagtgtggaaggtgatgatgacctaaggagcagaatcttcaggcttaggctccccaagcgaagcgccaccaacgttcttcagaaatgggtcctccaagggaatcctattacgctctctcagcttcgggatatatccaaagagcttcgaagatctcaacgttacaaacacgctttggagatatcagagtggatggttagcaatgaggaatatgagttatcagactctgattatgcagtccgcatagatttgatgacccaagtttttggcattgatgctgcagagcgctactttgagggtctacctcttgctacaaagactactgaaacatacacagcactcctccattcttacgcaggagcaaaattgactgaaaaggctgaggaactttatcaaaggataaaggattcaaacctttcctttgatgctcttacttacaatgaaatgatgactctttacatgtcagtggggcagtttgaaaaggtccctatagttgttgaagaactgaaacaacaaaaggtttcccctgatatctttacttacaatctatggataagttcctgtgccgctattcttaatatcgatgaagttaggaggattcttgatgaaatgagtcacggtgctggttctaatgaaagttggatcagatatttgaacctggccaatatatatattagtgtagctcatcttgataatgcaagttccaacacacttgttgagactgagaaaaggatcacccaaaggcaatggataacttatgacttcttaatcattctttatggtgggttgggaagtaaggataaacttgatcagatatggaattccttgggaatgaccaaacagaaaatgattagcaggaattacatgtgcatcatttcttcctatctgatgcttggtcttacgaaagaagtgggtgaagttattgatcaatggaagcaatcaacgaccacggattttgatatgcttgcctgtaaaaagattttggttgcttttagggacattggcttagctgaaatagccaacaacttgaatgtgattctcattgagaagaacctcagtcttggaagtgattaactaggagttctctgagcatgaatgtaatatagaatatatatagatttgagatcaattttgcaacttcggaagggaaaatatatttcatttgaaatttgttaatccatcccgaatgaataaatatgctgtgtgaatggaagtcttgcaatgct

SEQ ID NO: 5451 - protein, 394 aa, Glycine max
  misc_feature (1)..(394): Ceres Seq. ID no. 14309675
MAHRSLFLSLRRNSGLACVLNRTRFVSSGAVSSDLVEESVEGDDDLRSRIFRLRLPKRSATNVLQKWVLQGNPITLSQLRDISKELRRSQRYKHALEISEWMVSNEEYELSDSDYAVRIDLMTQVFGIDAAERYFEGLPLATKTTETYTALLHSYAGAKLTEKAEELYQRIKDSNLSFDALTYNEMMTLYMSVGQFEKVPIVVEELKQQKVSPDIFTYNLWISSCAAILNIDEVRRILDEMSHGAGSNESWIRYLNLANIYISVAHLDNASSNTLVETEKRITQRQWITYDFLIILYGGLGSKDKLDQIWNSLGMTKQKMISRNYMCIISSYLMLGLTKEVGEVIDQWKQSTTTDFDMLACKKILVAFRDIGLAEIANNLNVILIEKNLSLGSD

SEQ ID NO: 5452 - protein, 293 aa, Glycine max
  misc_feature (1)..(293): Ceres Seq. ID no. 14309676
MVSNEEYELSDSDYAVRIDLMTQVFGIDAAERYFEGLPLATKTTETYTALLHSYAGAKLTEKAEELYQRIKDSNLSFDALTYNEMMTLYMSVGQFEKVPIVVEELKQQKVSPDIFTYNLWISSCAAILNIDEVRRILDEMSHGAGSNESWIRYLNLANIYISVAHLDNASSNTLVETEKRITQRQWITYDFLIILYGGLGSKDKLDQIWNSLGMTKQKMISRNYMCIISSYLMLGLTKEVGEVIDQWKQSTTTDFDMLACKKILVAFRDIGLAEIANNLNVILIEKNLSLGSD

SEQ ID NO: 5453 - protein, 273 aa, Glycine max
  misc_feature (1)..(273): Ceres Seq. ID no. 14309677
MTQVFGIDAAERYFEGLPLATKTTETYTALLHSYAGAKLTEKAEELYQRIKDSNLSFDALTYNEMMTLYMSVGQFEKVPIVVEELKQQKVSPDIFTYNLWISSCAAILNIDEVRRILDEMSHGAGSNESWIRYLNLANIYISVAHLDNASSNTLVETEKRITQRQWITYDFLIILYGGLGSKDKLDQIWNSLGMTKQKMISRNYMCIISSYLMLGLTKEVGEVIDQWKQSTTTDFDMLACKKILVAFRDIGLAEIANNLNVILIEKNLSLGSD

SEQ ID NO: 5454 - DNA, 1197 bp, Glycine max
  misc_feature (1)..(1197): Ceres Seq. ID no. 14309695
gatagatggtacaatgatggctccatctactgcatttacaaagatctggcggatgcgcaataatggcactatagtctggcacaagggaactcaacttgtttggattggaggagacaagtttagtgactctcattcagttgacttagaggttcctgaggatggtgtccctttggagaaggaacttgacattgccgttgacttcacagcacctccattacctggtcgttacatatcatattggaggatgacaactccatctggacatcaatttggccaacgtgtttgggtccttatacaggttgatgcctctctcaaggactcattttatgataactctcaaggtctgaacttgaatattcccctcgatatcagtggctctaaaggacctcatattatagatatcaatgtccagcctactgaggatgatactgttcttcaaacccgcaagcctaatgctcccattgagcctttgaatcaaatggttgatgaggaaccaaggttggagctggaaaacgaattccctataaatgaagctacatttgttgcccctgttgcctcagccccagctgcaacctctgtggcatcttcatcagtgccttgtcctataattgatctgtctgaaacaaccccagctgttccatctaatcagcaatccccaaccgtggatgtgccatcgtcatctatgggtactggtggaggaattaattctgtggaggagaatctacttaaagagcttgaggagatgggttttaaacaggttgatttgaacaaggagatcttgaggaagaatgagtacgatctggaccaatccctagacgctctctgtggtgttgatgtctgtggtgtttctgagtgggaccatatgcttgaagagttacaggagatgggttttcgtgacaaagagatgaataagagactgcttgagaaaaacaatggaagcctcaaacgtgttgttatggatttaataaacggcgagtagttttagttgaaatgttagttaatagtttatgtaaaggtgacgacttgtgctcctagggtgcctgatacttgcctggcagtcataattatcttatttcctatctcgatcttgagttgtggtgattcatcacaattgaacaatttgatctatcctatgtttggatttaagtatgttatgaactcaaaagtatatagctaaatcattttggttatttaaag

SEQ ID NO: 5455 - protein, 325 aa, Glycine max
  misc_feature (1)..(325): Ceres Seq. ID no. 14309696
IDGTMMAPSTAFTKIWRMRNNGTIVWHKGTQLVWIGGDKFSDSHSVDLEVPEDGVPLEKELDIAVDFTAPPLPGRYISYWRMTTPSGHQFGQRVWVLIQVDASLKDSFYDNSQGLNLNIPLDISGSKGPHIIDINVQPTEDDTVLQTRKPNAPIEPLNQMVDEEPRLELENEFPINEATFVAPVASAPAATSVASSSVPCPIIDLSETTPAVPSNQQSPTVDVPSSSMGTGGGINSVEENLLKELEEMGFKQVDLNKEILRKNEYDLDQSLDALCGVDVCGVSEWDHMLEELQEMGFRDKEMNKRLLEKNNGSLKRVVMDLINGE

SEQ ID NO: 5456 - protein, 321 aa, Glycine max
  misc_feature (1)..(321): Ceres Seq. ID no. 14309697
MMAPSTAFTKIWRMRNNGTIVWHKGTQLVWIGGDKFSDSHSVDLEVPEDGVPLEKELDIAVDFTAPPLPGRYISYWRMTTPSGHQFGQRVWVLIQVDASLKDSFYDNSQGLNLNIPLDISGSKGPHIIDINVQPTEDDTVLQTRKPNAPIEPLNQMVDEEPRLELENEFPINEATFVAPVASAPAATSVASSSVPCPIIDLSETTPAVPSNQQSPTVDVPSSSMGTGGGINSVEENLLKELEEMGFKQVDLNKEILRKNEYDLDQSLDALCGVDVCGVSEWDHMLEELQEMGFRDKEMNKRLLEKNNGSLKRVVMDLINGE

SEQ ID NO: 5457 - protein, 320 aa, Glycine max
  misc_feature (1)..(320): Ceres Seq. ID no. 14309698
MAPSTAFTKIWRMRNNGTIVWHKGTQLVWIGGDKFSDSHSVDLEVPEDGVPLEKELDIAVDFTAPPLPGRYISYWRMTTPSGHQFGQRVWVLIQVDASLKDSFYDNSQGLNLNIPLDISGSKGPHIIDINVQPTEDDTVLQTRKPNAPIEPLNQMVDEEPRLELENEFPINEATFVAPVASAPAATSVASSSVPCPIIDLSETTPAVPSNQQSPTVDVPSSSMGTGGGINSVEENLLKELEEMGFKQVDLNKEILRKNEYDLDQSLDALCGVDVCGVSEWDHMLEELQEMGFRDKEMNKRLLEKNNGSLKRVVMDLINGE

SEQ ID NO: 5458 - DNA, 1283 bp, Glycine max
  misc_feature (1)..(1283): Ceres Seq. ID no. 14309707
aactcaaagaaaagcaaaatgtttttgtacaatttcatcgtgcaggaagtgaagataaaacaaagacaaaaacagcatcaggactacaaccaacttttttagagtcttggacaaaggattggaaatgtaatcccaatatgatcagtttagagtttgaaatatacaaacacaagttcttatcaaacgatttattgggtagagcagtattagacttacaaaattacacattcgtgacaaaaaaaccaaaaatcatcatacttccagttcaattagtcaaacaaaaggtaaaatcaactctcacagatcaaccatctatcgtcattcaaatcacaccagaagattttggttaccatccatcaccatacgtatggacatggtcatatgaacaacaagaacccactttgattatggatcttgccgatgtagtacaagtttcttgctctgaaactgcaacctattttgtaacagagaaaggttcactatacaaattagcaattggagaacatgtaccaataaaaattgaaacattaacacctgttctaaaagtagcagcaggattcgatcatgtgcttttcatttcgaaggataaaacagtgcaaagttttggtgaaaacaattatggacaattgggattggatgattttacatcacgatctattgcatcaacagttcaattggcacctggattatcggatgcagaatctgtttttgcaggtagaaatgtttcattctttgttgcatccaatggagatgcttatgcatgtggtgataattctaaaaatcaattaggattaagaaacaatgagttaattgcgcgtccaaaaattcttgacattaaaaatatatcttgtttacgtacatttaaagactttaccatggcaattagtcatgattcattatactttaccggtatttgtaacggattcgtgtcaaatacatggttgcatgtgttaactggaacaagatttatgtctgttgcaggatggagcgatatttttgctctatcaagagaaggaaaagtgtttaaatgtgatcttgaagaagataaggcagagattgttgaagaattatcaacgaaaaatatcactgaaattgttgctggatttaatcatttaatagctatggaagagaatggtgatgttacttacatacaagaaggacttggagataagttaaagtttttggagtcaaataaggcattatcgattgcagcttctggtactcaaagcatagtagttaccagagatttgtaaaaattacaacattaaatacaaatttgaagc

SEQ ID NO: 5459 - protein, 416 aa, Glycine max
  misc_feature (1)..(416): Ceres Seq. ID no. 14309708
LKEKQNVFVQFHRAGSEDKTKTKTASGLQPTFLESWTKDWKCNPNMISLEFEIYKHKFLSNDLLGRAVLDLQNYTFVTKKPKIIILPVQLVKQKVKSTLTDQPSIVIQITPEDFGYHPSPYVWTWSYEQQEPTLIMDLADVVQVSCSETATYFVTEKGSLYKLAIGEHVPIKIETLTPVLKVAAGFDHVLFISKDKTVQSFGENNYGQLGLDDFTSRSIASTVQLAPGLSDAESVFAGRNVSFFVASNGDAYACGDNSKNQLGLRNNELIARPKILDIKNISCLRTFKDFTMAISHDSLYFTGICNGFVSNTWLHVLTGTRFMSVAGWSDIFALSREGKVFKCDLEEDKAEIVEELSTKNITEIVAGFNHLIAMEENGDVTYIQEGLGDKLKFLESNKALSIAASGTQSIVVTRDL

SEQ ID NO: 5460 - protein, 371 aa, Glycine max
  misc_feature (1)..(371): Ceres Seq. ID no. 14309709
MISLEFEIYKHKFLSNDLLGRAVLDLQNYTFVTKKPKIIILPVQLVKQKVKSTLTDQPSIVIQITPEDFGYHPSPYVWTWSYEQQEPTLIMDLADVVQVSCSETATYFVTEKGSLYKLAIGEHVPIKIETLTPVLKVAAGFDHVLFISKDKTVQSFGENNYGQLGLDDFTSRSIASTVQLAPGLSDAESVFAGRNVSFFVASNGDAYACGDNSKNQLGLRNNELIARPKILDIKNISCLRTFKDFTMAISHDSLYFTGICNGFVSNTWLHVLTGTRFMSVAGWSDIFALSREGKVFKCDLEEDKAEIVEELSTKNITEIVAGFNHLIAMEENGDVTYIQEGLGDKLKFLESNKALSIAASGTQSIVVTRDL

SEQ ID NO: 5461 - protein, 281 aa, Glycine max
  misc_feature (1)..(281): Ceres Seq. ID no. 14309710
MDLADVVQVSCSETATYFVTEKGSLYKLAIGEHVPIKIETLTPVLKVAAGFDHVLFISKDKTVQSFGENNYGQLGLDDFTSRSIASTVQLAPGLSDAESVFAGRNVSFFVASNGDAYACGDNSKNQLGLRNNELIARPKILDIKNISCLRTFKDFTMAISHDSLYFTGICNGFVSNTWLHVLTGTRFMSVAGWSDIFALSREGKVFKCDLEEDKAEIVEELSTKNITEIVAGFNHLIAMEENGDVTYIQEGLGDKLKFLESNKALSIAASGTQSIVVTRDL

SEQ ID NO: 5462 - DNA, 1302 bp, Glycine max
  misc_feature (1)..(1302): Ceres Seq. ID no. 14310358
aggggactatcaaacattttggcccccttccgtgcccaactttctctcagacccgaaaatgaaagacatcttctaatggcagaagaagcacagaacagcaactccatgaatgccttgccaaaggttctcgttctgggtccccctacgtgcttcataaccctccaacctctctactctcacaagttccatttcctcaacccccacacctcaagcctttcactgcaacacttcctccaccaccaccaccaccaccacccttcctccatctccgccgttctctgcggtgcatcctactccgtcaccgccaacgtcctctgcctcctgcccgcgctccgcctcatcgtcaccaccagcgccggaaccgaccacatcgacctcgccgagtgccgccgccgcggaatccaggtcgccggcgccggagagctgttctccgaggacgtcgccgatatggccgtcgccctgctcgctgacgttatgaggaaaatttcggcggcggatcggtatttgaggactcagcagaatcacgacactacgccttgggattttttcacattcggctccaagttagcaggtaagcgagttgagattattggactgggaagcattggcatggaagtggccaagaggttggagtcttttggttgcattatcttatacaactctaagcataaaaaagcttcagtttcgtatcctttctattctagcatggtggatcttgcaactacttgcgacgctcttgtgttatgttgcgcactaaatgagcaaacaaagcacataattaacagggaagtcatgttggcattgggaaaacaaggatttattgtcaatgttggaagagggggtcttattgatgaaaaggaattggtcaagtgtttgatggaaggtgaaattggaggtgctggtttggatgtgtttgagaacgagcctcatgttcccaaagaactccttgcaatgaataatgtggttttatctccacattctgctgcttttactgtggaatctatgatgaatttgtgtgaacttatgggaggcaatttagaagccttcttcttaaataagcccctaattactcctgtaatgttgcctcaataacttgttcttttgataacctagtatcgtacgtgtggtacaattttatgacattcctgcaatgattctgattaagttttaaatgaatttgttctattccaaaaaccatctctgcaaagtgccttggcaagtgtatttcaaactctgttgtgccgttactctgtttgatcagtttttaagctcatttttatatggaaactctattgtgccgtt

SEQ ID NO: 5463 - protein, 363 aa, Glycine max
  misc_feature (1)..(363): Ceres Seq. ID no. 14310359
RGLSNILAPFRAQLSLRPENERHLLMAEEAQNSNSMNALPKVLVLGPPTCFITLQPLYSHKFHFLNPHTSSLSLQHFLHHHHHHHPSSISAVLCGASYSVTANVLCLLPALRLIVTTSAGTDHIDLAECRRRGIQVAGAGELFSEDVADMAVALLADVMRKISAADRYLRTQQNHDTTPWDFFTFGSKLAGKRVEIIGLGSIGMEVAKRLESFGCIILYNSKHKKASVSYPFYSSMVDLATTCDALVLCCALNEQTKHIINREVMLALGKQGFIVNVGRGGLIDEKELVKCLMEGEIGGAGLDVFENEPHVPKELLAMNNVVLSPHSAAFTVESMMNLCELMGGNLEAFFLNKPLITPVMLPQ

SEQ ID NO: 5464 - protein, 338 aa, Glycine max
  misc_feature (1)..(338): Ceres Seq. ID no. 14310360
MAEEAQNSNSMNALPKVLVLGPPTCFITLQPLYSHKFHFLNPHTSSLSLQHFLHHHHHHHPSSISAVLCGASYSVTANVLCLLPALRLIVTTSAGTDHIDLAECRRRGIQVAGAGELFSEDVADMAVALLADVMRKISAADRYLRTQQNHDTTPWDFFTFGSKLAGKRVEIIGLGSIGMEVAKRLESFGCIILYNSKHKKASVSYPFYSSMVDLATTCDALVLCCALNEQTKHIINREVMLALGKQGFIVNVGRGGLIDEKELVKCLMEGEIGGAGLDVFENEPHVPKELLAMNNVVLSPHSAAFTVESMMNLCELMGGNLEAFFLNKPLITPVMLPQ

SEQ ID NO: 5465 - protein, 328 aa, Glycine max
  misc_feature (1)..(328): Ceres Seq. ID no. 14310361
MNALPKVLVLGPPTCFITLQPLYSHKFHFLNPHTSSLSLQHFLHHHHHHHPSSISAVLCGASYSVTANVLCLLPALRLIVTTSAGTDHIDLAECRRRGIQVAGAGELFSEDVADMAVALLADVMRKISAADRYLRTQQNHDTTPWDFFTFGSKLAGKRVEIIGLGSIGMEVAKRLESFGCIILYNSKHKKASVSYPFYSSMVDLATTCDALVLCCALNEQTKHIINREVMLALGKQGFIVNVGRGGLIDEKELVKCLMEGEIGGAGLDVFENEPHVPKELLAMNNVVLSPHSAAFTVESMMNLCELMGGNLEAFFLNKPLITPVMLPQ

SEQ ID NO: 5466 - DNA, 939 bp, Glycine max
  misc_feature (1)..(939): Ceres Seq. ID no. 14310365
taatctcaaggggaagctgcgtctctttctaagacctaaatgccaccctatattctttgattcaaatatcaattcagcagctgttgtgagattaaatatttatcaaatatttttgttatgtgcaatgaagttccattgttatatccgggatttatctttcatatgcaaactccacaaaagatattgttctaacatcatacaaatttctttgaggtatgaatgtaatatgatcttaccgttgaactgatattaagactgcctttttctcattgttgatttgattgattttccgcatcaaactaatgccatgcataaattctcaatcaaatgattatgtatacctttctgaatagaatactctaatactaggaattataacctttagtcatttaagttttctttcatgatcaactgccagatacatgtaccagctgataaagaaacaaatgcactccataagtcttaattcagaaattcagccgattcttgtattggagaaggaagaagtggaatggcttggacttcatgcttttgtacaagtactaaagagaaagcaatcacgacataaggagttgctggcaattttgaggtcaaggttgtcatcacatagaatgtctgagagggtgtcacttgaactgaaatatgcaattaataccaaaaattcctctttgctatgggacatcaagtattaactcttaaaggtgagagacatcctacgaaccgatggcgtgatgagttgcgttgaaatgcttatttcttttagttgttttctgattcaacaacaatgtgatactgagtggtaatattggttattatatttggcataatatattttgtttatttttgtctcctggctttgaattcgggagaagagtccatgtcatgtctagttcaacaatacaagttttttgatgagtgataagtatttctttctcatgc

SEQ ID NO: 5467 - protein, 89 aa, Glycine max
  misc_feature (1)..(89): Ceres Seq. ID no. 14310366
MYQLIKKQMHSISLNSEIQPILVLEKEEVEWLGLHAFVQVLKRKQSRHKELLAILRSRLSSHRMSERVSLELKYAINTKNSSLLWDIKY

SEQ ID NO: 5468 - protein, 81 aa, Glycine max
  misc_feature (1)..(81): Ceres Seq. ID no. 14310367
NLKGKLRLFLRPKCHPIFFDSNINSAAVVRLNIYQIFLLCAMKFHCYIRDLSFICKLHKRYCSNIIQISLRYECNMILPLN

SEQ ID NO: 5469 - protein, 81 aa, Glycine max
  misc_feature (1)..(81): Ceres Seq. ID no. 14310368
MHSISLNSEIQPILVLEKEEVEWLGLHAFVQVLKRKQSRHKELLAILRSRLSSHRMSERVSLELKYAINTKNSSLLWDIKY

SEQ ID NO: 5470 - DNA, 1229 bp, Glycine max
  misc_feature (1)..(1229): Ceres Seq. ID no. 14310369
acactacagccacttctatagcttcatttaagaatggcactttctcctattcgttcttctactttctcttcatcatcagctattgttacattagctgtgttacttcttcttacaaggacctcttcagctaccctctcaaagaacttctattctaagacatgtccaaacgttttcaacacggtaaaatctgtagtaaaatctgctgtggccaaagaacctcgcattggagcttctattgttcgcctcttcttccatgactgctttgttcaaggttgtgatggaccaatactacttgatgacactccaaccttccagggggagaagactgcagctgctaacaacaattcagtgagaggttatgaattaatcgatgatatcaagtctaaggtcgagaaaatatgccccggtgtggtctcatgtgctgatatcttggacattgcttctcgtgactctgttgttcttcttggaggaccattttggaatgttagacttggaagaagggattctagaagtgccaatttcactgctgcaaacactggtgttattccacctcccacatctaacctcaccaaccttatcacaaggtttcaagatcaaggactctctgctagggacatggttgccttatctggagctcacacatttggcaaagcaaggtgtactagtttcagagatcgcatatacaatcaaaccaacattgacagaacatttgcattggccaggcagaggaggtgccctaggaccaatggcacaggtgacaacaatctagcaaatctagacttcagaactccaaatcattttgacaacaactacttcaaaaaccttctcattaaaaggggactcctcaattctgatcaagtgcttttcaatggtggatccactgattcactggtcagaacatacagccagaataacaaggcctttgattctgactttgttaaagcaatgattaggatgggagatatcaaacccttaactgggtcacaaggggagattaggaagaactgcaggagagtgaattaattagaagtgacacataaatttgtttggtgtacactttgtacccttcaaaagggggaagttgtttggtgtgttgggttgtttaagtgatttctcatgacttggaaattgtgaattgtttgtttagttcagtttaaattgtacttgtgtaaccttataattgtattatggaataaattataaggcattttgccttttgtaccaaaaat

SEQ ID NO: 5471 - protein, 329 aa, Glycine max
  misc_feature (1)..(329): Ceres Seq. ID no. 14310370
MALSPIRSSTFSSSSAIVTLAVLLLLTRTSSATLSKNFYSKTCPNVFNTVKSVVKSAVAKEPRIGASIVRLFFHDCFVQGCDGPILLDDTPTFQGEKTAAANNNSVRGYELIDDIKSKVEKICPGVVSCADILDIASRDSVVLLGGPFWNVRLGRRDSRSANFTAANTGVIPPPTSNLTNLITRFQDQGLSARDMVALSGAHTFGKARCTSFRDRIYNQTNIDRTFALARQRRCPRTNGTGDNNLANLDFRTPNHFDNNYFKNLLIKRGLLNSDQVLFNGGSTDSLVRTYSQNNKAFDSDFVKAMIRMGDIKPLTGSQGEIRKNCRRVN

SEQ ID NO: 5472 - DNA, 1484 bp, Glycine max
  misc_feature (1)..(1484): Ceres Seq. ID no. 14310387
ggtaaaaatgaacatgatagtcctgatgctcaatgcatggaaaggctcattgtgagtgatacttcattgcctaaatctgctaccagtcattttgaaagcccagctatttcagagtcttcagacattgtggatgatgggcctgtgaacaagtcaaatggtacagagtgcagaaatacaaatccactaccaggtgcccagaaagacataaaagaagatgaagtctatattaatatcaaactaaatgaagaatataacaagtctgttgatgttgatactcctaccgagtcacatcaagcagaagatgctggactattagtgaaggctgcagaagaccttgctagggagtatacatctcctttaactactgaaccttctgctcagcctgacagggaagtgtccggacttactgctgtgcctgttcaagatcaagctggtaataacttgggtaaacttggttcatccagagttgatgcttcagttgagtcaggtagccggtgtgacagtttggaaggcatctggggctctgtttcagttctgtcaattcaatccgatgcaccagctgttattgatgctgaaaccttgccatcaactggcttgctggcatcaacagaagcagggaaatcaaacttcaacgactcaaaagctacacctgacagacagcagtctggaaaatcagaaatgtttgaagcaccatctttcatgacattggttgatcctggtcaggttagcccaaaagccaatgcttctgaagtccagaagggacagaacacacaacagccagattccacttcacaggctgcttggtttcccactcttacacaagttgtcaatgagtctcaagggagaaagaagaatgaagaaataatagccaaggtgacaaactggagcactagtaaggagcacactcctcttaagagcctcttaggtgaggctgcccatagcagcaagccaagatctccaaaaatggaagaaaaatcagtgagtcagaagagtggtaaagttccggaaaagaatggttctgggttgacaactgttaactccattctgggtcctgaatcccctgtggctcaagtggtaaaaggagaggttgcaaaagaatggaactctccagcaagatatcctgctgatatcaagagagaaaaaaggaaagttaagagcagaccatactggatacaattggtatgctgcacatctgtcagtcctcagcgaaggtagaaaatcactaggttctgataatgcttccactctgatggattctggtcatagacatgctatttgcagtatttttctgtttttagtttgtctttgggtgcatattttgatcatgtgtcttctgttcattttggtagcctcctaggagtttggttgtatatgttgaccatcttcagttattatttatccctgcggtcatacatttttaccatacatagtaacgtatcattattttggcctggacccatattttagtccggtcttagttcttg

SEQ ID NO: 5473 - protein, 404 aa, Glycine max
  misc_feature (1)..(404): Ceres Seq. ID no. 14310388
GKNEHDSPDAQCMERLIVSDTSLPKSATSHFESPAISESSDIVDDGPVNKSNGTECRNTNPLPGAQKDIKEDEVYINIKLNEEYNKSVDVDTPTESHQAEDAGLLVKAAEDLAREYTSPLTTEPSAQPDREVSGLTAVPVQDQAGNNLGKLGSSRVDASVESGSRCDSLEGIWGSVSVLSIQSDAPAVIDAETLPSTGLLASTEAGKSNFNDSKATPDRQQSGKSEMFEAPSFMTLVDPGQVSPKANASEVQKGQNTQQPDSTSQAAWFPTLTQVVNESQGRKKNEEIIAKVTNWSTSKEHTPLKSLLGEAAHSSKPRSPKMEEKSVSQKSGKVPEKNGSGLTTVNSILGPESPVAQVVKGEVAKEWNSPARYPADIKREKRKVKSRPYWIQLVCCTSVSPQRR

SEQ ID NO: 5474 - protein, 392 aa, Glycine max
  misc_feature (1)..(392): Ceres Seq. ID no. 14310389
MERLIVSDTSLPKSATSHFESPAISESSDIVDDGPVNKSNGTECRNTNPLPGAQKDIKEDEVYINIKLNEEYNKSVDVDTPTESHQAEDAGLLVKAAEDLAREYTSPLTTEPSAQPDREVSGLTAVPVQDQAGNNLGKLGSSRVDASVESGSRCDSLEGIWGSVSVLSIQSDAPAVIDAETLPSTGLLASTEAGKSNFNDSKATPDRQQSGKSEMFEAPSFMTLVDPGQVSPKANASEVQKGQNTQQPDSTSQAAWFPTLTQVVNESQGRKKNEEIIAKVTNWSTSKEHTPLKSLLGEAAHSSKPRSPKMEEKSVSQKSGKVPEKNGSGLTTVNSILGPESPVAQVVKGEVAKEWNSPARYPADIKREKRKVKSRPYWIQLVCCTSVSPQRR

SEQ ID NO: 5475 - DNA, 1346 bp, Glycine max
  misc_feature (1)..(1346): Ceres Seq. ID no. 14310390
gaaatgagtttcttcgatttcatcgtgttgatgatagggtcgctctttctgttcaaagctttcgattttactttctgtgtctttcttctgcttcttttgattcccccaaatcttcagttttaaaaaccctaatctgctgccatgaggaagaagctcgatacccgtttccctgctgctcggataaagaagataatgcaggcagatgaggatgttggaaagatagcactggctgtgcctgttttagtttctaaagctctagaactatttttgcaagatctttgtgaccgcacttatgaaataactcttcaaagaggagcgaagaccatgaattcattgcatttaaaacattgtgtacaaagctataatgtctttgactttctgagggacgttgttagcagggttcctgactacggccatggccatggccatgctgaggctggtcctgatgatcgggtcattacaaaaagaaggaaagctattggtgatgatggtaatgacagcgatgaagaggctaagaggagcaagatgcttgagttgggccacactggcagtactggtaggggaagaggccgaggtagaggaagaggccgtggccgagggcgaccacctttaaatagagagacatatcatcaagatgctgaatctgagccttgcacttctgttcagccgagcaacccacaaaatacaaacacaagtatagcaatggataatggttctgagtcaaaggagataccaaaggaggagaatattgcagctcccgttgttcctgttgtaagcacggattccctccggaacattgatctgaatgccatcacgaatgaaaacgatgacaaaaaggctagtgcagaagctgatgcctccgcctcggtgcctgaacctgatgcctcattgcctgaacccccaacagagagcaagcatgaagaaattccggggtggtcactttctgatgtggacaagatggccattgattcactgcagcttgcacaacttggtaggccactagaagaggaggaggaagactatgatgaagaggaggggtaaatattattagtctttggtgattagattagtgaaaagttcatcatgataactgtagaataagtacatactagtgttatgattatgagtatccactagctgtcaatgcatgtaccatgttgttggctgaagaaagatctgaatgccccttttcattaatctggtttgtatgtggagctgatttatcttccccttgaccagtaatgttagcttcgtgtacttttaggcctacaatgtatatcacaattctagattgagttaaatttttgcatgcaaactttgtttaatattgctgcaaataactatac

SEQ ID NO: 5476 - protein, 299 aa, Glycine max
  misc_feature (1)..(299): Ceres Seq. ID no. 14310391
MRKKLDTRFPAARIKKIMQADEDVGKIALAVPVLVSKALELFLQDLCDRTYEITLQRGAKTMNSLHLKHCVQSYNVFDFLRDVVSRVPDYGHGHGHAEAGPDDRVITKRRKAIGDDGNDSDEEAKRSKMLELGHTGSTGRGRGRGRGRGRGRGRPPLNRETYHQDAESEPCTSVQPSNPQNTNTSIAMDNGSESKEIPKEENIAAPVVPVVSTDSLRNIDLNAITNENDDKKASAEADASASVPEPDASLPEPPTESKHEEIPGWSLSDVDKMAIDSLQLAQLGRPLEEEEEDYDEEEG

SEQ ID NO: 5477 - protein, 282 aa, Glycine max
  misc_feature (1)..(282): Ceres Seq. ID no. 14310392
MQADEDVGKIALAVPVLVSKALELFLQDLCDRTYEITLQRGAKTMNSLHLKHCVQSYNVFDFLRDVVSRVPDYGHGHGHAEAGPDDRVITKRRKAIGDDGNDSDEEAKRSKMLELGHTGSTGRGRGRGRGRGRGRGRPPLNRETYHQDAESEPCTSVQPSNPQNTNTSIAMDNGSESKEIPKEENIAAPVVPVVSTDSLRNIDLNAITNENDDKKASAEADASASVPEPDASLPEPPTESKHEEIPGWSLSDVDKMAIDSLQLAQLGRPLEEEEEDYDEEEG

SEQ ID NO: 5478 - protein, 238 aa, Glycine max
  misc_feature (1)..(238): Ceres Seq. ID no. 14310393
MNSLHLKHCVQSYNVFDFLRDVVSRVPDYGHGHGHAEAGPDDRVITKRRKAIGDDGNDSDEEAKRSKMLELGHTGSTGRGRGRGRGRGRGRGRPPLNRETYHQDAESEPCTSVQPSNPQNTNTSIAMDNGSESKEIPKEENIAAPVVPVVSTDSLRNIDLNAITNENDDKKASAEADASASVPEPDASLPEPPTESKHEEIPGWSLSDVDKMAIDSLQLAQLGRPLEEEEEDYDEEEG

SEQ ID NO: 5479 - DNA, 1372 bp, Glycine max
  misc_feature (1)..(1372): Ceres Seq. ID no. 14310394
gggaagctcaatttcccataggcatctatctccatactctgacagacacacaaaatttgagagaaaaaaaaccatcatcacaagagagtcacatgagaattgaaatggccacaaaacaagttacttctatggttcatgtagatgatgactacattgacatggaactatgttcctccccaaacttcttctcttattcccttagctctccaccatccaacagagagtttgaattccaaatgagtgaaaaagagtcatcaacttctccagctgatgatctcttctacaagggaaaactccttcctcttcaccttccccctcgtttgcaaatggttcaaaagctcgtagaaaactccaccaatgccaactttgagtacatcaaatcagattcagctttggaacacagaacctttcccttcaccactgaccttagagtgccttcaacaaatgccaacaccccttttgaatccaacatctctccttcagaatcacgccgtgtgagcagtgatgtgagcccaaatgaataccaactggggtggttttctgacatgaacaagtacaaccttattggtgatcttcctaagaagtcttggcccaagaaactgaaacagatgaagcagttctggcttggtcagagactcaaggcctcaagggcttacctgaaaactttattcaacaaatctggttgctcagacaagttctgcgccagtgctgcagcaagcaacaacattggagcggagaagaagtcatcaaggtgcaaagagtgtcagaacaagtacatgaaggttgcaaggagaaacccttttgagagtttctatgatggcaagcaccaggtaacttgttctatcatgaagagcatcaaaagagagatgcttgaagttgaagatgatttctgtgaccacaggaggtctttctctggggttggtcagcgacattgttccacaaaggcttcatctttgtccacatcttcatccgggtcctcttcttcgtcttcatctttttctttcagctcagctgggtactatgatttgcaacttttcaagaggagcatcagcgcgaattatgagttggaaagttcaattgagggagccattgctcattgcaaacagtctctgcagcagtgtggttcaaagaatggttcggatgatagcaggatttgttcttaatttgctaccaaaatgcaattggtgggaattagtgaatggccacactagccaacaccatagtgtgtgtgggtgtgtagaggggtgatagtgttgactgttgaaaaaaccttgtaagagaagaaagaggcatttttagttgaaatgctgtagcattttgatggagtttactgtttaaattaatagcttgggttttccagcattaatttgtc

SEQ ID NO: 5480 - protein, 386 aa, Glycine max
  misc_feature (1)..(386): Ceres Seq. ID no. 14310395
EAQFPIGIYLHTLTDTQNLREKKPSSQESHMRIEMATKQVTSMVHVDDDYIDMELCSSPNFFSYSLSSPPSNREFEFQMSEKESSTSPADDLFYKGKLLPLHLPPRLQMVQKLVENSTNANFEYIKSDSALEHRTFPFTTDLRVPSTNANTPFESNISPSESRRVSSDVSPNEYQLGWFSDMNKYNLIGDLPKKSWPKKLKQMKQFWLGQRLKASRAYLKTLFNKSGCSDKFCASAAASNNIGAEKKSSRCKECQNKYMKVARRNPFESFYDGKHQVTCSIMKSIKREMLEVEDDFCDHRRSFSGVGQRHCSTKASSLSTSSSGSSSSSSSFSFSSAGYYDLQLFKRSISANYELESSIEGAIAHCKQSLQQCGSKNGSDDSRICS

SEQ ID NO: 5481 - protein, 356 aa, Glycine max
  misc_feature (1)..(356): Ceres Seq. ID no. 14310396
MRIEMATKQVTSMVHVDDDYIDMELCSSPNFFSYSLSSPPSNREFEFQMSEKESSTSPADDLFYKGKLLPLHLPPRLQMVQKLVENSTNANFEYIKSDSALEHRTFPFTTDLRVPSTNANTPFESNISPSESRRVSSDVSPNEYQLGWFSDMNKYNLIGDLPKKSWPKKLKQMKQFWLGQRLKASRAYLKTLFNKSGCSDKFCASAAASNNIGAEKKSSRCKECQNKYMKVARRNPFESFYDGKHQVTCSIMKSIKREMLEVEDDFCDHRRSFSGVGQRHCSTKASSLSTSSSGSSSSSSSFSFSSAGYYDLQLFKRSISANYELESSIEGAIAHCKQSLQQCGSKNGSDDSRICS

SEQ ID NO: 5482 - protein, 352 aa, Glycine max
  misc_feature (1)..(352): Ceres Seq. ID no. 14310397
MATKQVTSMVHVDDDYIDMELCSSPNFFSYSLSSPPSNREFEFQMSEKESSTSPADDLFYKGKLLPLHLPPRLQMVQKLVENSTNANFEYIKSDSALEHRTFPFTTDLRVPSTNANTPFESNISPSESRRVSSDVSPNEYQLGWFSDMNKYNLIGDLPKKSWPKKLKQMKQFWLGQRLKASRAYLKTLFNKSGCSDKFCASAAASNNIGAEKKSSRCKECQNKYMKVARRNPFESFYDGKHQVTCSIMKSIKREMLEVEDDFCDHRRSFSGVGQRHCSTKASSLSTSSSGSSSSSSSFSFSSAGYYDLQLFKRSISANYELESSIEGAIAHCKQSLQQCGSKNGSDDSRICS

SEQ ID NO: 5483 - DNA, 1409 bp, Glycine max
  misc_feature (1)..(1409): Ceres Seq. ID no. 14310443
aaaaagactctgtgaagtgtgcgtgagaaaggaacagagagaagaaaaagaaaaaagatggaaggagagaaagagaatcccgattgtaacgccactttggtgaactccttctgcgaaatcacttcctcttccaaagaagaagcccttttctttttggagagccacaatttcgacctagacgccgccgtttccactttcctcgacaacgccaacaaccctctcatccctcaaaacgacgacgtcgttgtcgccgcaaacccaaaccccaactccgtttcccctccctccgattctcactccccggacttcaacccttccaggtctccttcgccgtctccgtcgccgactcgcacgccctacgagctccgatcccgcaggtctctcggcaagaaaccctccaccagccgccaaggcaaaattcgcactctcggcgatctcaaacgctcctcccgcgatgatgattccgattccgatcccgatttcgaacccgacgagtactacaccggcggcgaaaagagtgggatgcttgttcgagatcctaccagaggaaacagcaacaacaacaacagtgtggatgatatctttgatcaagcgaggcaggttgctgttgatgcacctccggagaatcctcgaagctcgtcgaggtcgggaagttttagtggcacggcgaggttgctctctggagagagattgccatctgctgctgctgctgctcctgctcctcagcgtgtagaggaagttacccacactgtcactttctggaggaatgggttctctgtcaatgatggtcctctacggaggttggatgatccgcaaaacgcaccgtttctggagagcataaagaagtccgaatgtcccaaagagcttgagccagcagataggaggactgctgtccatgtcaacctcacaaggcgggatgaagactaccctgaaccagtgaagccacgccatcgtgctttccagggtgttggaagaactttaggtagcaccagctccagcaatgatgaacctattcaaacaactggtgcttcaccaagtactgctccattgccaacaatgggtttaattgtagatgaggcacagtcagtgacatcaatccagctgaggttggctgatggcacacgcatggtttctcgcttcaatcaccatcatacaatccgagatgttcgagcattcattgatgcatcaagacccgggggtgtaagaagttaccaactgcagtcaatgggttttcctcccaaacaactcgctaatttggaccagactatagaacaagctggtattgccaactcagttgtcatccaaaagttgtaggttgtttaccagattctattttcagtcgacttgaaattactatttttatgcttaaacattgattgatctacttatattttattagtgaatttgat

SEQ ID NO: 5484 - protein, 418 aa, Glycine max
  misc_feature (1)..(418): Ceres Seq. ID no. 14310444
MEGEKENPDCNATLVNSFCEITSSSKEEALFFLESHNFDLDAAVSTFLDNANNPLIPQNDDVVVAANPNPNSVSPPSDSHSPDFNPSRSPSPSPSPTRTPYELRSRRSLGKKPSTSRQGKIRTLGDLKRSSRDDDSDSDPDFEPDEYYTGGEKSGMLVRDPTRGNSNNNNSVDDIFDQARQVAVDAPPENPRSSSRSGSFSGTARLLSGERLPSAAAAAPAPQRVEEVTHTVTFWRNGFSVNDGPLRRLDDPQNAPFLESIKKSECPKELEPADRRTAVHVNLTRRDEDYPEPVKPRHRAFQGVGRTLGSTSSSNDEPIQTTGASPSTAPLPTMGLIVDEAQSVTSIQLRLADGTRMVSRFNHHHTIRDVRAFIDASRPGGVRSYQLQSMGFPPKQLANLDQTIEQAGIANSVVIQKL

SEQ ID NO: 5485 - protein, 263 aa, Glycine max
  misc_feature (1)..(263): Ceres Seq. ID no. 14310445
MLVRDPTRGNSNNNNSVDDIFDQARQVAVDAPPENPRSSSRSGSFSGTARLLSGERLPSAAAAAPAPQRVEEVTHTVTFWRNGFSVNDGPLRRLDDPQNAPFLESIKKSECPKELEPADRRTAVHVNLTRRDEDYPEPVKPRHRAFQGVGRTLGSTSSSNDEPIQTTGASPSTAPLPTMGLIVDEAQSVTSIQLRLADGTRMVSRFNHHHTIRDVRAFIDASRPGGVRSYQLQSMGFPPKQLANLDQTIEQAGIANSVVIQKL

SEQ ID NO: 5486 - DNA, 1367 bp, Glycine max
  misc_feature (1)..(1367): Ceres Seq. ID no. 14310471
atgctgaaattaagaatctgtctcctgattctcctccatctctggagattgatggtaaagttgaagatagaatttcaccagatatgaaattggaagatcttctaaggatttatgaccaagagaaacttaagttcttatcttcatttgttgggcaggtttggtattcaaaacataaatgcactgccaaaatatattcctttagttttaccataaaagatggaacttgaatattattgatcttaacattaaacatatataccttgtgttttgcagaaaattaaaacaaatgtgttagtagcagacagaaaaatgagaaagctcatattctctctaagaccgaaagagaaggaagaattagttgagaagaagagaaatctcatggctaaacttcaagttggggatatagtaaaatgtcgtgtccagaaaattgcttactttgggatttttgttgaggttgaagaagtctctgcattaattcatcagtctgaattatcgtgggatgccactttgaacccagcatcatattttcagattggtcaggttctggaggcaaaagttcaccaaataaactttgctcttgagcgcatatttttatcattgaaggaggtcatgcctgatccattaatgaattccttagaggctatagttggggatcatgaccccttagatggaagactgaaagcagctcaaacagatgtagagtggccagaagtggattcccttgtcgaagaattgcaaaagattgagggagtccagtctgtttcaaaaggccgttttttcagaagccctggattagctccaacttttcaggtttatatggcatccatctttgaggatcagtataagttacttgctcgatctggaaacaaaatacaagaggtgattgttcaaacctctttagataaagaaaggatgaagtcagctgttatgacatgtgcaaacagagtagaataattgtggttggtgacatgacagtaagcctattgttgattgcttttttggtgattgtacattctttcggggagtgcaggctgcaatataaggagtttttcaagctaatttatacatgaggattggtgggaggatcaaatttttctttctttgtaaaaaattagtaataaaggcatatttctaacttctggggagacgtgttgggggtgagaggaggggttgcatataaagaacatgttcttagtcaacatataaaggacaagtagaaaaaactcgaatccttgctcttggatcaagtgatgccatttcttgtttgccactttgccttgtccactgcgaccgctgagaaattgttgatcattgtggttggttaatataagcttattagacagatttatttaaaaaagttgatgaat

SEQ ID NO: 5487 - protein, 214 aa, Glycine max
  misc_feature (1)..(214): Ceres Seq. ID no. 14310472
MRKLIFSLRPKEKEELVEKKRNLMAKLQVGDIVKCRVQKIAYFGIFVEVEEVSALIHQSELSWDATLNPASYFQIGQVLEAKVHQINFALERIFLSLKEVMPDPLMNSLEAIVGDHDPLDGRLKAAQTDVEWPEVDSLVEELQKIEGVQSVSKGRFFRSPGLAPTFQVYMASIFEDQYKLLARSGNKIQEVIVQTSLDKERMKSAVMTCANRVE

SEQ ID NO: 5488 - protein, 191 aa, Glycine max
  misc_feature (1)..(191): Ceres Seq. ID no. 14310473
MAKLQVGDIVKCRVQKIAYFGIFVEVEEVSALIHQSELSWDATLNPASYFQIGQVLEAKVHQINFALERIFLSLKEVMPDPLMNSLEAIVGDHDPLDGRLKAAQTDVEWPEVDSLVEELQKIEGVQSVSKGRFFRSPGLAPTFQVYMASIFEDQYKLLARSGNKIQEVIVQTSLDKERMKSAVMTCANRVE

SEQ ID NO: 5489 - protein, 114 aa, Glycine max
  misc_feature (1)..(114): Ceres Seq. ID no. 14310474
MPDPLMNSLEAIVGDHDPLDGRLKAAQTDVEWPEVDSLVEELQKIEGVQSVSKGRFFRSPGLAPTFQVYMASIFEDQYKLLARSGNKIQEVIVQTSLDKERMKSAVMTCANRVE

SEQ ID NO: 5490 - DNA, 1714 bp, Glycine max
  misc_feature (1)..(1714): Ceres Seq. ID no. 14310487
aaactcactgatttgcatcgccttgaattaataaacactggagtgagaaaggtaccagcacatttgggaaaactgaagtatcttcaggtatcaatgagtccgtttaaggttggcaaaagtagggagttcagtatccagcagctaggagaactcaatcttcatggaagtctatcaattcagaacctgcagaatgtcgagagtccctcggatgcattagcagtggatttgaaaaataaaacacaccttgtcaagctgaagttagaatgggattcagactggaaccctgatgattcaacaaaagaaagggatgaaactgtaatcgagaatctacagccttccgaacacttgaagaagttgaagatctggaactatgggggtaaacaatttccaaggtggttattcaacaattcatcatgtaatgtggtgtccttaagcttgaagaactgtcgatcttgccaacgtttgcctccccttggacttttgccttctctgaaggagctttcaattggagggcttgatgggatcgtgagtattaatgctgattttttcgggagtagctcttgttcatttacatccttggaatctttggagttctccgatatgaaggaatgggaagaatgggaatgtaaaggtgtgacaggtgcttttccacgtcttcaacatctttctatagtgcgttgtcccaagctgaaagggcacttgccagagcaactatgtcatttaaatgatctaaagatttatgggtgcgaacaacttgtaccttctgctctcagtgcccctgatattcatcaattatccctaggagactgtggaaagctgcaaattgctcatccgacaactttgaaagagcttaccattacaggtcacaacgtggaggcagccttactcgaacagattggacgcagttactcttgttcaaataacaatattcccatgcacagttgctatgatttccttgtaaggttggtcatcaatggtggctgcgactctctaacgaccattccgctagatatcttcccaatactcagggagcttcatatcaggaagtgtcctaatctacagaggatttcacaggggcaggctcataatcatctcaagtttctgtatatcaacgagtgcccccaattagaatcattgcctgaaggaatgcatgtcctccttccatctcttgatgagctgtggatagaggattgtccaaaagttgaaatgtttcccgaaggaggtttgccatcaaatttaaaatgtatgcatctcgatggttgttccaaacttatgtcgttattgaaaagtgccttgggaggcaatcactctctagaaaggttatatattgaaggagtggatgttgagtgtcttcctgacgaaggtgtactgccacactctcttgttactctatggatcagggagtgtccagatctaaaaagactggactacaaaggtctctgccacctctcctctctcaagatattgcatctttataagtgccccaggctccaatgcttaccagaggagggtctgcccaaatccatttcatatttgagaattaataattgtccgttgctcaaacaacgttgccgggaaccccaaggcgaagactggccaaagattgctcacattgaacacgtggatataaggtagtgaggttgatttaaaagaataatggtgaaagttgtagatgcttctctattgcctgcaatttactaattaattgttttcc

SEQ ID NO: 5491 - protein, 544 aa, Glycine max
  misc_feature (1)..(544): Ceres Seq. ID no. 14310488
KLTDLHRLELINTGVRKVPAHLGKLKYLQVSMSPFKVGKSREFSIQQLGELNLHGSLSIQNLQNVESPSDALAVDLKNKTHLVKLKLEWDSDWNPDDSTKERDETVIENLQPSEHLKKLKIWNYGGKQFPRWLFNNSSCNVVSLSLKNCRSCQRLPPLGLLPSLKELSIGGLDGIVSINADFFGSSSCSFTSLESLEFSDMKEWEEWECKGVTGAFPRLQHLSIVRCPKLKGHLPEQLCHLNDLKIYGCEQLVPSALSAPDIHQLSLGDCGKLQIAHPTTLKELTITGHNVEAALLEQIGRSYSCSNNNIPMHSCYDFLVRLVINGGCDSLTTIPLDIFPILRELHIRKCPNLQRISQGQAHNHLKFLYINECPQLESLPEGMHVLLPSLDELWIEDCPKVEMFPEGGLPSNLKCMHLDGCSKLMSLLKSALGGNHSLERLYIEGVDVECLPDEGVLPHSLVTLWIRECPDLKRLDYKGLCHLSSLKILHLYKCPRLQCLPEEGLPKSISYLRINNCPLLKQRCREPQGEDWPKIAHIEHVDIR

SEQ ID NO: 5492 - protein, 513 aa, Glycine max
  misc_feature (1)..(513): Ceres Seq. ID no. 14310489
MSPFKVGKSREFSIQQLGELNLHGSLSIQNLQNVESPSDALAVDLKNKTHLVKLKLEWDSDWNPDDSTKERDETVIENLQPSEHLKKLKIWNYGGKQFPRWLFNNSSCNVVSLSLKNCRSCQRLPPLGLLPSLKELSIGGLDGIVSINADFFGSSSCSFTSLESLEFSDMKEWEEWECKGVTGAFPRLQHLSIVRCPKLKGHLPEQLCHLNDLKIYGCEQLVPSALSAPDIHQLSLGDCGKLQIAHPTTLKELTITGHNVEAALLEQIGRSYSCSNNNIPMHSCYDFLVRLVINGGCDSLTTIPLDIFPILRELHIRKCPNLQRISQGQAHNHLKFLYINECPQLESLPEGMHVLLPSLDELWIEDCPKVEMFPEGGLPSNLKCMHLDGCSKLMSLLKSALGGNHSLERLYIEGVDVECLPDEGVLPHSLVTLWIRECPDLKRLDYKGLCHLSSLKILHLYKCPRLQCLPEEGLPKSISYLRINNCPLLKQRCREPQGEDWPKIAHIEHVDIR

SEQ ID NO: 5493 - protein, 344 aa, Glycine max
  misc_feature (1)..(344): Ceres Seq. ID no. 14310490
MKEWEEWECKGVTGAFPRLQHLSIVRCPKLKGHLPEQLCHLNDLKIYGCEQLVPSALSAPDIHQLSLGDCGKLQIAHPTTLKELTITGHNVEAALLEQIGRSYSCSNNNIPMHSCYDFLVRLVINGGCDSLTTIPLDIFPILRELHIRKCPNLQRISQGQAHNHLKFLYINECPQLESLPEGMHVLLPSLDELWIEDCPKVEMFPEGGLPSNLKCMHLDGCSKLMSLLKSALGGNHSLERLYIEGVDVECLPDEGVLPHSLVTLWIRECPDLKRLDYKGLCHLSSLKILHLYKCPRLQCLPEEGLPKSISYLRINNCPLLKQRCREPQGEDWPKIAHIEHVDIR

SEQ ID NO: 5494 - DNA, 1151 bp, Glycine max
  misc_feature (1)..(1151): Ceres Seq. ID no. 14310498
aattctgagaaaaactccaacgaacttcgcatttccacgaaaatggcttcccaaaacccagcggaggaagaaaattcaaagcgacattggtcccttgaagacttcgagatcggaaaacctctcggtaggggcaaattcggtagagtttacgtcgccagagaagttaagagcaaatttgttgtggcgttgaaggttatatttaaggaacaaattgataagtacagagttcatcaccaactgaggagagagatggagatacagaccagtctccggcacgcaaacatcctgcgtctttacggttggtttcatgatgctgaccgtgttttcttgattcttgagtatgctcataagggagagctttacaaggagctgagaaaaaagggtcatctcactgagaagcaagctgccacgtatattttgagcctcacaaaggcgttggcatattgtcatgagaaacatgttattcatagggatatcaagccagaaaatttgttgcttgaccatgaggggcgtcttaaaattgcagactttggttggtctgttcagtctagaagcaaaagacataccatgtgtggaacattggattatttagcaccagaaatggttgaaaacaaagctcatgactatgcagttgacaactggactttgggtatcctttgttatgagttcctctatggtgctcctccatttgaggctgagagtcaatctgataccttcaaaaggataatgaaggttgatctaagcttcccttccaccccttctgtctctatagaggcgaaaaatctgattagtcggctcctggtgaaagactcctcacgaaggctctctcttcagaagataatggagcatccttggataatcaagaatgcagattttgtgggtatttgctagtagcatcaactcactaatttaactttggccacgagggattaagactgaattctgtatatgatgttataaaatgcatgtaagtgttttgcagtgttcaagtgtttaatcaacttgaatgacacattacctttgctgcgaggttaggaacattaggatggtatatctgcctatttgtaatagttgtattgtaggtgtaatttcttccagttctttgtgcatctaaaccaggcatgactaatgacttgcacagatttattttg

SEQ ID NO: 5495 - protein, 296 aa, Glycine max
  misc_feature (1)..(296): Ceres Seq. ID no. 14310499
NSEKNSNELRISTKMASQNPAEEENSKRHWSLEDFEIGKPLGRGKFGRVYVAREVKSKFVVALKVIFKEQIDKYRVHHQLRREMEIQTSLRHANILRLYGWFHDADRVFLILEYAHKGELYKELRKKGHLTEKQAATYILSLTKALAYCHEKHVIHRDIKPENLLLDHEGRLKIADFGWSVQSRSKRHTMCGTLDYLAPEMVENKAHDYAVDNWTLGILCYEFLYGAPPFEAESQSDTFKRIMKVDLSFPSTPSVSIEAKNLISRLLVKDSSRRLSLQKIMEHPWIIKNADFVGIC

SEQ ID NO: 5496 - protein, 282 aa, Glycine max
  misc_feature (1)..(282): Ceres Seq. ID no. 14310500
MASQNPAEEENSKRHWSLEDFEIGKPLGRGKFGRVYVAREVKSKFVVALKVIFKEQIDKYRVHHQLRREMEIQTSLRHANILRLYGWFHDADRVFLILEYAHKGELYKELRKKGHLTEKQAATYILSLTKALAYCHEKHVIHRDIKPENLLLDHEGRLKIADFGWSVQSRSKRHTMCGTLDYLAPEMVENKAHDYAVDNWTLGILCYEFLYGAPPFEAESQSDTFKRIMKVDLSFPSTPSVSIEAKNLISRLLVKDSSRRLSLQKIMEHPWIIKNADFVGIC

SEQ ID NO: 5497 - protein, 213 aa, Glycine max
  misc_feature (1)..(213): Ceres Seq. ID no. 14310501
MEIQTSLRHANILRLYGWFHDADRVFLILEYAHKGELYKELRKKGHLTEKQAATYILSLTKALAYCHEKHVIHRDIKPENLLLDHEGRLKIADFGWSVQSRSKRHTMCGTLDYLAPEMVENKAHDYAVDNWTLGILCYEFLYGAPPFEAESQSDTFKRIMKVDLSFPSTPSVSIEAKNLISRLLVKDSSRRLSLQKIMEHPWIIKNADFVGIC

SEQ ID NO: 5498 - DNA, 1810 bp, Glycine max
  misc_feature (1)..(1810): Ceres Seq. ID no. 14310508
aatgcctagtgaattagctatgaacaatgatgagctacatgtggttatgttcccattccttgcatttggccacattagtccatttgttcagctctccaacaagttgttctctcatggtgttcatgtcactttcttgtcagctgcatccaacattcccagaatcagatcaactcttaatctcaatccagccatcaatgttatctcactaaagttcccaaatggtataaccaacactgctgaattgccacctcacttagctggaaatctcatacacgcccttgacctcactcaagatcaggtgaagtcccttttgttggaactcaaaccccactatgttttctttgactttgcacaacattggctcccaaaattagcttctgaagttggcatcaagtctgttcatttctcagtctactctgccatttctgatgcttacattaccgtgccttctagatttgctgatgttgaaggaagaaacatcacttttgaggatcttaaaaagcctccacctgggtatcctcaaaactctaatatttccctcaaggcctttgaggccatggactttatgttcctcttcacaagatttggtgaaaaaaaccttactggttatgagcgagttttgcaaagccttggtgagtgttcattcatagtgttcaaaacgtgcaaggaaatagaaggaccctacttagactacatagaaacgcaatttcgaaaaccagttttgctatctggtccactagtccccgagccatcaaccgatgtgcttgaggaaaagtggtccaaatggttagatggtttccctgccaaatctgtcatattatgctcctttggcagtgagacatttctgagtgattatcaaatcaaagaactagccagtgggttagaactcactggcttacctttcattttggttctgaatttcccatccaatctctctgccaaagctgagttggagagagcattgccaaaagggtatttggaaagagtgaagaataggggagtggtgcacagtggttggtttcagcagcagcttgtgctgaaacactcaagtgtggggtgctatgtatgccatggtggctttagttcagtgattgaagctatggtcaatgagtgtcaactggtgctgttgcctttcaagggtgaccagtttttcaattctaaactcattgccaatgatttaaaggcaggggtagaggtgaataggagtgatgaagatgggttctttcacaaagaggatatactggaggcattgaaaactgtcatgttggaggataacaaagagcaagggaagcaaataagagaaaaccacatgcaatggagcaagtttttatcaaataaggaaattcagaacaaattcatcacagatctggttgcccagttaaagtctatggcttagtcttgtctcttccaatggaaaataaagtctaccaagactagaaagtataaactatagttcaaaatgatcatattatcatatatcaattgagatatgcgtggtcagtctcgttgttcttgtgattttgctttcccgttgtaggttttattctgtgtctcctttctcccgatcaattaatgcagttaggagattcaccttaaaaaagctaaaaattgcttttgtaacttgaagttattgtattcctactgattttggtcaagaccaagaagttgtcttataatttgtgcacatggtttgttttgaaatttagaaaggaaaaaagaaaagaaaaagtagagcatggaacaaatatcgtttgtaatataggtgaccaataaatgtagaaccattctaaataaatatggctttgaatac

SEQ ID NO: 5499 - protein, 464 aa, Glycine max
  misc_feature (1)..(464): Ceres Seq. ID no. 14310509
MPSELAMNNDELHVVMFPFLAFGHISPFVQLSNKLFSHGVHVTFLSAASNIPRIRSTLNLNPAINVISLKFPNGITNTAELPPHLAGNLIHALDLTQDQVKSLLLELKPHYVFFDFAQHWLPKLASEVGIKSVHFSVYSAISDAYITVPSRFADVEGRNITFEDLKKPPPGYPQNSNISLKAFEAMDFMFLFTRFGEKNLTGYERVLQSLGECSFIVFKTCKEIEGPYLDYIETQFRKPVLLSGPLVPEPSTDVLEEKWSKWLDGFPAKSVILCSFGSETFLSDYQIKELASGLELTGLPFILVLNFPSNLSAKAELERALPKGYLERVKNRGVVHSGWFQQQLVLKHSSVGCYVCHGGFSSVIEAMVNECQLVLLPFKGDQFFNSKLIANDLKAGVEVNRSDEDGFFHKEDILEALKTVMLEDNKEQGKQIRENHMQWSKFLSNKEIQNKFITDLVAQLKSMA

SEQ ID NO: 5500 - protein, 458 aa, Glycine max
  misc_feature (1)..(458): Ceres Seq. ID no. 14310510
MNNDELHVVMFPFLAFGHISPFVQLSNKLFSHGVHVTFLSAASNIPRIRSTLNLNPAINVISLKFPNGITNTAELPPHLAGNLIHALDLTQDQVKSLLLELKPHYVFFDFAQHWLPKLASEVGIKSVHFSVYSAISDAYITVPSRFADVEGRNITFEDLKKPPPGYPQNSNISLKAFEAMDFMFLFTRFGEKNLTGYERVLQSLGECSFIVFKTCKEIEGPYLDYIETQFRKPVLLSGPLVPEPSTDVLEEKWSKWLDGFPAKSVILCSFGSETFLSDYQIKELASGLELTGLPFILVLNFPSNLSAKAELERALPKGYLERVKNRGVVHSGWFQQQLVLKHSSVGCYVCHGGFSSVIEAMVNECQLVLLPFKGDQFFNSKLIANDLKAGVEVNRSDEDGFFHKEDILEALKTVMLEDNKEQGKQIRENHMQWSKFLSNKEIQNKFITDLVAQLKSMA

SEQ ID NO: 5501 - protein, 449 aa, Glycine max
  misc_feature (1)..(449): Ceres Seq. ID no. 14310511
MFPFLAFGHISPFVQLSNKLFSHGVHVTFLSAASNIPRIRSTLNLNPAINVISLKFPNGITNTAELPPHLAGNLIHALDLTQDQVKSLLLELKPHYVFFDFAQHWLPKLASEVGIKSVHFSVYSAISDAYITVPSRFADVEGRNITFEDLKKPPPGYPQNSNISLKAFEAMDFMFLFTRFGEKNLTGYERVLQSLGECSFIVFKTCKEIEGPYLDYIETQFRKPVLLSGPLVPEPSTDVLEEKWSKWLDGFPAKSVILCSFGSETFLSDYQIKELASGLELTGLPFILVLNFPSNLSAKAELERALPKGYLERVKNRGVVHSGWFQQQLVLKHSSVGCYVCHGGFSSVIEAMVNECQLVLLPFKGDQFFNSKLIANDLKAGVEVNRSDEDGFFHKEDILEALKTVMLEDNKEQGKQIRENHMQWSKFLSNKEIQNKFITDLVAQLKSMA

SEQ ID NO: 5502 - DNA, 1861 bp, Glycine max
  misc_feature (1)..(1861): Ceres Seq. ID no. 14310527
acaattcctcaaatcacagcgaggaagaaacatcattttctcatgatagcagtatggaactgacagaaaatactagtgatgatccaatgccagaactgcacaatcctactacgctcaaagaaagatgtcttgagtctcttgattttcctggaaccgagacagtcaagaatatgcctgcctttggagctactgaagaacacttgagtggaaagcaaagtttagctggcagttatgataatgaggagaagatatcaagtgacagtgataatatttatcttgtagagatcaaagatactacctcaagttccttaaatgagccagttgaaattataagaagcagtcatgaggaggctccaaccaatgaaacagtcaatgatgttccagaagatttgctatccagtgtgaatacagaaaatccagatatcaaatctgagtcacctggaagagatgttgaaaccaagaatctgaatggtgataatggggaaaaaatttccatgtccaaaagtttagtcctagaaggtttagttagatcactcagatctaatttgattggttcaggagcacctgtaaacgaaccaactgccaacaacagaaaagaaggaattgaaaatgttaaacaggaaactgagactcttgaagagttccctacaaaggaacaatctgaagctcatattagtgctgttgtagaacctgagacccctgtagagaaacagaataacacaggattgtggtacttggtgtataagcacatggtatcaaatatggatgaaaacaattccgagtcactaattgatggggcagatgaaaaagagtcagggtttgatgggagcagaacaagaggagcttccttctctcatgaaagtacacccgtgactgatgaagagatgaaatttaaggaccatgtcgtagctgatccagaagttgcacgccaacagaatgaagccatcaagatggtagaagaagcaattgattcaattcttccagatgatcaggatgacttatcagacaaggaatcactcactgacagcacaatttcagacaactccaaacaatccaacagaactgaaagagtatacagtgaaggcctgaaccaaaaagaagaacagatggaatccgggaacggaatgatccaaaaacaagaagaatcagcaccaaaggagcaaaacaaaacaaaccagaaaatgtctacaagctggagcaatcttaaaaaagtgatcctgcttaggagattcatcaagtcattggaaaaagtaaggaaattcaacccaagagggcctagatatctacctctagagcctgattcagaagctgaaaaagttaacttaaggcatcaagacatggaagaacgaaaaggtacggaagaatggatgcttgattatgcacttcgacaggttgtttccaaattaacccctgctaggaaaagaaaagtggagctgctggtggaagcttttgaaacagtcatgccaactataaaaacttgaaactgggcaaactggcaaagagtggaatagctttgtatgcaaaaaaaattcaagctgaaaggtcaacaaggagatgtatatgatcataatcatttgggatgtcagcagttttttgttttgtggaaactgtgtctggtgtcatatattttttatagtctcttaggaggaaacttagagtatagaatgtttcatgattcagcaacaacaaaattcaatatagggatatttccccctttttttaacctttcatatctctcttggtgttctcaggtggatgttttgtatgaaagatttgcattacaaataccatagacaatctttaaatgtcatgatgtatgtcttttgtgtggaacataatagaatggcctaatccgtattgc

SEQ ID NO: 5503 - protein, 492 aa, Glycine max
  misc_feature (1)..(492): Ceres Seq. ID no. 14310528
NSSNHSEEETSFSHDSSMELTENTSDDPMPELHNPTTLKERCLESLDFPGTETVKNMPAFGATEEHLSGKQSLAGSYDNEEKISSDSDNIYLVEIKDTTSSSLNEPVEIIRSSHEEAPTNETVNDVPEDLLSSVNTENPDIKSESPGRDVETKNLNGDNGEKISMSKSLVLEGLVRSLRSNLIGSGAPVNEPTANNRKEGIENVKQETETLEEFPTKEQSEAHISAVVEPETPVEKQNNTGLWYLVYKHMVSNMDENNSESLIDGADEKESGFDGSRTRGASFSHESTPVTDEEMKFKDHVVADPEVARQQNEAIKMVEEAIDSILPDDQDDLSDKESLTDSTISDNSKQSNRTERVYSEGLNQKEEQMESGNGMIQKQEESAPKEQNKTNQKMSTSWSNLKKVILLRRFIKSLEKVRKFNPRGPRYLPLEPDSEAEKVNLRHQDMEERKGTEEWMLDYALRQVVSKLTPARKRKVELLVEAFETVMPTIKT

SEQ ID NO: 5504 - protein, 475 aa, Glycine max
  misc_feature (1)..(475): Ceres Seq. ID no. 14310529
MELTENTSDDPMPELHNPTTLKERCLESLDFPGTETVKNMPAFGATEEHLSGKQSLAGSYDNEEKISSDSDNIYLVEIKDTTSSSLNEPVEIIRSSHEEAPTNETVNDVPEDLLSSVNTENPDIKSESPGRDVETKNLNGDNGEKISMSKSLVLEGLVRSLRSNLIGSGAPVNEPTANNRKEGIENVKQETETLEEFPTKEQSEAHISAVVEPETPVEKQNNTGLWYLVYKHMVSNMDENNSESLIDGADEKESGFDGSRTRGASFSHESTPVTDEEMKFKDHVVADPEVARQQNEAIKMVEEAIDSILPDDQDDLSDKESLTDSTISDNSKQSNRTERVYSEGLNQKEEQMESGNGMIQKQEESAPKEQNKTNQKMSTSWSNLKKVILLRRFIKSLEKVRKFNPRGPRYLPLEPDSEAEKVNLRHQDMEERKGTEEWMLDYALRQVVSKLTPARKRKVELLVEAFETVMPTIKT

SEQ ID NO: 5505 - protein, 464 aa, Glycine max
  misc_feature (1)..(464): Ceres Seq. ID no. 14310530
MPELHNPTTLKERCLESLDFPGTETVKNMPAFGATEEHLSGKQSLAGSYDNEEKISSDSDNIYLVEIKDTTSSSLNEPVEIIRSSHEEAPTNETVNDVPEDLLSSVNTENPDIKSESPGRDVETKNLNGDNGEKISMSKSLVLEGLVRSLRSNLIGSGAPVNEPTANNRKEGIENVKQETETLEEFPTKEQSEAHISAVVEPETPVEKQNNTGLWYLVYKHMVSNMDENNSESLIDGADEKESGFDGSRTRGASFSHESTPVTDEEMKFKDHVVADPEVARQQNEAIKMVEEAIDSILPDDQDDLSDKESLTDSTISDNSKQSNRTERVYSEGLNQKEEQMESGNGMIQKQEESAPKEQNKTNQKMSTSWSNLKKVILLRRFIKSLEKVRKFNPRGPRYLPLEPDSEAEKVNLRHQDMEERKGTEEWMLDYALRQVVSKLTPARKRKVELLVEAFETVMPTIKT

SEQ ID NO: 5506 - DNA, 1371 bp, Glycine max
  misc_feature (1)..(1371): Ceres Seq. ID no. 14310539
taccaagattcagctgttgaatcacaaggagacacctcttctgttggcaatgatactgcatatagatcaaaagagtttgcatttgaaaatcctgctgcttatctttctaggtttgctggttctgaatgtggcactgaactctctatttcttccactcttgattcacctgacatatcagagcctggcgctatggaaaatgaacgagatgccaaagatttaatggaagggattggtaatcttgagaacactataaaccatgatgatgaggccaatgacaatgtttcacgtgtcatcccagcttctaacctagctacttctgttttggataagtcagagattgttgatgacattagtgccaatttgggtcactcagtggtagctgtggactctgaagagcctgctattaagactgagaaaaatgcacctgacctgcagagagagctgccagagtctgttctgcaagatttaagatcatctccagaagcttcacctagaagccatttaactgtccctgaatcacaaggaacgccttcaagtgaagtgtctgtgaaacctaaagatagcactatcaacaagactagatctggcaataaacgtcggagcctatcattgagtaacaaatcacctacaaatccaaatcatgattcaggctcgaaagacagtagggagcaactgcctaaagatcagcagaatggaaagaggcgcaattcctttggctcagtaaagcctgataacattgatcaagaatctagagataatagtactaacaacaattctctaccccatttcatgcaagctacagaatctgctagggccaaggttaatgcaaataactctccaagatcaagtccagatgtacacgaaggagatatcgaagttaagaagagacattccttacctggtgccactggtaggcaagtttctccacgcatccaacgatcaacatctaaggcacagcagagtgcaaaaggaaacaatgtacatcctcctcaagagagaaaatggctgaggtgaattgagggcgaagtgtgccgacaagcttctacgatttcattttttaattctctttgaagcatagctgctccgttttatatgcttttttttctccctctttttatatttcttgactctgtattctttgcctcccttttttgcttccccaaatttgaaggtgctcagtttggttgtgacggttgggaacatgaatatgtaaaagtgagtgaggcttatatatgtacattgttgctctgctcatggttattattgtgccatacatgtaaggcgcacgcgatctgtaagtttcagagttcagactacgactgcgtatgagatattttaatgttaaatatattttgcttgaattttgacaag

SEQ ID NO: 5507 - protein, 337 aa, Glycine max
  misc_feature (1)..(337): Ceres Seq. ID no. 14310540
YQDSAVESQGDTSSVGNDTAYRSKEFAFENPAAYLSRFAGSECGTELSISSTLDSPDISEPGAMENERDAKDLMEGIGNLENTINHDDEANDNVSRVIPASNLATSVLDKSEIVDDISANLGHSVVAVDSEEPAIKTEKNAPDLQRELPESVLQDLRSSPEASPRSHLTVPESQGTPSSEVSVKPKDSTINKTRSGNKRRSLSLSNKSPTNPNHDSGSKDSREQLPKDQQNGKRRNSFGSVKPDNIDQESRDNSTNNNSLPHFMQATESARAKVNANNSPRSSPDVHEGDIEVKKRHSLPGATGRQVSPRIQRSTSKAQQSAKGNNVHPPQERKWLR

SEQ ID NO: 5508 - protein, 274 aa, Glycine max
  misc_feature (1)..(274): Ceres Seq. ID no. 14310541
MENERDAKDLMEGIGNLENTINHDDEANDNVSRVIPASNLATSVLDKSEIVDDISANLGHSVVAVDSEEPAIKTEKNAPDLQRELPESVLQDLRSSPEASPRSHLTVPESQGTPSSEVSVKPKDSTINKTRSGNKRRSLSLSNKSPTNPNHDSGSKDSREQLPKDQQNGKRRNSFGSVKPDNIDQESRDNSTNNNSLPHFMQATESARAKVNANNSPRSSPDVHEGDIEVKKRHSLPGATGRQVSPRIQRSTSKAQQSAKGNNVHPPQERKWLR

SEQ ID NO: 5509 - protein, 264 aa, Glycine max
  misc_feature (1)..(264): Ceres Seq. ID no. 14310542
MEGIGNLENTINHDDEANDNVSRVIPASNLATSVLDKSEIVDDISANLGHSVVAVDSEEPAIKTEKNAPDLQRELPESVLQDLRSSPEASPRSHLTVPESQGTPSSEVSVKPKDSTINKTRSGNKRRSLSLSNKSPTNPNHDSGSKDSREQLPKDQQNGKRRNSFGSVKPDNIDQESRDNSTNNNSLPHFMQATESARAKVNANNSPRSSPDVHEGDIEVKKRHSLPGATGRQVSPRIQRSTSKAQQSAKGNNVHPPQERKWLR

SEQ ID NO: 5510 - DNA, 1271 bp, Glycine max
  misc_feature (1)..(1271): Ceres Seq. ID no. 14310543
attttttcttcatcatccaccactttatttgtcacttgctttcatgcaattaacacttctaccaccttttttcattttctcactctcttcactaaaatgagtgacacacaccaacctttcatgtccgtacaaccacccatgaagctccacaaccacccatttaacccacaagcctcaagctcaaattttgacggcgacccaccatgcaaaaccgccggaaaaacaaaaccacctcacacgaagctcctccgggtcattctcaccgaccacgacgccaccgattctgactcctccggcgacgacgaagacccaaaaaacacaaaaaaacacaaaaaggtgaaaagacaaattacccacatcaccataaaccttccctttttctcaaaatccccaactccaacatcaacaccttcttcttcttcgcttgacccgacccgttcgacccgacccaagaaacgactcggcgtccctcgccgccggaacaagttccgcggcgtccggcagcgaccatggggacggtggacggcagaaatccgtgacccgactcagagaaaacgggtctggctcggaaccttcgacacggcggaggaagccgccgccgtgtacgacgaggccgcggtgaagctcaagggccctaacgccgtcaccaacttccccctctccgccgccggaaacacggaacatgatacccctccgccggagacggtgttctccggcgaaggtctttcatctccgacgtccgttctcacttactgcgacggagactcgacgccgttcgacggttttcgttacggcgaggtcgacgcgttcgggtttgagtttgacatcgacgcgccgtttagtttaacggccgttaacttaggggtgctgagtcagcggttcgggaaggaagagtttggcgagtttgacccgaacgagttcttgacgtggccgagttaaggggcttctttgtcatttcgcgaaatatccagggactggtttagtaattctactaaagttctttttgtcgtattgttttgtcctacgtggaattccaaaactaccctcgtgactaaagagtttttgtgcagcttagaagagtgttagagtgctagagagcaatagagtgagaacaatttcgtaatggaagtggaagagaattttgtcctatgttaatttgtgtaattaagccttaattgtattgttatggagaaagaggatatgatggaaagtattagaaggattctattgtagtttcttatataattttataaagtaaaaatgttagtatt

SEQ ID NO: 5511 - protein, 312 aa, Glycine max
  misc_feature (1)..(312): Ceres Seq. ID no. 14310544
IFSSSSTTLFVTCFHAINTSTTFFHFLTLFTKMSDTHQPFMSVQPPMKLHNHPFNPQASSSNFDGDPPCKTAGKTKPPHTKLLRVILTDHDATDSDSSGDDEDPKNTKKHKKVKRQITHITINLPFFSKSPTPTSTPSSSSLDPTRSTRPKKRLGVPRRRNKFRGVRQRPWGRWTAEIRDPTQRKRVWLGTFDTAEEAAAVYDEAAVKLKGPNAVTNFPLSAAGNTEHDTPPPETVFSGEGLSSPTSVLTYCDGDSTPFDGFRYGEVDAFGFEFDIDAPFSLTAVNLGVLSQRFGKEEFGEFDPNEFLTWPS

SEQ ID NO: 5512 - protein, 280 aa, Glycine max
  misc_feature (1)..(280): Ceres Seq. ID no. 14310545
MSDTHQPFMSVQPPMKLHNHPFNPQASSSNFDGDPPCKTAGKTKPPHTKLLRVILTDHDATDSDSSGDDEDPKNTKKHKKVKRQITHITINLPFFSKSPTPTSTPSSSSLDPTRSTRPKKRLGVPRRRNKFRGVRQRPWGRWTAEIRDPTQRKRVWLGTFDTAEEAAAVYDEAAVKLKGPNAVTNFPLSAAGNTEHDTPPPETVFSGEGLSSPTSVLTYCDGDSTPFDGFRYGEVDAFGFEFDIDAPFSLTAVNLGVLSQRFGKEEFGEFDPNEFLTWPS

SEQ ID NO: 5513 - protein, 272 aa, Glycine max
  misc_feature (1)..(272): Ceres Seq. ID no. 14310546
MSVQPPMKLHNHPFNPQASSSNFDGDPPCKTAGKTKPPHTKLLRVILTDHDATDSDSSGDDEDPKNTKKHKKVKRQITHITINLPFFSKSPTPTSTPSSSSLDPTRSTRPKKRLGVPRRRNKFRGVRQRPWGRWTAEIRDPTQRKRVWLGTFDTAEEAAAVYDEAAVKLKGPNAVTNFPLSAAGNTEHDTPPPETVFSGEGLSSPTSVLTYCDGDSTPFDGFRYGEVDAFGFEFDIDAPFSLTAVNLGVLSQRFGKEEFGEFDPNEFLTWPS

SEQ ID NO: 5514 - DNA, 1098 bp, Glycine max
  misc_feature (1)..(1098): Ceres Seq. ID no. 14310551
tttatttttataggaaaatgcgagtttagtgatgatgaaacagtgtgtgtttgttatgggacttattatggaagtgactgtagtgttttttgtcagccttccgtaaattgttctaataatggtgattgtaaggcagatggaacttgtaattgtggagaaaattattacggagataattgtgaattcacttattgtcccggaaattgcagtggaaatggaatctgtaataattcaacgggagtgtgttcttgcagtgaaaattatttttcaccctcgtgtgaaaattattgcgttgctagtaccacttgtagtggacaaggagattgcagtaataacggaatttgcgaatgttataataattattatggaaataattgtctctctttctgtgattcccaaaccacatgcagcaatcacggaacatgtgtagagatacaaaacagagagagaaaagaaagaggagagagagaagagatagaaagtggagtagaatgccaatgtgattttaattatcataatttggattgtagtgtttattgtaatgatacaataacctgcagcggccatgggacatgcaacaacactggagtgtgcgaatgtaccggagaatatttcgactctgcgtgtgataaattaagttgtcatggatctaatactgacatagaatgcaacggatatgggacgtgcaattacactacgggattgtgcgattgtgattctgattataattgtttattagataccaatactccagctcttttacaaatgacatgtcatccttgtgtggacaacttttggactaagaaacacattattataatttcggtatctgtgggaggatttttattattattaattttaggatgtgttggttgctggttgaggaatagaaaacaacgtcacgaatactctcaaattcaaaattaatgataataacaactacaataataatactaacaattgcaaatgttaacatttttttttctttttaacttttgcactttgcggaggagttactttaattttatctataaataaatggttgtagcaataaattcgggatgtaaataaaatagattataatactgatataactat

SEQ ID NO: 5515 - protein, 308 aa, Glycine max
  misc_feature (1)..(308): Ceres Seq. ID no. 14310552
FIFIGKCEFSDDETVCVCYGTYYGSDCSVFCQPSVNCSNNGDCKADGTCNCGENYYGDNCEFTYCPGNCSGNGICNNSTGVCSCSENYFSPSCENYCVASTTCSGQGDCSNNGICECYNNYYGNNCLSFCDSQTTCSNHGTCVEIQNRERKERGEREEIESGVECQCDFNYHNLDCSVYCNDTITCSGHGTCNNTGVCECTGEYFDSACDKLSCHGSNTDIECNGYGTCNYTTGLCDCDSDYNCLLDTNTPALLQMTCHPCVDNFWTKKHIIIISVSVGGFLLLLILGCVGCWLRNRKQRHEYSQIQN

SEQ ID NO: 5516 - DNA, 2151 bp, Glycine max
  misc_feature (1)..(2151): Ceres Seq. ID no. 14310556
gggagttacacattattctctctctcactcacactcagagtggtagctagacaacaacgagagagagagagagagagatggaggatctcgaggaggaagagaacggagcggaggaggtgttggggtcaagcttgaccatggagaaagtggcggctgcgaagaagttcattgagaatcattatagggctcagatgaagaacatccaagagaggaaggagaggcgctgggttttagaaagaaaattggcatcatcagatgtgccaaatgaggagcggatcaacctcatcaaagatttagagaggaaggagactgaatatatgcgattgaaaagacacaagatttgtgttaatgattttgaacttttgaccatcattggaaggggggcttttggggaggttagactgtgccgggagaagaaatctggaaatatttatgctatgaaaaagctgaagaaatctgaaatgcttaggagaggccaggtggaacatgttagagctgagaggaatttgctggccgaagttgccagtcattgcattgtgaaactttactactcatttcaggatgctgagtacttgtatttaattatggagtatctgcctgggggtgacgttatgactctgctgatgagggaagacaccttaagtgaaaatgttgctagattttacattgcacaaagtgttctggccatagaatctattcacaaacacaattacattcacagagatattaaacctgataaccttcttctggataaaaatggtcacatgaagctctctgattttggtctctgtaagcctctggattgtattgccttgtctacactgcatgaaaatcagaccatagatgatgaaactttggcagaaccaatggatgttgatgatgcggacaatcgaagtagctggagaagtccacgtgaacagcttcaacattggcagatgaacaggaggaagttggcattttcaacagtggggacaccagactacattgctcctgaagtacttttgaaaaaaggatatgggatggaatgtgattggtggtcactgggagcaataatgtatgaaatgctggttggttacccaccattttactccgatgatccaataaccacatgcagaaagattgttcattggagaaatcatttaagatttccagatgatgcccagttaacacttgaggctaaggatctaatttataggttgctctgtgatgttgatcataggttaggtactcgaggggccattgaaataaaggctcatccttggttcaagggtgttgattgggataaactgtatgaaatggaggcagcatttaaacctcaagtcaacggggaactggatacccaaaacttcatgaagtttgatgaggttgatccaccaacagcagcaagaaccgggtctggatcctcacgaaagatgctaactaccaaagatctaagtttcgttggttatacttacaagaatttcgatgctgtaaaggaagggctccgtcaatcttttggtgattccatgcaagagtatgcttctaaacgggcagctgaagaaacaagtttacaaatgcttgcatcctctggagatccaatggttccataactttgtgcaaattgaagtccatcctgttgggtttttgtgtacttgctttggctttaaatattcggccaagaacatgtattatggtgtactccaattcctatgccatttgcaagaaaaatgtgtacagcaagcagttgacagcattgtcaaagcttgtagggcaaccccgcgcgtctgtatttgaattttcaacttaggaactgagagttgtgcgactgagtgctcctgtcctggctgcccaggttggctgaggaagacttgccttctctagtggcagttgctggttaaatgttagttatggacaaaaattgctaaggaactattaaagcatcctgaaaattattcgatgtgatgtgtacatttattggaagataacataaattaaactattaaaacaaactatgcttggggatggagtgtggaattgtctttagcagctcagttgcttgccctttttccctttttatctatttcatgtggaaaagtgcaattagtgacgtcaacctcactgtcctggtcactagctaatgcttgattgaatacaaacaactttttcttaaag

SEQ ID NO: 5517 - protein, 503 aa, Glycine max
  misc_feature (1)..(503): Ceres Seq. ID no. 14310557
MEDLEEEENGAEEVLGSSLTMEKVAAAKKFIENHYRAQMKNIQERKERRWVLERKLASSDVPNEERINLIKDLERKETEYMRLKRHKICVNDFELLTIIGRGAFGEVRLCREKKSGNIYAMKKLKKSEMLRRGQVEHVRAERNLLAEVASHCIVKLYYSFQDAEYLYLIMEYLPGGDVMTLLMREDTLSENVARFYIAQSVLAIESIHKHNYIHRDIKPDNLLLDKNGHMKLSDFGLCKPLDCIALSTLHENQTIDDETLAEPMDVDDADNRSSWRSPREQLQHWQMNRRKLAFSTVGTPDYIAPEVLLKKGYGMECDWWSLGAIMYEMLVGYPPFYSDDPITTCRKIVHWRNHLRFPDDAQLTLEAKDLIYRLLCDVDHRLGTRGAIEIKAHPWFKGVDWDKLYEMEAAFKPQVNGELDTQNFMKFDEVDPPTAARTGSGSSRKMLTTKDLSFVGYTYKNFDAVKEGLRQSFGDSMQEYASKRAAEETSLQMLASSGDPMVP

SEQ ID NO: 5518 - protein, 483 aa, Glycine max
  misc_feature (1)..(483): Ceres Seq. ID no. 14310558
MEKVAAAKKFIENHYRAQMKNIQERKERRWVLERKLASSDVPNEERINLIKDLERKETEYMRLKRHKICVNDFELLTIIGRGAFGEVRLCREKKSGNIYAMKKLKKSEMLRRGQVEHVRAERNLLAEVASHCIVKLYYSFQDAEYLYLIMEYLPGGDVMTLLMREDTLSENVARFYIAQSVLAIESIHKHNYIHRDIKPDNLLLDKNGHMKLSDFGLCKPLDCIALSTLHENQTIDDETLAEPMDVDDADNRSSWRSPREQLQHWQMNRRKLAFSTVGTPDYIAPEVLLKKGYGMECDWWSLGAIMYEMLVGYPPFYSDDPITTCRKIVHWRNHLRFPDDAQLTLEAKDLIYRLLCDVDHRLGTRGAIEIKAHPWFKGVDWDKLYEMEAAFKPQVNGELDTQNFMKFDEVDPPTAARTGSGSSRKMLTTKDLSFVGYTYKNFDAVKEGLRQSFGDSMQEYASKRAAEETSLQMLASSGDPMVP

SEQ ID NO: 5519 - protein, 465 aa, Glycine max
  misc_feature (1)..(465): Ceres Seq. ID no. 14310559
MKNIQERKERRWVLERKLASSDVPNEERINLIKDLERKETEYMRLKRHKICVNDFELLTIIGRGAFGEVRLCREKKSGNIYAMKKLKKSEMLRRGQVEHVRAERNLLAEVASHCIVKLYYSFQDAEYLYLIMEYLPGGDVMTLLMREDTLSENVARFYIAQSVLAIESIHKHNYIHRDIKPDNLLLDKNGHMKLSDFGLCKPLDCIALSTLHENQTIDDETLAEPMDVDDADNRSSWRSPREQLQHWQMNRRKLAFSTVGTPDYIAPEVLLKKGYGMECDWWSLGAIMYEMLVGYPPFYSDDPITTCRKIVHWRNHLRFPDDAQLTLEAKDLIYRLLCDVDHRLGTRGAIEIKAHPWFKGVDWDKLYEMEAAFKPQVNGELDTQNFMKFDEVDPPTAARTGSGSSRKMLTTKDLSFVGYTYKNFDAVKEGLRQSFGDSMQEYASKRAAEETSLQMLASSGDPMVP

SEQ ID NO: 5520 - DNA, 1621 bp, Glycine max
  misc_feature (1)..(1621): Ceres Seq. ID no. 14310568
aattagctataagcaggaaaggaagagagaagtaaagcagtagaggtttgtttgtttagtgatgtgtctggaaacatgaagcagaatgatcggccaagggagtgtttgtctaattcgaattctgaaggttgttctttgtcattgatgggaagagaaccccctcagaatttgttaccttccaaacacgacttccctagactggttctcgtgattgcactcgcatcgctagttgcttggacctgcaacttcctctttacctctctctttcatcccccttccaaacccttctgcgacacaaacctccactctcccgattactttctcgatatttgtcaaccttgtccaagtaatggagaatgcaatgatggcaagttggaatgtcatcagggttaccaaaggcatgggaacttgtgtgcagaagatggagatattaatgaatcagctcgaaaacttctggagagagtggaacatcacctctgtgaaaaatatgctcaatttttgtgcactggaactggaataatttgggttcatgaggatgatttatggaattattttgagccagtgggaaatgtcaaagtggacaatgctctttataattatacaaaacaaagggcagttgagacaatgggcaaattattggagacgaggttaaacagctctcatgggatgaaggagttcaagtgtccagatcagctggcagagcattacaagccatatacctgctgcattcgtcagtggatctcacagcatattctagttgttttgcccatttgtgccatgctttgtgctggaatgtacgacagaagctaagcatgtcaagacgagttgaggagctttacgacaaggtctgtgaaatacttgaagacaatgcattgacgtcaaagagtgcaaatggtgaatgtgaaccctgggttgttgcttctaggttacgcgatcacctgcttttgccaagagagcggaagaaccctttattatggaaaaagttagaagaattggttcaagaagattctcgaatagatcgctatccaaagttggtgaagggtgaatcaaaagtggtatgggaatggcaagtagaaggttctctgagcgcctcaaagatgaagaaaagaagagatgcaagcaaaacgatggtcaatgaaagcacggacctgaatcatcaacagcaccctgcaatgaaaacagagcctacggtaccacttttttgatctggagactcctcccaacagtgactactttcccttgtaaattgtgatggcctaaacttcagcagagggcaatatgtgcggcattggttgtgagtgtgacctgcattttttatgaagcatttttcaccaaaacaagtgtggattcatgggatctgcatgcttattaaggaatgtgcttatgtcttatagagtaataatagcttagggaggaaactcacgtccttgaaaatcctttacacccgcggttctggattgacggctgacaaactagttatgtactagtgctaactaaattagttaagcatttttttctcttgcgaaagaatccaatatttatagcatacaaagaatgttattatatgacattgtagtaaagtcaaggcatatggatgtgactacgaattcggacccattag

SEQ ID NO: 5521 - protein, 244 aa, Glycine max
  misc_feature (1)..(244): Ceres Seq. ID no. 14310569
MKQNDRPRECLSNSNSEGCSLSLMGREPPQNLLPSKHDFPRLVLVIALASLVAWTCNFLFTSLFHPPSKPFCDTNLHSPDYFLDICQPCPSNGECNDGKLECHQGYQRHGNLCAEDGDINESARKLLERVEHHLCEKYAQFLCTGTGIIWVHEDDLWNYFEPVGNVKVDNALYNYTKQRAVETMGKLLETRLNSSHGMKEFKCPDQLAEHYKPYTCCIRQWISQHILVVLPICAMLCAGMYDRS

SEQ ID NO: 5522 - protein, 221 aa, Glycine max
  misc_feature (1)..(221): Ceres Seq. ID no. 14310570
MGREPPQNLLPSKHDFPRLVLVIALASLVAWTCNFLFTSLFHPPSKPFCDTNLHSPDYFLDICQPCPSNGECNDGKLECHQGYQRHGNLCAEDGDINESARKLLERVEHHLCEKYAQFLCTGTGIIWVHEDDLWNYFEPVGNVKVDNALYNYTKQRAVETMGKLLETRLNSSHGMKEFKCPDQLAEHYKPYTCCIRQWISQHILVVLPICAMLCAGMYDRS

SEQ ID NO: 5523 - protein, 130 aa, Glycine max
  misc_feature (1)..(130): Ceres Seq. ID no. 14310571
MSRRVEELYDKVCEILEDNALTSKSANGECEPWVVASRLRDHLLLPRERKNPLLWKKLEELVQEDSRIDRYPKLVKGESKVVWEWQVEGSLSASKMKKRRDASKTMVNESTDLNHQQHPAMKTEPTVPLF

SEQ ID NO: 5524 - DNA, 1104 bp, Glycine max
  misc_feature (1)..(1104): Ceres Seq. ID no. 14310572
aaaaacgtgggagccctgaatcgtgcgtgttttgcgattctgacttgtttttcatttttactttttgggcctttgaaagcttaaaaacctaaacgcccaagactcaaaacaaggcagaaccgctcaactgcgccgtgaaactcttcttctcattcacattcagttgcgcgaagcaccatcaggctctgcaaatgccaatggtggatttggagggcacagaaggttacataccttccacagagtatgtggaagacagcaacgaaacactcattaacttgactgactcaactgagcttttgtttcttaagttgccttcttccaatgattttttatctgacatacatgggcagaaattgtttctcactcttcataatgatggtaaactagccagcttcgaggattcatcaggtaaagtatatgattttgtaagctattctgctcaggagccagacgaaacagtttttgttccctctacagaaccaaaaataggaaagatttcgatgcgagtttccactgtccattaccctggtcctaaagaacttgaaaagctcaattcaactaacgcaaaacatgcacatggaaattcttctggagtcactgggacaacttcatctcgatattttcctatgcaaagtggtggagcagcttcatcaaaaggtagcagacagagaagctctctaactgaagctagtgagccatcaagtatttcaaaaagaagacacgcgtctaaatctaaatccaacttgtccgagacttcacatgagcacagcactggcatttcgtccatgtccccaaatcattctcatgaaggaaaggcaaagagaagaaaacataaggaatagtgtttcctatactcgccattggcctatttaatagtgtaatatttagaggttacattctcccaggcctttaaatatgtccggaaagactagtgctaaacttttatgttgcaaaatgataaatttaaatgtttgcattctcttttttgtcttttttttttgcaaatgttcatttgcttcagttggacaatgttcactgatgtaaggagtaagaccctttcgtgctcctatgtatacttaagggcgatgttaattttgttgtgtt

SEQ ID NO: 5525 - protein, 216 aa, Glycine max
  misc_feature (1)..(216): Ceres Seq. ID no. 14310573
MPMVDLEGTEGYIPSTEYVEDSNETLINLTDSTELLFLKLPSSNDFLSDIHGQKLFLTLHNDGKLASFEDSSGKVYDFVSYSAQEPDETVFVPSTEPKIGKISMRVSTVHYPGPKELEKLNSTNAKHAHGNSSGVTGTTSSRYFPMQSGGAASSKGSRQRSSLTEASEPSSISKRRHASKSKSNLSETSHEHSTGISSMSPNHSHEGKAKRRKHKE

SEQ ID NO: 5526 - protein, 214 aa, Glycine max
  misc_feature (1)..(214): Ceres Seq. ID no. 14310574
MVDLEGTEGYIPSTEYVEDSNETLINLTDSTELLFLKLPSSNDFLSDIHGQKLFLTLHNDGKLASFEDSSGKVYDFVSYSAQEPDETVFVPSTEPKIGKISMRVSTVHYPGPKELEKLNSTNAKHAHGNSSGVTGTTSSRYFPMQSGGAASSKGSRQRSSLTEASEPSSISKRRHASKSKSNLSETSHEHSTGISSMSPNHSHEGKAKRRKHKE

SEQ ID NO: 5527 - protein, 113 aa, Glycine max
  misc_feature (1)..(113): Ceres Seq. ID no. 14310575
MRVSTVHYPGPKELEKLNSTNAKHAHGNSSGVTGTTSSRYFPMQSGGAASSKGSRQRSSLTEASEPSSISKRRHASKSKSNLSETSHEHSTGISSMSPNHSHEGKAKRRKHKE

SEQ ID NO: 5528 - DNA, 1987 bp, Glycine max
  misc_feature (1)..(1987): Ceres Seq. ID no. 14310584
accttgactccctgccacggctgagaaaatagcgacgcggatacacactcgtcttcacgatccagcgattctactctccgatgagtctttgcagggtgaagaatcgcgagtccagccgccggtgaagaatcacgcgattcgtctggaaatcgcgattcatccctgatacagagattcaagcacgattcaggaacaaaaacgagacaacctccgattcgtatcggtagcagctggaatcgtatcgaatcctgtgatacgtatcgtgaattgtacaatactaactatcatgatttaggctagtgctggagcttatttgactaggttatataatgttgttaaatagctgccaagtgctactgcattgccgaatttcttgaattcgcaatcaccacttcgtcaactattgcggtcgctatgggtgtcgtgggtacagaaagcgtcctgcatcctcttctcatctttgtgtaggtatccttcttctcatgagcagtgatgctgccaagacatgttcaaactattggtagtctccttgagagagttatgcaagttcatgttgtgcagctcggaggtataaatacacatgtcgacttgtaatgagctgccaagaaagctcaacaagtctgagaggaaaccacctgtgacaagttttaatgatcttaagcgtcaagctagactgaagaaaaaggagaggcaaaagctactgctgttcgaggcatgaaagcctgggaaaaaatgcgtggaggagcttcaaaacttatggggaagtatgctgtccaaacttgtggatattatccagaggtgcaagtgggacccaaaggtcatagagtacgaaattgtcaagctttcaaacaccagataagggatgggcaacgtgcatggtagggggcaacaattgatgatttggcacctccagtatatgtctatcacatccgagatgatcaacataggaagcctttggtaaatgagttgaaaaggtactatggtatgctgcctgcagtggttgagctatttgcccaggctggggcaccagttgataagaattatgcttctatgatgagggaagatgtcgtaatccctgaaatggatgaggaaaagttggttgtttaaagcaatggtttgattgacttcatatgcatggaagaggcatttgggcaatggaagagtctaaatatgaaaaatttaaggtttaatttctttcaaattataacaggttgtatttgtatatatgctaagatagaggacctgtctaatgttggtaattagacatataataggatgaaacaagagcattgggccactaaactatctcatgttctattggcaatataaggttgcagtattgattatatggaacaaatttacttttggcactcactgcatcatcacctaatttagttatagatgaaaaaagacttggatttcttgctgggattcctttgagaacaactcttcatccctctaccgatctcattcatcacctaatttagttatagtctgatctgcttttatgcaatattttgtattggtagtataatttcctgttactaaaaccaaagaaaactttagcccacaaggttaatttagtatcttctggaatacaagatgcagagggatggtcgacaatgcactagataaggtggaaaaagtgttttacttgccaagcatattaggaagaggaagaaagtgtaaaaggaacttcaaaaattggcaacagtaaagtagttcctgtgctcgagctctatcagattttcagaacaggttgtggctgggttcttcagtgttccacttccaaatccttgttcagctggtgcatcagaatattcttcgagacttcatagaacagttgggagttgggtgccttgaacgatagattgttgttgcttaattaaaacaaattgtatcatctacatatatcctacagtcttgtaatatatattatcatctcgaccttaacactttgttaataattataaccatgtgtgtttgg

SEQ ID NO: 5529 - protein, 55 aa, Glycine max
  misc_feature (1)..(55): Ceres Seq. ID no. 14310585
MKAWEKMRGGASKLMGKYAVQTCGYYPEVQVGPKGHRVRNCQAFKHQIRDGQRAW

SEQ ID NO: 5530 - protein, 49 aa, Glycine max
  misc_feature (1)..(49): Ceres Seq. ID no. 14310586
MRGGASKLMGKYAVQTCGYYPEVQVGPKGHRVRNCQAFKHQIRDGQRAW

SEQ ID NO: 5531 - protein, 45 aa, Glycine max
  misc_feature (1)..(45): Ceres Seq. ID no. 14310587
MSTCNELPRKLNKSERKPPVTSFNDLKRQARLKKKERQKLLLFEA

SEQ ID NO: 5532 - DNA, 1160 bp, Glycine max
  misc_feature (1)..(1160): Ceres Seq. ID no. 14310592
aaacgtgtttcatgaaatatctaacttttaaagagctcaatgtgtacaaactcattgtgagcggatgcaacgttaaataagagcatgaatagactcatgtctacacatctaactagagtagaagccaagacgcactgttctacaaattaaagaaaagactcctttatggataatatttatatcaaacaagcgttggtattgaaggaagttaagcatgtattccaaaagcttattggcgaggatcccatggagagtatgtatatggttgacactatccaaaggcttggcattgaacaccacttcgaagaggaaattgaagctgctcttcagaagcaacatttgatatttagcagtcatctcagtgattttgcgaataaccataaactttgtgaagttgcacttccattccgtttacttagacaaagaggccattatgttcttgcagatgtatttgacaacctgaagagtaacaaaaaagagtttagagaaaaacacggtgaagatgtgaagggtcttatttctctgtatgaggcaacccagctaggtattgaaggagaagacagtcttgatgatgcaggttacctctgccaccaacttcttcatgcatggctgacaagacatgaagagcataatgaagctatgtatgttgctaagactcttcagcatccgcttcattatgacttatcaagattcagggacgacacaagtatacttctaaatgatttcaagaccaagagagaatgggaatgcttagaggaacttgctgaaatcaattccagcatagttaggttcgtgaaccagaatgaaataactcaagtttacaaatggtggaaagaccttgggctgaacaatgaggtgaagttcgctagatatcaacctcttaaatggtacatgtggccaatggcatgcttcacagatccacgcttctcagagcaaaggattgagctcaccaaacctatctctctggtctacattattgatgacattttcgatgtttatgggacattagaccagcttactttatttacagatgctattaaaaggtattcaaatatatatatttctagtgtgtgcggcagacaatcaatagaattagcgatgccaacctagttagaatctttactcctattgtgatgcttaatcatgcaccttttacttac

SEQ ID NO: 5533 - protein, 314 aa, Glycine max
  misc_feature (1)..(314): Ceres Seq. ID no. 14310593
MDNIYIKQALVLKEVKHVFQKLIGEDPMESMYMVDTIQRLGIEHHFEEEIEAALQKQHLIFSSHLSDFANNHKLCEVALPFRLLRQRGHYVLADVFDNLKSNKKEFREKHGEDVKGLISLYEATQLGIEGEDSLDDAGYLCHQLLHAWLTRHEEHNEAMYVAKTLQHPLHYDLSRFRDDTSILLNDFKTKREWECLEELAEINSSIVRFVNQNEITQVYKWWKDLGLNNEVKFARYQPLKWYMWPMACFTDPRFSEQRIELTKPISLVYIIDDIFDVYGTLDQLTLFTDAIKRYSNIYISSVCGRQSIELAMPT

SEQ ID NO: 5534 - protein, 287 aa, Glycine max
  misc_feature (1)..(287): Ceres Seq. ID no. 14310594
MESMYMVDTIQRLGIEHHFEEEIEAALQKQHLIFSSHLSDFANNHKLCEVALPFRLLRQRGHYVLADVFDNLKSNKKEFREKHGEDVKGLISLYEATQLGIEGEDSLDDAGYLCHQLLHAWLTRHEEHNEAMYVAKTLQHPLHYDLSRFRDDTSILLNDFKTKREWECLEELAEINSSIVRFVNQNEITQVYKWWKDLGLNNEVKFARYQPLKWYMWPMACFTDPRFSEQRIELTKPISLVYIIDDIFDVYGTLDQLTLFTDAIKRYSNIYISSVCGRQSIELAMPT

SEQ ID NO: 5535 - protein, 284 aa, Glycine max
  misc_feature (1)..(284): Ceres Seq. ID no. 14310595
MYMVDTIQRLGIEHHFEEEIEAALQKQHLIFSSHLSDFANNHKLCEVALPFRLLRQRGHYVLADVFDNLKSNKKEFREKHGEDVKGLISLYEATQLGIEGEDSLDDAGYLCHQLLHAWLTRHEEHNEAMYVAKTLQHPLHYDLSRFRDDTSILLNDFKTKREWECLEELAEINSSIVRFVNQNEITQVYKWWKDLGLNNEVKFARYQPLKWYMWPMACFTDPRFSEQRIELTKPISLVYIIDDIFDVYGTLDQLTLFTDAIKRYSNIYISSVCGRQSIELAMPT

SEQ ID NO: 5536 - DNA, 1278 bp, Glycine max
  misc_feature (1)..(1278): Ceres Seq. ID no. 14310616
attcccaacgaaccaacacagcctcacaagtaacaaacttataacacacactctctctctctctctctgcaatggctggaatggttcccctttgcattgcatcattggtcactctttttgttgcaacaagtgctagaattcctggggttttcaatggtggtgcatggcagggtgcccacgccactttctacggtggaaatgatgcctctggaacaatgggtggggcatgtgggtacgggaacctatacagccaagggtatggcgtgaacaccgcggccttgagcacggcgctgttcaacaacgggttgagctgcggcgcgtgcttcgagataaagtgcgaccaagatccgaggtggtgcaacccgggaagcccttccatcgtcatcaccgccacgaatttttgccctcccaactttgcccttcccagcgacaacggcggctggtgcaaccctcctcggccccacttcgacctcgccatgcccatgttcctcaagatcgctcagtataaagccggcatcgtgcccgtcagttaccgccgggttccatgcagaaaggtcggtggaatcagatttacgatcaacggttttcgttacttcaacttggttctaatcaccaacgtggcgggtgcaggggatatcgcgcgcgtgagcgttaaaggttccaaaaccgggtggaacagcatgagcagaaactgggggcaaaattggcaatcaaacgcgaatttagtgggccaggccctttccttcagagtcacgggcagtgacagacgcacctcaacctcttggaacgtggcaccttctcattggaagttcggccagaccttcacgggcaagaatttccgcgtctgaaaaaaataacaaaatttaaacatggatgtttgtttttgtagttgcgttttggttttttagttttcccgcgttcaactttccctctattttcccgggaaagtttgaagccgtgttttggtttaagtgtgtagtaggggacagaaagtaagagaagggtagataaggtaaaatgaaagtgactttactataaatgctagtagtgggtgtgagtagatgtttctaccaccttttgttattggagggtgaatttgtgtgatattaattattactaaagtgtattgggtgttgctggcaatatttattacccagcaatgctttttgttgacttggtgggggctgaggaggctgcaaggttcatgtagcccgcatctcctttattatgaactagaaacattatattatgtaatatctttcagttataatgcatgcc

SEQ ID NO: 5537 - protein, 258 aa, Glycine max
  misc_feature (1)..(258): Ceres Seq. ID no. 14310617
MAGMVPLCIASLVTLFVATSARIPGVFNGGAWQGAHATFYGGNDASGTMGGACGYGNLYSQGYGVNTAALSTALFNNGLSCGACFEIKCDQDPRWCNPGSPSIVITATNFCPPNFALPSDNGGWCNPPRPHFDLAMPMFLKIAQYKAGIVPVSYRRVPCRKVGGIRFTINGFRYFNLVLITNVAGAGDIARVSVKGSKTGWNSMSRNWGQNWQSNANLVGQALSFRVTGSDRRTSTSWNVAPSHWKFGQTFTGKNFRV

SEQ ID NO: 5538 - protein, 255 aa, Glycine max
  misc_feature (1)..(255): Ceres Seq. ID no. 14310618
MVPLCIASLVTLFVATSARIPGVFNGGAWQGAHATFYGGNDASGTMGGACGYGNLYSQGYGVNTAALSTALFNNGLSCGACFEIKCDQDPRWCNPGSPSIVITATNFCPPNFALPSDNGGWCNPPRPHFDLAMPMFLKIAQYKAGIVPVSYRRVPCRKVGGIRFTINGFRYFNLVLITNVAGAGDIARVSVKGSKTGWNSMSRNWGQNWQSNANLVGQALSFRVTGSDRRTSTSWNVAPSHWKFGQTFTGKNFRV

SEQ ID NO: 5539 - protein, 210 aa, Glycine max
  misc_feature (1)..(210): Ceres Seq. ID no. 14310619
MGGACGYGNLYSQGYGVNTAALSTALFNNGLSCGACFEIKCDQDPRWCNPGSPSIVITATNFCPPNFALPSDNGGWCNPPRPHFDLAMPMFLKIAQYKAGIVPVSYRRVPCRKVGGIRFTINGFRYFNLVLITNVAGAGDIARVSVKGSKTGWNSMSRNWGQNWQSNANLVGQALSFRVTGSDRRTSTSWNVAPSHWKFGQTFTGKNFRV

SEQ ID NO: 5540 - DNA, 1352 bp, Glycine max
  misc_feature (1)..(1352): Ceres Seq. ID no. 14310624
ttgaaattttatcgaggaagtggcatttgctttggactggagcattaataacagtgtcacctccacaaatgctgccattgcaagggataagatcaagaagcaattcagcagtcatttatcacaaaatcaaagtaaaacagatgttgaagataaacagtcttctcgcttgccctcatttgcatatcctgacgaacagtgtgaactcttcaacacacagaatgatcagtgtgatctccttgaagagattagaaaactaaaatatgatttgaggagcacaaaaactgcgaagaaagacttggaagaaaagctgctgtcagtaactgatgagagtcagaacttagcaaaacaatgtcaagaagcacaaaataacatcaaaggtttagaatcagaaatcgaggcactgaaagaatccaaagcaacactagaagatcagattgagaaacagaagattataaatgaagatcttgatacacaacttacaatagctcagaccaaattaaatgacatctttcaaaagttttcgtccttagaagttgaattagaggataaaaagaactcctgtgaggatttagaggcaacatgtctagaacttcaactccagctggaaagcattgcaaagaaggaatctccaacatatggcaaatacgaagtagaaaagatatatcaaactggctgggagatcacaacagcttcatcaaagttggcagagtgccaagaaaccatcctaaaccttaggaaacaactcaaggcacttgcttcatctaatgaagtagcaatttttgacaaggttgtctccacaactaatactatggccaatccaactcagaagaagaacttgatcaaacgatcctctctacgcaatcaaatgcaagcagaggatgaagctaaaggagggatgcataagtctgtccaaactgaagaaactaaaagcgataaagatgtgcagaggccaccccttcttcaatctgaaaccgaaaaatctctgccaagtcccaaaagtctcacttcggagcaacatgatagaagcaaaaccacaggctctttggcaattgtgccaggtaagaagcaaataggctttggttttctgaggaagctgctgtcgagacgaaagaaaggaaggggtaagggaactaagttgttagccaaagcatgaataagaatgatcttggagagaatgcgaagacatgcttctggtgtaacatgcttttgtcttttattagattagattctggtggaacttgtttttatcttgtattggagatgattgaggttggagttgagacacagagtgaaagagaggtttggtgctgtaaatatagctggtgtaaataagttcattggcatttgagatt

SEQ ID NO: 5541 - protein, 114 aa, Glycine max
  misc_feature (1)..(114): Ceres Seq. ID no. 14310625
MANPTQKKNLIKRSSLRNQMQAEDEAKGGMHKSVQTEETKSDKDVQRPPLLQSETEKSLPSPKSLTSEQHDRSKTTGSLAIVPGKKQIGFGFLRKLLSRRKKGRGKGTKLLAKA

SEQ ID NO: 5542 - protein, 95 aa, Glycine max
  misc_feature (1)..(95): Ceres Seq. ID no. 14310626
MQAEDEAKGGMHKSVQTEETKSDKDVQRPPLLQSETEKSLPSPKSLTSEQHDRSKTTGSLAIVPGKKQIGFGFLRKLLSRRKKGRGKGTKLLAKA

SEQ ID NO: 5543 - protein, 85 aa, Glycine max
  misc_feature (1)..(85): Ceres Seq. ID no. 14310627
MHKSVQTEETKSDKDVQRPPLLQSETEKSLPSPKSLTSEQHDRSKTTGSLAIVPGKKQIGFGFLRKLLSRRKKGRGKGTKLLAKA

SEQ ID NO: 5544 - DNA, 1359 bp, Glycine max
  misc_feature (1)..(1359): Ceres Seq. ID no. 14310635
aacacagaagcaaaccgaacggtttcacatcagacgcagcagcaaaaagtttcaaatttggtactttggcaccctccacgtagtagttctcaccatgtccgacactggaagaagtgccaacaacaatggttccaagcggagcctgccatcatgcacgagtgcaagggaaaatgagagcgaaaacagtgcaaagaaaccaaatttggatggcaaaggtgagaaattcggtgaagccgagacacccaacaagagcaaagtccaaaatcaaaatggtggaaaatcttccgcctcatgtttggaatctaaaagcttcaacaagcttctggaaggggtggtttttgtgctttcagggtttgtgaatccggagaggggcatgttgaggtcacgagcgatggaaatgggagcagaatataagcctgattggaactctgattgcactctcttggtttgtgcttttccaaatacccctaagtttagacaagttgaagctgattgtggaaccattgtgtcaaaggtttggataatagagtgttacacccaaaggaagctgattgaaattgacagttaccttttgcatgctgggaaaccatggtgcaaaggaaatggatcaattgaagtaaatgaagataagaaaccatctgtacccaaaaaatcaccgaagcacattgaaagagaacagctttcaacatcaactgcctccctaaaatcaaagggaaaagaccctgatgttgctaggaaatgctttgagcctttggaagtgaaaaagtgggtcattgatgatttgaataaaacaattcagtggctggaaaatcaagaagaaaagccagaccctagtgagttgacaaaaatagctgcagaggggattctaacttgtttgcaagatgcaatatgttctctagaggaaaaacaggacatccggaaaggaactgaggactggatgttcttacctcgggttgttgaggagcttgcaaagtttgatgtagaaggcaacaagggctcattgttaaaggaagaacttcaaagacgggctttggattgtaagcgtatttatgaggaggaactaaatggtttagatcatgaaaggaaaacgaatacaaaggtaaataaagaacagacgagcaaaactagaagaacaaatgccatgtcttctggtgcagttgagtatgatagtgatgagacaattgagatgactgaacaagaaatagaccttgcatataagactttgtcctctaacatttgccacttgtgagtgatgattgaactttgtttctttaaggggttttggttcacctatatttttctttggatattctacggtgtatattacaaaaaaagaaaaggcccaagtgtgttagactg

SEQ ID NO: 5545 - protein, 415 aa, Glycine max
  misc_feature (1)..(415): Ceres Seq. ID no. 14310636
TQKQTERFHIRRSSKKFQIWYFGTLHVVVLTMSDTGRSANNNGSKRSLPSCTSARENESENSAKKPNLDGKGEKFGEAETPNKSKVQNQNGGKSSASCLESKSFNKLLEGVVFVLSGFVNPERGMLRSRAMEMGAEYKPDWNSDCTLLVCAFPNTPKFRQVEADCGTIVSKVWIIECYTQRKLIEIDSYLLHAGKPWCKGNGSIEVNEDKKPSVPKKSPKHIEREQLSTSTASLKSKGKDPDVARKCFEPLEVKKWVIDDLNKTIQWLENQEEKPDPSELTKIAAEGILTCLQDAICSLEEKQDIRKGTEDWMFLPRVVEELAKFDVEGNKGSLLKEELQRRALDCKRIYEEELNGLDHERKTNTKVNKEQTSKTRRTNAMSSGAVEYDSDETIEMTEQEIDLAYKTLSSNICHL

SEQ ID NO: 5546 - protein, 384 aa, Glycine max
  misc_feature (1)..(384): Ceres Seq. ID no. 14310637
MSDTGRSANNNGSKRSLPSCTSARENESENSAKKPNLDGKGEKFGEAETPNKSKVQNQNGGKSSASCLESKSFNKLLEGVVFVLSGFVNPERGMLRSRAMEMGAEYKPDWNSDCTLLVCAFPNTPKFRQVEADCGTIVSKVWIIECYTQRKLIEIDSYLLHAGKPWCKGNGSIEVNEDKKPSVPKKSPKHIEREQLSTSTASLKSKGKDPDVARKCFEPLEVKKWVIDDLNKTIQWLENQEEKPDPSELTKIAAEGILTCLQDAICSLEEKQDIRKGTEDWMFLPRVVEELAKFDVEGNKGSLLKEELQRRALDCKRIYEEELNGLDHERKTNTKVNKEQTSKTRRTNAMSSGAVEYDSDETIEMTEQEIDLAYKTLSSNICHL

SEQ ID NO: 5547 - protein, 291 aa, Glycine max
  misc_feature (1)..(291): Ceres Seq. ID no. 14310638
MLRSRAMEMGAEYKPDWNSDCTLLVCAFPNTPKFRQVEADCGTIVSKVWIIECYTQRKLIEIDSYLLHAGKPWCKGNGSIEVNEDKKPSVPKKSPKHIEREQLSTSTASLKSKGKDPDVARKCFEPLEVKKWVIDDLNKTIQWLENQEEKPDPSELTKIAAEGILTCLQDAICSLEEKQDIRKGTEDWMFLPRVVEELAKFDVEGNKGSLLKEELQRRALDCKRIYEEELNGLDHERKTNTKVNKEQTSKTRRTNAMSSGAVEYDSDETIEMTEQEIDLAYKTLSSNICHL

SEQ ID NO: 5548 - DNA, 1853 bp, Glycine max
  misc_feature (1)..(1853): Ceres Seq. ID no. 14310651
aataatagctcttgttcctcttttccatcaactgaaccatttaggtgccgtgatgcatttccgggtaagaactcatcacccaccctcttccgattctcgcgtcatgaatcaaccaaagctgaggcacaattggaattggagcaagatgttgccaccgaggatgagcctaatcaggtcattgattttcctggagggaaagtgggatttacttctgaaatgagattcatttctgagtctcctgagaaaagggtgccctgttatcgtgttcttgatgacaatggtgagatcgttaaatacagcaactatgtacaggtatctcactacagcactgttagtaaccaaaacttgattttagcgctgaagtaagtaatgtattaatgttatatttttctaaagaaggtattagataaaaaaaaaaaaaaagaaaaaaagaagtaaatgtgcataatattctaaaagagaaaaaaggaaaaccgataatttgttattagattatagtgtaaagttatttaacatatattggcggtgtataactattaaactcatttttaaaatgataacataaaattgttcgaacaatttttattttacaagtaaaaaattagtagaaagattttatgtaaggatgtagaattaatttttgtgatataatgcacgaaacacatcacatgggaactttattagttaactacctatggagaataattgaacaggttagcaaggaaatgggtgtgaagatgtattctgacatggtcactcttcaaactatggacaacatattctatgaagtgcagaggcaaggtagaatttccttctacctcacccaaatgggggaagaagcagttaacattgcatctgctgctgcacttgctcctgatgatataatattgcctcagtaccgggagcctggagttctattgtggcgtggttttacactgcaacaatttgttcatcaatgctttggaaacacacatgattttggaaaaggcaggcagatgccaatacattatgggtctaaccagcacaattacttcacagtgtcatcccccattgcaacacaacttcctcaagctgttggagctgcttattcccttaaaatggatgggaaaagtgcatgtgcagtcactttttgtggggatggtgccaccagtgagggagattttcatgctgctatgaattttgcagcagtaatggaggcccctgttgtttttatctgtcgtaataatggatgggcaatcagtacacctgtggaagaccaatttcgaagtgatggtattgtagttaagggtaaagcttatggcatctggagcatcagagtagatggaaatgatgctcttgctgtttatagtgcagttcacactgctagagaaatcgctataaaagaaaaaaggccagttttaattgaggctctcacttatagagttggacatcactctacatctgatgattcaactaagtaccggggaactgatgagattgaatattggaagatggcaaggaatccagtgaataggttcaaaagatgggtagaaaggaatggttggtggagtgacaaggatgaattggagcttagaagcagtgtcaggaagcagttaatgcatgcgattcaggtggcagagaaagcacaaaaacctccacttcaggacttatttaatgatgtctatgaccaaataccatcaaaccttcaggagcaagagagactaattagaaaaaccatcgagaagcatcccaaagactacccttctgatgttcctttgtagatattgccaattcaaacaagaaattgtactaaatcttacaatcaaaatataaaataaagggattggatgccctgttcttatcttttaaaaaag

SEQ ID NO: 5549 - protein, 369 aa, Glycine max
  misc_feature (1)..(369): Ceres Seq. ID no. 14310652
MHETHHMGTLLVNYLWRIIEQVSKEMGVKMYSDMVTLQTMDNIFYEVQRQGRISFYLTQMGEEAVNIASAAALAPDDIILPQYREPGVLLWRGFTLQQFVHQCFGNTHDFGKGRQMPIHYGSNQHNYFTVSSPIATQLPQAVGAAYSLKMDGKSACAVTFCGDGATSEGDFHAAMNFAAVMEAPVVFICRNNGWAISTPVEDQFRSDGIVVKGKAYGIWSIRVDGNDALAVYSAVHTAREIAIKEKRPVLIEALTYRVGHHSTSDDSTKYRGTDEIEYWKMARNPVNRFKRWVERNGWWSDKDELELRSSVRKQLMHAIQVAEKAQKPPLQDLFNDVYDQIPSNLQEQERLIRKTIEKHPKDYPSDVPL

SEQ ID NO: 5550 - protein, 363 aa, Glycine max
  misc_feature (1)..(363): Ceres Seq. ID no. 14310653
MGTLLVNYLWRIIEQVSKEMGVKMYSDMVTLQTMDNIFYEVQRQGRISFYLTQMGEEAVNIASAAALAPDDIILPQYREPGVLLWRGFTLQQFVHQCFGNTHDFGKGRQMPIHYGSNQHNYFTVSSPIATQLPQAVGAAYSLKMDGKSACAVTFCGDGATSEGDFHAAMNFAAVMEAPVVFICRNNGWAISTPVEDQFRSDGIVVKGKAYGIWSIRVDGNDALAVYSAVHTAREIAIKEKRPVLIEALTYRVGHHSTSDDSTKYRGTDEIEYWKMARNPVNRFKRWVERNGWWSDKDELELRSSVRKQLMHAIQVAEKAQKPPLQDLFNDVYDQIPSNLQEQERLIRKTIEKHPKDYPSDVPL

SEQ ID NO: 5551 - protein, 344 aa, Glycine max
  misc_feature (1)..(344): Ceres Seq. ID no. 14310654
MGVKMYSDMVTLQTMDNIFYEVQRQGRISFYLTQMGEEAVNIASAAALAPDDIILPQYREPGVLLWRGFTLQQFVHQCFGNTHDFGKGRQMPIHYGSNQHNYFTVSSPIATQLPQAVGAAYSLKMDGKSACAVTFCGDGATSEGDFHAAMNFAAVMEAPVVFICRNNGWAISTPVEDQFRSDGIVVKGKAYGIWSIRVDGNDALAVYSAVHTAREIAIKEKRPVLIEALTYRVGHHSTSDDSTKYRGTDEIEYWKMARNPVNRFKRWVERNGWWSDKDELELRSSVRKQLMHAIQVAEKAQKPPLQDLFNDVYDQIPSNLQEQERLIRKTIEKHPKDYPSDVPL

SEQ ID NO: 5552 - DNA, 1288 bp, Glycine max
  misc_feature (1)..(1288): Ceres Seq. ID no. 14310687
gatgctacaggtggaatcactggtttcagcgtgcgccggcggatccagcgatcggaaaatcgcctgcgagaccctggccgacgacgtccaccccacggatccgccggagtcccacccggattctccgccggagtccttctggctctcgagggacgaggaatacgactggtgggaccgcaacgccgtttacgagcgcaaagaatccaccaaggcaagtaataataattcaacaaacctaaaccctggcatcaactccagcaacaactcccagcgtttctctctcaatttcaagtccaaggcttccaccatcattggcttacctaagccgcagaaaacctccttcgtcgacgtcaagaaccgccgcaaccacaacaagcccagtaacatcaggctgttcccgaaacgcagcgtttcggtcggaaaatctgagtcaggactcgtcgaaccgtcttcgcccaaagtctcttgcatgggaagagtcagatccaagcgcgatcgaaatcgcaagttgagaagttcacgaaagtcttcccctgacacagacgccaaagaaaaacacagcagaagcggaaagaaacccggttttttcgagagttttcgctctattttccggtccggccgaaaagggaaaccggaccggaagaaaagcgatcccctggccgcggactcaactcatgagacgaagagcggtgccgttaactactctagagcgcggcacagcacgtcgagcttgaacgacgtgtcgttcgaggagtcagtctcgcgaaacagcgtgtcggagagcgaaccgcccggtttgggtggcatgatgcggttcgcgtctgggagaaggtctgagtcgtggggagtaggtgattccgaaggacacgtggcacagtagtattggatgaagataaccgttcggcgagggcaaacacgaagtggggccctttgcccttggatgtaagcaattgagataaaaaggcgagtcttttggcgtgggaccaaggcgttggaagagggagtgacgtggcgcgttgaacaaattttacttgttactgtttggaaagtaaaatctttttccttttgtgctgtgcttgattgaatctggtgtattttgtagccacaaagttttgtcttgtaaatatacacgagtcatgagtggtttttgtttctttgaattgagcagatgtatgtatattttgattttctctcttgggtttcaataattgtatgaattgtccaacggtgcatgcgttgccggttccctctccttttcaattaagcaaaattattaagcatgggtgtt

SEQ ID NO: 5553 - protein, 292 aa, Glycine max
  misc_feature (1)..(292): Ceres Seq. ID no. 14310688
MLQVESLVSACAGGSSDRKIACETLADDVHPTDPPESHPDSPPESFWLSRDEEYDWWDRNAVYERKESTKASNNNSTNLNPGINSSNNSQRFSLNFKSKASTIIGLPKPQKTSFVDVKNRRNHNKPSNIRLFPKRSVSVGKSESGLVEPSSPKVSCMGRVRSKRDRNRKLRSSRKSSPDTDAKEKHSRSGKKPGFFESFRSIFRSGRKGKPDRKKSDPLAADSTHETKSGAVNYSRARHSTSSLNDVSFEESVSRNSVSESEPPGLGGMMRFASGRRSESWGVGDSEGHVAQ

SEQ ID NO: 5554 - DNA, 1245 bp, Glycine max
  misc_feature (1)..(1245): Ceres Seq. ID no. 14310701
gaacaacaccaaaaaaaatggcacttgtgagccacgtttgtgtgagatgtgtagccacacccacttccccagagtccccaaattcggcacccttgccagacccaaggcaaaccaaggttctccttccgaagaagaagcctcagaaatggtccaccggggtggctcccggggagtacggtggccctcccaccaccaccaaactccgcaaatactggggcggcgatgacgaagaccctttggcctctgatgactatatgtggaacaaggagtttatgggtcgcttccaaaagttgattgaggaacccaatgctcaaccccctcctgcaaaggaagagccttcagggtttctaagcttaaatagagtcatgagcctggacagtttggaagttgatttgagcaaagaactcgcagctcctgtaaatcataatgcacacctgcaaattgatgcagaaactaatgtgacaggaagcaatagggtaagatataaatcagcaccaacacgtcgtgagcaagaaaaatgggatagagctaccaaggccgcaactggaggcagtgatgtgatgttccgggaaataaggcagtctcgtgaagatccaaaagttttggctgctcaagctgaggagcagtataataagttaaagaggaagttgcaaatctttaccttgggtataggtggtgttggtctggtttcagcttatgtttcttattcccctgagattgcagctagctttggtgctggctttcttggttctttggcgtatattcgtatgctgggaagtagcgtggactcgctaaggactgatggtgcaaagggatttgtcaagggagcaattgggcagccaagattactggttcctgttgttttggtcatggtctataaccgctggaatgcgattctggttccagaatttggatctatgcacttagaattgataccaatgctagtaggttttttcacatacaagattgcaacttttgctcaagctatagaggaggcaattactgtagctacaagaaagacctgaagaatattaggggtggagggggaggatgccatgtcattatatttgggtttttctctcccacatattgaacatataattgtatttatgtttttccatatttggattattgattataatatccagatatttggtcttaagtcttctctcccacaataagcacatatcgacttcatttttttcatatttacgatcagtgatatcaagggacacaattaaattc

SEQ ID NO: 5555 - protein, 340 aa, Glycine max
  misc_feature (1)..(340): Ceres Seq. ID no. 14310702
TTPKKMALVSHVCVRCVATPTSPESPNSAPLPDPRQTKVLLPKKKPQKWSTGVAPGEYGGPPTTTKLRKYWGGDDEDPLASDDYMWNKEFMGRFQKLIEEPNAQPPPAKEEPSGFLSLNRVMSLDSLEVDLSKELAAPVNHNAHLQIDAETNVTGSNRVRYKSAPTRREQEKWDRATKAATGGSDVMFREIRQSREDPKVLAAQAEEQYNKLKRKLQIFTLGIGGVGLVSAYVSYSPEIAASFGAGFLGSLAYIRMLGSSVDSLRTDGAKGFVKGAIGQPRLLVPVVLVMVYNRWNAILVPEFGSMHLELIPMLVGFFTYKIATFAQAIEEAITVATRKT

SEQ ID NO: 5556 - protein, 335 aa, Glycine max
  misc_feature (1)..(335): Ceres Seq. ID no. 14310703
MALVSHVCVRCVATPTSPESPNSAPLPDPRQTKVLLPKKKPQKWSTGVAPGEYGGPPTTTKLRKYWGGDDEDPLASDDYMWNKEFMGRFQKLIEEPNAQPPPAKEEPSGFLSLNRVMSLDSLEVDLSKELAAPVNHNAHLQIDAETNVTGSNRVRYKSAPTRREQEKWDRATKAATGGSDVMFREIRQSREDPKVLAAQAEEQYNKLKRKLQIFTLGIGGVGLVSAYVSYSPEIAASFGAGFLGSLAYIRMLGSSVDSLRTDGAKGFVKGAIGQPRLLVPVVLVMVYNRWNAILVPEFGSMHLELIPMLVGFFTYKIATFAQAIEEAITVATRKT

SEQ ID NO: 5557 - protein, 256 aa, Glycine max
  misc_feature (1)..(256): Ceres Seq. ID no. 14310704
MWNKEFMGRFQKLIEEPNAQPPPAKEEPSGFLSLNRVMSLDSLEVDLSKELAAPVNHNAHLQIDAETNVTGSNRVRYKSAPTRREQEKWDRATKAATGGSDVMFREIRQSREDPKVLAAQAEEQYNKLKRKLQIFTLGIGGVGLVSAYVSYSPEIAASFGAGFLGSLAYIRMLGSSVDSLRTDGAKGFVKGAIGQPRLLVPVVLVMVYNRWNAILVPEFGSMHLELIPMLVGFFTYKIATFAQAIEEAITVATRKT

SEQ ID NO: 5558 - DNA, 1560 bp, Glycine max
  misc_feature (1)..(1560): Ceres Seq. ID no. 14310736
atatttcaacctcctcagatttctttcttagcaaaccaattttcaaccacatgggtatccctcactttctcgttataccatatccagttctgggtcatgtgaatccccttatgcaattgtctgaggctctaaccaagcatggctgcaaaatcacatttctgaacacagagttcagccacaaaagagcaaacaacgctggtgctggactagacaaccttaaggaatcaggaatcaagtttgtgacactcccagatggcttggaacctgaagatgatagaagtgaccatgagaaagttattttgtctatccaaagcaacatgccttctttgcttccaaagctcatagaagatatcaatgctttggatgctgagaatagcataacttgcatagttgctactatgaatatgggttgggccttggaaattggacacaaacttggaattgaaggagctcttctttggactgcatctgcaacttccttggctgcatgctattgcattccaaggctgattgatgatggaattatagactcagaaggagtagcaaccaagaaacaagaattccagctttccctaaatatgcctatgatggaccctgcagaccttccatggggtggcctacgtaaggttttcttccctcaaatagttaaagagatgaaaatcttggagttaggagaatggtggctttgcaacaccacttgtgatcttgagcctggagcacttgccatatctccaaggttcctcccaattggcccattgatggaaagtgacaccaacaaaaattcattctgggaagaggacataacttgcctagattggttggatcagcagccacctcaatctgttgtgtatgtttcttttggtagtttagcaatagttgaacctaaccaattcaaagaactagctctaggacttgatctccttaacatgccttttctttgggttgtacgttccgacaataataacaaggtaaatagtgcataccctgatgaattccatggaagtaaaggtaaaattgtcaattgggtgcctcagaggaagatattgaaccaccctgccatagcttgcttcattagtcactgtggttggaattcaactatagaaggtgtatgcagtggcatacctttcttgtgttggccatttttctctgaccaatttgttaataggtcgtatatttgtgacgtgtggaaggttggattgaaattagacaaggatggaaatggattaatactgaagggagagataaggaagaaggtggaccaattgcttgggaatgaagacatcaaagctagatcgttgaaactgaaggaattgactgtgaataactcagttaatggtgatcaatcttcaaagaatctagaaaagtttattaactgggcaaagtagtactacctcctgctatagtttggattggaagttgtctctctttaatttttctcaatttttatgtctgaaattcgtttactatagctaaacagcagattgcatctccctgttgggtccaaagatactcaaaagaatcttttccaatttcaaaagaatagaagttaagtccaatgac

SEQ ID NO: 5559 - protein, 460 aa, Glycine max
  misc_feature (1)..(460): Ceres Seq. ID no. 14310737
ISTSSDFFLSKPIFNHMGIPHFLVIPYPVLGHVNPLMQLSEALTKHGCKITFLNTEFSHKRANNAGAGLDNLKESGIKFVTLPDGLEPEDDRSDHEKVILSIQSNMPSLLPKLIEDINALDAENSITCIVATMNMGWALEIGHKLGIEGALLWTASATSLAACYCIPRLIDDGIIDSEGVATKKQEFQLSLNMPMMDPADLPWGGLRKVFFPQIVKEMKILELGEWWLCNTTCDLEPGALAISPRFLPIGPLMESDTNKNSFWEEDITCLDWLDQQPPQSVVYVSFGSLAIVEPNQFKELALGLDLLNMPFLWVVRSDNNNKVNSAYPDEFHGSKGKIVNWVPQRKILNHPAIACFISHCGWNSTIEGVCSGIPFLCWPFFSDQFVNRSYICDVWKVGLKLDKDGNGLILKGEIRKKVDQLLGNEDIKARSLKLKELTVNNSVNGDQSSKNLEKFINWAK

SEQ ID NO: 5560 - protein, 444 aa, Glycine max
  misc_feature (1)..(444): Ceres Seq. ID no. 14310738
MGIPHFLVIPYPVLGHVNPLMQLSEALTKHGCKITFLNTEFSHKRANNAGAGLDNLKESGIKFVTLPDGLEPEDDRSDHEKVILSIQSNMPSLLPKLIEDINALDAENSITCIVATMNMGWALEIGHKLGIEGALLWTASATSLAACYCIPRLIDDGIIDSEGVATKKQEFQLSLNMPMMDPADLPWGGLRKVFFPQIVKEMKILELGEWWLCNTTCDLEPGALAISPRFLPIGPLMESDTNKNSFWEEDITCLDWLDQQPPQSVVYVSFGSLAIVEPNQFKELALGLDLLNMPFLWVVRSDNNNKVNSAYPDEFHGSKGKIVNWVPQRKILNHPAIACFISHCGWNSTIEGVCSGIPFLCWPFFSDQFVNRSYICDVWKVGLKLDKDGNGLILKGEIRKKVDQLLGNEDIKARSLKLKELTVNNSVNGDQSSKNLEKFINWAK

SEQ ID NO: 5561 - protein, 424 aa, Glycine max
  misc_feature (1)..(424): Ceres Seq. ID no. 14310739
MQLSEALTKHGCKITFLNTEFSHKRANNAGAGLDNLKESGIKFVTLPDGLEPEDDRSDHEKVILSIQSNMPSLLPKLIEDINALDAENSITCIVATMNMGWALEIGHKLGIEGALLWTASATSLAACYCIPRLIDDGIIDSEGVATKKQEFQLSLNMPMMDPADLPWGGLRKVFFPQIVKEMKILELGEWWLCNTTCDLEPGALAISPRFLPIGPLMESDTNKNSFWEEDITCLDWLDQQPPQSVVYVSFGSLAIVEPNQFKELALGLDLLNMPFLWVVRSDNNNKVNSAYPDEFHGSKGKIVNWVPQRKILNHPAIACFISHCGWNSTIEGVCSGIPFLCWPFFSDQFVNRSYICDVWKVGLKLDKDGNGLILKGEIRKKVDQLLGNEDIKARSLKLKELTVNNSVNGDQSSKNLEKFINWAK

SEQ ID NO: 5562 - DNA, 1212 bp, Glycine max
  misc_feature (1)..(1212): Ceres Seq. ID no. 14310756
agttgcattcgttcattcactccctaacatagcaattactaccatttaccaaagtaaacccagagatggagtggtgtgtgtcaatgccaaagattgagctgcatgctcacctcaatggatccatccgagactccacacttcttgaactcactaaggctttgattggaaagggtgtcatgaatttctccgaagtggagcatatcatcctcaaatataaccgttccctaaaagaagttttcaagctgttcgacctaatccacattctcaccactgatcacaacactgttacaagaattaccagagaagttattgaggattttgcatcagagaatgttgtctatctggagttgaggaccactccaaagaaaaatgattctgtgggaatgagcaaacactcttatgttgaagctgtactgaaaggtctaagatcaatcacttcagttgatgtggatttcattccacattgtgaagattcaaagactctttttactcctgcaccggttattaatggacatgtgagaaaaaaaatctttgttaggcttctcttgagcattgacagaagggagacaacagaagctgcaatggaaactgtcaagcttgcattggaaatgaggccttatggggtagttggaattgacctctctggaaatccaagtattggtgattggaccacatatttgccagcattgaaatttgctcgagaacaaggtctttatgtaacacttcattgtggcgagttacctaattcaaaggagataaaaaatatgcttgacttccgtccccaaaggattggacatgcttgtttctttgaggatgaacactggagacagctgaagtcgtcgaacattccggttgaaatttgcttgacatcaaacgttaggacaatgactgttccatctatagatgttcaccactttgctcatttgtacaacgcaaaacatcctttagccctgtgtactgatgactcgggagtcttctctacctgtctctccaaggaatacaaaattgctgctgattcatttgggctgggaaggagggaaatgtttgagctatcaaggaatgctgttgagcatatattcgcagatagcaaagtaaaggaggatttaagaaaaattttcaattcagtggcaaaaaaatatggaagtgtaaccacagtttcatctttagagaatatctgcatttagatataattaatattagagctttgttgac

SEQ ID NO: 5563 - protein, 372 aa, Glycine max
  misc_feature (1)..(372): Ceres Seq. ID no. 14310757
MEWCVSMPKIELHAHLNGSIRDSTLLELTKALIGKGVMNFSEVEHIILKYNRSLKEVFKLFDLIHILTTDHNTVTRITREVIEDFASENVVYLELRTTPKKNDSVGMSKHSYVEAVLKGLRSITSVDVDFIPHCEDSKTLFTPAPVINGHVRKKIFVRLLLSIDRRETTEAAMETVKLALEMRPYGVVGIDLSGNPSIGDWTTYLPALKFAREQGLYVTLHCGELPNSKEIKNMLDFRPQRIGHACFFEDEHWRQLKSSNIPVEICLTSNVRTMTVPSIDVHHFAHLYNAKHPLALCTDDSGVFSTCLSKEYKIAADSFGLGRREMFELSRNAVEHIFADSKVKEDLRKIFNSVAKKYGSVTTVSSLENICI

SEQ ID NO: 5564 - protein, 366 aa, Glycine max
  misc_feature (1)..(366): Ceres Seq. ID no. 14310758
MPKIELHAHLNGSIRDSTLLELTKALIGKGVMNFSEVEHIILKYNRSLKEVFKLFDLIHILTTDHNTVTRITREVIEDFASENVVYLELRTTPKKNDSVGMSKHSYVEAVLKGLRSITSVDVDFIPHCEDSKTLFTPAPVINGHVRKKIFVRLLLSIDRRETTEAAMETVKLALEMRPYGVVGIDLSGNPSIGDWTTYLPALKFAREQGLYVTLHCGELPNSKEIKNMLDFRPQRIGHACFFEDEHWRQLKSSNIPVEICLTSNVRTMTVPSIDVHHFAHLYNAKHPLALCTDDSGVFSTCLSKEYKIAADSFGLGRREMFELSRNAVEHIFADSKVKEDLRKIFNSVAKKYGSVTTVSSLENICI

SEQ ID NO: 5565 - protein, 335 aa, Glycine max
  misc_feature (1)..(335): Ceres Seq. ID no. 14310759
MNFSEVEHIILKYNRSLKEVFKLFDLIHILTTDHNTVTRITREVIEDFASENVVYLELRTTPKKNDSVGMSKHSYVEAVLKGLRSITSVDVDFIPHCEDSKTLFTPAPVINGHVRKKIFVRLLLSIDRRETTEAAMETVKLALEMRPYGVVGIDLSGNPSIGDWTTYLPALKFAREQGLYVTLHCGELPNSKEIKNMLDFRPQRIGHACFFEDEHWRQLKSSNIPVEICLTSNVRTMTVPSIDVHHFAHLYNAKHPLALCTDDSGVFSTCLSKEYKIAADSFGLGRREMFELSRNAVEHIFADSKVKEDLRKIFNSVAKKYGSVTTVSSLENICI

SEQ ID NO: 5566 - DNA, 1504 bp, Glycine max
  misc_feature (1)..(1504): Ceres Seq. ID no. 14310764
gacaccatttcgttcgttctatatgcttcctcttcaacccttcttctttccatcatctcccaccactttcacgctgctctggaatttacaacactaactcacataaaaccaaagttaaatgatgaatttcattgtaaattttcaattgaaatctgttgtggaaatttcctttgttcattgagattttttcgaggtgcagaagatttcccagttttgaagatatatttctcttcagacgggttttgaaactctgaactttttgcaagtcgtacgtgacaaggacgatcgctacttggccatcgtcgcagacagaagctcagaaatgtgattagtagttgagttttcggcatagatttgcattttccatagctctggaactgaaatctggataattttccaggtttcctacagctttgaacaaagttttagcaggagcagacttaggagatagaaaaatcagctccttttccccttagtttcagaaggaattgattgctcgacgattgctacttttttaaggaacgggttcaagagatggagaacgagtcaattattcagagcaataacaatacgaacacaatgtctagtgttagagaaaaaaacggaggggatgggtcgttgctgttgagggcgaattccgatagcgctaggcaagcaacgacgtcggatttggtgttgcagtgggggaatcggaagcggctaaggtgcatgaaggtgcaggttaaggacgattcttccggtccggttcagaggactacggttcgggtggatcgccgggtcgttagaaccgacaaggattctttaaataagctcactttcggtgtcaataataataatcatcatcatcagagtaacgggtatccgaatctccgtcaacgtccatcttcgccgcaaccacgaattctcaggaactcagaaagttcaagtgccatgagaggaggacaaagcaacgggggcgttagtgttaggggaattgcctcaccggacaggggtgcgcatgataagagagggacccataatgacaataacaagtccgcggcctcatcggatactgcgcacgatagcaagaagggagggtcgccgtccggcagcggagatgcggctgctccgccggtgtggccacccaagttcgtgattgccttgaccaacaaggagaaggaagaagattttctcgccattaagggctcaaagctgcctcagagacccaagaagagagctaaattcattcaacgaaccctcaatctcgttagtcctggcgcatggttgtgcgatcttaccttggaacgatacgaggttagggagaagaagatatccaaaaagcagagaccaagaggtttgaaagcaatgggaaacatggactcggactctgaatagagaatgagtgaaggtgctaagtaagctttatgtttgctaaggatgtgtaggaaatgcatggcatggcatctcagctaggtgccaacgaatccaaatcgaaatacaaaatattttagctttgccgctgctt

SEQ ID NO: 5567 - protein, 279 aa, Glycine max
  misc_feature (1)..(279): Ceres Seq. ID no. 14310765
MENESIIQSNNNTNTMSSVREKNGGDGSLLLRANSDSARQATTSDLVLQWGNRKRLRCMKVQVKDDSSGPVQRTTVRVDRRVVRTDKDSLNKLTFGVNNNNHHHQSNGYPNLRQRPSSPQPRILRNSESSSAMRGGQSNGGVSVRGIASPDRGAHDKRGTHNDNNKSAASSDTAHDSKKGGSPSGSGDAAAPPVWPPKFVIALTNKEKEEDFLAIKGSKLPQRPKKRAKFIQRTLNLVSPGAWLCDLTLERYEVREKKISKKQRPRGLKAMGNMDSDSE

SEQ ID NO: 5568 - protein, 264 aa, Glycine max
  misc_feature (1)..(264): Ceres Seq. ID no. 14310766
MSSVREKNGGDGSLLLRANSDSARQATTSDLVLQWGNRKRLRCMKVQVKDDSSGPVQRTTVRVDRRVVRTDKDSLNKLTFGVNNNNHHHQSNGYPNLRQRPSSPQPRILRNSESSSAMRGGQSNGGVSVRGIASPDRGAHDKRGTHNDNNKSAASSDTAHDSKKGGSPSGSGDAAAPPVWPPKFVIALTNKEKEEDFLAIKGSKLPQRPKKRAKFIQRTLNLVSPGAWLCDLTLERYEVREKKISKKQRPRGLKAMGNMDSDSE

SEQ ID NO: 5569 - protein, 221 aa, Glycine max
  misc_feature (1)..(221): Ceres Seq. ID no. 14310767
MKVQVKDDSSGPVQRTTVRVDRRVVRTDKDSLNKLTFGVNNNNHHHQSNGYPNLRQRPSSPQPRILRNSESSSAMRGGQSNGGVSVRGIASPDRGAHDKRGTHNDNNKSAASSDTAHDSKKGGSPSGSGDAAAPPVWPPKFVIALTNKEKEEDFLAIKGSKLPQRPKKRAKFIQRTLNLVSPGAWLCDLTLERYEVREKKISKKQRPRGLKAMGNMDSDSE

SEQ ID NO: 5570 - DNA, 1261 bp, Glycine max
  misc_feature (1)..(1261): Ceres Seq. ID no. 14310768
atgatgaaaaggagagtttagttgaaaaccacaacaatcatgaggcccgggaggaacattacaagggggatgatgcttctagtgctgtggctcatgatactcatgcaactagcactgaaactgagacacttagtttggaaaactctgatgtaaacttagaaatgaatattccaaaacctgaaaatgagacaacttattcagacgaaagtgtcgggaagcaaaatgattcagatttgaaggtttcagaaggtgacatgatagatggtatttcttcaaacacaactgctgttcaagagactggaaataacactttgtccaaccctgtggatgatagctcattactaaataaaacaactgcaacaaactctgacagtcacttggaatcaagcagtaacctgacagtagtgaccactgaagcaagcaataacttgaccggagctggtaatgacacatcaagttcatctgaacaaaataaaaaagtgatgttatctgaatctgaccaagctcaaagcagcacgatgaacacaacaatccctggagatataaaaaatgtgcagacagagggattagagcagagtggcaatagaacttcagatgaaaacctgcatgataccaattcgacgatctctgttaaaactgaaaatggaggtgtggatgcaggagaatcatctaatctagtagcttcgaatgtaaccgagaacacttacagaaatgagaggtctgaatctgatatttctgaaagtggcaagttcaacggtaactctgaaacaagtgaaacagatgaaaatcagaatgttgatgccacagaggatgagatgttcaaaggtgacacactaacaggtgaaactgatgaaacatcagactcttcctctgccaacaaaactatggattcagctgaacaagatgcaattgattcttctgatactcatatacacgaggatgtggctgaggctctaactgatcttgatacactaccagatatcagaaatgaaggagatgacagtgacgaaactgctgcagagtaaagtggaaagaagggcgttgggttcttgaaaagggctctttcagtttttctcctgaccctggtgtttgcatggcagatccacctagttgttagaacctgtttgcttgactcaaaaattgtgtcaagacaagatctttaaagggaaaaacatagtttagcggatatttttaatgattgtatcaaggtctggatgtgtaatttattgttacattcaactgtcaactacttttgttcccc

SEQ ID NO: 5571 - protein, 340 aa, Glycine max
  misc_feature (1)..(340): Ceres Seq. ID no. 14310769
DEKESLVENHNNHEAREEHYKGDDASSAVAHDTHATSTETETLSLENSDVNLEMNIPKPENETTYSDESVGKQNDSDLKVSEGDMIDGISSNTTAVQETGNNTLSNPVDDSSLLNKTTATNSDSHLESSSNLTVVTTEASNNLTGAGNDTSSSSEQNKKVMLSESDQAQSSTMNTTIPGDIKNVQTEGLEQSGNRTSDENLHDTNSTISVKTENGGVDAGESSNLVASNVTENTYRNERSESDISESGKFNGNSETSETDENQNVDATEDEMFKGDTLTGETDETSDSSSANKTMDSAEQDAIDSSDTHIHEDVAEALTDLDTLPDIRNEGDDSDETAAE

SEQ ID NO: 5572 - protein, 287 aa, Glycine max
  misc_feature (1)..(287): Ceres Seq. ID no. 14310770
MNIPKPENETTYSDESVGKQNDSDLKVSEGDMIDGISSNTTAVQETGNNTLSNPVDDSSLLNKTTATNSDSHLESSSNLTVVTTEASNNLTGAGNDTSSSSEQNKKVMLSESDQAQSSTMNTTIPGDIKNVQTEGLEQSGNRTSDENLHDTNSTISVKTENGGVDAGESSNLVASNVTENTYRNERSESDISESGKFNGNSETSETDENQNVDATEDEMFKGDTLTGETDETSDSSSANKTMDSAEQDAIDSSDTHIHEDVAEALTDLDTLPDIRNEGDDSDETAAE

SEQ ID NO: 5573 - protein, 256 aa, Glycine max
  misc_feature (1)..(256): Ceres Seq. ID no. 14310771
MIDGISSNTTAVQETGNNTLSNPVDDSSLLNKTTATNSDSHLESSSNLTVVTTEASNNLTGAGNDTSSSSEQNKKVMLSESDQAQSSTMNTTIPGDIKNVQTEGLEQSGNRTSDENLHDTNSTISVKTENGGVDAGESSNLVASNVTENTYRNERSESDISESGKFNGNSETSETDENQNVDATEDEMFKGDTLTGETDETSDSSSANKTMDSAEQDAIDSSDTHIHEDVAEALTDLDTLPDIRNEGDDSDETAAE

SEQ ID NO: 5574 - DNA, 1320 bp, Glycine max
  misc_feature (1)..(1320): Ceres Seq. ID no. 14310780
atgcaaaaccactgctcagaaagccaacacaagtactagagattaataatgtgtttgcagcagacactattttgtctttatccgacatggccattgaagaaattttggatgatgtacggttggaatgtgcaagatttgggactattaaatcaattaatgtagtcaagcatagcagtggcgagaatttagcaaccaaattagaagaatgcaaagtcataaacaaagtggatgctaaagaagtttctcaagacacaaactgtattactaataatacagaatctagtttttctgacaaggctacttaccccgactttgaaggaacaaatgggatggaaatccatgataacaatgaaatggaagaagttaaagttgacgagggtagctgtgtttatgttgataaaaatgctgaagtttttgactataaatcatgtagagaacacgtggatgattcagcagtagaagatgtgggggataagggcataccttgtagtatcattcaagaatgtcctgatcaacaagatacacccaatgatgggccagaattttatgataagatggttgctaacgatattgatgtgaatattgaaaataatatggaatctaaagacacagtttgtgcatttcaggaaggcttttctgaatgggatatcagtgcagaattggttagtccccaaaagagcattgacacggaagaggatatttatggtcatgtatttaaaccaggttctgttcttgttgagtatggaagagctgaagcatgttgttcggcagcacatagtttgcacggacgattctttgatggcagaattgtgacggtgggatatgttgctctcagcctatacagatcaagatttacaaaatgagcatttcaaagcagcaactcgtggttatatgatgaaacaccaaattatatttttgcatgattgtggaagaatagattaatcaatctgattggttatgccagcctgcttcctggatagctttttaactttcagatttacacttctgatgtttagtatttcaacatttggagtgggtaaaagcttaactgagcaatgtcgatttgaggaaaatgcagtatagcacacatcaagtttgtaactgcagactatctgatgatttgttatgcaaatcgggcatatgatttttatttttttattttgtacgtttaaatgtggttacatttcgagctggtggtcttatgctatttggcaatattttgtgtacatggttatgttgcgttacaaactgattattgtatcgtagttatttttagatgttggttacagggccatacttttcataattattttttttgac

SEQ ID NO: 5575 - protein, 286 aa, Glycine max
  misc_feature (1)..(286): Ceres Seq. ID no. 14310781
AKPLLRKPTQVLEINNVFAADTILSLSDMAIEEILDDVRLECARFGTIKSINVVKHSSGENLATKLEECKVINKVDAKEVSQDTNCITNNTESSFSDKATYPDFEGTNGMEIHDNNEMEEVKVDEGSCVYVDKNAEVFDYKSCREHVDDSAVEDVGDKGIPCSIIQECPDQQDTPNDGPEFYDKMVANDIDVNIENNMESKDTVCAFQEGFSEWDISAELVSPQKSIDTEEDIYGHVFKPGSVLVEYGRAEACCSAAHSLHGRFFDGRIVTVGYVALSLYRSRFTK

SEQ ID NO: 5576 - protein, 258 aa, Glycine max
  misc_feature (1)..(258): Ceres Seq. ID no. 14310782
MAIEEILDDVRLECARFGTIKSINVVKHSSGENLATKLEECKVINKVDAKEVSQDTNCITNNTESSFSDKATYPDFEGTNGMEIHDNNEMEEVKVDEGSCVYVDKNAEVFDYKSCREHVDDSAVEDVGDKGIPCSIIQECPDQQDTPNDGPEFYDKMVANDIDVNIENNMESKDTVCAFQEGFSEWDISAELVSPQKSIDTEEDIYGHVFKPGSVLVEYGRAEACCSAAHSLHGRFFDGRIVTVGYVALSLYRSRFTK

SEQ ID NO: 5577 - protein, 177 aa, Glycine max
  misc_feature (1)..(177): Ceres Seq. ID no. 14310783
MEIHDNNEMEEVKVDEGSCVYVDKNAEVFDYKSCREHVDDSAVEDVGDKGIPCSIIQECPDQQDTPNDGPEFYDKMVANDIDVNIENNMESKDTVCAFQEGFSEWDISAELVSPQKSIDTEEDIYGHVFKPGSVLVEYGRAEACCSAAHSLHGRFFDGRIVTVGYVALSLYRSRFTK

SEQ ID NO: 5578 - DNA, 2188 bp, Glycine max
  misc_feature (1)..(2188): Ceres Seq. ID no. 14310784
atgagtgagtgaactttggataagtaagtgttgtgtgaagattttgtatgagtacttgagcttctttgccttgtcagcttttgatttttgatgttgtggtgtggcagtggaagtcatactaaaaaaggtgattcttttgcagtggcaagcatggcaagaggaagagcagatgtgaactccagaaaaaaattggtcacagctgtgttggttttggtgattgttggtggttttttctatttctattctcagaatagtgattcatcttctgttgtgtatggtgataaatctttgagccactttggtttgggaggggacaaagatgatggtgaatcttcctccacagttgttggaggagagggcagtgttgtaccaaagagcattccagtctgtgatgatcgattatccgagctgattccttgtctggacagaaatctcatataccaaacaagattgaagcttgatttatctttgatggagcactatgagagacactgcccaacacctgataggagatacaattgtttaattcctcctcctccagggtacaaggttcctatcaagtggcccaaaagcagagaccaggtgtggaaggcaaatatacctcatacccatctagcaactgaaaaatctgaccagaactggatggttgtgaaaggtgaaacaatagtgtttcctggtggaggaacccacttccattatggtgctggtaaatacattgcttcaattgctaatatgcttaattttccaaacaatgatataaacaatgggggaagagtcaggtctgttcttgatgttggctgtggggttgctagctttggaggatatcttatttcctctaatgtgatagcaatgtcattggcaccaaatgatgttcatcaaaatcaaatccagtttgccttagagaggggaattccagcatatcttggtgtcttggggacccaaagactcccttatccaagtagatcattcgaacttgctcattgctctcgctgtagaatcgattggcttcagagagatggtatacttctgcttgagctggataggttactgaggccaggaggttatttcgcgtactcatctcctgaagcctatgcacaggatgaagaggataggaggatatggcgagaaatgagcactcttgtggagaggatgtgctggaaaatagcttctaagaaggatcagactgttatttgggtcaagcctctcactaatagctgctacttaaagagattgcctggtactaagcctccactctgcaggtctgatgatgatcctgatgctgtttggggagttaaaatgaaagtttgcatctcacgttattcagatcaaatgcacaaagcaaaaggaagtgatttggctccttggcctgctcgattgactactccacctcctcgtctggcagaaattcactattctactgaaatgtttgagaaggacatggaagtttggaaacaacgagttcgtaattactggagcaagctagccagtaagattaagccagacacaattcggaacgtgatggatatgaaggcaaacttgggttcatttgcagcagctttgaaggacaaagatgtttgggttatgaatgtagtgccagaaaatgaacaaaaaactctcaagattatatacgacagaggacttataggaacagttcacaactggtgtgaagctttttcaacctaccctcgaacgtatgatctactccatgcatggactgtgttttctgatattattaagaaagaatgcagtccagaggatttattaattgagatggatagaatcctaaggccaaagggtttcatcattgtccatgataagcgttcagtggtggagtatataaagaaatacttgccagcattacactgggaggctgtgaccatatatgatgtagatgatgatgatacagtgattataattcaaaagaaaatgtggctcacaagtcaaagcatcaaggtctctgaatagtgtcataatattcacttgtataagttaccagtgctactaggtgtataagtgtattatgtagctctattcctaaggcctaagctttcagtgtagctctcttcactatagacgcaagtcacagtgaaagctcacccaaatcgtctttatctttttttgcatttattgaattttgtacgcttcaacatttatatccactctgaagaaatattctaatttaaaaatt

SEQ ID NO: 5579 - protein, 624 aa, Glycine max
  misc_feature (1)..(624): Ceres Seq. ID no. 14310785
MLWCGSGSHTKKGDSFAVASMARGRADVNSRKKLVTAVLVLVIVGGFFYFYSQNSDSSSVVYGDKSLSHFGLGGDKDDGESSSTVVGGEGSVVPKSIPVCDDRLSELIPCLDRNLIYQTRLKLDLSLMEHYERHCPTPDRRYNCLIPPPPGYKVPIKWPKSRDQVWKANIPHTHLATEKSDQNWMVVKGETIVFPGGGTHFHYGAGKYIASIANMLNFPNNDINNGGRVRSVLDVGCGVASFGGYLISSNVIAMSLAPNDVHQNQIQFALERGIPAYLGVLGTQRLPYPSRSFELAHCSRCRIDWLQRDGILLLELDRLLRPGGYFAYSSPEAYAQDEEDRRIWREMSTLVERMCWKIASKKDQTVIWVKPLTNSCYLKRLPGTKPPLCRSDDDPDAVWGVKMKVCISRYSDQMHKAKGSDLAPWPARLTTPPPRLAEIHYSTEMFEKDMEVWKQRVRNYWSKLASKIKPDTIRNVMDMKANLGSFAAALKDKDVWVMNVVPENEQKTLKIIYDRGLIGTVHNWCEAFSTYPRTYDLLHAWTVFSDIIKKECSPEDLLIEMDRILRPKGFIIVHDKRSVVEYIKKYLPALHWEAVTIYDVDDDDTVIIIQKKMWLTSQSIKVSE

SEQ ID NO: 5580 - protein, 604 aa, Glycine max
  misc_feature (1)..(604): Ceres Seq. ID no. 14310786
MARGRADVNSRKKLVTAVLVLVIVGGFFYFYSQNSDSSSVVYGDKSLSHFGLGGDKDDGESSSTVVGGEGSVVPKSIPVCDDRLSELIPCLDRNLIYQTRLKLDLSLMEHYERHCPTPDRRYNCLIPPPPGYKVPIKWPKSRDQVWKANIPHTHLATEKSDQNWMVVKGETIVFPGGGTHFHYGAGKYIASIANMLNFPNNDINNGGRVRSVLDVGCGVASFGGYLISSNVIAMSLAPNDVHQNQIQFALERGIPAYLGVLGTQRLPYPSRSFELAHCSRCRIDWLQRDGILLLELDRLLRPGGYFAYSSPEAYAQDEEDRRIWREMSTLVERMCWKIASKKDQTVIWVKPLTNSCYLKRLPGTKPPLCRSDDDPDAVWGVKMKVCISRYSDQMHKAKGSDLAPWPARLTTPPPRLAEIHYSTEMFEKDMEVWKQRVRNYWSKLASKIKPDTIRNVMDMKANLGSFAAALKDKDVWVMNVVPENEQKTLKIIYDRGLIGTVHNWCEAFSTYPRTYDLLHAWTVFSDIIKKECSPEDLLIEMDRILRPKGFIIVHDKRSVVEYIKKYLPALHWEAVTIYDVDDDDTVIIIQKKMWLTSQSIKVSE

SEQ ID NO: 5581 - protein, 497 aa, Glycine max
  misc_feature (1)..(497): Ceres Seq. ID no. 14310787
MEHYERHCPTPDRRYNCLIPPPPGYKVPIKWPKSRDQVWKANIPHTHLATEKSDQNWMVVKGETIVFPGGGTHFHYGAGKYIASIANMLNFPNNDINNGGRVRSVLDVGCGVASFGGYLISSNVIAMSLAPNDVHQNQIQFALERGIPAYLGVLGTQRLPYPSRSFELAHCSRCRIDWLQRDGILLLELDRLLRPGGYFAYSSPEAYAQDEEDRRIWREMSTLVERMCWKIASKKDQTVIWVKPLTNSCYLKRLPGTKPPLCRSDDDPDAVWGVKMKVCISRYSDQMHKAKGSDLAPWPARLTTPPPRLAEIHYSTEMFEKDMEVWKQRVRNYWSKLASKIKPDTIRNVMDMKANLGSFAAALKDKDVWVMNVVPENEQKTLKIIYDRGLIGTVHNWCEAFSTYPRTYDLLHAWTVFSDIIKKECSPEDLLIEMDRILRPKGFIIVHDKRSVVEYIKKYLPALHWEAVTIYDVDDDDTVIIIQKKMWLTSQSIKVSE

SEQ ID NO: 5582 - DNA, 1498 bp, Glycine max
  misc_feature (1)..(1498): Ceres Seq. ID no. 14310807
atctagtatatatcttacccttagacacaacaaattccacataacaatttcatctagcaatgttaaaaaaccaaccacaaccagattggcctgagcccattgtccgggttcagtccttatccgaaaactgcatagattcaatccctgaaaggtacatcaagccttctactgatagaccatccataagaagttctaattttgatgatgccaatattccaatcatcgaccttggtggtctgtttggtgctgaccaacgtgtctcagactcaattcttaggcaaatctcagaggcttgcaaagagtggggcttcttccaagtcactaaccatggtgttagccctgatttgatggacaaggctagggaaacttggcgtcaattctttcacatgcccatggaggtgaagcagcaatatgccaactcgccaaaaacctatgaagggtacggaagcagacttggaattgagaaaggtgctattcttgattggagtgattactattttcttcactatcttcccttgccactcaaggactataacaaatggcctgcctcgcctccctcttgcaggaaagtgtttgatgagtatgggagagagttagtgaagctatgtgggaggttgatgaaggctttgtcaataaaccttggattagatgaaaaaattcttcaaaatggttttgggggagaagacataggggcatgtctaagagtgaatttttaccctaaatgtccacggccagagttgacgttgggtttgtcatcacactcagaccctggaggaatgactatgttgcttccagatgatcaagttcctggtcttcaagttcgaaaatgtgataattggattaccgtgaagcctgcacgccatgcttttatcgtcaatatcggagaccaaattcaggttctaagcaatgcaatttacaagagtgtggagcacagagtgatagtaaattcagataaagagagagtttctctggcatttttctacaaccccaaaagtgatatacccattgagccaataaaagagctggtaacaccggaaaagccctcactctacccagcaatgaccttcgatgaatacagactcttcattagaatgagaggacctcgaggcaaatctcaagttgaatctttaaagtctcccagatgatcaattctgctcataggcttttattgcttgcattctatgtccatttcaaatagtaagtcactatatatgacgtgtttggtttcacgtctttacagcgtgcgtgcgtgtttagtttcacgtcttggatgtgattttttttacatcttagatgttattttaagaagttaatagttatatatagttttcatgtctgaaatgtgattccttacttctcaagagtttacaagcacgctataccttattggtgtataattaattgtaaatcttgtaactagatcgggatttgtttgcacattgagccacagagtaaggatatgtaagagagattggatatatagatatgatattgtttt

SEQ ID NO: 5583 - protein, 361 aa, Glycine max
  misc_feature (1)..(361): Ceres Seq. ID no. 14310808
MLKNQPQPDWPEPIVRVQSLSENCIDSIPERYIKPSTDRPSIRSSNFDDANIPIIDLGGLFGADQRVSDSILRQISEACKEWGFFQVTNHGVSPDLMDKARETWRQFFHMPMEVKQQYANSPKTYEGYGSRLGIEKGAILDWSDYYFLHYLPLPLKDYNKWPASPPSCRKVFDEYGRELVKLCGRLMKALSINLGLDEKILQNGFGGEDIGACLRVNFYPKCPRPELTLGLSSHSDPGGMTMLLPDDQVPGLQVRKCDNWITVKPARHAFIVNIGDQIQVLSNAIYKSVEHRVIVNSDKERVSLAFFYNPKSDIPIEPIKELVTPEKPSLYPAMTFDEYRLFIRMRGPRGKSQVESLKSPR

SEQ ID NO: 5584 - protein, 265 aa, Glycine max
  misc_feature (1)..(265): Ceres Seq. ID no. 14310809
MDKARETWRQFFHMPMEVKQQYANSPKTYEGYGSRLGIEKGAILDWSDYYFLHYLPLPLKDYNKWPASPPSCRKVFDEYGRELVKLCGRLMKALSINLGLDEKILQNGFGGEDIGACLRVNFYPKCPRPELTLGLSSHSDPGGMTMLLPDDQVPGLQVRKCDNWITVKPARHAFIVNIGDQIQVLSNAIYKSVEHRVIVNSDKERVSLAFFYNPKSDIPIEPIKELVTPEKPSLYPAMTFDEYRLFIRMRGPRGKSQVESLKSPR

SEQ ID NO: 5585 - protein, 252 aa, Glycine max
  misc_feature (1)..(252): Ceres Seq. ID no. 14310810
MPMEVKQQYANSPKTYEGYGSRLGIEKGAILDWSDYYFLHYLPLPLKDYNKWPASPPSCRKVFDEYGRELVKLCGRLMKALSINLGLDEKILQNGFGGEDIGACLRVNFYPKCPRPELTLGLSSHSDPGGMTMLLPDDQVPGLQVRKCDNWITVKPARHAFIVNIGDQIQVLSNAIYKSVEHRVIVNSDKERVSLAFFYNPKSDIPIEPIKELVTPEKPSLYPAMTFDEYRLFIRMRGPRGKSQVESLKSPR

SEQ ID NO: 5586 - DNA, 1986 bp, Glycine max
  misc_feature (1)..(1986): Ceres Seq. ID no. 14310841
aaaaagaaaaggaagggcgaagttgaaaaaccaaaacccttggcgagtgaagccctagactcactagactacacacttcgcaatggcggttgttgctcaaacccctgacatcgccggcgagcggcagtccggccaagacgttcgcacccaaaacgttgtggcatgccaagccgttgccaacatcgtcaaaagctctttaggccccgttggcctcgacaagatgctcgtcgacgacattggcgacgtcaccatcaccaacgacggcgccacgattctcaagatgctggaagtggagcatcctgctgccaaggttttggttgaactcgccgagcttcaggatcgagaagtcggagacggcactacttctgtcgtcattgtagctgctgagcttctcaaaagggcaaatgaccttgtcaggaacaagattcatcctacctcgattatcagtggatatagacttgctatgcgagaggcttgtaaatatgtagaagaaaaactagctgtcaaggttgaaaagctgggaaaggattcactaattaactgtgccaagaccagtatgtcctcaaagttgatagctggtgatagtgacttctttgccattttggttgtagatgcagtgcaagctgtaaagatgaccaatgctcgaggtgaagttaaatacccaatcaagggaatcaatatcttgaaagctcatggaaaaagtgctagagacagctttctgatgaatggttatgctctaaatactggccgtgctgctcaaggaatgcctcttagggttgcccctgcaagaattgcctgtcttgatttcaatcttcagaagacaaaaatgcagttgggtgttcaagttttagttactgatcctagggagctagagaaaattcgtcaaagagaggctgatatgactaaggaacgtattgaaaaactgctgaaggctggagctaatgttattctgacaactaaaggaattgatgacatggctcttaagtactttgttgaggctggggcaattgctgtaagacgtgtgcggaaagaggacatgcgccatgttgccaaggctactggtgcaacattggtctcaacatttgctgatatggaaggggaggaaacatttgaaccatcttttcttggatatgctgatgaggttgttgaggagcgaatttctgatgatgctgtagttatgatcaaagggaccaaaactacaagcgcagtcactttgattctaagaggtgcaaatgaccatatgcttgatgagatggacagagctctgcatgatgcattgtcaattgtcaagagaactcttgaatcaaatacggtggtagctggtggaggtgctgttgaggcagcattatcagtttatttagagtaccttgctacaactttaggatctcgggagcagttggctatagcagaatttgctgagtctctgttaattattccaaaggtgctttctgttaatgctgctaaggatgccactgagctggtcgcaaaattacgggcctaccaccattcagcacaaactaaagccgataagaaacatttatcaagtatgggtttggacctttctgaagggaaaatcagaaacaacttggaggctggagtcattgagcctgcaatgagcaaagtaaaaattattcagtttgcaactgaagctgccattactatccttcgaattgatgacatgatcaagcttatcaaggatgaaagtcaaaatgaggattaaagtataactgaatctaggaggcatctactccccagtgcttacaaaagggagggttgtgctagtgtgcatttgaagagggtatctgcatttaatcttcaatgcccttgttcttgaaggaaaactgctctaattatttttctgaaagtagctttattatatttacatctttgcattttatattccaacaatttttaggcaaacatttttggtcatgcattggctggttgcatgtttgtacatttctttgaggcagtgtttgatttgtg

SEQ ID NO: 5587 - protein, 545 aa, Glycine max
  misc_feature (1)..(545): Ceres Seq. ID no. 14310842
MAVVAQTPDIAGERQSGQDVRTQNVVACQAVANIVKSSLGPVGLDKMLVDDIGDVTITNDGATILKMLEVEHPAAKVLVELAELQDREVGDGTTSVVIVAAELLKRANDLVRNKIHPTSIISGYRLAMREACKYVEEKLAVKVEKLGKDSLINCAKTSMSSKLIAGDSDFFAILVVDAVQAVKMTNARGEVKYPIKGINILKAHGKSARDSFLMNGYALNTGRAAQGMPLRVAPARIACLDFNLQKTKMQLGVQVLVTDPRELEKIRQREADMTKERIEKLLKAGANVILTTKGIDDMALKYFVEAGAIAVRRVRKEDMRHVAKATGATLVSTFADMEGEETFEPSFLGYADEVVEERISDDAVVMIKGTKTTSAVTLILRGANDHMLDEMDRALHDALSIVKRTLESNTVVAGGGAVEAALSVYLEYLATTLGSREQLAIAEFAESLLIIPKVLSVNAAKDATELVAKLRAYHHSAQTKADKKHLSSMGLDLSEGKIRNNLEAGVIEPAMSKVKIIQFATEAAITILRIDDMIKLIKDESQNED

SEQ ID NO: 5588 - protein, 499 aa, Glycine max
  misc_feature (1)..(499): Ceres Seq. ID no. 14310843
MLVDDIGDVTITNDGATILKMLEVEHPAAKVLVELAELQDREVGDGTTSVVIVAAELLKRANDLVRNKIHPTSIISGYRLAMREACKYVEEKLAVKVEKLGKDSLINCAKTSMSSKLIAGDSDFFAILVVDAVQAVKMTNARGEVKYPIKGINILKAHGKSARDSFLMNGYALNTGRAAQGMPLRVAPARIACLDFNLQKTKMQLGVQVLVTDPRELEKIRQREADMTKERIEKLLKAGANVILTTKGIDDMALKYFVEAGAIAVRRVRKEDMRHVAKATGATLVSTFADMEGEETFEPSFLGYADEVVEERISDDAVVMIKGTKTTSAVTLILRGANDHMLDEMDRALHDALSIVKRTLESNTVVAGGGAVEAALSVYLEYLATTLGSREQLAIAEFAESLLIIPKVLSVNAAKDATELVAKLRAYHHSAQTKADKKHLSSMGLDLSEGKIRNNLEAGVIEPAMSKVKIIQFATEAAITILRIDDMIKLIKDESQNED

SEQ ID NO: 5589 - protein, 479 aa, Glycine max
  misc_feature (1)..(479): Ceres Seq. ID no. 14310844
MLEVEHPAAKVLVELAELQDREVGDGTTSVVIVAAELLKRANDLVRNKIHPTSIISGYRLAMREACKYVEEKLAVKVEKLGKDSLINCAKTSMSSKLIAGDSDFFAILVVDAVQAVKMTNARGEVKYPIKGINILKAHGKSARDSFLMNGYALNTGRAAQGMPLRVAPARIACLDFNLQKTKMQLGVQVLVTDPRELEKIRQREADMTKERIEKLLKAGANVILTTKGIDDMALKYFVEAGAIAVRRVRKEDMRHVAKATGATLVSTFADMEGEETFEPSFLGYADEVVEERISDDAVVMIKGTKTTSAVTLILRGANDHMLDEMDRALHDALSIVKRTLESNTVVAGGGAVEAALSVYLEYLATTLGSREQLAIAEFAESLLIIPKVLSVNAAKDATELVAKLRAYHHSAQTKADKKHLSSMGLDLSEGKIRNNLEAGVIEPAMSKVKIIQFATEAAITILRIDDMIKLIKDESQNED

SEQ ID NO: 5590 - DNA, 1336 bp, Glycine max
  misc_feature (1)..(1336): Ceres Seq. ID no. 14310849
aagtagctgtcaagaggctttcaagaaagtctagccaaggtttagaggagttcaagaatgaaatggtgctcatagccaaactgcaacatagaaatctggttagactattggggtgttgcattcaaggggaagaaaagatactggtatatgagtacttgccaaacaaaagcttggactgctttttatttgatccggtgaagcaaacacaactagattgggcaaaacgctttgaaataatcgagggcattgcaagagggctactttatctgcaccgggattctagacttagaataattcatcgtgatttaaaagcaagcaacattttgttggatgaaagcatgaatccaaaaatttcagactttggcttggccagaatatttgggggaaaccaaaatgaagccaacacaaacagagtggttggtacatatggttatatgtccccagaatatgcaatggaaggtctgttttcaatcaaatctgatgtctatagttttggtgtattgctacttgagattatgagtggccgcaagaacacaagctttcgtgacacagatgactcaagtctcattggatatgcctggcacctttggagtgagcagagagtaatggagcttgttgatccttcccttggtgattcaattcctaagactaaagcgttgaggttcatacaaatagggatgttatgcgtgcaagattcagcatctcgtagaccaaacatgtcatctgtgttgttgatgctgggaagtgaatcaacagctctacctttgcctaagcaacctttgctcactacttccatgaggatacttgatgatggagaatcttatagcgaaggccttgatgtgtcaaatgatttgacagtttcaatggtgacaacagggagatagaagtgttaattacattttttggtttttcccattctgtttagctttgtttagactcttttcaatctacataagttcacagcaaaaagttttccttttaattttacctcccatttgaaacaagcctcttaatattgagtctattgtatatactataatttataaaccaaaatatcttttgagagtccaaaaaagtgccttgattcctggtcattgaaagaattcttctaggttgaaggttctcatgtgaggagatcattggaaaagtagcggaatctgtggttagcagttgcattttgattagttttttgaggcgtgattttgatatactatcatgtataaagttgtatattgttcacaattattatattcttgggagagcatcttcatttttaaatgtctctttgttgaactcttgtatgactagtttcgtacatgtctccaaatggcatttg

SEQ ID NO: 5591 - protein, 293 aa, Glycine max
  misc_feature (1)..(293): Ceres Seq. ID no. 14310850
VAVKRLSRKSSQGLEEFKNEMVLIAKLQHRNLVRLLGCCIQGEEKILVYEYLPNKSLDCFLFDPVKQTQLDWAKRFEIIEGIARGLLYLHRDSRLRIIHRDLKASNILLDESMNPKISDFGLARIFGGNQNEANTNRVVGTYGYMSPEYAMEGLFSIKSDVYSFGVLLLEIMSGRKNTSFRDTDDSSLIGYAWHLWSEQRVMELVDPSLGDSIPKTKALRFIQIGMLCVQDSASRRPNMSSVLLMLGSESTALPLPKQPLLTTSMRILDDGESYSEGLDVSNDLTVSMVTTGR

SEQ ID NO: 5592 - protein, 273 aa, Glycine max
  misc_feature (1)..(273): Ceres Seq. ID no. 14310851
MVLIAKLQHRNLVRLLGCCIQGEEKILVYEYLPNKSLDCFLFDPVKQTQLDWAKRFEIIEGIARGLLYLHRDSRLRIIHRDLKASNILLDESMNPKISDFGLARIFGGNQNEANTNRVVGTYGYMSPEYAMEGLFSIKSDVYSFGVLLLEIMSGRKNTSFRDTDDSSLIGYAWHLWSEQRVMELVDPSLGDSIPKTKALRFIQIGMLCVQDSASRRPNMSSVLLMLGSESTALPLPKQPLLTTSMRILDDGESYSEGLDVSNDLTVSMVTTGR

SEQ ID NO: 5593 - protein, 181 aa, Glycine max
  misc_feature (1)..(181): Ceres Seq. ID no. 14310852
MNPKISDFGLARIFGGNQNEANTNRVVGTYGYMSPEYAMEGLFSIKSDVYSFGVLLLEIMSGRKNTSFRDTDDSSLIGYAWHLWSEQRVMELVDPSLGDSIPKTKALRFIQIGMLCVQDSASRRPNMSSVLLMLGSESTALPLPKQPLLTTSMRILDDGESYSEGLDVSNDLTVSMVTTGR

SEQ ID NO: 5594 - DNA, 1329 bp, Glycine max
  misc_feature (1)..(1329): Ceres Seq. ID no. 14310872
aatctgcaatttgttatatattatactagaatattccatcttatgagttttttatttgctgattttgttctaatttccatgtcatctcttgtaagtaaaagattcttgtctaatgctgcttttatctctaatgttaatgattttcgtttgttgtttgatgactcaatatttctattatcttatacttagatcaatagtgtctagaatagaagattattcatatgacggatccaaaaatgtcaaatcagtgtaaaaaagaaaagaaaaatcataaagtcaaatctgtcaagaaagcaatattaagggtgacttctacagttggctggcaactaggttggcgattgattggttcgcctcaattaaagtttatagacatgacctggattatattttctcatttgcattcattctgattttattttaccattttgttttgtatttattcaaataattaattttttgttctttttatttttcttgtgtgcatgtacaccagcctgcacatattttaggaaacttagactttgttcccttgttatccagggggaacagggtgctcagataattgttgtacctgaactcgttgaatttctcatgtcaacactggttaaggttcgtaatgttcctgcatcttgcaccaagattccattaatttctcttgattatgaaccaccaaggttcagtattggcctgggctcaacttcacataatatttgtgtcagtcagactttaccaattttgtttattgtgcagaacaaaatcattcaaaactatagaagcatcactatgagttgatgcactagctagtgctggatttaaagtttctcgttcaaagctagttgacatgatcagcaatggtgatgtgcgtatcaactggatccatgttactaccaaaggaaccacactcaagagtggagatattgtatcagttagtggcaagggaagattaaagataggagaaataaactcctcaaagaaaggaaagtttgcagtggagctcattcagtatttgtagacgtttagcaagagctatcttcctaggcagtgcatgtttggattaaagttgagagagttcagaagtacttttattctcaaagtaacaattttttccttcatttgtgcattggaattcacaaacatatttttcaaactttaatccaacatagccgtagtctgtctaaagtctaaacggcatacttttactttttgtggaaaattttgcttagtctcatgtaactaaaatttatgatgaagatagaaaaaaatgtacagacagaacattcatcttctaatatttttactccctccatttcaagactattgatgttc

SEQ ID NO: 5595 - protein, 66 aa, Glycine max
  misc_feature (1)..(66): Ceres Seq. ID no. 14310873
MSTLVKVRNVPASCTKIPLISLDYEPPRFSIGLGSTSHNICVSQTLPILFIVQNKIIQNYRSITMS

SEQ ID NO: 5596 - protein, 63 aa, Glycine max
  misc_feature (1)..(63): Ceres Seq. ID no. 14310874
MTDPKMSNQCKKEKKNHKVKSVKKAILRVTSTVGWQLGWRLIGSPQLKFIDMTWIIFSHLHSF

SEQ ID NO: 5597 - protein, 62 aa, Glycine max
  misc_feature (1)..(62): Ceres Seq. ID no. 14310875
NLQFVIYYTRIFHLMSFLFADFVLISMSSLVSKRFLSNAAFISNVNDFRLLFDDSIFLLSYT

SEQ ID NO: 5598 - DNA, 1273 bp, Glycine max
  misc_feature (1)..(1273): Ceres Seq. ID no. 14310876
aattcccctgattcattggagacgcacttgctctcttttgaattatatacaaggaaacaaaagattttgcttgccttgcaggctgtaaagcagttactgagattggatgctgaacaccctgattctcatcgttgtttgattaaattcttccataaagtgggatccatgaatgcttctgtgactgacagtgagaaactgatttggagtgtcttagaggctgagcgcccaactattagtcagctgcatgagaaatccctgtttgaggcaaacaactcattccttgaaaaacataaagattctttgatgcatagagcagcttttgcagaaatattgcatattttggattcaaacagaaagtctgaggctgttaagttcattgaagagtcaacaaataacattgtgcccagaaatggagcacttggaccaatcagggaatggaatcttaaagactgtattgcagttcacaagcttcttggaacagttcttgctgatcaggatgctgcattgagatggaaggtgcgttgtgcagagtacttcccatattctacatactttgagggatgccacagctctgcctctcccaactcggccttcaatcagttacgtaagaactctgaaaatgagagtcctaaccattcagtgggtggtcaaaatgtgggctccatcacatcaaacgggaaactagaggcatttaaagatctcactatctaatcaagtcgaaatacacatccatgaggctaaatatatatgcgtgttacccagcttggatgcttgcaaaaccaaacggcgtttgacacttccagaaacgactgtgttgcaatttgcagcaacaacggtcacagttttggtgcgggttatggcaaattctacacacgttattccgatgtattttctttgcatgatttcccccccccccccagctgtgaaatttatttggtttgcaaatgtgtataattttacctcaattatgtcttaggattgactttttcaatttgttcacccctttttttctgggaggtggtagaccggagctgcatggtctttgtaccgttgtcttagattttcattttggtcgttgggagagttacataatttttgttttctggtcctgtatccagtcaacatacatctaggagagcatgttgtatctttcctattttattggcttattcatcatgtataaacattatgtgaaaattttgctactggatgccaaaatgacatgtaattttggatgaattcagtaaaaaaaatggaggttaatattgctgtc

SEQ ID NO: 5599 - protein, 236 aa, Glycine max
  misc_feature (1)..(236): Ceres Seq. ID no. 14310877
NSPDSLETHLLSFELYTRKQKILLALQAVKQLLRLDAEHPDSHRCLIKFFHKVGSMNASVTDSEKLIWSVLEAERPTISQLHEKSLFEANNSFLEKHKDSLMHRAAFAEILHILDSNRKSEAVKFIEESTNNIVPRNGALGPIREWNLKDCIAVHKLLGTVLADQDAALRWKVRCAEYFPYSTYFEGCHSSASPNSAFNQLRKNSENESPNHSVGGQNVGSITSNGKLEAFKDLTI

SEQ ID NO: 5600 - protein, 181 aa, Glycine max
  misc_feature (1)..(181): Ceres Seq. ID no. 14310878
MNASVTDSEKLIWSVLEAERPTISQLHEKSLFEANNSFLEKHKDSLMHRAAFAEILHILDSNRKSEAVKFIEESTNNIVPRNGALGPIREWNLKDCIAVHKLLGTVLADQDAALRWKVRCAEYFPYSTYFEGCHSSASPNSAFNQLRKNSENESPNHSVGGQNVGSITSNGKLEAFKDLTI

SEQ ID NO: 5601 - protein, 135 aa, Glycine max
  misc_feature (1)..(135): Ceres Seq. ID no. 14310879
MHRAAFAEILHILDSNRKSEAVKFIEESTNNIVPRNGALGPIREWNLKDCIAVHKLLGTVLADQDAALRWKVRCAEYFPYSTYFEGCHSSASPNSAFNQLRKNSENESPNHSVGGQNVGSITSNGKLEAFKDLTI

SEQ ID NO: 5602 - DNA, 1342 bp, Glycine max
  misc_feature (1)..(1342): Ceres Seq. ID no. 14310880
gacccgccaaaccattacaaaactaaacacccagctaccacattgtctagtatggctcttaatctcttaatttcaatcccattctttttactctttgtagtgaatccatttcactttgttgagccaagaaccttagaagtctccgagcatccattcaccagaactctccgaaaactcaaggacatcaacaagggacaaagggtgagaggcgtgggcgagctcaaaagctacctaaaaaaatttggctacctaacaacaaatgacaattcttcaaacaacaaccacttcgacaaaaacgttgagtttgctctcaaagaataccaagtgttccatcacttacgtcccacgggtcgtgtggatgccgaaaccatcaaaagaatgggcctcccacgttgtggtgtgcctgatattatcacccctcaaaaccataagcttaaggggttggtgattcttgcaaactatagcttcttctcgggttcaccaaaatgggaagagtctaaaagggcactaacctacacattcgtatcaagtgctaacgtgttgaggatgtatgatgtgaggctagcaacaaggaatgccttccaaagttgggcaagagcctctaacttcacatttatggaaatgccaagtgagtataataacctagctaacatagtcctagggtttcatcgtggggaccatggtgatgggtacccatttgatgggccgggccaggttttggcccacacttttgcaccacaagatggtaggttgcattttgatgctgatgaaccatggagcattgaatcaacaagctggaatgtaggaccaggatggaatgtgggttgggattggaggaggtgggtgcgtcctagatggcaaagccgaaggaccattgatttgcaaaccgtggctttgcatgaaataggtcaccttttagggctagggcatagtaacgttcccggctccattatgtatccctcttatgaaggggtaaagagggatctaactcaggatgatgtggatggcatacgggctctatatagattgcccaactagaacttgagaaatgttgttccacttgagttttgtgaaatagttgtcaagtgtaacaactaagccttggtgggttgttaacttaaattggttaagtagtgtgtttcgtaacaagttgatttgcattgatcgaggtttcttgaatcaataagtaggtgcttttatgttgattttattgttatcttatagtgactgtagatttctaatgtcttactagctatatgcttgaatgtttttatcttaaaagcaaatttactataaaacttagtgtaaaatttccaattcaacacagaagttactttttatt

SEQ ID NO: 5603 - protein, 345 aa, Glycine max
  misc_feature (1)..(345): Ceres Seq. ID no. 14310881
DPPNHYKTKHPATTLSSMALNLLISIPFFLLFVVNPFHFVEPRTLEVSEHPFTRTLRKLKDINKGQRVRGVGELKSYLKKFGYLTTNDNSSNNNHFDKNVEFALKEYQVFHHLRPTGRVDAETIKRMGLPRCGVPDIITPQNHKLKGLVILANYSFFSGSPKWEESKRALTYTFVSSANVLRMYDVRLATRNAFQSWARASNFTFMEMPSEYNNLANIVLGFHRGDHGDGYPFDGPGQVLAHTFAPQDGRLHFDADEPWSIESTSWNVGPGWNVGWDWRRWVRPRWQSRRTIDLQTVALHEIGHLLGLGHSNVPGSIMYPSYEGVKRDLTQDDVDGIRALYRLPN

SEQ ID NO: 5604 - protein, 328 aa, Glycine max
  misc_feature (1)..(328): Ceres Seq. ID no. 14310882
MALNLLISIPFFLLFVVNPFHFVEPRTLEVSEHPFTRTLRKLKDINKGQRVRGVGELKSYLKKFGYLTTNDNSSNNNHFDKNVEFALKEYQVFHHLRPTGRVDAETIKRMGLPRCGVPDIITPQNHKLKGLVILANYSFFSGSPKWEESKRALTYTFVSSANVLRMYDVRLATRNAFQSWARASNFTFMEMPSEYNNLANIVLGFHRGDHGDGYPFDGPGQVLAHTFAPQDGRLHFDADEPWSIESTSWNVGPGWNVGWDWRRWVRPRWQSRRTIDLQTVALHEIGHLLGLGHSNVPGSIMYPSYEGVKRDLTQDDVDGIRALYRLPN

SEQ ID NO: 5605 - protein, 219 aa, Glycine max
  misc_feature (1)..(219): Ceres Seq. ID no. 14310883
MGLPRCGVPDIITPQNHKLKGLVILANYSFFSGSPKWEESKRALTYTFVSSANVLRMYDVRLATRNAFQSWARASNFTFMEMPSEYNNLANIVLGFHRGDHGDGYPFDGPGQVLAHTFAPQDGRLHFDADEPWSIESTSWNVGPGWNVGWDWRRWVRPRWQSRRTIDLQTVALHEIGHLLGLGHSNVPGSIMYPSYEGVKRDLTQDDVDGIRALYRLPN

SEQ ID NO: 5606 - DNA, 1249 bp, Glycine max
  misc_feature (1)..(1249): Ceres Seq. ID no. 14310896
gaaggaagaagagaaggagaatgacggaaagttgcatccgatccgtcgtagaagccattcactcctctcctttccaagccgttctccatctcgccggtggagcttctcaggtggtgggttcgttgctatcagttcccggtgcttcgaatactgtgctcgaagttgtggttccttactctaagatgtctctcattcagttactcggaaagattccatcccaattttgtggccaacagactgctgaagatatggctttattggcgtataatcgcgctcttaagctctccaagccaggatccccggctgttggagtgggtttcactggttctttggccagcagtcgtccaaaactcggggaacacagattttatatgtcaacaaggacagccgaccaactttggatatcaagtgtgaccttgactaaggggcttcgtactcgagaagaagaggatagagtttctagtcatcttttgatcaaggcaattggaaatgcatgcaaagttcccggagcatctgttttgttgttgagtgagtcagatgtatctgatgaatgtgaaacacaattcaatgaagatcaacagttagaacaacttataaatggacaaatatgctttaaaatttacccatttgaaaatgagatatcagccgaaaggaaaataataatgcctggttctttcaatccattacatgatgggcatctgaagcttatggatgttgctactcgcatttgtggtgatgggtatccttgctttgaaatatcggcagtcaatgcagacaaacctccattatcagtgtctcagatcaaagatcgcatcaagcaatttgaaaaagttggaaagacggtaattatatccaatcagccttatttttataagaaggctgaacttttcccaggcagtgcttttgtaattggggccgacacggcagtgaggcttattaaccctgaatactacgatggtgactacaacaagatgctgaagatacttgttggttgtaaagaaacaggatgcactttccttgtgggtggtcggaatgttgatggtgctttcaaggttcttgacgatattgatgttccaaaagaactaaaagacatgttcgtctccattccagctgaacagttccgcatggatatatcctccactgaaataagaaatagaagtgggatgtaaataatttcatggctaaaggtcaatgtttaatctaggatgaaatcactaacacttaaaaaaaaaagggtttatattttttg

SEQ ID NO: 5607 - protein, 388 aa, Glycine max
  misc_feature (1)..(388): Ceres Seq. ID no. 14310897
RKKRRRMTESCIRSVVEAIHSSPFQAVLHLAGGASQVVGSLLSVPGASNTVLEVVVPYSKMSLIQLLGKIPSQFCGQQTAEDMALLAYNRALKLSKPGSPAVGVGFTGSLASSRPKLGEHRFYMSTRTADQLWISSVTLTKGLRTREEEDRVSSHLLIKAIGNACKVPGASVLLLSESDVSDECETQFNEDQQLEQLINGQICFKIYPFENEISAERKIIMPGSFNPLHDGHLKLMDVATRICGDGYPCFEISAVNADKPPLSVSQIKDRIKQFEKVGKTVIISNQPYFYKKAELFPGSAFVIGADTAVRLINPEYYDGDYNKMLKILVGCKETGCTFLVGGRNVDGAFKVLDDIDVPKELKDMFVSIPAEQFRMDISSTEIRNRSGM

SEQ ID NO: 5608 - protein, 382 aa, Glycine max
  misc_feature (1)..(382): Ceres Seq. ID no. 14310898
MTESCIRSVVEAIHSSPFQAVLHLAGGASQVVGSLLSVPGASNTVLEVVVPYSKMSLIQLLGKIPSQFCGQQTAEDMALLAYNRALKLSKPGSPAVGVGFTGSLASSRPKLGEHRFYMSTRTADQLWISSVTLTKGLRTREEEDRVSSHLLIKAIGNACKVPGASVLLLSESDVSDECETQFNEDQQLEQLINGQICFKIYPFENEISAERKIIMPGSFNPLHDGHLKLMDVATRICGDGYPCFEISAVNADKPPLSVSQIKDRIKQFEKVGKTVIISNQPYFYKKAELFPGSAFVIGADTAVRLINPEYYDGDYNKMLKILVGCKETGCTFLVGGRNVDGAFKVLDDIDVPKELKDMFVSIPAEQFRMDISSTEIRNRSGM

SEQ ID NO: 5609 - protein, 328 aa, Glycine max
  misc_feature (1)..(328): Ceres Seq. ID no. 14310899
MSLIQLLGKIPSQFCGQQTAEDMALLAYNRALKLSKPGSPAVGVGFTGSLASSRPKLGEHRFYMSTRTADQLWISSVTLTKGLRTREEEDRVSSHLLIKAIGNACKVPGASVLLLSESDVSDECETQFNEDQQLEQLINGQICFKIYPFENEISAERKIIMPGSFNPLHDGHLKLMDVATRICGDGYPCFEISAVNADKPPLSVSQIKDRIKQFEKVGKTVIISNQPYFYKKAELFPGSAFVIGADTAVRLINPEYYDGDYNKMLKILVGCKETGCTFLVGGRNVDGAFKVLDDIDVPKELKDMFVSIPAEQFRMDISSTEIRNRSGM

SEQ ID NO: 5610 - DNA, 1305 bp, Glycine max
  misc_feature (1)..(1305): Ceres Seq. ID no. 14310904
tttttctgtgtagttccatcgcatcaaaccctggcaatggcagctacggccatacagaggttcccccaacacaaatacgtagacgcagttcgctggcttcccctacaatccgcattcgaccgattcgcagttttggcactcttcgacttcgattccgatgcttcctccatcgaaatccactctctcaacccaaaccccctctcattggaaccacactcttcgtggtcctctccttcccgcgtttcctccctcaaggcctcgcacttcctccagaagcccctcattgtcgcttccacttcctccggttctctccacttcctcttctccgattcctccgtcgcaacgctcgagtccgaggtctccattcccgagggcgcgctgcattccgttcccgcttcttgcgttgacctattggacggtggcgtcgagtgcgtgaccgttggggaagatgggaaggtcaacttggttggtattggggattccaatttgaactaccggaggttgtttgatagcgccggcctggtctcctacacggcggtgagctgggcgtctccgatggagttcgccaccggtggctacggcttcggtcttcattggtgggaccaacggaaaccgggaggtccggtttctcaatttaagggtaactgggataaaaaattgacatctgggattgtgcactctattgatattcatccgtcgcgaaagcatacttgcctggctggtggttccttaggtactgtttttgcctgggatcttaggtggcagcaacaaccgattatactttcaggcgcaggggctggtgctggtggcaacactgctgtccagtcaatatctgaaagtgaggtttgggaggttcagtatgatcgttgtataaaaccaaatacttcatctacccggatcttaccttccatgatctgctctgaggatggaattctcggtgtgattgagcaaggcgaggaacctattgagctgctggctgaaccttgtgccatcaatagctttgatattgatcgacataatccatcggatgtgatatgtagtttagaatgggaagcagtagccatattgacaagacaataacattcggggtttctactttttggtggcttgaatttcagaaagtttgtaactgatagaaggagtggagctcttaacggacaatttgtgttttttatgtattccggaatgttctattccttttctaaagccatttgcatgcaaatggattttgggattgtacaatatgtagcatgtgtataattgactttacacattggatcaatgctactaccatccgctttgcct

SEQ ID NO: 5611 - protein, 359 aa, Glycine max
  misc_feature (1)..(359): Ceres Seq. ID no. 14310905
FFCVVPSHQTLAMAATAIQRFPQHKYVDAVRWLPLQSAFDRFAVLALFDFDSDASSIEIHSLNPNPLSLEPHSSWSSPSRVSSLKASHFLQKPLIVASTSSGSLHFLFSDSSVATLESEVSIPEGALHSVPASCVDLLDGGVECVTVGEDGKVNLVGIGDSNLNYRRLFDSAGLVSYTAVSWASPMEFATGGYGFGLHWWDQRKPGGPVSQFKGNWDKKLTSGIVHSIDIHPSRKHTCLAGGSLGTVFAWDLRWQQQPIILSGAGAGAGGNTAVQSISESEVWEVQYDRCIKPNTSSTRILPSMICSEDGILGVIEQGEEPIELLAEPCAINSFDIDRHNPSDVICSLEWEAVAILTRQ

SEQ ID NO: 5612 - protein, 347 aa, Glycine max
  misc_feature (1)..(347): Ceres Seq. ID no. 14310906
MAATAIQRFPQHKYVDAVRWLPLQSAFDRFAVLALFDFDSDASSIEIHSLNPNPLSLEPHSSWSSPSRVSSLKASHFLQKPLIVASTSSGSLHFLFSDSSVATLESEVSIPEGALHSVPASCVDLLDGGVECVTVGEDGKVNLVGIGDSNLNYRRLFDSAGLVSYTAVSWASPMEFATGGYGFGLHWWDQRKPGGPVSQFKGNWDKKLTSGIVHSIDIHPSRKHTCLAGGSLGTVFAWDLRWQQQPIILSGAGAGAGGNTAVQSISESEVWEVQYDRCIKPNTSSTRILPSMICSEDGILGVIEQGEEPIELLAEPCAINSFDIDRHNPSDVICSLEWEAVAILTRQ

SEQ ID NO: 5613 - DNA, 1291 bp, Glycine max
  misc_feature (1)..(1291): Ceres Seq. ID no. 14310917
gaatcttaaataagagaacagcccaaaacctttcaaaatacacatgctgcaaattgctcacccaatcaccagccatgggagaggttgacgcagcattcatccaagacccaccacacaggccaaagctctccaccatccaagccgaaggaattcccataattgatctctctccaataaccaaccacagagtttcagacccttctgctattgaaggcttagtgaaggagataggtagtgcatgcaacgagtggggtttcttccaagtaacaaaccatggagtgcccctcactctaaggcaaaacattgagaaagcctcaaaattgttctttgcacagagtgcggaggaaaagagaaaggttagcagaaatgagagctctccagcgggttattatgacacagaacacaccaaaaacgttagggactggaaagaagtctttgattttctagccaaagaacccactttcattcctgtcacttctgatgaacatgatgatcgagtcaatcagtggactaatcaatcccctgaataccctctaaactttagggttgtaacacaagagtatattcaagagatggaaaagctgtcctttaagattttagagcttatagctttgagcttaggccttgaagcaaagaggtttgaagaatttttcatcaaagaccaaactagctttattcgactcaaccactatcctccatgcccttatcctgaccttgctcttggcgtcggtcgacacaaggaccctggtgccttaaccattcttgcacaggatgaggttggaggacttgaagtgagacgtaaagcagatcaagagtggataagagtgaaacccaccccagatgcttatatcatcaacattggtgacactgttcaggtttggagcaatgatgcatatgagagtgtggatcacagagtggtggtcaactctgagaaggaaaggttttccattcctttcttcttcttccctgcacacgacaccgaagttaagcctttggaggagctgataaatgagcaaaacccttcaaaatataggccatacaagtggggcaagtttcttgtccacagagggaacagcaattttaagaagcaaaatgaggagaacattcaaatttatcattacaagatagcttaaagggtaaattgtgtatgatattatcatgatatgaggcagcgttgatccaagacaacgttactgatatgaataagtccgatcaacttcactgctaaatttcctagtgtgccttatgtattgaacaatcactgaataaaagaactaaattattaccattt

SEQ ID NO: 5614 - protein, 376 aa, Glycine max
  misc_feature (1)..(376): Ceres Seq. ID no. 14310918
ILNKRTAQNLSKYTCCKLLTQSPAMGEVDAAFIQDPPHRPKLSTIQAEGIPIIDLSPITNHRVSDPSAIEGLVKEIGSACNEWGFFQVTNHGVPLTLRQNIEKASKLFFAQSAEEKRKVSRNESSPAGYYDTEHTKNVRDWKEVFDFLAKEPTFIPVTSDEHDDRVNQWTNQSPEYPLNFRVVTQEYIQEMEKLSFKILELIALSLGLEAKRFEEFFIKDQTSFIRLNHYPPCPYPDLALGVGRHKDPGALTILAQDEVGGLEVRRKADQEWIRVKPTPDAYIINIGDTVQVWSNDAYESVDHRVVVNSEKERFSIPFFFFPAHDTEVKPLEELINEQNPSKYRPYKWGKFLVHRGNSNFKKQNEENIQIYHYKIA

SEQ ID NO: 5615 - protein, 352 aa, Glycine max
  misc_feature (1)..(352): Ceres Seq. ID no. 14310919
MGEVDAAFIQDPPHRPKLSTIQAEGIPIIDLSPITNHRVSDPSAIEGLVKEIGSACNEWGFFQVTNHGVPLTLRQNIEKASKLFFAQSAEEKRKVSRNESSPAGYYDTEHTKNVRDWKEVFDFLAKEPTFIPVTSDEHDDRVNQWTNQSPEYPLNFRVVTQEYIQEMEKLSFKILELIALSLGLEAKRFEEFFIKDQTSFIRLNHYPPCPYPDLALGVGRHKDPGALTILAQDEVGGLEVRRKADQEWIRVKPTPDAYIINIGDTVQVWSNDAYESVDHRVVVNSEKERFSIPFFFFPAHDTEVKPLEELINEQNPSKYRPYKWGKFLVHRGNSNFKKQNEENIQIYHYKIA

SEQ ID NO: 5616 - DNA, 1270 bp, Glycine max
  misc_feature (1)..(1270): Ceres Seq. ID no. 14310983
aaagaaactgcgatcttaggtctcctgcaccatgaaaatctggtttcactttatggccgcacttctcgcaattgcaacaaacacatgctagtttacgagtacatctccaatggcactcttactaaacatcttcatgaatcttctggtggtaaactaccatggcataatagattgaatattgccattgaaactgctactgccttggtatttcttcatgaatcaggtatcatccaccgtgatgtaaaagggagtaatattctgttggatgaaaattttactgtcaaagttgcagattttggattctcacggtctcttccagatcatgctactcatgtttcaactattccagtaggaactcgtgcttacatagatcctgactactatgaatctggaagggtcagtgacaaaagtgatgtctatagttttggggttgtcttgttcgaactcatatcatccatccgcccaagtttaatggaaggcacagattatgttactcttgcacagtttgcaaagagaaaaattttaaacaaggaattaaccgctgtagtggatcaaagtttttggcttggtgttgacaaaaacatgatggaaatgataacagcagtggcagagttagcatttcagtgtgtgcagtgtcccaaggaactcagaccatccatgaaacaggtgctagatacccttgagggcataaggaaaggaacatggggattcaaccagataacatagtccttattcatgctaccaacattcctggttctatcaaaccattcatttggtttgtggtctagtaattggattttggcttaacagagatgattttgttctgcagtataggaatttcaggttagccctattgtaggttagaaatttacttgactatttagggtgtgtttgttttagctggattacactttgaggcacgttgaacatggatccttatgtcacttggattcacgttcaacgtggtttaacagcaatacaaacatgctgttacatgatacatgtaaatgcattccatgttctaaatgtataagaaagaccaaaagctggaaaccatctcagaattgcagtacatcacttcaaacattatcctcctcctcctctttaaagtaaaaacatggataattccttagtagagataaagggagttgtcaaatgtcaatattaaaaataaaaggcgtaacccgtcggcagctgttgtacatggataatggactcttcatagtactctgtatagtgtccattgaattaaagagtctaatattctccc

SEQ ID NO: 5617 - protein, 241 aa, Glycine max
  misc_feature (1)..(241): Ceres Seq. ID no. 14310984
KETAILGLLHHENLVSLYGRTSRNCNKHMLVYEYISNGTLTKHLHESSGGKLPWHNRLNIAIETATALVFLHESGIIHRDVKGSNILLDENFTVKVADFGFSRSLPDHATHVSTIPVGTRAYIDPDYYESGRVSDKSDVYSFGVVLFELISSIRPSLMEGTDYVTLAQFAKRKILNKELTAVVDQSFWLGVDKNMMEMITAVAELAFQCVQCPKELRPSMKQVLDTLEGIRKGTWGFNQIT

SEQ ID NO: 5618 - protein, 213 aa, Glycine max
  misc_feature (1)..(213): Ceres Seq. ID no. 14310985
MLVYEYISNGTLTKHLHESSGGKLPWHNRLNIAIETATALVFLHESGIIHRDVKGSNILLDENFTVKVADFGFSRSLPDHATHVSTIPVGTRAYIDPDYYESGRVSDKSDVYSFGVVLFELISSIRPSLMEGTDYVTLAQFAKRKILNKELTAVVDQSFWLGVDKNMMEMITAVAELAFQCVQCPKELRPSMKQVLDTLEGIRKGTWGFNQIT

SEQ ID NO: 5619 - DNA, 1785 bp, Glycine max
  misc_feature (1)..(1785): Ceres Seq. ID no. 14310998
gaacagcacaaggaaacaaaaccaacccttttgagcttgcacaactctgatggtagttgcacaactacttcagactctctctctctgagtgcctcaccacacagattctgtgatataccaatggaggccctcaatgctgctggcttgacccctctatctgtgctctctgatagaacaaaaacaagaactaaacacccttctgtttctgcatgcaaagtctcaaacttttccacctccaccaacaagaaacaagcattgctgcaaagttgcatatcaaaaactttgcatggggggctgattcttgcagcttcggctgttaatggtggagctgccacagccttaacgtacgatgaggcactgggacaacctttgagcctccctggtactggggactttgatgtgaatggctttgtggagagtgtcgctggctttgcagctgagaaccctgcaattgttgccgggggagtggttgttttggcagtgccattggttttgtctcaggttttcaagaagcctaaggcttggggtgttgagtctgctaagaacgcgtatgctaaacttggggctgatgggaatgctcagctgcttgacataagggcactggtggagattaggcaagtggggtccccagatgttgggggtctaaagaagaaagccgtgtcaataccttataagggtgatgataagccagggttcttgaagaagcttgcattgaagtttaaggagccagagaataccacattgtttattcttgacaaatttgatgggaactctgaactggttgcagagttggttaccattaatggatttaaagcagcttatgcaattaaggatggtgcagaaggaccgcgaggatggaagagtagtggtcttccttggatagcaccacggaaaacattgagtttggacaatctgacagatgctatatctgaagcaataggagatacctctgatggtgtggcagttactcttgggattgctgcagctgctgctggacttagtatattagctttttctgagatagaatcaatcctccaagttgtaggatcagctgcgctcattcagtttgcaagcaagaagcttttgtttgctgaggaccgaaagcaaaccgtgaaacaacttgatgagttcttgaacaccaaggttgcccctaaagaacttgttgatgaaataaaggatattggaaaggctcttctaccatcctctaccaataataaggctcttcctgctccagaagagaaaagttcagagcttgctacagctgatagcactgtacagaatgcagtagctactcccgagcccaaagcggatgcagtagctcctgaagtaaactcagtgcccaaaactgaagtgaaggcagaagaatcatttcctgcacaaccaaggccactttcaccatacccatattatccagatttcaagcctccaacatctcctaccccttcacagccctagaccttcacttcttttaatcttgaacataattccatagaaggcaaatcaattgtccaaatatccagcatgtatcaagaggtgtacaatactacaatctataatcctatcagaaaaagtcatgcatcttaatttgcagataagatccgtgacataagttgtataattttaaagtttgttatgattatccatccacttgtgctactgggtacactttttgtaattgatggatgtgttgtagaggtaggtgtcaagttaacattgtagttattttaacatttagtataacattcaatctttcagttttggagtaagcaaataaggtttatgtac

SEQ ID NO: 5620 - protein, 484 aa, Glycine max
  misc_feature (1)..(484): Ceres Seq. ID no. 14310999
EQHKETKPTLLSLHNSDGSCTTTSDSLSLSASPHRFCDIPMEALNAAGLTPLSVLSDRTKTRTKHPSVSACKVSNFSTSTNKKQALLQSCISKTLHGGLILAASAVNGGAATALTYDEALGQPLSLPGTGDFDVNGFVESVAGFAAENPAIVAGGVVVLAVPLVLSQVFKKPKAWGVESAKNAYAKLGADGNAQLLDIRALVEIRQVGSPDVGGLKKKAVSIPYKGDDKPGFLKKLALKFKEPENTTLFILDKFDGNSELVAELVTINGFKAAYAIKDGAEGPRGWKSSGLPWIAPRKTLSLDNLTDAISEAIGDTSDGVAVTLGIAAAAAGLSILAFSEIESILQVVGSAALIQFASKKLLFAEDRKQTVKQLDEFLNTKVAPKELVDEIKDIGKALLPSSTNNKALPAPEEKSSELATADSTVQNAVATPEPKADAVAPEVNSVPKTEVKAEESFPAQPRPLSPYPYYPDFKPPTSPTPSQP

SEQ ID NO: 5621 - protein, 444 aa, Glycine max
  misc_feature (1)..(444): Ceres Seq. ID no. 14311000
MEALNAAGLTPLSVLSDRTKTRTKHPSVSACKVSNFSTSTNKKQALLQSCISKTLHGGLILAASAVNGGAATALTYDEALGQPLSLPGTGDFDVNGFVESVAGFAAENPAIVAGGVVVLAVPLVLSQVFKKPKAWGVESAKNAYAKLGADGNAQLLDIRALVEIRQVGSPDVGGLKKKAVSIPYKGDDKPGFLKKLALKFKEPENTTLFILDKFDGNSELVAELVTINGFKAAYAIKDGAEGPRGWKSSGLPWIAPRKTLSLDNLTDAISEAIGDTSDGVAVTLGIAAAAAGLSILAFSEIESILQVVGSAALIQFASKKLLFAEDRKQTVKQLDEFLNTKVAPKELVDEIKDIGKALLPSSTNNKALPAPEEKSSELATADSTVQNAVATPEPKADAVAPEVNSVPKTEVKAEESFPAQPRPLSPYPYYPDFKPPTSPTPSQP

SEQ ID NO: 5622 - DNA, 1352 bp, Glycine max
  misc_feature (1)..(1352): Ceres Seq. ID no. 14311001
ttttttttagtttttcgatggacccgaagttcatcggaaagccgctggcgatggtggacctggaccgggaccggatgtcggagcgtgggtcccaccaccggcgttcccactccgacacctccttccgcttccctgccaacttcgacgagcttctcctcttcgacccctccgacctcgacatctccggcctcccgtcgccgctccctctgccgtcgcagggcgccggcggcgtggttccgatgtccgtcgtctccgaggagtctggcggacggccgaggccgtccggggcttccgccggcgggcacctgcggagtctgtcggtggattctgacttcttcgatgggctcgggtccggcgtcggcggcgatgagagaggtgccgggaatggcggcggcgagcggcacagcaactcgatggaggggtcgtcgacgacgtcgtttgaggcggactcggcgacgatgatggatggcatgaagaaagctacggcccctgataaacttgctgagcttgctcttacggatcccaaaatagctaagaggatgcttgctaacaggcaatctgctgcaagatctaaggagaggaagattcgttacacaagtgagttggagaagaaggtgcagactcttcagactgaagcaactaacctttctgcacagcttaccatgcttcagagagacactacagatttgactgcacagaataaggagctcaaactgcgcttacaggcttttgagcaagaagcacagcttagagaagatctcaatgaggcattgaagaaagaactgcagcgccttagggtacaaagtgcttgctggggtgctatgactggtggtaacccttcttttggtgggatattcaaccagttggcttcccagttagccatgcaacagttgtctaattctgtgccccatcagcaccagacacaacaccagccacaggttggcatgcctcctcccccctctggacagaagcaccctaagttcatggacttcaatcagcagaagtagctaataatagttgtagcagtaaatgattgattacatgcaatattcatcacaagtaacatcctgtgcatatgaatgtataactaactggtgagacttgtgaaggatatattgtgcagttcagtgtctttagtcatgtgttgtttatctttagttctaggatatgtgtactttctgcagttctaggtgagaagcatagcctttgaaatgtaagcgtcatagctcttgggtgaatgagggtaacataaaggtgtagaaagactagttgataatagtatagatggtgaatgaagtttattaactagcttctggacttaaatagcatgctatatatgttaaaagttaaag

SEQ ID NO: 5623 - protein, 334 aa, Glycine max
  misc_feature (1)..(334): Ceres Seq. ID no. 14311002
FFSFSMDPKFIGKPLAMVDLDRDRMSERGSHHRRSHSDTSFRFPANFDELLLFDPSDLDISGLPSPLPLPSQGAGGVVPMSVVSEESGGRPRPSGASAGGHLRSLSVDSDFFDGLGSGVGGDERGAGNGGGERHSNSMEGSSTTSFEADSATMMDGMKKATAPDKLAELALTDPKIAKRMLANRQSAARSKERKIRYTSELEKKVQTLQTEATNLSAQLTMLQRDTTDLTAQNKELKLRLQAFEQEAQLREDLNEALKKELQRLRVQSACWGAMTGGNPSFGGIFNQLASQLAMQQLSNSVPHQHQTQHQPQVGMPPPPSGQKHPKFMDFNQQK

SEQ ID NO: 5624 - protein, 329 aa, Glycine max
  misc_feature (1)..(329): Ceres Seq. ID no. 14311003
MDPKFIGKPLAMVDLDRDRMSERGSHHRRSHSDTSFRFPANFDELLLFDPSDLDISGLPSPLPLPSQGAGGVVPMSVVSEESGGRPRPSGASAGGHLRSLSVDSDFFDGLGSGVGGDERGAGNGGGERHSNSMEGSSTTSFEADSATMMDGMKKATAPDKLAELALTDPKIAKRMLANRQSAARSKERKIRYTSELEKKVQTLQTEATNLSAQLTMLQRDTTDLTAQNKELKLRLQAFEQEAQLREDLNEALKKELQRLRVQSACWGAMTGGNPSFGGIFNQLASQLAMQQLSNSVPHQHQTQHQPQVGMPPPPSGQKHPKFMDFNQQK

SEQ ID NO: 5625 - protein, 318 aa, Glycine max
  misc_feature (1)..(318): Ceres Seq. ID no. 14311004
MVDLDRDRMSERGSHHRRSHSDTSFRFPANFDELLLFDPSDLDISGLPSPLPLPSQGAGGVVPMSVVSEESGGRPRPSGASAGGHLRSLSVDSDFFDGLGSGVGGDERGAGNGGGERHSNSMEGSSTTSFEADSATMMDGMKKATAPDKLAELALTDPKIAKRMLANRQSAARSKERKIRYTSELEKKVQTLQTEATNLSAQLTMLQRDTTDLTAQNKELKLRLQAFEQEAQLREDLNEALKKELQRLRVQSACWGAMTGGNPSFGGIFNQLASQLAMQQLSNSVPHQHQTQHQPQVGMPPPPSGQKHPKFMDFNQQK

SEQ ID NO: 5626 - DNA, 1277 bp, Glycine max
  misc_feature (1)..(1277): Ceres Seq. ID no. 14311040
acgtgtgaatcaggttcatgatagggaagaaactgagacagaaccagaagggaataaagaaaaggagggaaaggttcgggataatgaagaactcgtggaagaaagagaaagaaaaacagtgacagaagcacaatctcaagagaataaagctgaggaggataagtttcaagatgatagtgaagaactcgtggtggaaacagaaacagaaacagaagttcagtgtgaagagaataaagaggagggtaaggttcgggatagtgaagaacatgtggaggaaatggaaacagaaacaggagcagaagcgcaacctgaagagaagaaagatgagggtaaggttcgggacagtgaaaaactcgtggaggaaacgcaaacggaaacagaaggacaatctgaagagaagaaagatgaggagggaaaggtggctgtgatgagtagttctgtgagtgagacctatgattcggattctgtggctgtatcgatgaagaaaaggaaggataagaagaagaaggttacttccgcaaggaaatctttgtcgttacaacaagagcataagaataagcattataagactagagggaaagttgccaacgaggaggaagttaccagcttcaaaactacgagtttggggcagcaaccacagagaatgaagcagagttcactggctgcaaagcgtaagagattactttggacagcagaagaagaaaaagttctcaaggaaggagtatcaaagttctccacagaaaatcagaatatcccttggaggaaaattttggaatttggctgtcgtgtatttgatgagactcgtactcctgttgatctcaaggataaatggaagaacattatctccaagaaaagtagaagtactgattgtagttatacttttgatttataagaagtgatatttaggcaacacccccttacaccacgtttgttgactttgatgtctatttcgtccaagaggtcctctgcttcaaacacagcatctttgacatcatctagccaagctttcagatatcgatttctgattttgttctgcttcatcaaccacagcattggtggacacttgcttgatgttcaacatctgcagcagcgtctcgtagttttcttcctcgaaaaaagtccagaacaagattttgtgcatatttttagacaattttgtggatggtgtgcatatattatgtgttgacacatttatttgttatttaaaggcttcaaaatgttggaataatgctttttttattatatgttgattataaagtttttttatgaacattatt

SEQ ID NO: 5627 - protein, 296 aa, Glycine max
  misc_feature (1)..(296): Ceres Seq. ID no. 14311041
RVNQVHDREETETEPEGNKEKEGKVRDNEELVEERERKTVTEAQSQENKAEEDKFQDDSEELVVETETETEVQCEENKEEGKVRDSEEHVEEMETETGAEAQPEEKKDEGKVRDSEKLVEETQTETEGQSEEKKDEEGKVAVMSSSVSETYDSDSVAVSMKKRKDKKKKVTSARKSLSLQQEHKNKHYKTRGKVANEEEVTSFKTTSLGQQPQRMKQSSLAAKRKRLLWTAEEEKVLKEGVSKFSTENQNIPWRKILEFGCRVFDETRTPVDLKDKWKNIISKKSRSTDCSYTFDL

SEQ ID NO: 5628 - protein, 204 aa, Glycine max
  misc_feature (1)..(204): Ceres Seq. ID no. 14311042
METETGAEAQPEEKKDEGKVRDSEKLVEETQTETEGQSEEKKDEEGKVAVMSSSVSETYDSDSVAVSMKKRKDKKKKVTSARKSLSLQQEHKNKHYKTRGKVANEEEVTSFKTTSLGQQPQRMKQSSLAAKRKRLLWTAEEEKVLKEGVSKFSTENQNIPWRKILEFGCRVFDETRTPVDLKDKWKNIISKKSRSTDCSYTFDL

SEQ ID NO: 5629 - protein, 154 aa, Glycine max
  misc_feature (1)..(154): Ceres Seq. ID no. 14311043
MSSSVSETYDSDSVAVSMKKRKDKKKKVTSARKSLSLQQEHKNKHYKTRGKVANEEEVTSFKTTSLGQQPQRMKQSSLAAKRKRLLWTAEEEKVLKEGVSKFSTENQNIPWRKILEFGCRVFDETRTPVDLKDKWKNIISKKSRSTDCSYTFDL

SEQ ID NO: 5630 - DNA, 1718 bp, Glycine max
  misc_feature (1)..(1718): Ceres Seq. ID no. 14311074
actactactacattagtgaagaccatttttcaattagtctcctctctctctctctctctctcacacacacactttggccttaacagaaccgaacacaacacgagagagatagagatacaacagaagaacaaactccgacatctctcgctttctctactttgccctgtttttattcggaagcaagcaaggcttaaatatatagatccctctttcccgtgtttttccttggatgaatctcaatctgaatggtataaggaataaaaaattcatcgtcataatcaggtatggaagttgggagcgtggtgttagtatggtggtggattagtctgatcccgaggattttatcagatccaagcgacgaagcatgcctgacgaacctaagcaagtccttggaagacccaaacaaactgctccataactggaaggaagagaacttcgccaagccctgcaacgactcctcctcgaatctccgaggcgcaatctgcaacaacggacgcatctacaagctctccctcaacaacctctctctccgcggcaccatatcccctttcctctcaaactgtaccaatctccaaaccctagacctctcctccaacttcctcacaggcccaatccccccagaactacagtccctggtcaacctcgccgttctgaacctctcttcgaacagtctccaaggggtgatccccccggtgctcacaatgtgcgcctacctcaacatcatcgacctccacgataatttgcttactgggcccatccctcagcaattgggcctgctcgttcgcctctccgctttcgatgtgtccaataaccgcctctcagggcccatcccggcttcgctttccaaccggagcgggaacttgcccagattcaacgccagctcattcctagagaataaggatctctacggttacccgttgccgccgcttaggaatagagggttgtccgttttggccattgttgggatcggcttgggaagtggccttgctagcttggtgcttagcttcaccggggtttgtatttggttgaaatttaccgagcgcaagatggcgctcgaggaaggcaaaatcagccaccttatgcctgattattgaatattgaaacaacaccttttaatcaccaattactacaatagtttcaaattattccaattccaagctagtactagtatctttcattattcaacttgattgatcggatcgctgatgcttcttcacctcagaaaaaaaaaaaaaatagtacccgtaccaggagggtagggtaggttagtgggtgcggtgctgctactgctacatgaagtcttgaagatgcgctgcgccgttgaactgctaaaatatatactacaaactcatcaaacagctggtgccatctttctaatctgcacaagagtcacattatcggaaggagccgctgggggacaccaacggtactacacagccacatggattgggacttgttgttgttctactcttgttcacttgttagtccaacgtcaactagtcaaccctctttatttactatatgtaaccctccctacttagcttaggattaggatcactatttttagatcatgcaaaacttactaacttagtatattagattattttattttaatttgaatctgaataaaatattcagatgatgaattttgtcattgtttctactctaatgagattatatttaacaatgggtaattaaatgatagtattattatactt

SEQ ID NO: 5631 - protein, 269 aa, Glycine max
  misc_feature (1)..(269): Ceres Seq. ID no. 14311075
MEVGSVVLVWWWISLIPRILSDPSDEACLTNLSKSLEDPNKLLHNWKEENFAKPCNDSSSNLRGAICNNGRIYKLSLNNLSLRGTISPFLSNCTNLQTLDLSSNFLTGPIPPELQSLVNLAVLNLSSNSLQGVIPPVLTMCAYLNIIDLHDNLLTGPIPQQLGLLVRLSAFDVSNNRLSGPIPASLSNRSGNLPRFNASSFLENKDLYGYPLPPLRNRGLSVLAIVGIGLGSGLASLVLSFTGVCIWLKFTERKMALEEGKISHLMPDY

SEQ ID NO: 5632 - DNA, 1393 bp, Glycine max
  misc_feature (1)..(1393): Ceres Seq. ID no. 14311088
acattactcaactcatcctttctggttctggttcaacacagcacaccatttctaatgctgtaaaatttgtaccatgcagcaaggggctctgcttctgcttttgtgcttggtctctctgttccccctcactcactatgcctgactttcttgccacaaacccacttaccttttcagctgcagaatctccaagattccccttcctcaattcacgcccaactcttacaccaagaacccaactcaacccaaattcccgtgtcctcttttctcccaaaccatccaaaaccagttgcaataacaagagtgtctctttggcactgagctccaggtcgaatgaagggccatcaaggggttatggcttttacaacgagcttgagtttgaggacagaaatgaggaaactttggggttggagataaaccctgttgttgctgaggattcccagagtgaaactgagtctctcccatttgatggggtggaaggtgatgataattataagggagaggatgatttggttcgggttcagggggatgcagatggagatggggatggtttgaagaaagattatgatgatgacgatgatcaaggtgagaatgagaaatttggaggtaaacttagagtcagaagaggtaaacaggtaattagaaggtcgaatttgttggccaagcaagtgatcagtattcgctctgcgcttagcttggggttcgtttcacagctttgggtggacacttcctcttggatggtgttgtttgtggaggttagaccaaacttgctctctggggattcagagaaattccttctggaggacattagtcagattggagatgttgtccttgtccaggatgaaagtgtgatagacaatgaatttaaaatggttggattggagacactggttggatacaaagttgtaacaccctctcgaaggaatattggaaaggtgcgagggtacactttcagtatcaattcaggtgctgttgaagaacttgaacttgattcatttggactatccattattccatcaagtttggtgagtacctacgctttgctggttgaggacgtgctggaagtagtatttgacgcagttgttgtgcatgaagctgcagctttacgaattcaaaggctttctaaggggtttttgggcaaccagaatgtgagaatttcagtggatgattttgaagatttagactctgaacaatctgatacatacggtcctatttcaatgagaagaaaaagtaccggaggaaagaaacctaatcaaagagattgggatgatgaagataattgggagcttccgatggactatccttgattctaatggattttctactaaatttcatgtaaaacacatttttgtttattaaaaataatgaaaatttgaataaacctattaaatacacc

SEQ ID NO: 5633 - protein, 433 aa, Glycine max
  misc_feature (1)..(433): Ceres Seq. ID no. 14311089
ITQLILSGSGSTQHTISNAVKFVPCSKGLCFCFCAWSLCSPSLTMPDFLATNPLTFSAAESPRFPFLNSRPTLTPRTQLNPNSRVLFSPKPSKTSCNNKSVSLALSSRSNEGPSRGYGFYNELEFEDRNEETLGLEINPVVAEDSQSETESLPFDGVEGDDNYKGEDDLVRVQGDADGDGDGLKKDYDDDDDQGENEKFGGKLRVRRGKQVIRRSNLLAKQVISIRSALSLGFVSQLWVDTSSWMVLFVEVRPNLLSGDSEKFLLEDISQIGDVVLVQDESVIDNEFKMVGLETLVGYKVVTPSRRNIGKVRGYTFSINSGAVEELELDSFGLSIIPSSLVSTYALLVEDVLEVVFDAVVVHEAAALRIQRLSKGFLGNQNVRISVDDFEDLDSEQSDTYGPISMRRKSTGGKKPNQRDWDDEDNWELPMDYP

SEQ ID NO: 5634 - protein, 389 aa, Glycine max
  misc_feature (1)..(389): Ceres Seq. ID no. 14311090
MPDFLATNPLTFSAAESPRFPFLNSRPTLTPRTQLNPNSRVLFSPKPSKTSCNNKSVSLALSSRSNEGPSRGYGFYNELEFEDRNEETLGLEINPVVAEDSQSETESLPFDGVEGDDNYKGEDDLVRVQGDADGDGDGLKKDYDDDDDQGENEKFGGKLRVRRGKQVIRRSNLLAKQVISIRSALSLGFVSQLWVDTSSWMVLFVEVRPNLLSGDSEKFLLEDISQIGDVVLVQDESVIDNEFKMVGLETLVGYKVVTPSRRNIGKVRGYTFSINSGAVEELELDSFGLSIIPSSLVSTYALLVEDVLEVVFDAVVVHEAAALRIQRLSKGFLGNQNVRISVDDFEDLDSEQSDTYGPISMRRKSTGGKKPNQRDWDDEDNWELPMDYP

SEQ ID NO: 5635 - DNA, 1683 bp, Glycine max
  misc_feature (1)..(1683): Ceres Seq. ID no. 14311103
gaacaatccatccttgaacgtgcctttagatctgcaaacttcagcttagagcaaaacaataaataaaaaatccaccttttctatcaacctctagctatatccatttttatccaaatgacagaaaaactttccaacaatccatccttgaacgtgcctttactatccgagtggaatcaccatgatgaggagaaagccatagcctctcatccttctaccaaaaatactgtgtccttctttcgcacatgccttaatggactcaatgcaatatcaggtgttggaatactgtcagttccatatgctcttgcatctggagggtggttaagcttggttcttctatttgctattgccgctgcagcattttacacaggcacgttgattaaaagatgtatggacaagaattcgaacattaaaacctacccagatataggtgagcttgcatttggaaagataggaaggctaataatatcagtgtccatgtacacggagctctacttggtttcaatagggttcttgattctggaaggcgataacttgaataacttgtgccccattgaagaggttcagatagctggcttcgtaattggtgggaagcaactgtttgtgatattggttgcccttatcatcttgcccacagtttggttggacaacttgagtatgctttcttatgtatctgcaagtggagtgtttgcttctgctgtaatcatcctatcaatatcatggactggaacatttgatggagttggttttcatcaaaagggaactcttgttaattggcgcggaatccccacagctgttagcttgtatgccttttgctattgtgcacatcccgtcttccccaccttgtacaattccatgactaacaaacatcagttctctaatgtcctattagtatgctttctgttaaccactgtgggttatgcatccatggctataattggttatctaatgtttggtgctgacgttgaatcacaagtaacattaaacctgccactgaacaaagtaagctcaaaattagcaatatatacaaccttggtcaatcccatatccaagttcgctttgatggcaacaccaattaccaatgcgttgaaagatttacttccaagggcgtacaagaatagagcgaccaacatcttagtcagcactgtcttggtaataagcgctaccattgttgccctcagtgttcctttctttggggatctcatgtctctggttggagcgtttttaagtgtcacagcttctattctgcttccatgcttgtgttacttgaagatttcaggcacttacaatgaatttgggtgtgagaccatagccatagtgacaataatagtagcagctatagcaatgggaatatctggaacatatacctctgtcatggaaatagtacatcatttgtaatagacaatgcagtggtccattctattgactgtaaatttcctcaaaaaaggatttttttttttctttcactcatgtgactgtatgtcttacgaggaaaaggagaggtaaatactgatgaagaagtaagatatggttggtgaaaaagaggaaaaggaaaatatatgatacagatcatatatgctatcctatatctagagagagaaagaaaaagagagaaagaaaaagagagaaaaatataaatattataaaatttatgatgtaataaaaaaatattgatgatgtgtttat

SEQ ID NO: 5636 - protein, 426 aa, Glycine max
  misc_feature (1)..(426): Ceres Seq. ID no. 14311104
MTEKLSNNPSLNVPLLSEWNHHDEEKAIASHPSTKNTVSFFRTCLNGLNAISGVGILSVPYALASGGWLSLVLLFAIAAAAFYTGTLIKRCMDKNSNIKTYPDIGELAFGKIGRLIISVSMYTELYLVSIGFLILEGDNLNNLCPIEEVQIAGFVIGGKQLFVILVALIILPTVWLDNLSMLSYVSASGVFASAVIILSISWTGTFDGVGFHQKGTLVNWRGIPTAVSLYAFCYCAHPVFPTLYNSMTNKHQFSNVLLVCFLLTTVGYASMAIIGYLMFGADVESQVTLNLPLNKVSSKLAIYTTLVNPISKFALMATPITNALKDLLPRAYKNRATNILVSTVLVISATIVALSVPFFGDLMSLVGAFLSVTASILLPCLCYLKISGTYNEFGCETIAIVTIIVAAIAMGISGTYTSVMEIVHHL

SEQ ID NO: 5637 - protein, 335 aa, Glycine max
  misc_feature (1)..(335): Ceres Seq. ID no. 14311105
MDKNSNIKTYPDIGELAFGKIGRLIISVSMYTELYLVSIGFLILEGDNLNNLCPIEEVQIAGFVIGGKQLFVILVALIILPTVWLDNLSMLSYVSASGVFASAVIILSISWTGTFDGVGFHQKGTLVNWRGIPTAVSLYAFCYCAHPVFPTLYNSMTNKHQFSNVLLVCFLLTTVGYASMAIIGYLMFGADVESQVTLNLPLNKVSSKLAIYTTLVNPISKFALMATPITNALKDLLPRAYKNRATNILVSTVLVISATIVALSVPFFGDLMSLVGAFLSVTASILLPCLCYLKISGTYNEFGCETIAIVTIIVAAIAMGISGTYTSVMEIVHHL

SEQ ID NO: 5638 - protein, 306 aa, Glycine max
  misc_feature (1)..(306): Ceres Seq. ID no. 14311106
MYTELYLVSIGFLILEGDNLNNLCPIEEVQIAGFVIGGKQLFVILVALIILPTVWLDNLSMLSYVSASGVFASAVIILSISWTGTFDGVGFHQKGTLVNWRGIPTAVSLYAFCYCAHPVFPTLYNSMTNKHQFSNVLLVCFLLTTVGYASMAIIGYLMFGADVESQVTLNLPLNKVSSKLAIYTTLVNPISKFALMATPITNALKDLLPRAYKNRATNILVSTVLVISATIVALSVPFFGDLMSLVGAFLSVTASILLPCLCYLKISGTYNEFGCETIAIVTIIVAAIAMGISGTYTSVMEIVHHL

SEQ ID NO: 5639 - DNA, 1576 bp, Glycine max
  misc_feature (1)..(1576): Ceres Seq. ID no. 14311148
ttttattcttaaaccagcaacttctatatggaagggtcacaagattcaggatgatagaagttctcaatggtcaaggatgaaacatagaaataaaacatcaaaactaagactcaacagacggaagactgctttaattaatgaccagtattcaattttggtttcatgtcgatgcaattatactgcatcaaggttgttctttaagcaaccaaccagttggcgaccacgtagctcaagggatattatgatctcggttgtgtcagagatgtcaggacagtctcttgctgcttatggaaaaacttgccaacttcccatacagatattaactcttcaagcttcaaatttgacctctgaggatctaactttgactgtgcttgctccagcctcatttacttcacccctttcagtagtctccttgaattcaccaacgactccaatgagtccttttttaggtttctcagagttattagtaagagtaaatggtgaaagaggaattggtgccacccagcgacaaagtttcactcttggtgtaaaagataatgagaaacaaagttatgatggcaaagcccaggctgtttctacgagtgatgatgtcattcctggttctgatcttagttgtacacatctatggctgcagagtagaattccacttggatgtattccatctcaatccattgccactataaagcttgagctacttccattgactgatggcataattgttctggacactttgcaaattgatgtcaaggaaaaaggtatagattgctgtacttttggaccatttttttcctcttaattccatgtttaagcatctatatagagaatatttggtcaatacaaattaatgagaagatgaactgctggtttaagatctgttacttgtatgattgtcattgttattttgaagtatcgcccattcacataacaataaggtcttctgttggcttcccttagctgtgagtgtgacattctgtaacaagtgcccatttttgtcttgatccatttcatattaatagttttgctgcctagatctagtcatttgtttcacttgagaagagaagtgaatattattgagtgttttgcaatacaagcactaatccctatttataagctaaacgggatgagataaggaaaggctaaccattaggcctgaaagaagagtcagcggctacttgctatgtgctggcgagtggttggcacaggaatggtatgtggctttcacgtgttgggaagaagcatgtgtagtggtggtggtggaaggcaacgtgaatttggggacaagccaatctggagatgacaccccatccggtatggtcacactggtcaaattggcaactgagtggtgacaggcagtggtggacggcagcaagagcggagcccttgaaattgagagttctgatacctacttgaaatttgaaaagagaaaaaactgaatattatcgagtgtgttttgcaatacaagcactaatgtctatttataggctagacatattatgagaaagagggaaaataggaaaacaaaactatcctaaaaattacaaatatattcttaatatatacagggagattctattgg

SEQ ID NO: 5640 - protein, 264 aa, Glycine max
  misc_feature (1)..(264): Ceres Seq. ID no. 14311149
FILKPATSIWKGHKIQDDRSSQWSRMKHRNKTSKLRLNRRKTALINDQYSILVSCRCNYTASRLFFKQPTSWRPRSSRDIMISVVSEMSGQSLAAYGKTCQLPIQILTLQASNLTSEDLTLTVLAPASFTSPLSVVSLNSPTTPMSPFLGFSELLVRVNGERGIGATQRQSFTLGVKDNEKQSYDGKAQAVSTSDDVIPGSDLSCTHLWLQSRIPLGCIPSQSIATIKLELLPLTDGIIVLDTLQIDVKEKGIDCCTFGPFFSS

SEQ ID NO: 5641 - protein, 239 aa, Glycine max
  misc_feature (1)..(239): Ceres Seq. ID no. 14311150
MKHRNKTSKLRLNRRKTALINDQYSILVSCRCNYTASRLFFKQPTSWRPRSSRDIMISVVSEMSGQSLAAYGKTCQLPIQILTLQASNLTSEDLTLTVLAPASFTSPLSVVSLNSPTTPMSPFLGFSELLVRVNGERGIGATQRQSFTLGVKDNEKQSYDGKAQAVSTSDDVIPGSDLSCTHLWLQSRIPLGCIPSQSIATIKLELLPLTDGIIVLDTLQIDVKEKGIDCCTFGPFFSS

SEQ ID NO: 5642 - protein, 184 aa, Glycine max
  misc_feature (1)..(184): Ceres Seq. ID no. 14311151
MISVVSEMSGQSLAAYGKTCQLPIQILTLQASNLTSEDLTLTVLAPASFTSPLSVVSLNSPTTPMSPFLGFSELLVRVNGERGIGATQRQSFTLGVKDNEKQSYDGKAQAVSTSDDVIPGSDLSCTHLWLQSRIPLGCIPSQSIATIKLELLPLTDGIIVLDTLQIDVKEKGIDCCTFGPFFSS

SEQ ID NO: 5643 - DNA, 1404 bp, Glycine max
  misc_feature (1)..(1404): Ceres Seq. ID no. 14311152
tatctacttatcgtctaagctcagtgatcacaacctacgccgagtgaaaccccaatcccaatacactcccaactcacaaagccatgtctccaggtcctgttgtcgacgcttcccctgaggttgaagcagagcaacaacttccctccgtcgatgacgcaacccagttgaagaaatcccaaccgcaggaggatgatgctcccgttgtcgaggacgtgagggatgatgacaaggacgacgacgatgaggacgacgacgacgatgatgaagatgacaaggaagacgatgctctaggtcctcttctctttcactaagtttcctcttaacctaatagaatccttatttggtacttttcatgttatcgttagtaaaccctatggttctaattgattatttggtttccacgtgcttgtgcataattctagggtttgggttgagttctgtatttacccgtgagacctaactcacgttagattggattttattctaattatcatattatcatacttgagcgatcttaacaaggtctctaatcatagagaaatggtagttgtttgctaacagtaacgtgtaatgttcaactgcttcatctttttgctgttatttgtatgtatttatttgtgcattggctgttattctttgattattgttgttatttgtttaagtataaaaaaattgttttcatgtggggctagaggtaacctttagaccttaattaacaatggctgtcctggagatgccttgattctgtgcggggcatagtaggaaacaaaaggaattataaaggggcttggcataacccttaattagttgtcacttgattgattggaatttatgtgttggtgtttgaaaagcaaatctgagctatgctcaacttttatctgttgctaatgtccaaactttcggaatgcatatgattggttacataaccattcaatgtttatctgagaattttaacaaaggtgacttgggcataatgtgtgtcttgctaaaaaatgatgttacattagaaaaagaagaaattagtaacatatttgattagtttgcattaattttcatggtaaatattaacccaagcataacattttggacaacgtaaaatagatgttctatcttactatatcctaagttggtccctgctctgagtcccaaagattgactgctagttttttttaacattctgacaattttatccccttcagcttcacatttatgagtagatggttcgatctttgttttatctttagtttacaatacttatcaacacatcaactaggtgagcacctcatcaaatctgcagcacctcaatttgaagagggatggccctttttagagatctgcagagcactgcttctgatcactgagctcttataccaccattataatttttgtgattatttttcttga

SEQ ID NO: 5644 - protein, 75 aa, Glycine max
  misc_feature (1)..(75): Ceres Seq. ID no. 14311153
MSPGPVVDASPEVEAEQQLPSVDDATQLKKSQPQEDDAPVVEDVRDDDKDDDDEDDDDDDEDDKEDDALGPLLFH

SEQ ID NO: 5645 - protein, 64 aa, Glycine max
  misc_feature (1)..(64): Ceres Seq. ID no. 14311154
MSRWFDLCFIFSLQYLSTHQLGEHLIKSAAPQFEEGWPFLEICRALLLITELLYHHYNFCDYFS

SEQ ID NO: 5646 - protein, 44 aa, Glycine max
  misc_feature (1)..(44): Ceres Seq. ID no. 14311155
MHMIGYITIQCLSENFNKGDLGIMCVLLKNDVTLEKEEISNIFD

SEQ ID NO: 5647 - DNA, 1657 bp, Glycine max
  misc_feature (1)..(1657): Ceres Seq. ID no. 14311203
gagaaatggaagcaccatgggccacaacaagttcaagcatagtttttgtgatagtgatacttgctctaacatcatgggcatggaggatgttgaattggctatggataaggccaaagaggctagagaggctcctaagggaacaaggccttcaaggaaacccctacaggatattggttggggacttaaaggagattgtgaagttgcaaatggaagcaagatccaaacccatgaatctctcccatgatattgtgccacgtgtgtttgcacatctgcatcagagtgtcctcaaacatggcaagaattcttttatttggtttggaccaaaaccaagggtgaccctcacagatcctgagctgatcaaagatgtacttaacaagatcagtgatttccgaaagcctgaagcaaatccacttgccaaattactagctactggtcttgtaaactatgatggagaaaaatggaacaagcacagaagattaattaatcctgcattcagtttagaaaaattgaagattatgttaccaatattcttcaaaagttgcaatgatctaattatcaagtgggagggaatgttgtcttatgatggatcatgtgaaatggatgtttggcctttccttcaaaatttagctagtgatgttattgcgagaacagcatttggaagtagttttgaagaaggaaaaagaatatttcaacttcaaaaagagctagcggaacttacaatgaaagttatcatgaaagtttacatccctggatggagatttgtacctactgcaaccaatcggagaatgaaggaaattgatagatatataaaagcttcacttacagacatgattaagaagagagagaaagcaccaaagacaggtgaagctactagggatgacttgttaggtatacttctggagtcaaatcacaaggaaatacaagaacacagaaacaatgagaatgttggaatgaatctcaatgatgtaatcgaggaatgcaagttattctactttgcagggcaagagaccacttcagttttacttgtttggacaatggtgttgttaagtaggtaccctgattggcaatcacgtgcaagggaggaagtcttacaagtctttggcaaacaagcaccaaattttgatgggctaagtcaccttaagattgtcaccatgattttgtatgaggttcttagattatacccaccaggaattggccttactagaagtgttcacagagatatgaaactgggaaacctaacattacctgctggagtgcaagtttccttaccaataattatggttcaccatgaccgtgaactctggggtgatgatgcaaaagagttcaatcctgagagattttcagaaggggtttcaaaagcgacaaatggcagagtttcattttttccatttggatggggtcctagaatatgcatcggacaaaacttttccttgttggaggcaaagatggctttgtcgatgatcttacagcatttctcatttgaactttctccagcttatactcatgctccgtttacagtgattactcttcagccccaatatggcgctcatgtcattttacgtaaagttgaaatgtaaaatataataataacccttattttgatttgcatttcgcactgcaaagtttataatgcaataatagtagaagactaattgtc

SEQ ID NO: 5648 - protein, 524 aa, Glycine max
  misc_feature (1)..(524): Ceres Seq. ID no. 14311204
EMEAPWATTSSSIVFVIVILALTSWAWRMLNWLWIRPKRLERLLREQGLQGNPYRILVGDLKEIVKLQMEARSKPMNLSHDIVPRVFAHLHQSVLKHGKNSFIWFGPKPRVTLTDPELIKDVLNKISDFRKPEANPLAKLLATGLVNYDGEKWNKHRRLINPAFSLEKLKIMLPIFFKSCNDLIIKWEGMLSYDGSCEMDVWPFLQNLASDVIARTAFGSSFEEGKRIFQLQKELAELTMKVIMKVYIPGWRFVPTATNRRMKEIDRYIKASLTDMIKKREKAPKTGEATRDDLLGILLESNHKEIQEHRNNENVGMNLNDVIEECKLFYFAGQETTSVLLVWTMVLLSRYPDWQSRAREEVLQVFGKQAPNFDGLSHLKIVTMILYEVLRLYPPGIGLTRSVHRDMKLGNLTLPAGVQVSLPIIMVHHDRELWGDDAKEFNPERFSEGVSKATNGRVSFFPFGWGPRICIGQNFSLLEAKMALSMILQHFSFELSPAYTHAPFTVITLQPQYGAHVILRKVEM

SEQ ID NO: 5649 - protein, 523 aa, Glycine max
  misc_feature (1)..(523): Ceres Seq. ID no. 14311205
MEAPWATTSSSIVFVIVILALTSWAWRMLNWLWIRPKRLERLLREQGLQGNPYRILVGDLKEIVKLQMEARSKPMNLSHDIVPRVFAHLHQSVLKHGKNSFIWFGPKPRVTLTDPELIKDVLNKISDFRKPEANPLAKLLATGLVNYDGEKWNKHRRLINPAFSLEKLKIMLPIFFKSCNDLIIKWEGMLSYDGSCEMDVWPFLQNLASDVIARTAFGSSFEEGKRIFQLQKELAELTMKVIMKVYIPGWRFVPTATNRRMKEIDRYIKASLTDMIKKREKAPKTGEATRDDLLGILLESNHKEIQEHRNNENVGMNLNDVIEECKLFYFAGQETTSVLLVWTMVLLSRYPDWQSRAREEVLQVFGKQAPNFDGLSHLKIVTMILYEVLRLYPPGIGLTRSVHRDMKLGNLTLPAGVQVSLPIIMVHHDRELWGDDAKEFNPERFSEGVSKATNGRVSFFPFGWGPRICIGQNFSLLEAKMALSMILQHFSFELSPAYTHAPFTVITLQPQYGAHVILRKVEM

SEQ ID NO: 5650 - protein, 496 aa, Glycine max
  misc_feature (1)..(496): Ceres Seq. ID no. 14311206
MLNWLWIRPKRLERLLREQGLQGNPYRILVGDLKEIVKLQMEARSKPMNLSHDIVPRVFAHLHQSVLKHGKNSFIWFGPKPRVTLTDPELIKDVLNKISDFRKPEANPLAKLLATGLVNYDGEKWNKHRRLINPAFSLEKLKIMLPIFFKSCNDLIIKWEGMLSYDGSCEMDVWPFLQNLASDVIARTAFGSSFEEGKRIFQLQKELAELTMKVIMKVYIPGWRFVPTATNRRMKEIDRYIKASLTDMIKKREKAPKTGEATRDDLLGILLESNHKEIQEHRNNENVGMNLNDVIEECKLFYFAGQETTSVLLVWTMVLLSRYPDWQSRAREEVLQVFGKQAPNFDGLSHLKIVTMILYEVLRLYPPGIGLTRSVHRDMKLGNLTLPAGVQVSLPIIMVHHDRELWGDDAKEFNPERFSEGVSKATNGRVSFFPFGWGPRICIGQNFSLLEAKMALSMILQHFSFELSPAYTHAPFTVITLQPQYGAHVILRKVEM

SEQ ID NO: 5651 - DNA, 1237 bp, Glycine max
  misc_feature (1)..(1237): Ceres Seq. ID no. 14311207
gaaattctccaaggaatctctctctctctctctctttctttccctttttcactttctcattcattcttattagtatttctatttcacttcaccaacccactccaccgtttcccctttccttccatgctattatggcttcatcttccatcaaacacactcaccaccttaaccgcacaaaactcttcatgaaagaagaaacccttttgaaaaagaagcatcactatcccaaaatcatacgaatacgtgtcaccgacgccgacgctaccgactcctccagcgacgacgacgagccctccatgtcctccacgcgccgcagagtaaaaaacttcgtcaacgaaattaccatccaaggcggcggcggtggtggtggcgacgttaacgttgtttctaagaaaagaagattcaagtccggtgccggagctccgttatgtcggcggaagacgggggcgaagaagttccggggagtgaggcagcggccatgggggaagtgggcggcggagataagagacccgtcgcgccgcgtccggctgtggctgggaacctacgacaccgccgaggaagctgccattgtgtacgacaacgcggccattcagctgcgtggcgccgacgcgctcaccaatttcataacgccgccgccggagaacagaaaaaccggttactgctccggcgaggagtctcgcaacaacgacgacttgcgttcccccacttcggttcttgggcgctgttcggtgtccgaggaagctgtaactgcaaacgacgtatttggaggctctagtgagtgcgagtattcatgcgtttcggagtcagtgtttcctattcctaacgaggtggtgtttgactttgaaagcacgttagatatgtttgatgaagggattaataatgttgtggcagagactagtatattcttggcggaggatttagatttgggttttacgagttggcatagagagtgtgataatttccaagacattgggggggatttgtttgtttgggatcctcttgtcgctctttgattgagacacagacaccattctctcgtctttgtaattctattgccaacgaaaatgggttgctatcagttttgtttcttttgggggtttaggcaaaaaccttgtgtctaaggagaggttttctaattttttattctagcagtatatgtttattaaccactagttgtaaaaccgtgcttcccacggtgttgccgtctttttgtttcttatataaaattatgtctcat

SEQ ID NO: 5652 - protein, 336 aa, Glycine max
  misc_feature (1)..(336): Ceres Seq. ID no. 14311208
NSPRNLSLSLSFFPFFTFSFILISISISLHQPTPPFPLSFHAIMASSSIKHTHHLNRTKLFMKEETLLKKKHHYPKIIRIRVTDADATDSSSDDDEPSMSSTRRRVKNFVNEITIQGGGGGGGDVNVVSKKRRFKSGAGAPLCRRKTGAKKFRGVRQRPWGKWAAEIRDPSRRVRLWLGTYDTAEEAAIVYDNAAIQLRGADALTNFITPPPENRKTGYCSGEESRNNDDLRSPTSVLGRCSVSEEAVTANDVFGGSSECEYSCVSESVFPIPNEVVFDFESTLDMFDEGINNVVAETSIFLAEDLDLGFTSWHRECDNFQDIGGDLFVWDPLVAL

SEQ ID NO: 5653 - protein, 293 aa, Glycine max
  misc_feature (1)..(293): Ceres Seq. ID no. 14311209
MASSSIKHTHHLNRTKLFMKEETLLKKKHHYPKIIRIRVTDADATDSSSDDDEPSMSSTRRRVKNFVNEITIQGGGGGGGDVNVVSKKRRFKSGAGAPLCRRKTGAKKFRGVRQRPWGKWAAEIRDPSRRVRLWLGTYDTAEEAAIVYDNAAIQLRGADALTNFITPPPENRKTGYCSGEESRNNDDLRSPTSVLGRCSVSEEAVTANDVFGGSSECEYSCVSESVFPIPNEVVFDFESTLDMFDEGINNVVAETSIFLAEDLDLGFTSWHRECDNFQDIGGDLFVWDPLVAL

SEQ ID NO: 5654 - protein, 275 aa, Glycine max
  misc_feature (1)..(275): Ceres Seq. ID no. 14311210
MKEETLLKKKHHYPKIIRIRVTDADATDSSSDDDEPSMSSTRRRVKNFVNEITIQGGGGGGGDVNVVSKKRRFKSGAGAPLCRRKTGAKKFRGVRQRPWGKWAAEIRDPSRRVRLWLGTYDTAEEAAIVYDNAAIQLRGADALTNFITPPPENRKTGYCSGEESRNNDDLRSPTSVLGRCSVSEEAVTANDVFGGSSECEYSCVSESVFPIPNEVVFDFESTLDMFDEGINNVVAETSIFLAEDLDLGFTSWHRECDNFQDIGGDLFVWDPLVAL

SEQ ID NO: 5655 - DNA, 1184 bp, Glycine max
  misc_feature (1)..(1184): Ceres Seq. ID no. 14311232
agtgcagaaggaatcaaaatttgaattcagatacttaaaatttgaagaactgctatgaaagaacatcccaccatttagatttttgagagtatttatttgggtgggtcccgtgagatgtatgtgcaattgtccctgttttgataacagaaaaaaaggggaaaggggtaagaatatgtaattaggatacattctgcaagaaatttttttcttaaaatgtcatgaacattagtgttttggatttcatgaaaatttgttgcatcatttataaattaggactaaatgtgacataagaattgcaacaaaagatagatagacatttcttgattgcttttatattaacattgtttgacaattgacctaggtatggagaatctggcctttgggacacccaataaatcaatttatgaatgcattcaccgaccaccgtgactctgatcttctcattgtcagccatttctcactcttactgggatgtgcgcttcctatttggatgtctactgggtacaatgatcgacctcttgctccttttgcgggaatattgagtctaggaattggagacacaatggcatcaatggttggacacaagtatggtgttctgaggtggagtaaaacaggcaagaaaactgttgaaggtactgcagctggtataacttctgtattggctgcttgttctttactccttccactcttagcatcgactggatacattctcactcagcattggttctctcttcttctagctgtgactgtaagtggtttgttggaggcttacacaacacaacttgacaatgcatttataccactttttttctatagtcttctctgtttgtagacacagcttagttaatcttggacgagcgacgaggctctgcaaatatatgttgtctctgggcacattgtttatgcagaggtcagataactattaaccaatgcaattgtactttaccagtttagggttgtggtatacatagtagatagtagttaggattgtatctatacagaaatgatagatatacgagtgttcatttaaagggtttatacccaacacgcataacacaatgtatgcagagtgacagtttcccatttttgttggaacctatgtgaggccatgacaagaggagagttgttgaacatctagtggacaatggtaaagaaattgttaatatctcatttttcattcgtag

SEQ ID NO: 5656 - protein, 142 aa, Glycine max
  misc_feature (1)..(142): Ceres Seq. ID no. 14311233
MNAFTDHRDSDLLIVSHFSLLLGCALPIWMSTGYNDRPLAPFAGILSLGIGDTMASMVGHKYGVLRWSKTGKKTVEGTAAGITSVLAACSLLLPLLASTGYILTQHWFSLLLAVTVSGLLEAYTTQLDNAFIPLFFYSLLCL

SEQ ID NO: 5657 - protein, 113 aa, Glycine max
  misc_feature (1)..(113): Ceres Seq. ID no. 14311234
MSTGYNDRPLAPFAGILSLGIGDTMASMVGHKYGVLRWSKTGKKTVEGTAAGITSVLAACSLLLPLLASTGYILTQHWFSLLLAVTVSGLLEAYTTQLDNAFIPLFFYSLLCL

SEQ ID NO: 5658 - protein, 89 aa, Glycine max
  misc_feature (1)..(89): Ceres Seq. ID no. 14311235
MASMVGHKYGVLRWSKTGKKTVEGTAAGITSVLAACSLLLPLLASTGYILTQHWFSLLLAVTVSGLLEAYTTQLDNAFIPLFFYSLLCL

SEQ ID NO: 5659 - DNA, 1184 bp, Glycine max
  misc_feature (1)..(1184): Ceres Seq. ID no. 14311249
agagtaattttgcatcgtcgtcacacatggagatctccggcaccgttctccgtcaggtcagctacgtctccggctatgggacccacacgcggtcccgcggcctggctcctcgttttggggtgaggatggggatgggttctggtttctgtgacgaggggcatttgcggtattaccaggacaccaaaaaggttctcaccccaaagaagaagttgaagctgctcaagggtttctccaaattagggcttgcatcggatcccgagaaactcgccatgttctatgatcttcaacaaaacctcacctcggatgctggagatgtattactgagagagttagaagcagcaagagcaaaggagaaggaagtgaagaagaaaaggaaacaagagaagaaggccaaactcaaagctgccaagatgaattgtgaatcttcttcatcttcatcgtccgaatcaagtgacagcgattgtggttgtgatcaagtggttgacatgaacaccttcagagctggtgttggtgttggtgttggtgttggtgttggtgttgttgcccctgcacctgtcgaggaatccccactgcccaagaccgcccccattgttgaggatgcgaatgcgcattgcgttgccatggaactgtgttctaagaatgatatatatgttagcagtgctagtaatggttttaagaacgagagtgctgtagttacctctgctcctcagaagaggattgaggtatgcatggggaacaagtgcaaaagatcaggggctgctgcattgatgcaagagtttgagaaagtggtgggtgttgaaggtgtagctgttgttgcatgcaagtgcatgggcaagtgcaaaactgctcctaatgttaaagttcagaattctgttgatcataatagcctggctcagggacttgatgattctgttaagattcctgctaaccctctatgcattggggttggcttggaggatgtggatgccatcgtggctagatatttttgggagagtcacacagatataggcatggcaggtgcaggtgcagctacagctacttgatgttgtgggaatggctagtgtgttatttgtaattatatatatacgtagccaggatgccgaggaaacattattgacaatggttttttttagttgttcatattgtataatataaattagttatgaagtttcttttccttgttt

SEQ ID NO: 5660 - protein, 346 aa, Glycine max
  misc_feature (1)..(346): Ceres Seq. ID no. 14311250
SNFASSSHMEISGTVLRQVSYVSGYGTHTRSRGLAPRFGVRMGMGSGFCDEGHLRYYQDTKKVLTPKKKLKLLKGFSKLGLASDPEKLAMFYDLQQNLTSDAGDVLLRELEAARAKEKEVKKKRKQEKKAKLKAAKMNCESSSSSSSESSDSDCGCDQVVDMNTFRAGVGVGVGVGVGVVAPAPVEESPLPKTAPIVEDANAHCVAMELCSKNDIYVSSASNGFKNESAVVTSAPQKRIEVCMGNKCKRSGAAALMQEFEKVVGVEGVAVVACKCMGKCKTAPNVKVQNSVDHNSLAQGLDDSVKIPANPLCIGVGLEDVDAIVARYFWESHTDIGMAGAGAATAT

SEQ ID NO: 5661 - protein, 338 aa, Glycine max
  misc_feature (1)..(338): Ceres Seq. ID no. 14311251
MEISGTVLRQVSYVSGYGTHTRSRGLAPRFGVRMGMGSGFCDEGHLRYYQDTKKVLTPKKKLKLLKGFSKLGLASDPEKLAMFYDLQQNLTSDAGDVLLRELEAARAKEKEVKKKRKQEKKAKLKAAKMNCESSSSSSSESSDSDCGCDQVVDMNTFRAGVGVGVGVGVGVVAPAPVEESPLPKTAPIVEDANAHCVAMELCSKNDIYVSSASNGFKNESAVVTSAPQKRIEVCMGNKCKRSGAAALMQEFEKVVGVEGVAVVACKCMGKCKTAPNVKVQNSVDHNSLAQGLDDSVKIPANPLCIGVGLEDVDAIVARYFWESHTDIGMAGAGAATAT

SEQ ID NO: 5662 - protein, 305 aa, Glycine max
  misc_feature (1)..(305): Ceres Seq. ID no. 14311252
MGMGSGFCDEGHLRYYQDTKKVLTPKKKLKLLKGFSKLGLASDPEKLAMFYDLQQNLTSDAGDVLLRELEAARAKEKEVKKKRKQEKKAKLKAAKMNCESSSSSSSESSDSDCGCDQVVDMNTFRAGVGVGVGVGVGVVAPAPVEESPLPKTAPIVEDANAHCVAMELCSKNDIYVSSASNGFKNESAVVTSAPQKRIEVCMGNKCKRSGAAALMQEFEKVVGVEGVAVVACKCMGKCKTAPNVKVQNSVDHNSLAQGLDDSVKIPANPLCIGVGLEDVDAIVARYFWESHTDIGMAGAGAATAT

SEQ ID NO: 5663 - DNA, 1111 bp, Glycine max
  misc_feature (1)..(1111): Ceres Seq. ID no. 14311256
ataagaagataattggaagattgaagaaggagtgattgtaatctggaaggatgaggagtactattgttttacgattgggaagacgtgcgcgtattccattccaacgagcattagcaacgcagagtaacaataataacactctggtgtttatccctctccctcgctgcctcagcgcaacgcggtcgtttcactttcagcgcaattcaccgtttggattctccagcgggcatgggcaacgcaggagcatgttcatccaaacgcagcccacgccaaatccctcgtctctcatgttttatcccggcaagcccgtcatggaagttggaagctccgacttcccaaaccctcgttctgcaatgaactctcccctcgccaaatcgctcttcgcaatcgacggcgttactcgcgttttctttggatctgatttcgttaccgttacgaaatcggaagaggctgcgtgggaattcctcaagcctgaagtcttcgccgccattatggatttctactcctccgctcagcctctctttttagattctcaagccgccgcggccatggatacagctattcaccaagatgattctgaaacagttgcaatgatcaaggaattgttagagactcgaattcgacctgcagtgcaagatgatggcggggacattgaatatagaggttttgacctagatactggaatagtaaaacttagaatgcaaggggcatgcagtggctgcccaagttcatcagtgactctgaaatcaggcattgaaaatatgctgatgcattatgttcctgaggtcaaaggtgtggaacaagaattggatgctgaggatgatggagcagcattaagtggagaaattaaatagttgaacttttttttgttttttctcaaaattgctacttgcatttagtctcttcatgcatgcattttcgcactcaacagagacttagaagtacaacagcagtacatgatggaaacaaaaaaaggtgtgagtctacacaaaaaatatattgaataagtcgtgagttggatacattatagtatggcatgaaatcatcgttccatgctagttggatcttcctgacatagatgaaagtaatttatgacacgatgccattacat

SEQ ID NO: 5664 - protein, 267 aa, Glycine max
  misc_feature (1)..(267): Ceres Seq. ID no. 14311257
MRSTIVLRLGRRARIPFQRALATQSNNNNTLVFIPLPRCLSATRSFHFQRNSPFGFSSGHGQRRSMFIQTQPTPNPSSLMFYPGKPVMEVGSSDFPNPRSAMNSPLAKSLFAIDGVTRVFFGSDFVTVTKSEEAAWEFLKPEVFAAIMDFYSSAQPLFLDSQAAAAMDTAIHQDDSETVAMIKELLETRIRPAVQDDGGDIEYRGFDLDTGIVKLRMQGACSGCPSSSVTLKSGIENMLMHYVPEVKGVEQELDAEDDGAALSGEIK

SEQ ID NO: 5665 - protein, 202 aa, Glycine max
  misc_feature (1)..(202): Ceres Seq. ID no. 14311258
MFIQTQPTPNPSSLMFYPGKPVMEVGSSDFPNPRSAMNSPLAKSLFAIDGVTRVFFGSDFVTVTKSEEAAWEFLKPEVFAAIMDFYSSAQPLFLDSQAAAAMDTAIHQDDSETVAMIKELLETRIRPAVQDDGGDIEYRGFDLDTGIVKLRMQGACSGCPSSSVTLKSGIENMLMHYVPEVKGVEQELDAEDDGAALSGEIK

SEQ ID NO: 5666 - protein, 188 aa, Glycine max
  misc_feature (1)..(188): Ceres Seq. ID no. 14311259
MFYPGKPVMEVGSSDFPNPRSAMNSPLAKSLFAIDGVTRVFFGSDFVTVTKSEEAAWEFLKPEVFAAIMDFYSSAQPLFLDSQAAAAMDTAIHQDDSETVAMIKELLETRIRPAVQDDGGDIEYRGFDLDTGIVKLRMQGACSGCPSSSVTLKSGIENMLMHYVPEVKGVEQELDAEDDGAALSGEIK

SEQ ID NO: 5667 - DNA, 1562 bp, Glycine max
  misc_feature (1)..(1562): Ceres Seq. ID no. 14311272
tatgccttctgatctttacaacttgaattcatcctatggttctgtggaagagcttaaatactgtatagaggaaatgcattctcaagatctgctggccttgggagatgttgtacttaaccatcgatgtgcacagaaacagagtccaaatggtgtttggaacatttttggtggcaagcttgcatggggacctgaagccattgtatgtgatgatccaaattttcaggggcgcgggaatccttccagtggtgatatcttccatgctgcacccaatgttgatcattctcaggactttgtaaggaaagatatcaaggagtggttgaactggctgcgcaatgatataggttttgatggatggcgtcttgactttgttagaggtttctctggtacatatgtaaaagaatatattgaagcatcaactcctgtatttgccattggagaatattgggacagcttgggctatgaacatggaagtttgtgttacaaccaagatgctcatcggcaacggataattaattggatcaatgcaactggtggtacttcatctgcatttgatatgacgacaaaggggatacttcattctgctctgcataatgaatattggagactgatagatcctcaagggaaaccaacaggagtgatgggatggtgggcttctcgtgctgttacattcctagagaaccatgataccgggtccacacaagcctgaagagtatcaccttgtataagatcatgctctgggtactgtgagagataaatttttggcgaacgaaaacttaaaaatccaccagtcttagtctttggtatcatatagatgtacaagggaaatattgcattgaacttagctacatttgaggttttggtttctactcctgtggttggttctcgttgatttggttcatagcaccataaatttggcctatgtaattgatcagggccactggccattcccacgggataagctcatgcagggatatgcatatattttgactcatcctggaactcctacaatattttatgaccatttctatgattttggcatccacgatgtattaaccgagttgattgacgctcggagacgagctgggatccattgtcggagctctatcaagatataccatgcaaacaatgaaggttatgtagctcaggttggtgatgcgctggtaatgaagcttgggcagtttgattggaatccctccaaggaaaaccaattggaagggagctggcagaagtttgttgacaaaggaccagactaccaagtgtggttgagacaatagtttaataccaatctatagacattgctctattctgtaatggaaattgaaaatagcttcaataaagcacacatatcataggaaaaaaaaatttgtttgtaacatgtaacgaacaaacagataaggtatttcttatctgcttcgtatgagcttgagtcaaatgcctccataaaaaaacaataaatttcatctgcattttgagttacatttgtttaaatgtagccgtgtgtattaaaactatgttgctttgtgagagcccataaagaatgcacttgcaactttgtttcctct

SEQ ID NO: 5668 - protein, 234 aa, Glycine max
  misc_feature (1)..(234): Ceres Seq. ID no. 14311273
MPSDLYNLNSSYGSVEELKYCIEEMHSQDLLALGDVVLNHRCAQKQSPNGVWNIFGGKLAWGPEAIVCDDPNFQGRGNPSSGDIFHAAPNVDHSQDFVRKDIKEWLNWLRNDIGFDGWRLDFVRGFSGTYVKEYIEASTPVFAIGEYWDSLGYEHGSLCYNQDAHRQRIINWINATGGTSSAFDMTTKGILHSALHNEYWRLIDPQGKPTGVMGWWASRAVTFLENHDTGSTQA

SEQ ID NO: 5669 - protein, 210 aa, Glycine max
  misc_feature (1)..(210): Ceres Seq. ID no. 14311274
MHSQDLLALGDVVLNHRCAQKQSPNGVWNIFGGKLAWGPEAIVCDDPNFQGRGNPSSGDIFHAAPNVDHSQDFVRKDIKEWLNWLRNDIGFDGWRLDFVRGFSGTYVKEYIEASTPVFAIGEYWDSLGYEHGSLCYNQDAHRQRIINWINATGGTSSAFDMTTKGILHSALHNEYWRLIDPQGKPTGVMGWWASRAVTFLENHDTGSTQA

SEQ ID NO: 5670 - DNA, 1679 bp, Glycine max
  misc_feature (1)..(1679): Ceres Seq. ID no. 14311291
tattataattttattttcaatcacatgagttacaaatgtatctgcgtgcaaaaaagattgaatgttccttgaagatactaaataatacaattttatcaagcagaaccaagttatatttttaagtgtatcgttacctatcattgcattctattacaaatattctatcattgcattctattacatgggattataagtgttctgatttgtctttagttatatttttaattacttaatgttctaattaattgaaaaaaccattttttaaataaagttgctttctgattagtatttgttagagatgcaatataaagtcattcatgtatcgttacctagcagcttgagctttttggatagtttgttaatgacatggtatgaaattctctgactatgtggtctagagttcaatcctttatactcttattcttctaataaaacgttaaatttcaaccaaggtagatcatatgtggacttgtgcattatccacacttaatgtccaaaaggctcttgcatgagaggcatgttaaagatgtaaaataaaatcattcatgtatcttcacctatgaacttaagctttttggataatttgttcttgatagtaataattagtaaaatcaaatctgttatttaaatgtatcaaaatttacatgtgaaaatttaaattggtctaagttcattatagtttgtctttgactattatagtcctttatacctttctttaaatgggtatgtactaagttgtggggatgttatcgcatcatcactttccttttttatgaaatttcattaacattaagtttaaaaacttccagccactaggtcacttgatttttcctgctcaatttataggttactcaaatgaagcaggagcatgacaagaggcaagcaagcctcatagctgaacacaacgaacagctaaagcgtacccaactgcaagctgaaaatgaattgagagagaaaacaatgtttatgaggaatgatcatgaagctcagatcaaagcattgaggtgtgaacttgaagatgagtgtcggaagctggaagaggagttgcatcttcaaaaaatccaaagaagacaggcaaagggctttgttgcagttgcagtggaaagtgatgagtgacaagcctaaagaggaccaagaagtgaattcaaaacaggccacgaggttgtaacatatgaaagtccgcgaccgatgatggggattcatcgtttagtgtttgtgttatttcgtcaactgggtagggaaacagtgtatgcaccaggatggcgccagaatttcaacactagagaatttgctgaactctacaaccttggattgccagttgctgctgtctatttcaacattcagagggaatctggctctggtggaagaaggttataccattgagggttctagaaatatttctcccacactctttagtagtaaatgagtgcttttcaacttaatattaaactgagcatatagtgaaataaattgcttgctagatcagttggtagcaacaagtcctctacatatacacataaatgaaatcgaagcatctcggttcatttttcttatttctattatcagctgcagaatgttatagatatattatatatgtaaagtggaaaacaacttgagcccaagttaaattatggggtacttatacttttgctaaaaaaaaaaaaaaaaaaaaaaaaaag

SEQ ID NO: 5671 - protein, 86 aa, Glycine max
  misc_feature (1)..(86): Ceres Seq. ID no. 14311292
MKQEHDKRQASLIAEHNEQLKRTQLQAENELREKTMFMRNDHEAQIKALRCELEDECRKLEEELHLQKIQRRQAKGFVAVAVESDE

SEQ ID NO: 5672 - protein, 64 aa, Glycine max
  misc_feature (1)..(64): Ceres Seq. ID no. 14311293
MMGIHRLVFVLFRQLGRETVYAPGWRQNFNTREFAELYNLGLPVAAVYFNIQRESGSGGRRLYH

SEQ ID NO: 5673 - protein, 63 aa, Glycine max
  misc_feature (1)..(63): Ceres Seq. ID no. 14311294
MGIHRLVFVLFRQLGRETVYAPGWRQNFNTREFAELYNLGLPVAAVYFNIQRESGSGGRRLYH

SEQ ID NO: 5674 - DNA, 1518 bp, Glycine max
  misc_feature (1)..(1518): Ceres Seq. ID no. 14311301
agttcatctgagtctttgagagatgttagattaaactacaatgatttggcacctgccagcttccccaatgtggaatttttagtgctaactggcagtgctttcaaagtccttccccaatgcatcagccaatgtcgctttctcaagaatctagttttggacaattgcaaggagcttcaagaaatcagaggggttcctccaaagataaaatatctctcagcaataaactgcacatcattgtctcatgagtctcaaagcatgttattgaatcagagattacacgagggtggtggcacagatttttcccttccaggaacaaggataccggaatggttcgaccattgtactacaggaccattgctgtctttctggtttcgtaacaaatttccaaggatggctctagctgttgttggagttttggacaagcagggaagctttcccatgtcaagattccacttgctcattaatggcattcaaaagctgcattgccttttcaccgcacaatcaaaactaaccacgtatcatatattcctgtccgatgtgcagctgaaatcctacaatggcgaattgcaaagtgtgtatggggaggatgggtggaaccatgttgagatttcatatgtgagaccaagtgcctttccacattcatgcagagccaagagaggaaccatcaaattgatgggggttcatgtttacaagcaaaaaacaagcatggagggtgtccggttcacgaatccttggtctccaaagagatcatacagcgaagtttccaagcctagtttgaaagaaaattttcagtcactggccaaaagaagccgtggatcacaaggcatggaaatttgtgaggcaccacgcatgaagcagcatgaagtgaatagtggttatcacagtgtatcacagagactatggttagaaatttgcagcattgtagctcctgcagatgttaaagtcctaatgtggagcatttgccaaaatgctttgccaacttttgaatatcttttcaggaggaagcttgtaaatagtccactctgccccatttgtggaacagaacctgaaaccgtcgaacacgcgttcctgttttgtccgtggacacgacccctttggtttggaagtgatttccagtggtgcattgatgccaaaacagttcaaagctttcaactttggctttggcagaaactagtggagattcaaagggtatatcaagaaaatgccaaccaagtatctgctcaggtgggaagtatttgttgggctatttggaaaggaaggaatgaatttattcttgaaggaaaacctgtcaatccattgattttaaggtaaggcatctctgtgtgtatatgatgagaatgagggctatatttcttttaacgagatttgtagcttaaaaaattggggtgtaaaaagatgatatcacccttgattttttatttatttgaatgacttttctctaatggtaaagtgggattgtttttaaaagatactcaaaataatgccgtgcaatatgagattatgggccatggataaatc

SEQ ID NO: 5675 - protein, 436 aa, Glycine max
  misc_feature (1)..(436): Ceres Seq. ID no. 14311302
SSSESLRDVRLNYNDLAPASFPNVEFLVLTGSAFKVLPQCISQCRFLKNLVLDNCKELQEIRGVPPKIKYLSAINCTSLSHESQSMLLNQRLHEGGGTDFSLPGTRIPEWFDHCTTGPLLSFWFRNKFPRMALAVVGVLDKQGSFPMSRFHLLINGIQKLHCLFTAQSKLTTYHIFLSDVQLKSYNGELQSVYGEDGWNHVEISYVRPSAFPHSCRAKRGTIKLMGVHVYKQKTSMEGVRFTNPWSPKRSYSEVSKPSLKENFQSLAKRSRGSQGMEICEAPRMKQHEVNSGYHSVSQRLWLEICSIVAPADVKVLMWSICQNALPTFEYLFRRKLVNSPLCPICGTEPETVEHAFLFCPWTRPLWFGSDFQWCIDAKTVQSFQLWLWQKLVEIQRVYQENANQVSAQVGSICWAIWKGRNEFILEGKPVNPLILR

SEQ ID NO: 5676 - protein, 351 aa, Glycine max
  misc_feature (1)..(351): Ceres Seq. ID no. 14311303
MLLNQRLHEGGGTDFSLPGTRIPEWFDHCTTGPLLSFWFRNKFPRMALAVVGVLDKQGSFPMSRFHLLINGIQKLHCLFTAQSKLTTYHIFLSDVQLKSYNGELQSVYGEDGWNHVEISYVRPSAFPHSCRAKRGTIKLMGVHVYKQKTSMEGVRFTNPWSPKRSYSEVSKPSLKENFQSLAKRSRGSQGMEICEAPRMKQHEVNSGYHSVSQRLWLEICSIVAPADVKVLMWSICQNALPTFEYLFRRKLVNSPLCPICGTEPETVEHAFLFCPWTRPLWFGSDFQWCIDAKTVQSFQLWLWQKLVEIQRVYQENANQVSAQVGSICWAIWKGRNEFILEGKPVNPLILR

SEQ ID NO: 5677 - protein, 306 aa, Glycine max
  misc_feature (1)..(306): Ceres Seq. ID no. 14311304
MALAVVGVLDKQGSFPMSRFHLLINGIQKLHCLFTAQSKLTTYHIFLSDVQLKSYNGELQSVYGEDGWNHVEISYVRPSAFPHSCRAKRGTIKLMGVHVYKQKTSMEGVRFTNPWSPKRSYSEVSKPSLKENFQSLAKRSRGSQGMEICEAPRMKQHEVNSGYHSVSQRLWLEICSIVAPADVKVLMWSICQNALPTFEYLFRRKLVNSPLCPICGTEPETVEHAFLFCPWTRPLWFGSDFQWCIDAKTVQSFQLWLWQKLVEIQRVYQENANQVSAQVGSICWAIWKGRNEFILEGKPVNPLILR

SEQ ID NO: 5678 - DNA, 1875 bp, Glycine max
  misc_feature (1)..(1875): Ceres Seq. ID no. 14311313
gtgaaacttcccaaaaaatatacagcactatggaacaccaaaaagaggagcaactagaaccagtgagtcctgtgggacaatacttcaacagctctgtgctatgcatatacatcattggagttttagaattcgaagttccaatagatgacttgcaaacatatgctcttcttaaagatgttttccttcccatcaatccacgcttctcctccatcatggtccaagataaagatggagagaaaagatggaagcaagttgatgtaaacttgacggaccatgtcaacatccccacattccccgaaggaaaaacagcggaatcttatgataaatattttcatgattatttatcaagcatagcaatggagcaattaccacaaagcagaccattatgggatattcacataatcaattaccttacaagtgatgcatccagcactataatatttaagcttcaccatgcacttggagatggctattctctcatgggtgctcttctttcttgtcttcaacgagccgatgacccttctcttcccttgtcctttccttctctcaaacaatctaaacaagaaccttcttccactaaaagcttttgcagaaaattttcttggatgtgttcctctgccttcaacactgtctcagattttggatggagtgtattgaagagtagcatcattagtgatgataaaacaccgataaggtttggagacgaaggagccgactatcaaccaatttccatatcaagcatgacattctccattgaccacatcagggacatcaaatcaaggctcggagtgacaataaatgatgtggtcactggaattgtcttctatggaactagattatatatgcaagatatggactccaaatcaaagaccgcacactccacagcattggtattactgaatacgagaaacgttgaaggttaccaatcgatcaatgatatgctaaatactaaagccacgggtccatgggggaacagaattaccttcttgcatgttccaataccgaaattaaatgaaacaagaactacaaaccctcttgaatttatttgggacacacataacataatcaagaggaagaaacaatctctaggagttgtactcaccgggacacttttgaagatagagggcaaattgaggggacaagaggcagtagctaaacgcattcgtggcacattgacaaaatcaagtgcagtgatttcaaacttggctggaccaatacaacaaatggctttagctaaccatcctgtgaaaggcttgtatttcacattggccggtggacctgaaagtctagtcatttcagttatgagctatatgggagtcctaagtgttaccctcaaaacggaaaaagacttcatagacgaacataaattgaagttgtgcatgcaaagtgcatttgagataattctccaagcagctatggaaattcctcaggaaaccaaaccttagtatttggtttggatgattggaacagcttattacgaaaattagagagagagagagatatggagaatttaccatattatttctccggatttatcaacgccttaagtaattgcttgtctatagtatatttgtcgtatgtttggaaagatcaatacacgaggcccaccttattttggatctgtttaggcctattcttgtttggaagaatcttattgtctgatctcacttggtaatcatttcttgtttgtttcacaaactaaaaagtgtacaagagttgttatatttttaattatgtagtcttttgtaaaaattttgtacatcacatttcttatcctcttgtctccaacactccaacattaattaacaacaatattaaaaatttagctcaaatctcacaatgtagggggctaattcaatagaaggttttcaatcc

SEQ ID NO: 5679 - protein, 480 aa, Glycine max
  misc_feature (1)..(480): Ceres Seq. ID no. 14311314
ETSQKIYSTMEHQKEEQLEPVSPVGQYFNSSVLCIYIIGVLEFEVPIDDLQTYALLKDVFLPINPRFSSIMVQDKDGEKRWKQVDVNLTDHVNIPTFPEGKTAESYDKYFHDYLSSIAMEQLPQSRPLWDIHIINYLTSDASSTIIFKLHHALGDGYSLMGALLSCLQRADDPSLPLSFPSLKQSKQEPSSTKSFCRKFSWMCSSAFNTVSDFGWSVLKSSIISDDKTPIRFGDEGADYQPISISSMTFSIDHIRDIKSRLGVTINDVVTGIVFYGTRLYMQDMDSKSKTAHSTALVLLNTRNVEGYQSINDMLNTKATGPWGNRITFLHVPIPKLNETRTTNPLEFIWDTHNIIKRKKQSLGVVLTGTLLKIEGKLRGQEAVAKRIRGTLTKSSAVISNLAGPIQQMALANHPVKGLYFTLAGGPESLVISVMSYMGVLSVTLKTEKDFIDEHKLKLCMQSAFEIILQAAMEIPQETKP

SEQ ID NO: 5680 - protein, 471 aa, Glycine max
  misc_feature (1)..(471): Ceres Seq. ID no. 14311315
MEHQKEEQLEPVSPVGQYFNSSVLCIYIIGVLEFEVPIDDLQTYALLKDVFLPINPRFSSIMVQDKDGEKRWKQVDVNLTDHVNIPTFPEGKTAESYDKYFHDYLSSIAMEQLPQSRPLWDIHIINYLTSDASSTIIFKLHHALGDGYSLMGALLSCLQRADDPSLPLSFPSLKQSKQEPSSTKSFCRKFSWMCSSAFNTVSDFGWSVLKSSIISDDKTPIRFGDEGADYQPISISSMTFSIDHIRDIKSRLGVTINDVVTGIVFYGTRLYMQDMDSKSKTAHSTALVLLNTRNVEGYQSINDMLNTKATGPWGNRITFLHVPIPKLNETRTTNPLEFIWDTHNIIKRKKQSLGVVLTGTLLKIEGKLRGQEAVAKRIRGTLTKSSAVISNLAGPIQQMALANHPVKGLYFTLAGGPESLVISVMSYMGVLSVTLKTEKDFIDEHKLKLCMQSAFEIILQAAMEIPQETKP

SEQ ID NO: 5681 - protein, 410 aa, Glycine max
  misc_feature (1)..(410): Ceres Seq. ID no. 14311316
MVQDKDGEKRWKQVDVNLTDHVNIPTFPEGKTAESYDKYFHDYLSSIAMEQLPQSRPLWDIHIINYLTSDASSTIIFKLHHALGDGYSLMGALLSCLQRADDPSLPLSFPSLKQSKQEPSSTKSFCRKFSWMCSSAFNTVSDFGWSVLKSSIISDDKTPIRFGDEGADYQPISISSMTFSIDHIRDIKSRLGVTINDVVTGIVFYGTRLYMQDMDSKSKTAHSTALVLLNTRNVEGYQSINDMLNTKATGPWGNRITFLHVPIPKLNETRTTNPLEFIWDTHNIIKRKKQSLGVVLTGTLLKIEGKLRGQEAVAKRIRGTLTKSSAVISNLAGPIQQMALANHPVKGLYFTLAGGPESLVISVMSYMGVLSVTLKTEKDFIDEHKLKLCMQSAFEIILQAAMEIPQETKP

SEQ ID NO: 5682 - DNA, 1545 bp, Glycine max
  misc_feature (1)..(1545): Ceres Seq. ID no. 14311334
acatagctttttcttttgcgcacctgagcttcgtttcgacggagaacaaataacgcaacccacccaaggttcgcatcgcatcgcatcgcatcatggcccaagacaaaaaggagcgtaaaaggagcatgaagaagaagcagaaccaatctctgacaactctgcctcaggaattgatcagagaaattcttctgagattaccggtgaaatctcttctgcgtttcaagtgcgtctgtaagtcgtttctgtctctgatttcggatccccaatttgtgatttcccattatgccctagctgcctcgcccacccatagattaattcttatatcacatgatttttatgctcaatccatcgccacggaatcagtgttcaaaacctgtagccgagacgtggtttatttccctctccctcttccatcaattccatgccttcgccttgacgattttggcattcgacccaagattttgggttcatgcagaggccttgtacttctatactatgacgacagcgcaaatctcattctgtggaatccgtcccttggccgtcacaaacgattgccaaactacagggatgacataacttcattcccatatggttttggctatgacgaatcaaaagatgagtacttgctgattctaattggattgcccaagtttggacctgaaactggagctgacatctactccttcaaaaccgagtcttggaaaacagacactattgtttatgatccattagttaggtataaggctgaggatagaatagccagagcagggtcgctcctcaatggggctcttcattggtttgttttctcggagagcaaagaggatcatgtgattatcgcctttgatctcgtggaaaggactctatcggagattcctcttcctctcgctgatcgttctactgtgcaaaaagatgcagtttatggtctgagaataatgggagggtgtctcagtgtgtgttgctccagctgtggaatgactgagatatgggtgatgaaggaatataaagtgcggtcatcttggactatgacctttcttatccatacttctaatcggatttccccaatatgcacaatcaaagatggtgagattttaggatcaaattgcgcgggaactggaagattagagaaacgcaatgacaaaggagagctgcttgagcatttcatggacaccaaaggtcaacggttcagctgtgccaatctacaggctgctatgtatacagagagtctactgccactcccaacgtcattttgggaaacaagtgaagaggactaactgtaatagacaacaaaaatcagggccatgaaatatgcaaaataatgtagacagtatcttgatgtcactttcctataaatggtgaagctgttggtagaaggcattgcacttgggagagaatggcatatatatgatattaaattatctattgttggggtagaactagtggagctaacttcacctagtggaataaggctttattgctgttgttgcagtgtagaactagtgtcagttttaatgctatttcaataaagttggagtttgaagaaacttt

SEQ ID NO: 5683 - protein, 392 aa, Glycine max
  misc_feature (1)..(392): Ceres Seq. ID no. 14311335
MAQDKKERKRSMKKKQNQSLTTLPQELIREILLRLPVKSLLRFKCVCKSFLSLISDPQFVISHYALAASPTHRLILISHDFYAQSIATESVFKTCSRDVVYFPLPLPSIPCLRLDDFGIRPKILGSCRGLVLLYYDDSANLILWNPSLGRHKRLPNYRDDITSFPYGFGYDESKDEYLLILIGLPKFGPETGADIYSFKTESWKTDTIVYDPLVRYKAEDRIARAGSLLNGALHWFVFSESKEDHVIIAFDLVERTLSEIPLPLADRSTVQKDAVYGLRIMGGCLSVCCSSCGMTEIWVMKEYKVRSSWTMTFLIHTSNRISPICTIKDGEILGSNCAGTGRLEKRNDKGELLEHFMDTKGQRFSCANLQAAMYTESLLPLPTSFWETSEED

SEQ ID NO: 5684 - protein, 381 aa, Glycine max
  misc_feature (1)..(381): Ceres Seq. ID no. 14311336
MKKKQNQSLTTLPQELIREILLRLPVKSLLRFKCVCKSFLSLISDPQFVISHYALAASPTHRLILISHDFYAQSIATESVFKTCSRDVVYFPLPLPSIPCLRLDDFGIRPKILGSCRGLVLLYYDDSANLILWNPSLGRHKRLPNYRDDITSFPYGFGYDESKDEYLLILIGLPKFGPETGADIYSFKTESWKTDTIVYDPLVRYKAEDRIARAGSLLNGALHWFVFSESKEDHVIIAFDLVERTLSEIPLPLADRSTVQKDAVYGLRIMGGCLSVCCSSCGMTEIWVMKEYKVRSSWTMTFLIHTSNRISPICTIKDGEILGSNCAGTGRLEKRNDKGELLEHFMDTKGQRFSCANLQAAMYTESLLPLPTSFWETSEED

SEQ ID NO: 5685 - DNA, 1417 bp, Glycine max
  misc_feature (1)..(1417): Ceres Seq. ID no. 14311355
aggattatgtttattgacttgttctttctttatttgtattttcaatgaatcagttattcatcaatttcatagactgttgtgtagaactggaatatcacctgtgcactgaaaatcttataccagattcttttgttaccgcagtggaggttgagattgatggctctgttactgtcgaaacagtaggaaatactgctataggtgaggttagtagcatagcggatgacaacagagaaggtggaagttctgttgaaccaaatgacaaccaagatcaacatgataatgggactcaagattcctctggagggatcactatcccatctgcaattcccacagtatcggttgtttcagttgaagagccctacgttggtcaggagtttgggtcagaagcagcagcacatgcattttataatgcttatgccacagaagttggatttatcgtacgtgtgagtaaactctcgcggtcaaggcgtgatggaactgctattggacgtactcttgtttgcaacaaagagggattcagaatggctgacaaacgtgaaaagattgtgaggcaaagggccgagaccagggttggttgcagggcaatgattatggtgaggaaacttagttctggcaaatgggttgttgcaaagtttgtgaaggaacacacacatcctttgacccctggcaaaggtagaagggatttctactatgaacaatatccggtcagtttcttttctttcactactgaacaactgtacatattatgttgtgtcaagtgttacttgtgcttaatagatcagttatgaaatctgagtgagatcatgatgctctcatattgtgctaaatattagagaatttcaggctatttcagaacgaagttttcaggataacattggttctcttaacattttccatctctattataatccataatccagagaatttttttcttctgcattacctcacatcatttgaaatttgctcaaattggtcttattacccttgcccttgtacaaattcctttactcataatgtaatgcaacttagaaagtgccacgtaagtaaagagcaacttgtgagattagtaaatattatattcctcactctttttcagttcctttttatgctattttcagactgaacaggataaaattcgggaactatctcaacagttggcaactgagaaaaagcgatctgcggcctataaaagacatcttgaattgatatttgagcaaattgaagagcagaatgataacctttcaaagaaaatacagcacatagtagactgcgtgaaggagatggaagccaaagaagaacatagtagacagtgtgaaggagatggaagccaaagaacaacagagtagactcagatagattcaacttacaacgtgatacttttagttggtagaggaaactagttcagtcaatgtagagg

SEQ ID NO: 5686 - protein, 247 aa, Glycine max
  misc_feature (1)..(247): Ceres Seq. ID no. 14311356
MNQLFINFIDCCVELEYHLCTENLIPDSFVTAVEVEIDGSVTVETVGNTAIGEVSSIADDNREGGSSVEPNDNQDQHDNGTQDSSGGITIPSAIPTVSVVSVEEPYVGQEFGSEAAAHAFYNAYATEVGFIVRVSKLSRSRRDGTAIGRTLVCNKEGFRMADKREKIVRQRAETRVGCRAMIMVRKLSSGKWVVAKFVKEHTHPLTPGKGRRDFYYEQYPVSFFSFTTEQLYILCCVKCYLCLIDQL

SEQ ID NO: 5687 - DNA, 2168 bp, Glycine max
  misc_feature (1)..(2168): Ceres Seq. ID no. 14311361
gatcagttttcaaatcttggattcgattccatcactgatatttctcttctctctctctttctctgccgaatatggcgccgcctgcgccagcagttgaaggcggccaggcgccgcaagggcggcagcaacagccgcaaggagggtttggcctctccggaatcatacgcatggcagttttctggtacttcgcctccaaattcttttcccccaaaaaacctaccgaaccttccgctctcatctccaatctctatcagaaggcacagcctctggatatgtggctttatctttccgagtacgagaagttcaatgactttggtagtgaaagttctcttgtatggcatgaaaccaatattccgtatgccgtttggggacctgagagtaccaggactctaactttgaagtatcatccgtctgagtctttgaagcataatgggagtctatatgctcatgttttctttgcacactctggcttttcgcctgacccaagtgatccagaataccagcctcaagcagcatttggaaggacgcatcctgttgtgatgtacttgcccaagtcacaagcagataaaaagaaaagtctgttgggaggttcaccagattctagtgaggctcaagtgacatccaaggtggttgatgaatctgaagatgatgattctaatgatgatggtcctgtggagtgggcttcatattggaaaccaaatataacaataaacttggttgctgacttcactcagtacccaaaaacaggtgtagcaccaaacattgctccatacttgaacatcgatccttttactgggaactactatccaattgtttatttcaatgagttctggttactcagggataagctgatacctttaaacgagacagtgactgaattatcacttaacctggaagttggtcccattagtatgacaaagtggcagttattcctgcagattgaccagtccttccagattcaccgtagttattgaagcatgcttgaaggcgaggctgatgaactcaagagggtattcttggaagggaatccttacctcctggcaattaccatggttgtttctcttcttcattcagtctttgacttcttggctttcaagaatgacatccaattttggaacaaaaataaatctatggaaggactctctgcaaagaccgttgttgtgagctttgcttgtcagcttatcatcttcctttatctacttgacaatgacacctcttggatgattcttgcaagctctggaattggttgtgttattgagttttggaaaattggtaaagccatgcgcatagagattgataggacaggaaggatacctatgttgaagctccgcgatcgagaatcatacgtacggaataagacaaaggaatatgatgatattgctatgaagtatttgttctatgttttatttctccttgttgctggcttttctgtttactcactgatgtatgagcgtcacaagagctggtattcttggattttgtcttcgctcacaagttgtgtatacatgtttggttttattatgatgtgccctcaattgttcatcaactacaagctcaaatctgttgctcatctaccttggaggcaaatgacttacaagtttctcaacaccataattgatgacctttttgcctttgtcattaaaatgccaacactccatcggctttctgtcttccgtgatgatcttatctttgtcatatacttataccagaggtggatttataaagtggacaagaaacgtgttaacgaatttggttttggaggtgaggatgatcaggctgtggcagagacagacgctgcaaaggaagaagagaagaaaactaattgatttggttttctctcaacaatttgagaaaattttacagtagatacttaatactgtagaattcaacggggattgatttgtttttctccccttttgttacacatttgcaattagatttttgttgaaagaaagctctagtttggccctttctactggaatttttactagtaccgaaggatggagggaatttaactactgagaccttcatggttgactgtaagggtcataacagctttttagttgcccttctgtagtttttctttaatctcaaatgtcttttagtttgtgacagataacccttttatgtattattttcttccactcatgtatttttcactaatttat

SEQ ID NO: 5688 - protein, 300 aa, Glycine max
  misc_feature (1)..(300): Ceres Seq. ID no. 14311362
MAPPAPAVEGGQAPQGRQQQPQGGFGLSGIIRMAVFWYFASKFFSPKKPTEPSALISNLYQKAQPLDMWLYLSEYEKFNDFGSESSLVWHETNIPYAVWGPESTRTLTLKYHPSESLKHNGSLYAHVFFAHSGFSPDPSDPEYQPQAAFGRTHPVVMYLPKSQADKKKSLLGGSPDSSEAQVTSKVVDESEDDDSNDDGPVEWASYWKPNITINLVADFTQYPKTGVAPNIAPYLNIDPFTGNYYPIVYFNEFWLLRDKLIPLNETVTELSLNLEVGPISMTKWQLFLQIDQSFQIHRSY

SEQ ID NO: 5689 - protein, 282 aa, Glycine max
  misc_feature (1)..(282): Ceres Seq. ID no. 14311363
MLEGEADELKRVFLEGNPYLLAITMVVSLLHSVFDFLAFKNDIQFWNKNKSMEGLSAKTVVVSFACQLIIFLYLLDNDTSWMILASSGIGCVIEFWKIGKAMRIEIDRTGRIPMLKLRDRESYVRNKTKEYDDIAMKYLFYVLFLLVAGFSVYSLMYERHKSWYSWILSSLTSCVYMFGFIMMCPQLFINYKLKSVAHLPWRQMTYKFLNTIIDDLFAFVIKMPTLHRLSVFRDDLIFVIYLYQRWIYKVDKKRVNEFGFGGEDDQAVAETDAAKEEEKKTN

SEQ ID NO: 5690 - protein, 268 aa, Glycine max
  misc_feature (1)..(268): Ceres Seq. ID no. 14311364
MAVFWYFASKFFSPKKPTEPSALISNLYQKAQPLDMWLYLSEYEKFNDFGSESSLVWHETNIPYAVWGPESTRTLTLKYHPSESLKHNGSLYAHVFFAHSGFSPDPSDPEYQPQAAFGRTHPVVMYLPKSQADKKKSLLGGSPDSSEAQVTSKVVDESEDDDSNDDGPVEWASYWKPNITINLVADFTQYPKTGVAPNIAPYLNIDPFTGNYYPIVYFNEFWLLRDKLIPLNETVTELSLNLEVGPISMTKWQLFLQIDQSFQIHRSY

SEQ ID NO: 5691 - DNA, 1337 bp, Glycine max
  misc_feature (1)..(1337): Ceres Seq. ID no. 14311385
tattgtgttgaagactgtgggtggccttctcaagattatgcatacgagtgcaaaatcaaccttcttactggtaaaacacatcaggtctgttagctttcattttatgttttctttcaactacttaaatgttggattgtattatatgaatggtgaaccggctggtggccatttggctgtgtttcaaaggttataattatatcgaataaggttatgtttggataaacttctctataagtatttataggagaagagaataagaaataaatttctcccataaactaaaattagctttatgaataagtttattgtaacttataggaaaaacttatttctattttccttcttattctcttcttttacaagtgtttatagagaaacttatcaaaacagggcctaaataaagaaaatcttgttatttcttttatttgattatcttttaggaaaaggaaactatgttttgtacctgaatagtaacttcaattttaatgcagattcgagctcaatttgctgcctataaggcaccattaattggtgattctatgtatatgccagctgcaattgcggatgtgagtaatcctggacttaatccatttggaaaatacaagaaagatttcagtagtgagagtgaaaaagaaacagctgttgtaaattggatggcacaacatggaaaagagccgagtgttgcaattggccttcaagcatgtcaaatttcatgggatgatgatgaacacttttatgaagctggtttaccttggtggaggtgttaaaatgcttgaaatgtgtgcttggattgaggataaggatctttatagctaatgttttcatctttcctcagttttacgtgagtatactatcgttcaaattgaaaatatcctaattcagtggtacgactgatttgtttgcctgaaaaacaaagaaatgttttgatacgcagatgcagatattcagaaggtggaagactggtcacggatcactgtatactggtttctcctgctgtggtgtaagaatgatgcaatattttcttgaggttgtagaggggaggcaatgagactatcgctggtttgaaaagtgaaacacaaataaaagggaaagaggagcttcatatggggatttaaattgtgcacgctgtcatatactggtgactgtggcgatccttgtagcaccatttctagcagaatcaagtctgaacaggtaaaccagagatgtttggatattcacggataaagacgcctttttgaaaaagagtttaatttattttactaggagattgaagaactaagaaaatgttgtaacttattggaaacatctgatcaggctgtgttatatattaatgcctc

SEQ ID NO: 5692 - protein, 93 aa, Glycine max
  misc_feature (1)..(93): Ceres Seq. ID no. 14311386
MQIRAQFAAYKAPLIGDSMYMPAAIADVSNPGLNPFGKYKKDFSSESEKETAVVNWMAQHGKEPSVAIGLQACQISWDDDEHFYEAGLPWWRC

SEQ ID NO: 5693 - protein, 75 aa, Glycine max
  misc_feature (1)..(75): Ceres Seq. ID no. 14311387
MYMPAAIADVSNPGLNPFGKYKKDFSSESEKETAVVNWMAQHGKEPSVAIGLQACQISWDDDEHFYEAGLPWWRC

SEQ ID NO: 5694 - protein, 73 aa, Glycine max
  misc_feature (1)..(73): Ceres Seq. ID no. 14311388
MPAAIADVSNPGLNPFGKYKKDFSSESEKETAVVNWMAQHGKEPSVAIGLQACQISWDDDEHFYEAGLPWWRC

SEQ ID NO: 5695 - DNA, 1221 bp, Glycine max
  misc_feature (1)..(1221): Ceres Seq. ID no. 14311419
agcagatggcactggcagagaaatatcggaataaaggaaatgattctaagggtcatccaatgaaacaatgtactacacgtccagtgccgatgacttcacaaattccaccatgcgcttcatcacatgctatatctcgtcccaccgatccatttgctaggacatctgatgtgagagatccaccttctatacagggagtgcactcaccatgtacttcacaaccaacaaatttagatgcaggacatacccttagatcatttgttgcattagagacacaaaacaacgatggcaagccaattatataccttagtggacaaggattcttaccttcacgccctgttgctaatgagattggggatatcctcaagagtcattatactgatccctggtcatcatggaagaagataccaattatcacaagagacttgtggctcggagagtttttgagaaagttttctatttgtccaccggattacaattgggcaaaaaagaattttgaaatacaaggtgcagcaatgatgaaaaatattctaaatgaggctcgaaccacaatgaataaaccaaattgggtcaaagacgatgtttgggagagattatgtgagcattggaaatctgaagaattaaaaaagaagagcacccaagctaatatgagtaaagagactggcacccttcctactccattggacttgtttcgtctcaagcatcaactttcagacaacacatgggtggatatacaggaggaatttgcacgaacattggaacaattgaccaaaagtgcatttgcgcaaggaaatcctccaccaagtgagtcagatgtctggcatgctatagttagaaagaaggggcttggaatggtaggaaggccttgctatcatggctcatcttcatcaatggagtgggtaaaaagacaagattttgatgaattaagaaaaaaaatgaaagaaattagaaatgaaagagataggcttcaaagtagagttgcaaacattgagaggcttgccgagcataacaatgcattgattcgagaattgatggaaagtatgaacaagccatctacaatagatgaaagtcaagatgaggatgggagtaactgagtgaaccataatgactcattgatgctgatttacctttaatgtgattatgtctaaaggcaaatgtcctgtactttggatattaatgtattcatagttaaaaaattgctaatttaaaaaaaaaaaaaaaaag

SEQ ID NO: 5696 - protein, 362 aa, Glycine max
  misc_feature (1)..(362): Ceres Seq. ID no. 14311420
QMALAEKYRNKGNDSKGHPMKQCTTRPVPMTSQIPPCASSHAISRPTDPFARTSDVRDPPSIQGVHSPCTSQPTNLDAGHTLRSFVALETQNNDGKPIIYLSGQGFLPSRPVANEIGDILKSHYTDPWSSWKKIPIITRDLWLGEFLRKFSICPPDYNWAKKNFEIQGAAMMKNILNEARTTMNKPNWVKDDVWERLCEHWKSEELKKKSTQANMSKETGTLPTPLDLFRLKHQLSDNTWVDIQEEFARTLEQLTKSAFAQGNPPPSESDVWHAIVRKKGLGMVGRPCYHGSSSSMEWVKRQDFDELRKKMKEIRNERDRLQSRVANIERLAEHNNALIRELMESMNKPSTIDESQDEDGSN

SEQ ID NO: 5697 - protein, 361 aa, Glycine max
  misc_feature (1)..(361): Ceres Seq. ID no. 14311421
MALAEKYRNKGNDSKGHPMKQCTTRPVPMTSQIPPCASSHAISRPTDPFARTSDVRDPPSIQGVHSPCTSQPTNLDAGHTLRSFVALETQNNDGKPIIYLSGQGFLPSRPVANEIGDILKSHYTDPWSSWKKIPIITRDLWLGEFLRKFSICPPDYNWAKKNFEIQGAAMMKNILNEARTTMNKPNWVKDDVWERLCEHWKSEELKKKSTQANMSKETGTLPTPLDLFRLKHQLSDNTWVDIQEEFARTLEQLTKSAFAQGNPPPSESDVWHAIVRKKGLGMVGRPCYHGSSSSMEWVKRQDFDELRKKMKEIRNERDRLQSRVANIERLAEHNNALIRELMESMNKPSTIDESQDEDGSN

SEQ ID NO: 5698 - protein, 343 aa, Glycine max
  misc_feature (1)..(343): Ceres Seq. ID no. 14311422
MKQCTTRPVPMTSQIPPCASSHAISRPTDPFARTSDVRDPPSIQGVHSPCTSQPTNLDAGHTLRSFVALETQNNDGKPIIYLSGQGFLPSRPVANEIGDILKSHYTDPWSSWKKIPIITRDLWLGEFLRKFSICPPDYNWAKKNFEIQGAAMMKNILNEARTTMNKPNWVKDDVWERLCEHWKSEELKKKSTQANMSKETGTLPTPLDLFRLKHQLSDNTWVDIQEEFARTLEQLTKSAFAQGNPPPSESDVWHAIVRKKGLGMVGRPCYHGSSSSMEWVKRQDFDELRKKMKEIRNERDRLQSRVANIERLAEHNNALIRELMESMNKPSTIDESQDEDGSN

SEQ ID NO: 5699 - DNA, 1467 bp, Glycine max
  misc_feature (1)..(1467): Ceres Seq. ID no. 14311451
tcagcactaggccccccccccaaggaaatctagcttccctgcaggcaagcatggaatcaatgatgagaaatcgagaactaagtgaaacaaggatgatgcaggctctaagagaggagctagcatctgctgagcgaagagcagaagaggagcgtgctgcacataatgctaccaaaatggctgctatggaaagagaagtggaattggagcacagagcagttgagtcatccactgcacttgcaaggatacagagagtagcggacgagaggacagcaaaagccacagaacttgagcagaaagtggcacttctcgaggttgaatgcgcatctttaaatcaagaactacaagatatggaagcccgtgtgcgccgggaacaaaaaaaggcaccagaagaggcaaatcaagtaattcagatgcaggcatggcaggaagaattggagcgtgcacgtcaaggtcagagggaagctgaaaacaagctatcatccttggaggctgaaatgcaaaaaatgagagttgaaatggctgccatgaagagggatgctgagcattactcacgtcaggagcatatggagttagagaaacgctatcgggaactgactgaccttttgtactacaaacaaactcaattagaaaccatggtcagtgaaaaagctgctgcagagtttcaattggaaaaggaaattaagcgtcttcaggaagcaaaggcagaggcagaaagaagtagagtttctcgtcgagcatcatcatcttgggaagatgagactgaaataaaatcccttgagccgcttcctttgcatcaccgtcatttggtcggtgcaagtattcagttgcaaaaggcagtgaaactattagattctggggctgtcagggccacaagatttctctggcagtatccaacagctcgagttattttatttttctacttggtgtttgtacatctcttcttgatgtatctcttgcatcgccttcaggtacaagctgacacattggccgctagagaagttgcagaatctatgggactttctaaccagaatttaccgtgactcttcaaaaatattccatctagggcatgtgtcaggtgttaataatatcttcctgactacatatattttcaagtgtacatttccaatgccgctgcttagggtggcttgataatggttttcagcaaattactcgtgcattgcaaaccaaaagaggaacttaggtacaggcatcttatgtctcaagttgatcttttgagaaactgttgcaagatggagttgggaaaattggaatttgctttagccgtatgattattgaatgggtggcacagcttctctttcttgtgtaggctgtcctgaaaattgaattggttgattatatgtttattcgttttttcttctccgaaaatgtattttgagtggaacgatgtagatacaaatatattttgtgatatcatttttcttcgttccaagggcaattgccaaaact

SEQ ID NO: 5700 - protein, 345 aa, Glycine max
  misc_feature (1)..(345): Ceres Seq. ID no. 14311452
STRPPPQGNLASLQASMESMMRNRELSETRMMQALREELASAERRAEEERAAHNATKMAAMEREVELEHRAVESSTALARIQRVADERTAKATELEQKVALLEVECASLNQELQDMEARVRREQKKAPEEANQVIQMQAWQEELERARQGQREAENKLSSLEAEMQKMRVEMAAMKRDAEHYSRQEHMELEKRYRELTDLLYYKQTQLETMVSEKAAAEFQLEKEIKRLQEAKAEAERSRVSRRASSSWEDETEIKSLEPLPLHHRHLVGASIQLQKAVKLLDSGAVRATRFLWQYPTARVILFFYLVFVHLFLMYLLHRLQVQADTLAAREVAESMGLSNQNLP

SEQ ID NO: 5701 - protein, 329 aa, Glycine max
  misc_feature (1)..(329): Ceres Seq. ID no. 14311453
MESMMRNRELSETRMMQALREELASAERRAEEERAAHNATKMAAMEREVELEHRAVESSTALARIQRVADERTAKATELEQKVALLEVECASLNQELQDMEARVRREQKKAPEEANQVIQMQAWQEELERARQGQREAENKLSSLEAEMQKMRVEMAAMKRDAEHYSRQEHMELEKRYRELTDLLYYKQTQLETMVSEKAAAEFQLEKEIKRLQEAKAEAERSRVSRRASSSWEDETEIKSLEPLPLHHRHLVGASIQLQKAVKLLDSGAVRATRFLWQYPTARVILFFYLVFVHLFLMYLLHRLQVQADTLAAREVAESMGLSNQNLP

SEQ ID NO: 5702 - protein, 326 aa, Glycine max
  misc_feature (1)..(326): Ceres Seq. ID no. 14311454
MMRNRELSETRMMQALREELASAERRAEEERAAHNATKMAAMEREVELEHRAVESSTALARIQRVADERTAKATELEQKVALLEVECASLNQELQDMEARVRREQKKAPEEANQVIQMQAWQEELERARQGQREAENKLSSLEAEMQKMRVEMAAMKRDAEHYSRQEHMELEKRYRELTDLLYYKQTQLETMVSEKAAAEFQLEKEIKRLQEAKAEAERSRVSRRASSSWEDETEIKSLEPLPLHHRHLVGASIQLQKAVKLLDSGAVRATRFLWQYPTARVILFFYLVFVHLFLMYLLHRLQVQADTLAAREVAESMGLSNQNLP

SEQ ID NO: 5703 - DNA, 1161 bp, Glycine max
  misc_feature (1)..(1161): Ceres Seq. ID no. 14311463
atcccactttgttaaaaatttcacgaaaaaaaataaaataaaaattggaaaaattccaattccgctctcgattttcgatttcggagtttgatagcaacgttggaaggaaaggtgagagcaaaatcgttggaagaatctggtttttgggtcgtggttgttgttttcgccatcaaaacaatgtcttcgccggacattgtctcgatattggagaactcgaaggagttcgatcgggtgaggaaagaacaagaggatattctgtcggagatcaacaaacttcacaagaagcttcaagcaactcctgaagtagttgagaagcctggggataactcattggctaggctgaaatttttgtacactcaagcaaaagatctttcagaaagtgaagcaagtatttccaacttactgataaaccaaattgatgccctactgcctacgggtccacaagggcaaacacgaagaagaatagaaggtaatgagcagaaaaggaaacgagtgaagactgagtcagacatttcaaggctaactcctaatatgcgaagtcaacttgaggcttgtgccagtcttaaaggcgaacaggtagcggctagggtcacaccacgaaatgctgataaggacgagtggtttgtcgtaaaagtgattcattttgataaggaatcaaaggaatttgaagtactggatgaggaaccaggcgatgatgaagaaagcagtggccaaagacaatacaagcttcccatggcaaatatcattcctttccccaagagtaatgatccttctagcgctcttgatttccctcctggaaaacatgttttggcggtctatccaggaactactgcactttataaagcaacagttgttcaaggccctcgcagaaggaagaccgaggattatgtgttggaatttgatgatgatgaggaagatggatctttacctcaaaggacagtgccattccgcaaagtggttcctcttccagaaggacatcgccaatgagtttgagtataagctatttattatagttgtgtataaagcagaaactagaccattgcatatgtgccacttgtgtaatatgctccgtgtgatgtggtttgtaagaatgacattgcaacccaatttcgaacatgtaagaatgacacgaagttcaatttcacgttacctagaaatgat

SEQ ID NO: 5704 - protein, 269 aa, Glycine max
  misc_feature (1)..(269): Ceres Seq. ID no. 14311464
MSSPDIVSILENSKEFDRVRKEQEDILSEINKLHKKLQATPEVVEKPGDNSLARLKFLYTQAKDLSESEASISNLLINQIDALLPTGPQGQTRRRIEGNEQKRKRVKTESDISRLTPNMRSQLEACASLKGEQVAARVTPRNADKDEWFVVKVIHFDKESKEFEVLDEEPGDDEESSGQRQYKLPMANIIPFPKSNDPSSALDFPPGKHVLAVYPGTTALYKATVVQGPRRRKTEDYVLEFDDDEEDGSLPQRTVPFRKVVPLPEGHRQ

SEQ ID NO: 5705 - protein, 161 aa, Glycine max
  misc_feature (1)..(161): Ceres Seq. ID no. 14311465
MRNQAMMKKAVAKDNTSFPWQISFLSPRVMILLALLISLLENMFWRSIQELLHFIKQQLFKALAEGRPRIMCWNLMMMRKMDLYLKGQCHSAKWFLFQKDIANEFEYKLFIIVVYKAETRPLHMCHLCNMLRVMWFVRMTLQPNFEHVRMTRSSISRYLEM

SEQ ID NO: 5706 - protein, 156 aa, Glycine max
  misc_feature (1)..(156): Ceres Seq. ID no. 14311466
MMKKAVAKDNTSFPWQISFLSPRVMILLALLISLLENMFWRSIQELLHFIKQQLFKALAEGRPRIMCWNLMMMRKMDLYLKGQCHSAKWFLFQKDIANEFEYKLFIIVVYKAETRPLHMCHLCNMLRVMWFVRMTLQPNFEHVRMTRSSISRYLEM

SEQ ID NO: 5707 - DNA, 1167 bp, Glycine max
  misc_feature (1)..(1167): Ceres Seq. ID no. 14311467
atttttagtcttttgactcatatgaaccctaattttgggttgaattactctctctctctctctctttccttaaaattagatttcaaagttctcaccttttgtcttcctcgtatctcgcagcctcgagggcttccgacattcccagcgattatgctcgaatccgaagacaaagggacataaaaaaaagcaactctttcaagttgagtgttgtgtggggatggatcaaatagtttcaggagaagaagaagaggagcttggtgttgacattgaggaaggtgttgggttcaatgagacacaagatataacaacaaccaatcaagaagatgttcttgatcaggtttggagtgggcggttgagttatgaccacaggtctgaaaatcttactgatgatgatgctgatgatggtctgataaaccccttgatgggaggagatgggaagcagaggagagaaagaagcagccaaagtctggacctttcggatagaaaattcgatagtgtcaaggttaagaagacgaggaagccttcttccaagcctcctagacctccgaaaggtcctttattgactgcaaacgaccagaagctgatgagggagatcgcggagctcgctatgaggaagcgtgctaggattgagcgtatgagaaggatgaaagcagcaaagtcttcttctccttgcagtagcattttggctatgatagtgactgttatcttcttcgtcttccttatctttcaagggttcttcacaagcaatgcaagtttgagttcaagcaattctccagcaccagacaataaccgtatggtctctgttcagttcttcaatgagtttgctcctcgtgagagaatcgatcccagcccaactacgaggttcaggtataagagagtctcgggtgcagacaatgaagagaacacaagagaagttaccagatgagttagttctcttgggattctttgtaatgtaaaaccaaaaaacagtacttatgttttgttttattcttgacatcattctattgttccttttgctctgttcttgtgctcacatgtgtctctctgcgtgtatatatatgttgttatggatgaatctcgaaaccttctttggggttaggctttgtacagcaactgagtcttatgtcctaaaacaataatgctgatgaagtcatgatgattgatggc

SEQ ID NO: 5708 - protein, 235 aa, Glycine max
  misc_feature (1)..(235): Ceres Seq. ID no. 14311468
MDQIVSGEEEEELGVDIEEGVGFNETQDITTTNQEDVLDQVWSGRLSYDHRSENLTDDDADDGLINPLMGGDGKQRRERSSQSLDLSDRKFDSVKVKKTRKPSSKPPRPPKGPLLTANDQKLMREIAELAMRKRARIERMRRMKAAKSSSPCSSILAMIVTVIFFVFLIFQGFFTSNASLSSSNSPAPDNNRMVSVQFFNEFAPRERIDPSPTTRFRYKRVSGADNEENTREVTR

SEQ ID NO: 5709 - protein, 167 aa, Glycine max
  misc_feature (1)..(167): Ceres Seq. ID no. 14311469
MGGDGKQRRERSSQSLDLSDRKFDSVKVKKTRKPSSKPPRPPKGPLLTANDQKLMREIAELAMRKRARIERMRRMKAAKSSSPCSSILAMIVTVIFFVFLIFQGFFTSNASLSSSNSPAPDNNRMVSVQFFNEFAPRERIDPSPTTRFRYKRVSGADNEENTREVTR

SEQ ID NO: 5710 - DNA, 1322 bp, Glycine max
  misc_feature (1)..(1322): Ceres Seq. ID no. 14311477
aactcacacacccttctcttctctctttcaattccttcccagctcttcattgaagaagctatggactttctaaacttcttgcttaacttgttggtccctccaggcagtatgatcaccttggctttctcatggcctgcactttgcttcctcaatttttgtgagtggctttataatagtatatatggtgaggatatggataataaagtggtcataatcaccggcgcatcttcaggcattggagagcaaattgcatatgagtatgctttgaggagagcaaatttaacgttggtggcccgcagagagcacaggctaagagggatcgctgagaatgcaaagagattgggtgcaagacatgtgatgattatggcagcagatgttgtgaaggaagatgattgtaggagatttgttaacgaaaccataaatgtctttggccgtgtagatcatcttgtaaatacagtgagtttgggacatacattctgctttgaagaagctacagacacatcagttttccctgttctcctggatattaatttttgggggaatgtttatccaacatttgtggctcttccttaccttcatcaaagcaatggtcgtattattatcaatgcatcagttgaaagttggttgcctatgccaaggatgagtttatatgctgctgcaaaggcagcattagtgaacttttatgagacactgagatttgagttgaaagatgaggttggaataacaatagccacacatggttggattggaagcgaaatgacgaggggcaagttcatgctggaggagggtgctgagatgcaatggaaggaagaaagagaagtgcaggtgacgggtggaccagtagaggagttcgcaaggttgatagtatcaggggcatgtagaggagatgcatatgtgaagtttcctagctggtatgatgtattcctactatacagggtgtttgctccaagagttcttaactgggcattcaggcttcttatttcgccacaagggacaagaagagcttcttcttatgtagggactggcaaacacatcgaagctgtgggtatggtgagacctatggctatgctggagggaacctcacctacacacaatgccattggtcctcttaccttctctggccagctgatcagccagcacaagctcgattaattccaacatcatatcctccagaaaattatgaagccatctactttttctatacatatatatgcttttatcatttattgcattcttgctatcaccatgcttcgtgaaactatgtcatgttgttggactttgttgtcaaaaatgaaaataaacttgtcttgattgccaaatcc

SEQ ID NO: 5711 - protein, 383 aa, Glycine max
  misc_feature (1)..(383): Ceres Seq. ID no. 14311478
NSHTLLFSLSIPSQLFIEEAMDFLNFLLNLLVPPGSMITLAFSWPALCFLNFCEWLYNSIYGEDMDNKVVIITGASSGIGEQIAYEYALRRANLTLVARREHRLRGIAENAKRLGARHVMIMAADVVKEDDCRRFVNETINVFGRVDHLVNTVSLGHTFCFEEATDTSVFPVLLDINFWGNVYPTFVALPYLHQSNGRIIINASVESWLPMPRMSLYAAAKAALVNFYETLRFELKDEVGITIATHGWIGSEMTRGKFMLEEGAEMQWKEEREVQVTGGPVEEFARLIVSGACRGDAYVKFPSWYDVFLLYRVFAPRVLNWAFRLLISPQGTRRASSYVGTGKHIEAVGMVRPMAMLEGTSPTHNAIGPLTFSGQLISQHKLD

SEQ ID NO: 5712 - protein, 363 aa, Glycine max
  misc_feature (1)..(363): Ceres Seq. ID no. 14311479
MDFLNFLLNLLVPPGSMITLAFSWPALCFLNFCEWLYNSIYGEDMDNKVVIITGASSGIGEQIAYEYALRRANLTLVARREHRLRGIAENAKRLGARHVMIMAADVVKEDDCRRFVNETINVFGRVDHLVNTVSLGHTFCFEEATDTSVFPVLLDINFWGNVYPTFVALPYLHQSNGRIIINASVESWLPMPRMSLYAAAKAALVNFYETLRFELKDEVGITIATHGWIGSEMTRGKFMLEEGAEMQWKEEREVQVTGGPVEEFARLIVSGACRGDAYVKFPSWYDVFLLYRVFAPRVLNWAFRLLISPQGTRRASSYVGTGKHIEAVGMVRPMAMLEGTSPTHNAIGPLTFSGQLISQHKLD

SEQ ID NO: 5713 - protein, 347 aa, Glycine max
  misc_feature (1)..(347): Ceres Seq. ID no. 14311480
MITLAFSWPALCFLNFCEWLYNSIYGEDMDNKVVIITGASSGIGEQIAYEYALRRANLTLVARREHRLRGIAENAKRLGARHVMIMAADVVKEDDCRRFVNETINVFGRVDHLVNTVSLGHTFCFEEATDTSVFPVLLDINFWGNVYPTFVALPYLHQSNGRIIINASVESWLPMPRMSLYAAAKAALVNFYETLRFELKDEVGITIATHGWIGSEMTRGKFMLEEGAEMQWKEEREVQVTGGPVEEFARLIVSGACRGDAYVKFPSWYDVFLLYRVFAPRVLNWAFRLLISPQGTRRASSYVGTGKHIEAVGMVRPMAMLEGTSPTHNAIGPLTFSGQLISQHKLD

SEQ ID NO: 5714 - DNA, 1189 bp, Glycine max
  misc_feature (1)..(1189): Ceres Seq. ID no. 14311493
attcttttcactttttgggtcctcttcttctctctctcaatttaaatatcactctcctctcccctccaccacgactagtaaataaatggatccctcgtccgtgaacggcttctactcgttcctgacgctgggaatcgacgatctagagagagtgttcctgagcacaaacttcatgtcaatccaattcctccaaagagtggtctctgttctaagatcgttccacacccaattgaccctcctggtccagaaactccagctcccagtgggcgacaagtggctggacgagtacatggacgaaagctccaaactctgggacgcctgccacctcatcaagtccggcatttcggccatggatagctactactctgccgccctcaacatcacctcctccctcgactcccatcgccacatcaccccccaagtctctcgccaggtaataagggccattgccgggtgccgtcgggaggcggtggggctggaggaggagaacagggcgctgatggaggcgcggattgaggccttgtcgcttcggttccaagagaggctgtccatcgagtccaagctgaacggcttcaacggcttcagaggggtgctgtacgcaatgaggaacgtgagttcgttgctgctcatggtacttctgtacggactcgtgtactgctatggggactcctcggacttcgtgttgggcggttgcgggtacgaggggtgcctgttcctgggatcggcgttcatgatgtcgacggccaggttgcagcagcgggtggcggcggagatcgggcacatgggcggctcgccggggatgcttctgcacgagtttcggaggtcgaaggtggccatggaggagctgagaggggagttagagagaagagggtcagggtctcagggagtggagtgggagagtgaggttgctattagagagagagtggagaatctcagaacgtgttttggggttctcagatctggggcagacaacattgttgctcagcttgatgatttctttgacgagattgtggaagggaggaagaggcttttggacttttgcagtcataggtgactcagccaattcaaaatgaaataggtgtcttggctgcctacaaaaaatagaaacaaagacaaggtagaagaatagttgatggggttgttgtaccttttattaaccctttctttaattattattattgttattatc

SEQ ID NO: 5715 - protein, 322 aa, Glycine max
  misc_feature (1)..(322): Ceres Seq. ID no. 14311494
MDPSSVNGFYSFLTLGIDDLERVFLSTNFMSIQFLQRVVSVLRSFHTQLTLLVQKLQLPVGDKWLDEYMDESSKLWDACHLIKSGISAMDSYYSAALNITSSLDSHRHITPQVSRQVIRAIAGCRREAVGLEEENRALMEARIEALSLRFQERLSIESKLNGFNGFRGVLYAMRNVSSLLLMVLLYGLVYCYGDSSDFVLGGCGYEGCLFLGSAFMMSTARLQQRVAAEIGHMGGSPGMLLHEFRRSKVAMEELRGELERRGSGSQGVEWESEVAIRERVENLRTCFGVLRSGADNIVAQLDDFFDEIVEGRKRLLDFCSHR

SEQ ID NO: 5716 - protein, 293 aa, Glycine max
  misc_feature (1)..(293): Ceres Seq. ID no. 14311495
MSIQFLQRVVSVLRSFHTQLTLLVQKLQLPVGDKWLDEYMDESSKLWDACHLIKSGISAMDSYYSAALNITSSLDSHRHITPQVSRQVIRAIAGCRREAVGLEEENRALMEARIEALSLRFQERLSIESKLNGFNGFRGVLYAMRNVSSLLLMVLLYGLVYCYGDSSDFVLGGCGYEGCLFLGSAFMMSTARLQQRVAAEIGHMGGSPGMLLHEFRRSKVAMEELRGELERRGSGSQGVEWESEVAIRERVENLRTCFGVLRSGADNIVAQLDDFFDEIVEGRKRLLDFCSHR

SEQ ID NO: 5717 - protein, 254 aa, Glycine max
  misc_feature (1)..(254): Ceres Seq. ID no. 14311496
MDESSKLWDACHLIKSGISAMDSYYSAALNITSSLDSHRHITPQVSRQVIRAIAGCRREAVGLEEENRALMEARIEALSLRFQERLSIESKLNGFNGFRGVLYAMRNVSSLLLMVLLYGLVYCYGDSSDFVLGGCGYEGCLFLGSAFMMSTARLQQRVAAEIGHMGGSPGMLLHEFRRSKVAMEELRGELERRGSGSQGVEWESEVAIRERVENLRTCFGVLRSGADNIVAQLDDFFDEIVEGRKRLLDFCSHR

SEQ ID NO: 5718 - DNA, 1248 bp, Glycine max
  misc_feature (1)..(1248): Ceres Seq. ID no. 14311497
agagacattctccctccaaaagaatcacattctttgttttcttcttcttggccatggcttattcccgttggtgctggttcccactctacttagcagcctcaattgccctcggaatcatcgccatctcctcagcgatacgttccacttccaacaagaacccaccccaagatccacccataccccacgacatctcactcaacgcctccaacgctctccgcaaagcaggcttcatagtaatggcagatcttctccaccactctccctcattcttcaaaccgccgcaaaactcaaccatcttcgccatcaaagactccgccatcaaaaacacctcccaccctctctggttcctcaaaaccctcctcctctaccacaccaccacctccaacgcctattccttcaacgacctcgtcaaaattccccaaggaacgtgcctccccaccctccttcgtgataaaaatgtttctctcactaagcttgaccttgaccatgcaccaaactccgtggagattaatcacgtcttgatatcaaaccctaatatcttcctcggagagcaacttgccgtgcatggcgttcttgcgccgttctctccccttcagccgcaagaccttcttcaacggggttttggttttgctattcgcacacccacttgccgctccaacgacgtcaacgtctccgtttccaagaacggggttgagtggaaccgcgtcgttcacttgctccgtgcaaaagggtatgcttcgttctcgattgcgttgcattctgttcttgatgggataaagagagacttttctgggagtttgggttatgtcacaatcttcgctcctcgcgatttgactttacttggataccctttgactattcttgatagagctgtgaggcttcatattctgcctcaaaggtttgtttacaaagaaatctcttctctgccggttaggagtttgttaaagacgctcatgcctgatgagcatcttgagattgatggggttctggattttgtgccgggcatggttgttaatggtgttgtgattgtggcgcctgacatgatcatttcggagaaatttgtggttcatgggatttctagagcttttaagatggctgaggttactagttgaagatattattgaaggtcaatggagtccatacattatgatagggtcagggaaatttgtagcaattttgcttttgggtgcataagtttgtatcatttttagtttcattggataatgtacaaaacatgtatgttctcgt

SEQ ID NO: 5719 - protein, 369 aa, Glycine max
  misc_feature (1)..(369): Ceres Seq. ID no. 14311498
RHSPSKRITFFVFFFLAMAYSRWCWFPLYLAASIALGIIAISSAIRSTSNKNPPQDPPIPHDISLNASNALRKAGFIVMADLLHHSPSFFKPPQNSTIFAIKDSAIKNTSHPLWFLKTLLLYHTTTSNAYSFNDLVKIPQGTCLPTLLRDKNVSLTKLDLDHAPNSVEINHVLISNPNIFLGEQLAVHGVLAPFSPLQPQDLLQRGFGFAIRTPTCRSNDVNVSVSKNGVEWNRVVHLLRAKGYASFSIALHSVLDGIKRDFSGSLGYVTIFAPRDLTLLGYPLTILDRAVRLHILPQRFVYKEISSLPVRSLLKTLMPDEHLEIDGVLDFVPGMVVNGVVIVAPDMIISEKFVVHGISRAFKMAEVTS

SEQ ID NO: 5720 - protein, 352 aa, Glycine max
  misc_feature (1)..(352): Ceres Seq. ID no. 14311499
MAYSRWCWFPLYLAASIALGIIAISSAIRSTSNKNPPQDPPIPHDISLNASNALRKAGFIVMADLLHHSPSFFKPPQNSTIFAIKDSAIKNTSHPLWFLKTLLLYHTTTSNAYSFNDLVKIPQGTCLPTLLRDKNVSLTKLDLDHAPNSVEINHVLISNPNIFLGEQLAVHGVLAPFSPLQPQDLLQRGFGFAIRTPTCRSNDVNVSVSKNGVEWNRVVHLLRAKGYASFSIALHSVLDGIKRDFSGSLGYVTIFAPRDLTLLGYPLTILDRAVRLHILPQRFVYKEISSLPVRSLLKTLMPDEHLEIDGVLDFVPGMVVNGVVIVAPDMIISEKFVVHGISRAFKMAEVTS

SEQ ID NO: 5721 - protein, 291 aa, Glycine max
  misc_feature (1)..(291): Ceres Seq. ID no. 14311500
MADLLHHSPSFFKPPQNSTIFAIKDSAIKNTSHPLWFLKTLLLYHTTTSNAYSFNDLVKIPQGTCLPTLLRDKNVSLTKLDLDHAPNSVEINHVLISNPNIFLGEQLAVHGVLAPFSPLQPQDLLQRGFGFAIRTPTCRSNDVNVSVSKNGVEWNRVVHLLRAKGYASFSIALHSVLDGIKRDFSGSLGYVTIFAPRDLTLLGYPLTILDRAVRLHILPQRFVYKEISSLPVRSLLKTLMPDEHLEIDGVLDFVPGMVVNGVVIVAPDMIISEKFVVHGISRAFKMAEVTS

SEQ ID NO: 5722 - DNA, 1401 bp, Glycine max
  misc_feature (1)..(1401): Ceres Seq. ID no. 14311509
atcggttataccctttgccccctctctctctctctctctccttctcagtgcaaacagtttagaaaaccaaattaatctagttcaatcatacatagagaatacagtgtaaagaatagattttctcccctaccaaaaacaagagggagctgagatattgtaaggtggtgtgaaaggaattaacaaggatctgttttgggatatatgggcataagagaaagagatgacatggtgcaatgactcagatgaggagaggggaattgatcaactggttgcaccaacaattactcctacttcaactaataacactactgttcttactgatcatcgcacaaaagcaagcgaaattcgcaccttaacttgcccctcatgtggccaaaacattgaattccaagaccagactggaatcaatgacttgccggggttaccagctggggtgaagtttgatccgaatgaccaagagatattagagcatttggaagcaaaggtactgtctgacgtgccaaagcttcatccacttattgatgagttcataccaacgcttgaaggagagaatgggatctgttatacgcatccagaaaagcttccaggtgtaagaaaagatgggcaaatccgccacttctttcacaggccatctaaagcatacacaacaggaacaaggaaaagaagaaaggttcacaccgacgaagaaggaagcgagacaaggtggcacaaaacaggaaaaactagacccgtttttgttggtggtgctgtgaaggggttcaagaaaatcctagtcctctacaccaactatggaaggcaaaagaagcctgagaagaccaattgggtgatgcatcaataccaccttggcactagcgaagaagagaaagatggagaattggtggtttcaaaggttttctaccaaacacaacctcgacaatgtggtaattccattataaagcaggatctttatgatgaagaaagattgatgactaaccaaagtgtccataatgatgatgacaacaatataatacctagaaataataatgcaagtgctcttatggactactacaatccttctttcataaattatgaccaattgggtggtcgtagtaatagggaaaattcacctcaacttattccaaatttggtcatgcaaggtgatagctcttctttcattcgattagcaatggatgcaaccaaagccaagatggacagaaaatagctccttactggaagaactttcttggtagaacatatagtagtgacaatgaccatatattgatgttgatgttttttttttatattactattatatatataacatgtatttattctatatatgggacgataagttggaagaaagacaaggcttccattattattattatatatatatgtgtgtcgaggattacccatttgacg

SEQ ID NO: 5723 - protein, 326 aa, Glycine max
  misc_feature (1)..(326): Ceres Seq. ID no. 14311510
MTWCNDSDEERGIDQLVAPTITPTSTNNTTVLTDHRTKASEIRTLTCPSCGQNIEFQDQTGINDLPGLPAGVKFDPNDQEILEHLEAKVLSDVPKLHPLIDEFIPTLEGENGICYTHPEKLPGVRKDGQIRHFFHRPSKAYTTGTRKRRKVHTDEEGSETRWHKTGKTRPVFVGGAVKGFKKILVLYTNYGRQKKPEKTNWVMHQYHLGTSEEEKDGELVVSKVFYQTQPRQCGNSIIKQDLYDEERLMTNQSVHNDDDNNIIPRNNNASALMDYYNPSFINYDQLGGRSNRENSPQLIPNLVMQGDSSSFIRLAMDATKAKMDRK

SEQ ID NO: 5724 - DNA, 1254 bp, Glycine max
  misc_feature (1)..(1254): Ceres Seq. ID no. 14311531
ctttcataaatatttctttcgtataactcggtcccacttgccttcttctgtaacgtgtaaaaaacaaacactaaatctcccgcacccccgagcccggaaagagatctagtgtgtctgtgactgtcagaaacaaacattatttggttttctgaattgtttggattgcgagaaaaaaaaaaaaaggaaaaatggcaaaggatattcgattcttcgacctcaacacgggcgccaagatcccttcagtcggcttgggaacttggcagtccgatcctggccttgttgctgaagccgtcgcggcggccatcaaggttggttaccgccacattgattgtgctcaaatctatggcaatgagaaggagattggctctttgttgaagaatctgtttgaggagggtgtattgaagcgcgaggatttgtggattacatctaaactctggaatactgatcatgctccagaagatgtaccactggcactggaccggaccttgaaagatttgcagctggattatgtagatttgtatcttatccactggcctgctccgatgaagaaaggatcagctggctttaagcctgaaaatcttgtgcaaccaaacatacctaacacctggaaggcgatggaagcactctatgactctggcaaggctcggaccatcggtgtaagcaatttttccaccaagaagctctcggatttgctgctaattgctcgtgttcctcccgctgtcaaccaggtggagtgtcatccttcctggcagcaggacaagctgcaggctttctgcaattccaaaggtgtccacctctctggatattcacctttgggttcccctggaacaacctggcttaaaagtgatgtcctcaagcatcaagttataaatatgattgcggagaaactaggcaagacgcctgcacaagtagctcttcgctggggacttcaaatgggccatagtgttcttcccaagagtacaaacgaaactagaataaaggaaaattttgatgtttttggctggtctatacctgaggacctgctcgccaaattttctgagattcaacaggcaagattactcaggggtaccacatttgcccatgaaacttatggtgcctacagatcccttgaggaactttgggatggtgaaatctgagaaatctatctgtaaatttgataagtgaatggatcgaggagtgagagttctgtgaaactgtgaatcagtatactcctttgttgacttgagcaaattttattttattcctggtttgacg

SEQ ID NO: 5725 - protein, 315 aa, Glycine max
  misc_feature (1)..(315): Ceres Seq. ID no. 14311532
MAKDIRFFDLNTGAKIPSVGLGTWQSDPGLVAEAVAAAIKVGYRHIDCAQIYGNEKEIGSLLKNLFEEGVLKREDLWITSKLWNTDHAPEDVPLALDRTLKDLQLDYVDLYLIHWPAPMKKGSAGFKPENLVQPNIPNTWKAMEALYDSGKARTIGVSNFSTKKLSDLLLIARVPPAVNQVECHPSWQQDKLQAFCNSKGVHLSGYSPLGSPGTTWLKSDVLKHQVINMIAEKLGKTPAQVALRWGLQMGHSVLPKSTNETRIKENFDVFGWSIPEDLLAKFSEIQQARLLRGTTFAHETYGAYRSLEELWDGEI

SEQ ID NO: 5726 - protein, 197 aa, Glycine max
  misc_feature (1)..(197): Ceres Seq. ID no. 14311533
MKKGSAGFKPENLVQPNIPNTWKAMEALYDSGKARTIGVSNFSTKKLSDLLLIARVPPAVNQVECHPSWQQDKLQAFCNSKGVHLSGYSPLGSPGTTWLKSDVLKHQVINMIAEKLGKTPAQVALRWGLQMGHSVLPKSTNETRIKENFDVFGWSIPEDLLAKFSEIQQARLLRGTTFAHETYGAYRSLEELWDGEI

SEQ ID NO: 5727 - protein, 173 aa, Glycine max
  misc_feature (1)..(173): Ceres Seq. ID no. 14311534
MEALYDSGKARTIGVSNFSTKKLSDLLLIARVPPAVNQVECHPSWQQDKLQAFCNSKGVHLSGYSPLGSPGTTWLKSDVLKHQVINMIAEKLGKTPAQVALRWGLQMGHSVLPKSTNETRIKENFDVFGWSIPEDLLAKFSEIQQARLLRGTTFAHETYGAYRSLEELWDGEI

SEQ ID NO: 5728 - DNA, 1300 bp, Glycine max
  misc_feature (1)..(1300): Ceres Seq. ID no. 14311539
acttttcattttctaggttacatggttttagttgatgtgacaatgcttggatcgttgtaaggggcaactgaattattttagtaatgtatgataaactatccctttataaatgtgcagccaatctcttgcaattagctaaagaaagtggggctaatattaaacatattttatacaatgatgagaaatataaatttatgaatataaaagcattatatgcccttgtatgtgaggcattgaaacattggagtatcattgaacttctaattaacgaatcaaaaatattgatcaatgaacaagaattagacatttggcttgtcagaatattaattacagagcacatttttggaaagaagaaaattgatagtcttaatgaatttgggcgtacaattcttcaatatgaatccaagtttagagaactgctctccaaacaagattcttataacacagaccatgtaaataagaatatagaaattaaaggtaagttctactactttcagcgttttatatagtttaatttggttttgttgcagacagtctaagcattggcggattgagtggacatctaacgtgagaagtgcagtcagtcaagaacttgaccttttagttaccaattaaaattccttaaaataaattaaaacttatttgtaaagtgaaaactcaacattcttctaaaatcttatgacatctgcaacaatgtcctatgttggtgtattagcatatttatttctctacagtacagctatgtttacctttcctttcatagcttactttgggacccattacattttgaaagacgtttttaatgttagtgatttctcaaatattgtatggtcagttattgctagtgtactagctgtcaacataattattggactgtatgcgtacaaagcgtattatgagcctgaaccagatagtgaccagcccccgcctgttccaccacgcatgaaaaggagtgacctcaacctgaaacaagaataacggtttagttacaaagacttagttttagttaattttttagaaatatctcgcttatcataattgatgtacatattatgcctgcttatataatcattgtttggtcaaagttgatgtaaataaatgtgattttatgtactacatgtatagcaaaaatagagccaaatattgttattattttatcacaattttataatattattgtaaagcaataattcagtattatgaaaatattaataatatttttagtgttataaaataataataataaaacatgcatatatatattaataaatatttcattaataaatcgctattgaatttg

SEQ ID NO: 5729 - protein, 141 aa, Glycine max
  misc_feature (1)..(141): Ceres Seq. ID no. 14311540
MYDKLSLYKCAANLLQLAKESGANIKHILYNDEKYKFMNIKALYALVCEALKHWSIIELLINESKILINEQELDIWLVRILITEHIFGKKKIDSLNEFGRTILQYESKFRELLSKQDSYNTDHVNKNIEIKGKFYYFQRFI

SEQ ID NO: 5730 - protein, 104 aa, Glycine max
  misc_feature (1)..(104): Ceres Seq. ID no. 14311541
MNIKALYALVCEALKHWSIIELLINESKILINEQELDIWLVRILITEHIFGKKKIDSLNEFGRTILQYESKFRELLSKQDSYNTDHVNKNIEIKGKFYYFQRFI

SEQ ID NO: 5731 - protein, 99 aa, Glycine max
  misc_feature (1)..(99): Ceres Seq. ID no. 14311542
MTSATMSYVGVLAYLFLYSTAMFTFPFIAYFGTHYILKDVFNVSDFSNIVWSVIASVLAVNIIIGLYAYKAYYEPEPDSDQPPPVPPRMKRSDLNLKQE

SEQ ID NO: 5732 - DNA, 1427 bp, Glycine max
  misc_feature (1)..(1427): Ceres Seq. ID no. 14311543
aaccctctttggcgtggctaacaaaacgacgttttgagtaacgcggcagcgtgtgccgggagtgtcgtttaatcgcccgccaagacattttcctttttcatttcatcgctgagtccctaaagtgcagtgaaatggtccttcttcacctcccaaggttccctctctacctcgttaccttatctccctccctcactccccgagcctactccaaaaccaccctcttacggccacccaaatccactctcaccgcctcagaacccgtaggtgttaacccttccccaacagagctatccctcgagaagctcttcgttccgccggagaccaccgtgtccctcgaaagttccagagtcttgaacggttccaacattctgttgagtaactacgccaatgatgctctggtattgcaggccgagtttgtgaaaagcagcgtgaagaccgaggattgtccctccgatggacttgctgagttcgctctcgttggccgctccaacgtcggaaaatcctcgctcctcaactccctcgtgcgccgcaagaagctcgccttaacttcgaagaaacctggcaaaacgcaatgtataaaccattttcggattaataatagctggtacctggttgatttgcctggatatgggtatgcatctgcaccgcatgaacttaggatggattgggaaaaattcaccaaaaactatttccttaaccgctcaacgttagtttcagtattccttctaatagatgctagcattcctgctaaacaaattgatcttgactatgccagttggttgggtcagaatcagatcccaatgacattaatcttcaccaaatgtgacaagcggaaaaagaaaaagaatggaggcaaaagaccagaagaaaatgttaatgattttcaggatttgattcgaggtttcttccaatcagtgcctccatggatcatgaccagtagtgttaccaatcagggtcgtgatgagatactcctccatatggcccagctacggaactactggctcaagcactagttctgagaaacatgatatcgttagagcagatacgcatttccagatagacttgcttgattaccagctaatatggttatcaatttatctattttcctggtgtgccttctctgtattgcccaagtacctacaaggcctaaagctagtgacatgaaagctggataaagaaaactatttagaacaaagcttgatactgtactgtacaacaccatgcctgcgtgaggttctctactcccagccctgtacgattgttctaatgaagtttgttttggatgttcacaaatggttattatcacctgtaaattagtaatgatattttcattcaaataattggatacttccaaagtactattgtcgttgattttaaagaacttatatgtgagatttttgccactcccccgaagtgacacttcatag

SEQ ID NO: 5733 - protein, 293 aa, Glycine max
  misc_feature (1)..(293): Ceres Seq. ID no. 14311544
MVLLHLPRFPLYLVTLSPSLTPRAYSKTTLLRPPKSTLTASEPVGVNPSPTELSLEKLFVPPETTVSLESSRVLNGSNILLSNYANDALVLQAEFVKSSVKTEDCPSDGLAEFALVGRSNVGKSSLLNSLVRRKKLALTSKKPGKTQCINHFRINNSWYLVDLPGYGYASAPHELRMDWEKFTKNYFLNRSTLVSVFLLIDASIPAKQIDLDYASWLGQNQIPMTLIFTKCDKRKKKKNGGKRPEENVNDFQDLIRGFFQSVPPWIMTSSVTNQGRDEILLHMAQLRNYWLKH

SEQ ID NO: 5734 - DNA, 919 bp, Glycine max
  misc_feature (1)..(919): Ceres Seq. ID no. 14311545
gcattagtattttaagtagtacatattcacttgaaaaaaaaatattatcgtgcaaagaacaagcttggaaaagaaaaatcttttaaaacgagttattcattttccaaaatcttttaactagtactttattaaaactcaattatctaattttgtttttgttgggttgcggtgtttctccgagttgcttcaattgaatggctcttcagcttccaccacttcctggccgtgccatgcgcttcaactcaagcgtgtgctcccttcctgcacgaaaatctagcacctttgccactctgtcacaaccccgaagcgactgggttgaagccactaacagtttcttcgaccaagacaaacgacccatcatgttatttgacggagtatgcaacttgtgcaacgggggtgtgaagttcgttcgtgataacgatcgaaataagacaattagatatgaacctcttcagagtgaaacgggtaaaatcttactcaggagatcaggaagagctcctgatgatatctcaagtgttgtacttgttgaaaaggaaagatcctatattaagtcagaagccgtgctgaagataatggaatatatagacttaccctttccacagctagcaattcttcttcaatttgtgcctctgtttatcagagattttgtttatgacaatgttgcaaacaatcgttacctgatttttggtcgttcggaatcatgtgaaatatagcatcatcctggcatgagtactggaggtaacagtaatgtgctaagttcaaaaactgggcttctttatagtccaagtcatatcctgttctcaaatattttgaagattctgtgtactactgtatagaagctttacttgtcgttttatttgataagctcatagaagcagaggacatcatcaattcgtaataatattttctgtcccaaatg

SEQ ID NO: 5735 - protein, 172 aa, Glycine max
  misc_feature (1)..(172): Ceres Seq. ID no. 14311546
MALQLPPLPGRAMRFNSSVCSLPARKSSTFATLSQPRSDWVEATNSFFDQDKRPIMLFDGVCNLCNGGVKFVRDNDRNKTIRYEPLQSETGKILLRRSGRAPDDISSVVLVEKERSYIKSEAVLKIMEYIDLPFPQLAILLQFVPLFIRDFVYDNVANNRYLIFGRSESCEI

SEQ ID NO: 5736 - protein, 160 aa, Glycine max
  misc_feature (1)..(160): Ceres Seq. ID no. 14311547
MRFNSSVCSLPARKSSTFATLSQPRSDWVEATNSFFDQDKRPIMLFDGVCNLCNGGVKFVRDNDRNKTIRYEPLQSETGKILLRRSGRAPDDISSVVLVEKERSYIKSEAVLKIMEYIDLPFPQLAILLQFVPLFIRDFVYDNVANNRYLIFGRSESCEI

SEQ ID NO: 5737 - protein, 117 aa, Glycine max
  misc_feature (1)..(117): Ceres Seq. ID no. 14311548
MLFDGVCNLCNGGVKFVRDNDRNKTIRYEPLQSETGKILLRRSGRAPDDISSVVLVEKERSYIKSEAVLKIMEYIDLPFPQLAILLQFVPLFIRDFVYDNVANNRYLIFGRSESCEI

SEQ ID NO: 5738 - DNA, 1647 bp, Glycine max
  misc_feature (1)..(1647): Ceres Seq. ID no. 14311553
aatttaccattcattttggtattttctatattggtctatgagtagcttagttttaaaattcagcagcaactcacaattaccaccacccttttgtttttgttcatgagtgtggcggcttcttatttatgacttcaagctaatcatcttttcttcttgttgtttgctatttttttagttataaactggcttgtgctgtatgttaggcttcttatttcatgttaatatgttatttaccttggcgatttcaacttgtactttatcttaagaataagcttcaaggctaaaccaatgtacacaccttgtgcaggacagacaaagctgattcacttaggagcctcaagagctatgtctacatcttctcgtgctcttcccactcccttggaaaacaagtatatgaaacccccagattcttttcagctttcacccgtcagatctgactgcaaattctgcctcatcaaattcaatcagaagtgctgggaagatgttgtcttcaccttctgaatgtcccgatgatatccctttttcctttgtttctcagacatcaggtgacaatgtgtcttccgaaattcattcaacagcattgatttctcaccctcaagataatgaagatctttcctggggaccagatccatttcaggatattcttggctttcctgaaaatgtttctgtccagcatgatcaggtgcaaaacaatggttgttacataaatgatgataatgtcaaaagatctgattttggggagtgggttgatcagttaatgtcaattgatgattctcttcacccgaactggagtcaacttcttggtgatgacaatgtagcagaaccaaaaccaaaggcatctcatgttcctcagcagcagcatatagcatctgtagaagttgttggcaattcagcatcaactgcaccgcagactaagcctagaatgcgttggactccagaacttcacgaggcctttgtggaagcagttaatcagcttggtggtagtgataaggctactccaaagggtgtgttgaatctaatgaaagttgagggccttactatctatcatgtaaaaagccacttgcagaagtatagaactgccagatataaaccagagccgtcagaaggaaattctgagaaaaaggtgactccaatggaagaaatgaaatctctagatttgaaaacgagtaaggggatcactgaagcattacgtttacagatggaactccagaagcgacttcacgaacaacttgagatccaaagaaagttgcagattcaaattgaagaccaagggaaacgtcttcagatgatgtttgagaaacagggagagatgggtgacaacaaggttaatggctcctcggacacaaacgaggaaggcgacaaatttgaaagcattccaaaagccatgcctgaagagaaggattcaagcacaagaaaacaaatagcaggtgaagctgaagaagtgatcaatgaagatgaagctgcaccacccacaaaacgggtgaaaagttcataacagcaagatcgttttatggttctagatttgtttaatattcttagactggtttggactgcatggaacttgtaaaaatattattggatccaaggatgtttcgacttgctcatttatcactgccagaagtaaaatcttgttttatatttgttatc

SEQ ID NO: 5739 - protein, 337 aa, Glycine max
  misc_feature (1)..(337): Ceres Seq. ID no. 14311554
MLSSPSECPDDIPFSFVSQTSGDNVSSEIHSTALISHPQDNEDLSWGPDPFQDILGFPENVSVQHDQVQNNGCYINDDNVKRSDFGEWVDQLMSIDDSLHPNWSQLLGDDNVAEPKPKASHVPQQQHIASVEVVGNSASTAPQTKPRMRWTPELHEAFVEAVNQLGGSDKATPKGVLNLMKVEGLTIYHVKSHLQKYRTARYKPEPSEGNSEKKVTPMEEMKSLDLKTSKGITEALRLQMELQKRLHEQLEIQRKLQIQIEDQGKRLQMMFEKQGEMGDNKVNGSSDTNEEGDKFESIPKAMPEEKDSSTRKQIAGEAEEVINEDEAAPPTKRVKSS

SEQ ID NO: 5740 - protein, 245 aa, Glycine max
  misc_feature (1)..(245): Ceres Seq. ID no. 14311555
MSIDDSLHPNWSQLLGDDNVAEPKPKASHVPQQQHIASVEVVGNSASTAPQTKPRMRWTPELHEAFVEAVNQLGGSDKATPKGVLNLMKVEGLTIYHVKSHLQKYRTARYKPEPSEGNSEKKVTPMEEMKSLDLKTSKGITEALRLQMELQKRLHEQLEIQRKLQIQIEDQGKRLQMMFEKQGEMGDNKVNGSSDTNEEGDKFESIPKAMPEEKDSSTRKQIAGEAEEVINEDEAAPPTKRVKSS

SEQ ID NO: 5741 - protein, 190 aa, Glycine max
  misc_feature (1)..(190): Ceres Seq. ID no. 14311556
MRWTPELHEAFVEAVNQLGGSDKATPKGVLNLMKVEGLTIYHVKSHLQKYRTARYKPEPSEGNSEKKVTPMEEMKSLDLKTSKGITEALRLQMELQKRLHEQLEIQRKLQIQIEDQGKRLQMMFEKQGEMGDNKVNGSSDTNEEGDKFESIPKAMPEEKDSSTRKQIAGEAEEVINEDEAAPPTKRVKSS

SEQ ID NO: 5742 - DNA, 1179 bp, Glycine max
  misc_feature (1)..(1179): Ceres Seq. ID no. 14311572
atcgatccaaaaccttctaagccttcactatgacagatcctaagtccaatttatacactgaaaccttcaacttcatgcccctctattctcacctctcttcttttagtacttctcaatcaaacttattctcttcttactcaaacaacaacactttcgccattcaatctgaaacctcttcctcttatgctcctccttctcctcctctcagagaagcccttcctctcataaacaacataagcctcagaaaacaaaaggaaaaaaatgaaccatcaaagagtggtggtggtatggttgaagaggaaggaggaaagaaaagggacatggatgagacgacccttttgatgactagtactactactgaagagggtgatgctgaaactgtgacagtagcactgcaaatagggcttcctagcgtggctgcttctgatgatcttaatgggtcaaggaagatccctgcagcttgtgcacaaatgaatgaaaaggaggatgcgaggagtgtgatttctggacacccttttgatagattgaacaaggttcagtattggattcccaccccttctcagattctcattggtcctactcagtttttgtgtcatgtgtgctctaagagtttcaacagatataataatcttcagatgcatatgtggggacatggatctcaatatagaaagggccctgattctctaaaaggaacacaaccatcagcaatgctacggcttccatgcttttgttgtgcaccaggttgcaagcacaacatagaccacccaagagcaaggcctctgaaggacttcagaacccttcaaacacactacaagagaaaacacggcattaaaccctacatgtgcagaaaatgtgacaaaacgtttgcggtgaaaggtgattggaggacacacgagaagaactgtggcaaaatatggtactgtttatgtgggtctgatttcaaacacaaaagatctctaaaggatcacataaaggcctttggccatggccacggtgctgttgacattgattgcatgcaagaagatgaagcggcctccgaaattgaacatgatggggatatctcaatgtgaaaattaataagtttggaaaatcaaaattgaagtgacttttcatgtaattaattaattaatttcacatacatgcttaattgtaatagattgtataaggtgtattttatat

SEQ ID NO: 5743 - protein, 346 aa, Glycine max
  misc_feature (1)..(346): Ceres Seq. ID no. 14311573
MTDPKSNLYTETFNFMPLYSHLSSFSTSQSNLFSSYSNNNTFAIQSETSSSYAPPSPPLREALPLINNISLRKQKEKNEPSKSGGGMVEEEGGKKRDMDETTLLMTSTTTEEGDAETVTVALQIGLPSVAASDDLNGSRKIPAACAQMNEKEDARSVISGHPFDRLNKVQYWIPTPSQILIGPTQFLCHVCSKSFNRYNNLQMHMWGHGSQYRKGPDSLKGTQPSAMLRLPCFCCAPGCKHNIDHPRARPLKDFRTLQTHYKRKHGIKPYMCRKCDKTFAVKGDWRTHEKNCGKIWYCLCGSDFKHKRSLKDHIKAFGHGHGAVDIDCMQEDEAASEIEHDGDISM

SEQ ID NO: 5744 - protein, 331 aa, Glycine max
  misc_feature (1)..(331): Ceres Seq. ID no. 14311574
MPLYSHLSSFSTSQSNLFSSYSNNNTFAIQSETSSSYAPPSPPLREALPLINNISLRKQKEKNEPSKSGGGMVEEEGGKKRDMDETTLLMTSTTTEEGDAETVTVALQIGLPSVAASDDLNGSRKIPAACAQMNEKEDARSVISGHPFDRLNKVQYWIPTPSQILIGPTQFLCHVCSKSFNRYNNLQMHMWGHGSQYRKGPDSLKGTQPSAMLRLPCFCCAPGCKHNIDHPRARPLKDFRTLQTHYKRKHGIKPYMCRKCDKTFAVKGDWRTHEKNCGKIWYCLCGSDFKHKRSLKDHIKAFGHGHGAVDIDCMQEDEAASEIEHDGDISM

SEQ ID NO: 5745 - protein, 260 aa, Glycine max
  misc_feature (1)..(260): Ceres Seq. ID no. 14311575
MVEEEGGKKRDMDETTLLMTSTTTEEGDAETVTVALQIGLPSVAASDDLNGSRKIPAACAQMNEKEDARSVISGHPFDRLNKVQYWIPTPSQILIGPTQFLCHVCSKSFNRYNNLQMHMWGHGSQYRKGPDSLKGTQPSAMLRLPCFCCAPGCKHNIDHPRARPLKDFRTLQTHYKRKHGIKPYMCRKCDKTFAVKGDWRTHEKNCGKIWYCLCGSDFKHKRSLKDHIKAFGHGHGAVDIDCMQEDEAASEIEHDGDISM

SEQ ID NO: 5746 - DNA, 1365 bp, Glycine max
  misc_feature (1)..(1365): Ceres Seq. ID no. 14311579
ccttaatcttaacagaaacacacacttgttctgttcctacggttttgttatggctcttccttcactatcctttctcttcatcttcacttccttcatcgtctccgtctcacactcaataccctttattgttattcatggaattggggatcagtgctctaatcgtggagtgaaaaaattcacacagcaattgagcagcttctctggtgctgaaggatattgtgtcgaggttggaaatggatcatgggattcatggtttgagcctttgaaagagcaggctgagattgtttgtgaaaaggtgaagcaaatgaaagaattgaaggaaggatacaacattgttggactttcccagggaaatttaattggtcgaggcgttgtggaattttgtgaaggaggacctcctgttaaaaactttatctctttagcaggccctcacgctggtactgcttcagttcccctatgtggttcaggtatcttctgcgttcttgcagacaccctcatcaagggagaggtttacagtagctatattcaagaacacttggctcctagtggatatcttaaattaccgaatgccatacctgattatttggagaactgtagatttcttccagtgcttaacaatgaaataccagataagagaaattctacttacaaggaaagatttagtagcttgcagaatttggtacttatcatgtttgagcacgacactgttttaataccaaaggaaacttcctggtttggatattacccagatggctacttcaagccagttttaccaccacaatcaacagaactctacattgaggattggataggcttaagaactctagatgaagctggaaaagttcacttcattagtgttccaggaaatcatcttggaatctcccaagaggatatgaaaaagcatgtagtgccatatttgaaggatcacatattcgtacaagatagtatcaataaggctaggttcaggttgcgaggagttaatcagaaagttattcaaagtaatatgatggaacaatctcaaaaggaggaggtggaaccatcatcctccccattacttgatggatcattgccatactggtggcctacaccattcaagactttccttggtgaattgattggcattaatgaagaggaatctatacaaaggaaataatcacattacacgttattgtgaaactaaatctattaaattgaacaaaatgtgtttggactgatcaaaagatttatcagatagatatagaaaaatagtattatatgttgatattagtttagttgataaatatcaaaatgcttcacttggaagtcttaggttctattttctttggtgaatacttatgaacacctaattttgtttgacttctctct

SEQ ID NO: 5747 - protein, 383 aa, Glycine max
  misc_feature (1)..(383): Ceres Seq. ID no. 14311580
LNLNRNTHLFCSYGFVMALPSLSFLFIFTSFIVSVSHSIPFIVIHGIGDQCSNRGVKKFTQQLSSFSGAEGYCVEVGNGSWDSWFEPLKEQAEIVCEKVKQMKELKEGYNIVGLSQGNLIGRGVVEFCEGGPPVKNFISLAGPHAGTASVPLCGSGIFCVLADTLIKGEVYSSYIQEHLAPSGYLKLPNAIPDYLENCRFLPVLNNEIPDKRNSTYKERFSSLQNLVLIMFEHDTVLIPKETSWFGYYPDGYFKPVLPPQSTELYIEDWIGLRTLDEAGKVHFISVPGNHLGISQEDMKKHVVPYLKDHIFVQDSINKARFRLRGVNQKVIQSNMMEQSQKEEVEPSSSPLLDGSLPYWWPTPFKTFLGELIGINEEESIQRK

SEQ ID NO: 5748 - protein, 367 aa, Glycine max
  misc_feature (1)..(367): Ceres Seq. ID no. 14311581
MALPSLSFLFIFTSFIVSVSHSIPFIVIHGIGDQCSNRGVKKFTQQLSSFSGAEGYCVEVGNGSWDSWFEPLKEQAEIVCEKVKQMKELKEGYNIVGLSQGNLIGRGVVEFCEGGPPVKNFISLAGPHAGTASVPLCGSGIFCVLADTLIKGEVYSSYIQEHLAPSGYLKLPNAIPDYLENCRFLPVLNNEIPDKRNSTYKERFSSLQNLVLIMFEHDTVLIPKETSWFGYYPDGYFKPVLPPQSTELYIEDWIGLRTLDEAGKVHFISVPGNHLGISQEDMKKHVVPYLKDHIFVQDSINKARFRLRGVNQKVIQSNMMEQSQKEEVEPSSSPLLDGSLPYWWPTPFKTFLGELIGINEEESIQRK

SEQ ID NO: 5749 - protein, 282 aa, Glycine max
  misc_feature (1)..(282): Ceres Seq. ID no. 14311582
MKELKEGYNIVGLSQGNLIGRGVVEFCEGGPPVKNFISLAGPHAGTASVPLCGSGIFCVLADTLIKGEVYSSYIQEHLAPSGYLKLPNAIPDYLENCRFLPVLNNEIPDKRNSTYKERFSSLQNLVLIMFEHDTVLIPKETSWFGYYPDGYFKPVLPPQSTELYIEDWIGLRTLDEAGKVHFISVPGNHLGISQEDMKKHVVPYLKDHIFVQDSINKARFRLRGVNQKVIQSNMMEQSQKEEVEPSSSPLLDGSLPYWWPTPFKTFLGELIGINEEESIQRK

SEQ ID NO: 5750 - DNA, 1442 bp, Glycine max
  misc_feature (1)..(1442): Ceres Seq. ID no. 14311590
ataaattagaaccgattgaaagtaatcaatccgtggattctctgaacttatcgcttcttcccggtaggtccatttcgcttttgtttctgtttcccatatcctgcctgtgttatcttattagggtttcgttcccaattgcaattcaattcaaattcgcacactatttactaggtttgaatttgggtgtttccgtttcaatggatgacggcgagcttgatttctccaaccatgaagtgttttcgagtcccaacatgggtgagcttcccagcagcggttcaatggacagtttcttcgacgagcttctcaaggacacgcacgcctgcacccacacccacacctgtaaccctcccggccccgatttctcccacactcacacgtgctaccatgtccacaccaaaatcgtccccgcccctgaggaggaccatgtcgccaccgatgacaccgccgagtccgccgagaagaagtcgtcgtcgtcgaagaagcggtctctggggaacaaagaggccgtccggaagtaccgcgagaagaagaaggcgcgtgcggcgtcgctggaggacgaggttgtgaagttgagggctctgaaccagcacttgatgaagaagctgaaggggcaggcggctctcgaggccgaaatcgcgaggctcaagtgtttgttggttgacataagggggaggattgaaggggaaattgggtcgtttccctatcagaaaccaacgccgaatgcgaaccctccggtggctaacttgcctggttcttatgtgatgaacccttgtaacttgcaatgtgatgatcgggtgtattgccatcacccctatgggaaaattggggagagtgcggctttgaatggggaagagtttgatggttgtgaatttgagaacctgcagtgtctggcaagccagaatttggggctcaaggatcttcgtgcctgtggggttggacaggcaaggtctaatgtaaattcttctgcatcaaataaaagaaaagggggatctcatgctgtgacagctggttgaagaattaataaattggtggttttcatctttgccatgaacttagggaagatgggggtgtgtttcatctttcagtacttagtgctgtggacagcatttttgctggacaagggtagaaggaactgttcctttaactgaagattttgcatatgggcatgtcttctacaagttaagacagacaagtgatttgttttgtatttgagaacgcaaagtaactgtttcgatgatgggaaaagcatatctgcctgtctgcccttagagaacaagtcttgaatagatttcggtaaattaaaaatgctcttgctgatcctcttttggaatgattaataaaacattacattattgtatcttctacttcgaccgccgttgtggacaaaatttgtaataattttactttgcgttagagtctctatagtaaataattgcttaaat

SEQ ID NO: 5751 - protein, 336 aa, Glycine max
  misc_feature (1)..(336): Ceres Seq. ID no. 14311591
KLEPIESNQSVDSLNLSLLPGRSISLLFLFPISCLCYLIRVSFPIAIQFKFAHYLLGLNLGVSVSMDDGELDFSNHEVFSSPNMGELPSSGSMDSFFDELLKDTHACTHTHTCNPPGPDFSHTHTCYHVHTKIVPAPEEDHVATDDTAESAEKKSSSSKKRSLGNKEAVRKYREKKKARAASLEDEVVKLRALNQHLMKKLKGQAALEAEIARLKCLLVDIRGRIEGEIGSFPYQKPTPNANPPVANLPGSYVMNPCNLQCDDRVYCHHPYGKIGESAALNGEEFDGCEFENLQCLASQNLGLKDLRACGVGQARSNVNSSASNKRKGGSHAVTAG

SEQ ID NO: 5752 - protein, 271 aa, Glycine max
  misc_feature (1)..(271): Ceres Seq. ID no. 14311592
MDDGELDFSNHEVFSSPNMGELPSSGSMDSFFDELLKDTHACTHTHTCNPPGPDFSHTHTCYHVHTKIVPAPEEDHVATDDTAESAEKKSSSSKKRSLGNKEAVRKYREKKKARAASLEDEVVKLRALNQHLMKKLKGQAALEAEIARLKCLLVDIRGRIEGEIGSFPYQKPTPNANPPVANLPGSYVMNPCNLQCDDRVYCHHPYGKIGESAALNGEEFDGCEFENLQCLASQNLGLKDLRACGVGQARSNVNSSASNKRKGGSHAVTAG

SEQ ID NO: 5753 - protein, 253 aa, Glycine max
  misc_feature (1)..(253): Ceres Seq. ID no. 14311593
MGELPSSGSMDSFFDELLKDTHACTHTHTCNPPGPDFSHTHTCYHVHTKIVPAPEEDHVATDDTAESAEKKSSSSKKRSLGNKEAVRKYREKKKARAASLEDEVVKLRALNQHLMKKLKGQAALEAEIARLKCLLVDIRGRIEGEIGSFPYQKPTPNANPPVANLPGSYVMNPCNLQCDDRVYCHHPYGKIGESAALNGEEFDGCEFENLQCLASQNLGLKDLRACGVGQARSNVNSSASNKRKGGSHAVTAG

SEQ ID NO: 5754 - DNA, 1371 bp, Glycine max
  misc_feature (1)..(1371): Ceres Seq. ID no. 14311594
attgtcacattatactttgatagccattctggcatgctttctttgctccacagcggagtacaccaccactgtccactggtacactcttggcattttccctttcttttttcatttttatttttaaatcccactctcattttcccttccacttttccaattccttcacttcacactctcacactcacagacacagtctctctaatctaatggatgcaaagtctgctgaagctgttgttcccttagaaccattgaagtatcagacatggttcttgaaagtttcgatccactgtgaaggttgcaggaggaaagttaagaaggttctacagagcattgatggtgtttttaccacaacggttgacccgcaacagcaaaaagtaaccgtcactggaagcgttggagttgagacgctcataaggaaactggtcaaagccggaaaacacgccgagatttggccggagaatctcgccgccgggaagggaaagaactccggcaaagacaagaagcagcagcagcagcagaagaagaagaagaacgaacaaggagaaccagaaagcgcggtaaacaactctactacaacaaatgcagaacaaaacactaactctggcacaaaaaagggaattgaaaaaaatgctggcgaaaacaagagcaccggaaactcaaagtccggcggcggagaaagtgaggcagcgaaaccggagaacaagggtggtcaaagtgaagggggttctgggaagaaaaagaaaaagaaaggtcaaagcggtggagtgagtgcagcatgtggtgatgcacctgcgcacactggatcggaggtgcagtgttctgggcagatgaatctgagccctacacgtcagcaatcatacgtgtatcctgaaacatactgttatcctcaccaagtggtgtatctagcaactcacaacaacaacaggttatgtcccatgcccatgggaacaatgggtggtccttcttactatgtttcatcattgccctacatgtgtgcaggcttcgaccatgactctccttattatcgctttcaatctccacccttcgaaatcttcagtgatgagaatgccaacggttgttctattgtgtgaccaaagataaatcaaataaacatagtgctttttgtttctttgatggtcccaggtagaggtagtttttttttttttttgttttgttatgtttttgtattttgaggagggaaaaatcgagcttatggcatatacgttgtgctctgtccttggattttctaggggctcactttgctgcatttactactccaacactgaaatatgcccaaccttaccttattttgatcttttggaccaagctgtaaataatattctaatatggacccttttaatatttcatgtc

SEQ ID NO: 5755 - protein, 294 aa, Glycine max
  misc_feature (1)..(294): Ceres Seq. ID no. 14311595
MDAKSAEAVVPLEPLKYQTWFLKVSIHCEGCRRKVKKVLQSIDGVFTTTVDPQQQKVTVTGSVGVETLIRKLVKAGKHAEIWPENLAAGKGKNSGKDKKQQQQQKKKKNEQGEPESAVNNSTTTNAEQNTNSGTKKGIEKNAGENKSTGNSKSGGGESEAAKPENKGGQSEGGSGKKKKKKGQSGGVSAACGDAPAHTGSEVQCSGQMNLSPTRQQSYVYPETYCYPHQVVYLATHNNNRLCPMPMGTMGGPSYYVSSLPYMCAGFDHDSPYYRFQSPPFEIFSDENANGCSIV

SEQ ID NO: 5756 - DNA, 1157 bp, Glycine max
  misc_feature (1)..(1157): Ceres Seq. ID no. 14311596
atcctaatttgttattgttatctcgtcctagcacactccagactctgcgaacagctaccactgtcgaccatcaccatgcagtccagctccaaggccggcggcaatggcgacgaggagcacctggtttgcgtgacgggggcggggagcttcatcgggtcgtgggtggtcaaggagctcctcctccgtggctaccatgtccggggaaccgccagagatcccgctgaccgcaagaacgcgcatctgctggcgctggacggcgccgaggagaggctcaccctgtgccgcgccgacgtcatggacggcgacagcctcggcgccgcattccatggctgccgcggcgtgttccatgtcgcctccccggtctccaatgaccctgagctcatgcctgaggccgtggaggggacgaggaacgtgatcaacgcggcagcagacgcgggcgtgcggcgtgtggtgttcacttcctcctacggtgccgtgcacatggacccaaagcggagcccggacaccgtcgtcgatgagtcgtgctggagcgactacgactactgcaaacaaaccggcaatctgtactgctgcgccaagatgatggcggaggtcgccgcgaaggaggaggcgaccaagagggggctggagctggcggtggtggtgccggcgacgaccatcggtcctgccctgcagcagacgctcaacttcagcagtgaccacgtcgcccgctacctcacaggcgccaagccggcctaccagaacgtcgtcaccgcctacatcgatgtccgagacgtcgcccgcgcgcacgccctcgtctacgagcaccctgacgcgcgcggcgatcgctacctctgcgtcagcgccgtgatgcaccgcgctcacttcgtccggctcctcaaggacctctacccgcagtaccccgtcaccgccaagcgcgaagacgacggcaagccgatggcgagggagtacaggttctcgaatcagaagctcggggatttgggcttggagttcactgacatgaggacaagtttgtacgacacggtgatttgcctgcagcacaggggccatgtccctgtcatcgtgccacgtcatcgtgcatgtttgtgaaaattataatgtgtacacaaattgaactcgattataagcaaataaatgaggataagtactctgttttc

SEQ ID NO: 5757 - protein, 362 aa, Glycine max
  misc_feature (1)..(362): Ceres Seq. ID no. 14311597
ILICYCYLVLAHSRLCEQLPLSTITMQSSSKAGGNGDEEHLVCVTGAGSFIGSWVVKELLLRGYHVRGTARDPADRKNAHLLALDGAEERLTLCRADVMDGDSLGAAFHGCRGVFHVASPVSNDPELMPEAVEGTRNVINAAADAGVRRVVFTSSYGAVHMDPKRSPDTVVDESCWSDYDYCKQTGNLYCCAKMMAEVAAKEEATKRGLELAVVVPATTIGPALQQTLNFSSDHVARYLTGAKPAYQNVVTAYIDVRDVARAHALVYEHPDARGDRYLCVSAVMHRAHFVRLLKDLYPQYPVTAKREDDGKPMAREYRFSNQKLGDLGLEFTDMRTSLYDTVICLQHRGHVPVIVPRHRACL

SEQ ID NO: 5758 - protein, 337 aa, Glycine max
  misc_feature (1)..(337): Ceres Seq. ID no. 14311598
MQSSSKAGGNGDEEHLVCVTGAGSFIGSWVVKELLLRGYHVRGTARDPADRKNAHLLALDGAEERLTLCRADVMDGDSLGAAFHGCRGVFHVASPVSNDPELMPEAVEGTRNVINAAADAGVRRVVFTSSYGAVHMDPKRSPDTVVDESCWSDYDYCKQTGNLYCCAKMMAEVAAKEEATKRGLELAVVVPATTIGPALQQTLNFSSDHVARYLTGAKPAYQNVVTAYIDVRDVARAHALVYEHPDARGDRYLCVSAVMHRAHFVRLLKDLYPQYPVTAKREDDGKPMAREYRFSNQKLGDLGLEFTDMRTSLYDTVICLQHRGHVPVIVPRHRACL

SEQ ID NO: 5759 - protein, 264 aa, Glycine max
  misc_feature (1)..(264): Ceres Seq. ID no. 14311599
MDGDSLGAAFHGCRGVFHVASPVSNDPELMPEAVEGTRNVINAAADAGVRRVVFTSSYGAVHMDPKRSPDTVVDESCWSDYDYCKQTGNLYCCAKMMAEVAAKEEATKRGLELAVVVPATTIGPALQQTLNFSSDHVARYLTGAKPAYQNVVTAYIDVRDVARAHALVYEHPDARGDRYLCVSAVMHRAHFVRLLKDLYPQYPVTAKREDDGKPMAREYRFSNQKLGDLGLEFTDMRTSLYDTVICLQHRGHVPVIVPRHRACL

SEQ ID NO: 5760 - DNA, 1348 bp, Glycine max
  misc_feature (1)..(1348): Ceres Seq. ID no. 14311637
gatgcatgggagaagaaattgtataaggaagttaaggatgaagagaggttacgagctatttatgagaaaaagttcaagagactgaaaacattggataatctaggagctgaatctagtaaaattgatgctactagggcatcaataaggaagctgcaaacaaaaatcaatatttgcatcagaactgctgaaactataatgggaagaatacataaattgagggataatgaattgcagcctcaacttgcagcattgattaacggattcataagaatgtggaaattcatgctcaaatgccaccagaaacagttccaagctatcatggagagtaaaagtcagtctcttaagattaacgtgggtctgcaaggagatgaaggtttgaaggccattgtagaacttgaaaaggagcttttgaattggtgcagtcagttcaaccattgggttaagactcaaaaatcttatgtcaagaatttgaatgagtggctcataaggtgccttcctaatgaacctgaagaaacagctgatggtattgcccctttctctccaagtcagcttgatgccccaccagtttttataatttgcaatgattggaatcatgcaatgagtagaatatcagaaactggggtggcagaggccatgcatgaatttgctctaaaactacatgagttatgggaaaagcaagatgaagcgcaacgccagagaatcaaagcagagtatcttagaaaggactttgagaaacagcttagaactttgcacacagaaatgggaggctcagaacatgaccatgataaagttttgggaaagattgcattgtcaaagcttgcttctgatagtggtgtttcaccactagatgatcttaaagtggatttagattctatgaagaagaaattgcatgaagagagggtcaggcataaagaagccatcaaacttgttcgtgatgcagctaataatagtttacaagctggtttgattcccattttcaagacattagagagtttcacttcagaggtggtgaaagctcatgaacaagtcaggcttcaaagtgccggggacaagtagatattccagctatttggtttcttttgagatcatgtgattgcatttactagtgtggattaattgggggagtctagagattacatggaagatttagaactaacccaccagttttgcagctagagttagtgttattatataggaaagcacctcttgaattaccctatagaggtttgctcggaacatgtttcagcgatgaaaggtttgggcgcctaaaatgtcaggagtggtcatcgtgaattcagctccggtaacatccaatctatagttaggggaaaattgtacagacaaaaac

SEQ ID NO: 5761 - protein, 351 aa, Glycine max
  misc_feature (1)..(351): Ceres Seq. ID no. 14311638
DAWEKKLYKEVKDEERLRAIYEKKFKRLKTLDNLGAESSKIDATRASIRKLQTKINICIRTAETIMGRIHKLRDNELQPQLAALINGFIRMWKFMLKCHQKQFQAIMESKSQSLKINVGLQGDEGLKAIVELEKELLNWCSQFNHWVKTQKSYVKNLNEWLIRCLPNEPEETADGIAPFSPSQLDAPPVFIICNDWNHAMSRISETGVAEAMHEFALKLHELWEKQDEAQRQRIKAEYLRKDFEKQLRTLHTEMGGSEHDHDKVLGKIALSKLASDSGVSPLDDLKVDLDSMKKKLHEERVRHKEAIKLVRDAANNSLQAGLIPIFKTLESFTSEVVKAHEQVRLQSAGDK

SEQ ID NO: 5762 - protein, 286 aa, Glycine max
  misc_feature (1)..(286): Ceres Seq. ID no. 14311639
MGRIHKLRDNELQPQLAALINGFIRMWKFMLKCHQKQFQAIMESKSQSLKINVGLQGDEGLKAIVELEKELLNWCSQFNHWVKTQKSYVKNLNEWLIRCLPNEPEETADGIAPFSPSQLDAPPVFIICNDWNHAMSRISETGVAEAMHEFALKLHELWEKQDEAQRQRIKAEYLRKDFEKQLRTLHTEMGGSEHDHDKVLGKIALSKLASDSGVSPLDDLKVDLDSMKKKLHEERVRHKEAIKLVRDAANNSLQAGLIPIFKTLESFTSEVVKAHEQVRLQSAGDK

SEQ ID NO: 5763 - protein, 261 aa, Glycine max
  misc_feature (1)..(261): Ceres Seq. ID no. 14311640
MWKFMLKCHQKQFQAIMESKSQSLKINVGLQGDEGLKAIVELEKELLNWCSQFNHWVKTQKSYVKNLNEWLIRCLPNEPEETADGIAPFSPSQLDAPPVFIICNDWNHAMSRISETGVAEAMHEFALKLHELWEKQDEAQRQRIKAEYLRKDFEKQLRTLHTEMGGSEHDHDKVLGKIALSKLASDSGVSPLDDLKVDLDSMKKKLHEERVRHKEAIKLVRDAANNSLQAGLIPIFKTLESFTSEVVKAHEQVRLQSAGDK

SEQ ID NO: 5764 - DNA, 1798 bp, Glycine max
  misc_feature (1)..(1798): Ceres Seq. ID no. 14311667
atcttgttggtccattcgtgcggtaacggaaggagacaataagcgtctccatcgcttaaattgccgagaacttcattacccattatctgttacagttctacgctctcgctccaaaccccacttcagatttggtttactggaaggaaagtgcttgaaggacccaatctacacgagagatgcaatggcaataaacacacacatgttagcttcaatgtgttattattgctgccactgtgattaatgagtaagtcactgtgtcaaaggatatagagctgttttcttccagtgcatctttggtttgagatttatgtagttttctctgaaaagtgattactagtttccctcaaacaataatggaggcagcaaaggttctttcacactgcaaaactgccccttttggtttctctatcgtgagcaacaaagtatctctgagacctttcgacaaacattttcatgctgatgtacttgctaacagacccaagagcattagttttcaattgaattgttcctatggaaaccctttttcctctgtgctgaaacctgcaagaaaaagggctaattttttaccttctcccagatgctcaatttccagtagtgccagcactgaatctcaaaatccagtcctagagttctttagaaatgtgccatttgattcaataaaagctacacttctgcagttgactccaattgatgttgtgaagtggtctgggatattatgcatcatagctgcagccacaaaatggactatgaatatgcttttcagtcccttcttttggatgtattttagctggacgtggttgttctggccttggatggtggccatagggcttgcagtctatgggttatattgctttcggaaacatctgcacagtgaggcaaacatatttgagcaattggctattgttacatcagtttttacgtggctcactcttgttccacctggtcatttcaatggctaccttgaaggctggccttatgttttcttttttgtgtatcattatttctttttcttcaatgttagtgttagaaagcggttatatggagattattttgctcagccccatgacccaaagtgggacgtgaacttgccaatgtggtctcgcctattgttcagcacaggagtcatggttggccattggcttgcagcatttgaagggcctgagcttcacctcataccgggtgggtggagcaatcttggaatctgggctttaatcattacaactctgctaatgcagtataatgctacattgtatctcgctaagtattcagaaaatgtggtggagccaacttctgtagtgcaatttggaccttatcgttgggtccgtcatccaatatattcatcaacaatgcttttgtttgtaacatactgcattgcgcttcgagcacctctgagtctgctatttattgtggcagtatgcttgttgtattataagcagaaggcagagaaggaagaggatttgatggttgagacttttggccagagttacacagaatatgcaagcaaagttaagtacaagcttattccttttatctattagttgatctccagaagtttagtcagtcatcaaaatctgattgtactgtcaggtttaggcaaaagatagtgttaattctcaaaatccaagtgtatctctttgtttactctttactctgttatctttagtgtagccttaaattatggtatcatgtgcacttgtggtgattagatttttgaagattttggttttcaatgatgttttgtttcatagaacatgcaaaatttgactatataaatcttgtctatattaagctgtgtgcc

SEQ ID NO: 5765 - protein, 394 aa, Glycine max
  misc_feature (1)..(394): Ceres Seq. ID no. 14311668
MEAAKVLSHCKTAPFGFSIVSNKVSLRPFDKHFHADVLANRPKSISFQLNCSYGNPFSSVLKPARKRANFLPSPRCSISSSASTESQNPVLEFFRNVPFDSIKATLLQLTPIDVVKWSGILCIIAAATKWTMNMLFSPFFWMYFSWTWLFWPWMVAIGLAVYGLYCFRKHLHSEANIFEQLAIVTSVFTWLTLVPPGHFNGYLEGWPYVFFFVYHYFFFFNVSVRKRLYGDYFAQPHDPKWDVNLPMWSRLLFSTGVMVGHWLAAFEGPELHLIPGGWSNLGIWALIITTLLMQYNATLYLAKYSENVVEPTSVVQFGPYRWVRHPIYSSTMLLFVTYCIALRAPLSLLFIVAVCLLYYKQKAEKEEDLMVETFGQSYTEYASKVKYKLIPFIY

SEQ ID NO: 5766 - protein, 263 aa, Glycine max
  misc_feature (1)..(263): Ceres Seq. ID no. 14311669
MNMLFSPFFWMYFSWTWLFWPWMVAIGLAVYGLYCFRKHLHSEANIFEQLAIVTSVFTWLTLVPPGHFNGYLEGWPYVFFFVYHYFFFFNVSVRKRLYGDYFAQPHDPKWDVNLPMWSRLLFSTGVMVGHWLAAFEGPELHLIPGGWSNLGIWALIITTLLMQYNATLYLAKYSENVVEPTSVVQFGPYRWVRHPIYSSTMLLFVTYCIALRAPLSLLFIVAVCLLYYKQKAEKEEDLMVETFGQSYTEYASKVKYKLIPFIY

SEQ ID NO: 5767 - protein, 261 aa, Glycine max
  misc_feature (1)..(261): Ceres Seq. ID no. 14311670
MLFSPFFWMYFSWTWLFWPWMVAIGLAVYGLYCFRKHLHSEANIFEQLAIVTSVFTWLTLVPPGHFNGYLEGWPYVFFFVYHYFFFFNVSVRKRLYGDYFAQPHDPKWDVNLPMWSRLLFSTGVMVGHWLAAFEGPELHLIPGGWSNLGIWALIITTLLMQYNATLYLAKYSENVVEPTSVVQFGPYRWVRHPIYSSTMLLFVTYCIALRAPLSLLFIVAVCLLYYKQKAEKEEDLMVETFGQSYTEYASKVKYKLIPFIY

SEQ ID NO: 5768 - DNA, 1283 bp, Glycine max
  misc_feature (1)..(1283): Ceres Seq. ID no. 14311675
gttgtgtgtaagtgtgaagagaagagaatggtagtaggattgaatgtgcctcagccatttctgtcaccagtttgcaagacggcaccttacccacttgatctcatcgccaccgccgcgtccctccacttcggccaccttctccgccgccgcgcgacccaccatctccgccttggggttcttcttcactcctgtttcaagaaactcgctcctttaactcacatttttagattgaacgataagtggtgtcaaagatgctttcaactcaatgggttgaactatcttcaactgtcagccggtgatttgacttcctcatggtcaactagtttctctttctttaatgggggaggagatggaggccgccgctatggaaaggctgggatgtccaactccaagatgtctggaaaagatccatttaatggaaggaaatggacagaaattctccttgctgccaatgttttattttatattgcacaacttgcaacccaaggcaagctattattgtggggagcaaagataaatagtctaattgacaaaggacaactttggagacttgccacgtcttcctttttgcatgccaacatcggacaccttttggtaaattgttattccttgaactcagttggtcctactgtggagagcttcagtggccctcggagatttcttgcagtttactttatctctgcaattgcaagttctgctacgagttattggttctgcagaatgcctgctgtaggtgcatcaggagcaatttttggactagttggatcagttgccgtatttgtattaaggcacaaagaccttgtgggaggtggtaaaaaagatttacaacacatagcccaagtaattgccctcaatatggttattgggctattatccactgggattgacaactggggacatttaggagggttggttggtggagttgctgcatcatggtttattggaccggcatggaaacatgaatccacatcaagtgatggaagaagacttttcattgacactgcaccaatgtataaactcttcaagattaaaagagtacctaagcaatggaaatagaaacatttcattatgtatggaatggaactcataactaatcattgctcgttgtttattggtaaaatgattcactgctgtgagcttctcttaaaatacttaatattgtggggttgtagtacaagtacctgacacgtctgaattattttgtatactttaataaccttcacactgggacattgtatttataaattgtatttgtgtaattggtatccttcattttccctctt

SEQ ID NO: 5769 - protein, 351 aa, Glycine max
  misc_feature (1)..(351): Ceres Seq. ID no. 14311676
VVCKCEEKRMVVGLNVPQPFLSPVCKTAPYPLDLIATAASLHFGHLLRRRATHHLRLGVLLHSCFKKLAPLTHIFRLNDKWCQRCFQLNGLNYLQLSAGDLTSSWSTSFSFFNGGGDGGRRYGKAGMSNSKMSGKDPFNGRKWTEILLAANVLFYIAQLATQGKLLLWGAKINSLIDKGQLWRLATSSFLHANIGHLLVNCYSLNSVGPTVESFSGPRRFLAVYFISAIASSATSYWFCRMPAVGASGAIFGLVGSVAVFVLRHKDLVGGGKKDLQHIAQVIALNMVIGLLSTGIDNWGHLGGLVGGVAASWFIGPAWKHESTSSDGRRLFIDTAPMYKLFKIKRVPKQWK

SEQ ID NO: 5770 - protein, 342 aa, Glycine max
  misc_feature (1)..(342): Ceres Seq. ID no. 14311677
MVVGLNVPQPFLSPVCKTAPYPLDLIATAASLHFGHLLRRRATHHLRLGVLLHSCFKKLAPLTHIFRLNDKWCQRCFQLNGLNYLQLSAGDLTSSWSTSFSFFNGGGDGGRRYGKAGMSNSKMSGKDPFNGRKWTEILLAANVLFYIAQLATQGKLLLWGAKINSLIDKGQLWRLATSSFLHANIGHLLVNCYSLNSVGPTVESFSGPRRFLAVYFISAIASSATSYWFCRMPAVGASGAIFGLVGSVAVFVLRHKDLVGGGKKDLQHIAQVIALNMVIGLLSTGIDNWGHLGGLVGGVAASWFIGPAWKHESTSSDGRRLFIDTAPMYKLFKIKRVPKQWK

SEQ ID NO: 5771 - protein, 225 aa, Glycine max
  misc_feature (1)..(225): Ceres Seq. ID no. 14311678
MSNSKMSGKDPFNGRKWTEILLAANVLFYIAQLATQGKLLLWGAKINSLIDKGQLWRLATSSFLHANIGHLLVNCYSLNSVGPTVESFSGPRRFLAVYFISAIASSATSYWFCRMPAVGASGAIFGLVGSVAVFVLRHKDLVGGGKKDLQHIAQVIALNMVIGLLSTGIDNWGHLGGLVGGVAASWFIGPAWKHESTSSDGRRLFIDTAPMYKLFKIKRVPKQWK

SEQ ID NO: 5772 - DNA, 1361 bp, Glycine max
  misc_feature (1)..(1361): Ceres Seq. ID no. 14311717
gaggaaatccctaataacccccggtcgcctttccacggcgaaaggtatcccggcggcgatggcggcggctgcggcaaggtccggatcccggcgcttgttctccatatccgccctggtgccaccgaagccaccgagccctcccccgaaggcagatcccttcgccagcctctttgttcccgggttaagcaagcgaacagtagctgatggacttaggggagcttttgcaaagtctggtgaagtcgtgcatggttctcttttgacaaaccttccagcatcatctgtaaaaaaatcaaggtggtatatgatcaatgcaaaccgttcaggtcctttgacagtgcgtaaagaataccgcaaagtacttccttctttcataaggccatctgcatcttactccacacaagcttcagaaaaaagaccaaaacaggagagaacagacttgacgactgttgaagatccctttaatgcgcctacctacaatatacctgagaagccagtgacatttgtcgagggcgcctcttacagtgttgtaatacttgctgggcttggagttgctgcattggctggatacgctgttttcaaagagcttatatttgaaccaaaagagtacaagatttttgggaaagctctagcaagagttcagagtgatagccaggttacagccaaaattggttaccctataactggttatggtacggaatccagaaaccgtgcagctcggcagcgcatccaaaacagggtttggacagatgaggatggtgttgaacatgtggaggtaggctttcatatccgagggccgcatggagctggaaaggtgtttgcggagatgttcaaagacagctccgacaggacatggaagttcacgtttcttctcgtcgagattacgtcaccgcgacccgcacaaatcatgttagaatcttacctaccagcatagggatgcaagagacaacatcagccagcagcggcacatctatgcgacacttcattttacatcctatctccaatggcctgcatctgatgttaaatacccgtcctcggattaaagaagttgtgaattttgaactttcccgaaagcataagtaggaggaagatgaaccatcagagctgctgaccatctctagtatcttagacatggtgtaccgtgcaaggaccttgatgttgttgctttgtttagctgaaaggcgcgcaggcacatgtatacaagccatctttcctgatgctcctcaaacaacatggaacggagcgagtgatccttcatctatcgagttgtggtctcgtttcaggcagttttaatgatgcctatggatttcatgcaaacctccaatgatgtccaaatagcaataatatctggttacattacggcc

SEQ ID NO: 5773 - protein, 309 aa, Glycine max
  misc_feature (1)..(309): Ceres Seq. ID no. 14311718
RKSLITPGRLSTAKGIPAAMAAAAARSGSRRLFSISALVPPKPPSPPPKADPFASLFVPGLSKRTVADGLRGAFAKSGEVVHGSLLTNLPASSVKKSRWYMINANRSGPLTVRKEYRKVLPSFIRPSASYSTQASEKRPKQERTDLTTVEDPFNAPTYNIPEKPVTFVEGASYSVVILAGLGVAALAGYAVFKELIFEPKEYKIFGKALARVQSDSQVTAKIGYPITGYGTESRNRAARQRIQNRVWTDEDGVEHVEVGFHIRGPHGAGKVFAEMFKDSSDRTWKFTFLLVEITSPRPAQIMLESYLPA

SEQ ID NO: 5774 - protein, 290 aa, Glycine max
  misc_feature (1)..(290): Ceres Seq. ID no. 14311719
MAAAAARSGSRRLFSISALVPPKPPSPPPKADPFASLFVPGLSKRTVADGLRGAFAKSGEVVHGSLLTNLPASSVKKSRWYMINANRSGPLTVRKEYRKVLPSFIRPSASYSTQASEKRPKQERTDLTTVEDPFNAPTYNIPEKPVTFVEGASYSVVILAGLGVAALAGYAVFKELIFEPKEYKIFGKALARVQSDSQVTAKIGYPITGYGTESRNRAARQRIQNRVWTDEDGVEHVEVGFHIRGPHGAGKVFAEMFKDSSDRTWKFTFLLVEITSPRPAQIMLESYLPA

SEQ ID NO: 5775 - protein, 209 aa, Glycine max
  misc_feature (1)..(209): Ceres Seq. ID no. 14311720
MINANRSGPLTVRKEYRKVLPSFIRPSASYSTQASEKRPKQERTDLTTVEDPFNAPTYNIPEKPVTFVEGASYSVVILAGLGVAALAGYAVFKELIFEPKEYKIFGKALARVQSDSQVTAKIGYPITGYGTESRNRAARQRIQNRVWTDEDGVEHVEVGFHIRGPHGAGKVFAEMFKDSSDRTWKFTFLLVEITSPRPAQIMLESYLPA

SEQ ID NO: 5776 - DNA, 1233 bp, Glycine max
  misc_feature (1)..(1233): Ceres Seq. ID no. 14311725
aacaaaatagaaaagtagcagcaccctgctcatttgttgggatcccattcttccacaacagttcaaagtttgctctctcattcctcacccctccgcctcctctctcacgtacgcacactgttttcacctaaaaagctgctacccaatactccgtacaccgtatacctaaaccaccccaactacaacggacactaacaaatcattattattactgttactattacatcacattcttcacacactaatcaaaatcatcattttccatatatatcgccagcaagatacaagaagaaagaaagatgcttccgtttcggagattctatgggttcgagagctggctagaccacgacgctggccatgctcagagttcgctgatcaaaaaggcggtggagttggacggcgccagatcgaaaacggagcggaaatcaacggaagcgtgcaagagtcacagggaagctgagaggagacgcaggcagagaatcaactctcacctctccaccttacgtaccctccttcctaacgccgccaagtcggacaaggcgtcgttgctgggggaagtggtggagcacgtgaagcggctgaggaagcaagccgatgacgtgacgtgcggggactcgtactcctcgcgcagcggcgaaccgggttcggtccggtcggaggcatggccgtttccgggggagtgcgatgaggtgacggtgagttactgtgacggcgaggacggggaaccgaagcgggtgaaggcgacggtgtgctgcggggaccggaccggtctgaaccgggacgtgtcccaagcgatccggtcggttcgggccaaagcggttcgcgcggagatgatgacggttgggggaaggacgaagagtgttgtggtggtggagtgggaaaaggaagaagaggaggttggggcgctggaacgggctttgaaggctgtggtggagaatcgggctttggtgggctttggaatgggcccagtcattctgggccagaaacggggtagggattgctgtgcttcgcctagtagtgaggttgactctgacttcttgctgaggaatgggagcttttgctaattcgtaattagtttctttttttggtaaaagaaataattagatgcttagttagctttcgggttggtaatcttggagatgcctttttttttatttatataggcatgatgctttagtctataccatagtctaaaatctaaaatttataataatatataattgtggtaatttt

SEQ ID NO: 5777 - protein, 254 aa, Glycine max
  misc_feature (1)..(254): Ceres Seq. ID no. 14311726
MLPFRRFYGFESWLDHDAGHAQSSLIKKAVELDGARSKTERKSTEACKSHREAERRRRQRINSHLSTLRTLLPNAAKSDKASLLGEVVEHVKRLRKQADDVTCGDSYSSRSGEPGSVRSEAWPFPGECDEVTVSYCDGEDGEPKRVKATVCCGDRTGLNRDVSQAIRSVRAKAVRAEMMTVGGRTKSVVVVEWEKEEEEVGALERALKAVVENRALVGFGMGPVILGQKRGRDCCASPSSEVDSDFLLRNGSFC

SEQ ID NO: 5778 - DNA, 1358 bp, Glycine max
  misc_feature (1)..(1358): Ceres Seq. ID no. 14311747
tgctctttttgaggagcactattacatcaagcaattgggtaactgtgacctatctggaatgagtgatcctcacgatgaattcaagggaaagaatgtcctgattgagagaaaggaaccttcagaactggcatcaaaatatggcatgtcagttgagacatatcaagaaattcttggagaatgcaggcataagttgtttgaagtaaggtcaaggcgtccaaagccacatttggatgataaggttattgtatcgtggaatggactggcaatctcatcttttgccagggcttctaagattctcaagggtgaagctgaagggaccaaattctactttcctgtcattggcactgaaccaaaggagtacatgggaattgcagaaaaagcagcatcctttattaggaagcaactttacaatgtagaaactcacaggctacaccatagtttcagacattcgccatctaaagctcctgctttcttggatgattatgcttttctgatttctggattgctggatctctatgagtttggtggtggaattagctggcttctatgggccattgaattgcaggaaacccaggatgctttgtttcttgataagacaggaggaggatatttcaataatacaggagaagatgcttccgttctcctccgtgtaaaggaagaccatgatggggcagaaccctcaggaaactcagtttctgctataaatcttataagattggcttccatggttgctggaagtaaggctgagcattataagcgaaatgcagaacatctattggcagtttttgagaaaaggttgaaagatatggctatggcagtgcctctaatgtgttgtgcagcagatatgttgcgtgtactttctcggaagcaagtggtcgtggttggtgaaaggacgtctgaggactttgaaaacatgcttgctgcagctcatgcagtatatgatcccaacagaacagttattcatatagatcccaacaacaaagacgagatggaattttgggaagtaaataacagtaatgttgctctcatggcaaaaaataactttgcagtcaacaaggttgtagctcttgtatgccaaaacttcacttgtagcccctctgtgactgaccattcgtcacttaaagctttgctctccaaaaaaccttcctcttcgttcacgtaagctattggttctgatgagtaggaaaatagttaacgtcggcgaaagctccctcttagagatccccctttcaatctacagaactagttggttctgacttctctgtcaaaataaagataggtaacattctctgttgacttgaggaattgatgcatgtccttttcgtatgcctgtgctcaacaagccatgatttttcttc

SEQ ID NO: 5779 - protein, 386 aa, Glycine max
  misc_feature (1)..(386): Ceres Seq. ID no. 14311748
ALFEEHYYIKQLGNCDLSGMSDPHDEFKGKNVLIERKEPSELASKYGMSVETYQEILGECRHKLFEVRSRRPKPHLDDKVIVSWNGLAISSFARASKILKGEAEGTKFYFPVIGTEPKEYMGIAEKAASFIRKQLYNVETHRLHHSFRHSPSKAPAFLDDYAFLISGLLDLYEFGGGISWLLWAIELQETQDALFLDKTGGGYFNNTGEDASVLLRVKEDHDGAEPSGNSVSAINLIRLASMVAGSKAEHYKRNAEHLLAVFEKRLKDMAMAVPLMCCAADMLRVLSRKQVVVVGERTSEDFENMLAAAHAVYDPNRTVIHIDPNNKDEMEFWEVNNSNVALMAKNNFAVNKVVALVCQNFTCSPSVTDHSSLKALLSKKPSSSFT

SEQ ID NO: 5780 - protein, 367 aa, Glycine max
  misc_feature (1)..(367): Ceres Seq. ID no. 14311749
MSDPHDEFKGKNVLIERKEPSELASKYGMSVETYQEILGECRHKLFEVRSRRPKPHLDDKVIVSWNGLAISSFARASKILKGEAEGTKFYFPVIGTEPKEYMGIAEKAASFIRKQLYNVETHRLHHSFRHSPSKAPAFLDDYAFLISGLLDLYEFGGGISWLLWAIELQETQDALFLDKTGGGYFNNTGEDASVLLRVKEDHDGAEPSGNSVSAINLIRLASMVAGSKAEHYKRNAEHLLAVFEKRLKDMAMAVPLMCCAADMLRVLSRKQVVVVGERTSEDFENMLAAAHAVYDPNRTVIHIDPNNKDEMEFWEVNNSNVALMAKNNFAVNKVVALVCQNFTCSPSVTDHSSLKALLSKKPSSSFT

SEQ ID NO: 5781 - protein, 339 aa, Glycine max
  misc_feature (1)..(339): Ceres Seq. ID no. 14311750
MSVETYQEILGECRHKLFEVRSRRPKPHLDDKVIVSWNGLAISSFARASKILKGEAEGTKFYFPVIGTEPKEYMGIAEKAASFIRKQLYNVETHRLHHSFRHSPSKAPAFLDDYAFLISGLLDLYEFGGGISWLLWAIELQETQDALFLDKTGGGYFNNTGEDASVLLRVKEDHDGAEPSGNSVSAINLIRLASMVAGSKAEHYKRNAEHLLAVFEKRLKDMAMAVPLMCCAADMLRVLSRKQVVVVGERTSEDFENMLAAAHAVYDPNRTVIHIDPNNKDEMEFWEVNNSNVALMAKNNFAVNKVVALVCQNFTCSPSVTDHSSLKALLSKKPSSSFT

SEQ ID NO: 5782 - DNA, 1245 bp, Glycine max
  misc_feature (1)..(1245): Ceres Seq. ID no. 14311777
tcccgagcaacgaaagctaggtcacgggttcgaaaccatttttcgtgaaaataggtgtttttttgagttcgtcgttttgctcttcgtgttgttgaagtgcaacgccatggacccagatcagggcacttcaaaagcctggaagcccaagttcaaacccaggaatctcaaagcagtccgagctcccaaaaccgaagcggatgataagcgaaacgaagatagcgaagtgcctcgagctctctcgcgtcgacgacatgaaaatcctgcaaaacgcgagcctaaagtcgaaagaaaatctagcgtggaagttgcatttagtcttggaagttcatcatcacattccctcaggacatatggcacaagcaaatctatagatagtggcacaagcagtggttcaccatctaaatattttgccaatgaacaaattcgttcaattgctactgaggatcaaaatgatgcttctaatgcatctgccaggaaaatcaaaagagagtacaaggaaccatgggattatgaaaactcttactatccgactactcttcctttgaggaagccaaattctggagatccagaaattcttgatgagaaagaatttggtgaagctgctactagtgtggagtatgatgagaatactgttaattctgctgcagaactcgagatcttggagagtgaggaacaaaggatgtttttctttcagattcctactcctctgcctatggacaagcagagtaataaggggaaggagaaaattggtacatcaacagtatcgggagaggccacaaagtcaaagaatgccttggaagagttgccgaggggatatatgggcaaaatgctggtgtacaagagtggagcaattttatcttagagtgtattcccctgcaaattcatggagagatgagtacccaattccaagcaatgctattcggtgtggcaaggctgtgggacactactaatgccaccaccaaaccaacattgggatttttatttgaacagtgtcattcatttccattcatggcttaactcaagcctcttctcttgttctcttgtaccattattcatgttatgatgccatagattattatagagttattgatttctcctgtcctcttcctcctctcatcttcgtgttatgtccaaattcagctatatataagatcatctgtgtttggattatgatattcttcttatttaaactatttatttatttaaataggttcaagggacctgatgttaatgtgccatggaaac

SEQ ID NO: 5783 - protein, 286 aa, Glycine max
  misc_feature (1)..(286): Ceres Seq. ID no. 14311778
PEQRKLGHGFETIFRENRCFFEFVVLLFVLLKCNAMDPDQGTSKAWKPKFKPRNLKAVRAPKTEADDKRNEDSEVPRALSRRRHENPAKREPKVERKSSVEVAFSLGSSSSHSLRTYGTSKSIDSGTSSGSPSKYFANEQIRSIATEDQNDASNASARKIKREYKEPWDYENSYYPTTLPLRKPNSGDPEILDEKEFGEAATSVEYDENTVNSAAELEILESEEQRMFFFQIPTPLPMDKQSNKGKEKIGTSTVSGEATKSKNALEELPRGYMGKMLVYKSGAILS

SEQ ID NO: 5784 - protein, 251 aa, Glycine max
  misc_feature (1)..(251): Ceres Seq. ID no. 14311779
MDPDQGTSKAWKPKFKPRNLKAVRAPKTEADDKRNEDSEVPRALSRRRHENPAKREPKVERKSSVEVAFSLGSSSSHSLRTYGTSKSIDSGTSSGSPSKYFANEQIRSIATEDQNDASNASARKIKREYKEPWDYENSYYPTTLPLRKPNSGDPEILDEKEFGEAATSVEYDENTVNSAAELEILESEEQRMFFFQIPTPLPMDKQSNKGKEKIGTSTVSGEATKSKNALEELPRGYMGKMLVYKSGAILS

SEQ ID NO: 5785 - DNA, 1181 bp, Glycine max
  misc_feature (1)..(1181): Ceres Seq. ID no. 14311812
ttttttctctctccttctactctccccctctttctcattttccggtgacatggagtccaagtggggtggcgcccccgccagcatcatggcggcgaatttcgacgacttcaagtggatcgcctccatgttcgatcccggaaacgacgacgtcaagcccttctccgacgcagctttccaaaaccaggatgcagtaactgcattttcaacttgtggtggagtaacagatgatacccttgttcgttcccaaaacctcactcccattcaatccaccatttctgcaactattgattctcagtcttccttttgtggtaccgttgggagcccagtgtctgctaacaaaccaaacgtgagagataatcaagtaaaaggggtcgccaccactacaagtggttcctcacgtgagccatctgatgaggatgatgaagcaggtccttgtgaacaaagcacaaacgctattgatatgaagcgccttagaaggaaggtttctaatagagagtctgcaaggaggtccaggagaagaaaacaagcccatttggctgacctggagtggcaagttgaacggctgagactggaaaatgcaaacctatttaagcagcttacagatgccagccaacaatttcgtgacgctgatacgaataaccgagtcctaaaatcagatgtcgaagctttgagagctaaggtgaaattagctgaggatatggtcactcgtggcacactcacccctatcaacaaccagattcttcaaaatcagagttcactaaacaccccacctcaactcaacacaaataatctacaccgcatgacacatgtttcgccaaccatcaccgtccgtgggaatgatgatgcttcatatggaggtggaattacagttagtggacaaaattcacctcttggtgggcttggaaacttggataatattccttgcagcgatttcaatagtggaatcaatagtaataatgctgtgagctctatgactagcatgtggccttaacgttattcttattgcaccacatgacttgtgttgtagtagtactgtccggttagatccaactttatgcatgtcttggttttattagatttgtggttatattgtggaaaatattatataggtaacaaaaatgtggtatctacgtgtaagaatccatctagaatatttagcatggtgtgtgttaaatggtttc

SEQ ID NO: 5786 - protein, 329 aa, Glycine max
  misc_feature (1)..(329): Ceres Seq. ID no. 14311813
FFSLLLLSPSFSFSGDMESKWGGAPASIMAANFDDFKWIASMFDPGNDDVKPFSDAAFQNQDAVTAFSTCGGVTDDTLVRSQNLTPIQSTISATIDSQSSFCGTVGSPVSANKPNVRDNQVKGVATTTSGSSREPSDEDDEAGPCEQSTNAIDMKRLRRKVSNRESARRSRRRKQAHLADLEWQVERLRLENANLFKQLTDASQQFRDADTNNRVLKSDVEALRAKVKLAEDMVTRGTLTPINNQILQNQSSLNTPPQLNTNNLHRMTHVSPTITVRGNDDASYGGGITVSGQNSPLGGLGNLDNIPCSDFNSGINSNNAVSSMTSMWP

SEQ ID NO: 5787 - protein, 313 aa, Glycine max
  misc_feature (1)..(313): Ceres Seq. ID no. 14311814
MESKWGGAPASIMAANFDDFKWIASMFDPGNDDVKPFSDAAFQNQDAVTAFSTCGGVTDDTLVRSQNLTPIQSTISATIDSQSSFCGTVGSPVSANKPNVRDNQVKGVATTTSGSSREPSDEDDEAGPCEQSTNAIDMKRLRRKVSNRESARRSRRRKQAHLADLEWQVERLRLENANLFKQLTDASQQFRDADTNNRVLKSDVEALRAKVKLAEDMVTRGTLTPINNQILQNQSSLNTPPQLNTNNLHRMTHVSPTITVRGNDDASYGGGITVSGQNSPLGGLGNLDNIPCSDFNSGINSNNAVSSMTSMWP

SEQ ID NO: 5788 - protein, 301 aa, Glycine max
  misc_feature (1)..(301): Ceres Seq. ID no. 14311815
MAANFDDFKWIASMFDPGNDDVKPFSDAAFQNQDAVTAFSTCGGVTDDTLVRSQNLTPIQSTISATIDSQSSFCGTVGSPVSANKPNVRDNQVKGVATTTSGSSREPSDEDDEAGPCEQSTNAIDMKRLRRKVSNRESARRSRRRKQAHLADLEWQVERLRLENANLFKQLTDASQQFRDADTNNRVLKSDVEALRAKVKLAEDMVTRGTLTPINNQILQNQSSLNTPPQLNTNNLHRMTHVSPTITVRGNDDASYGGGITVSGQNSPLGGLGNLDNIPCSDFNSGINSNNAVSSMTSMWP

SEQ ID NO: 5789 - DNA, 1263 bp, Glycine max
  misc_feature (1)..(1263): Ceres Seq. ID no. 14311832
actggattgcaccgtctcttttctttcccctttgttaggaacaacaccacgccacctttgtttacgaactcgtcgacttgatgactcatcacaacgccaccaccaccgcctaacgacctagagcaccttctctctcctctaattggccattgcttaagttgacttgctgcgaaggttgctttgatcatttgaagcgcctgaaaatcgttgtgcgaattttgagggttctgttcttgtaatccgaaaatggccgcgattcggaggcgggtgtggcagttatcttcaatcgcaggtttcggggcttcgagatcggaagtgtcgtcgtcattgtcgtcgtcccaaagagcaattttcgatccattttctgtttcggggaccagacacttttcccaagtggtgaaatccaaccgcaagcacttgttcctcgttgacaccttggcccttgttaggagactggaaggggaaggagtgccctcgaagcaagccgaggcgataaccgctgccataactgaggttttgaatgacagtctcgaaaatgtgtctcagtcgttggtatcaaaggcgcagatgcagaaaattgaaatgatgcaagaatccaacctgtctaagtttaaagcggaggtgcagagctcacagggacaccatttttctctcttacaacacgagactgagaagcttaggaatgatatagagaagatgcgtaatgagttgaggtatgagatagacaaagtcactgctgggcagcgattagatttgaaccttgaaagggggagaataagggaggaattgtctaatcagaatgctgaaactaacaacctgacaaacaaacttgatagagagatccattctttaagagcacaactggaagcagccaaatatgatgtcataaaatattgcataggaacacttgtttcgatttctgctgttggtcttgctgttttacgcatattgatgtaaatggattgtattccgattaacatccacaaagatgaggtgaaaaagaatcaagggtagctccgtagctgcattgaagatttatcttctgtcagagaaacaattgcattacaatactagtacaacttttttttttggtccatactagtggagctgaaaggaacgagctccaatcaggcacgaattgggcctgttttttaagccccattctatattcttttgttaatttatttgacatgccctttgggatatttgtgcaatttatgcgtggctgtatggtatgagtacaatacaagcaccttggattat

SEQ ID NO: 5790 - protein, 236 aa, Glycine max
  misc_feature (1)..(236): Ceres Seq. ID no. 14311833
MAAIRRRVWQLSSIAGFGASRSEVSSSLSSSQRAIFDPFSVSGTRHFSQVVKSNRKHLFLVDTLALVRRLEGEGVPSKQAEAITAAITEVLNDSLENVSQSLVSKAQMQKIEMMQESNLSKFKAEVQSSQGHHFSLLQHETEKLRNDIEKMRNELRYEIDKVTAGQRLDLNLERGRIREELSNQNAETNNLTNKLDREIHSLRAQLEAAKYDVIKYCIGTLVSISAVGLAVLRILM

SEQ ID NO: 5791 - protein, 129 aa, Glycine max
  misc_feature (1)..(129): Ceres Seq. ID no. 14311834
MQKIEMMQESNLSKFKAEVQSSQGHHFSLLQHETEKLRNDIEKMRNELRYEIDKVTAGQRLDLNLERGRIREELSNQNAETNNLTNKLDREIHSLRAQLEAAKYDVIKYCIGTLVSISAVGLAVLRILM

SEQ ID NO: 5792 - protein, 124 aa, Glycine max
  misc_feature (1)..(124): Ceres Seq. ID no. 14311835
MMQESNLSKFKAEVQSSQGHHFSLLQHETEKLRNDIEKMRNELRYEIDKVTAGQRLDLNLERGRIREELSNQNAETNNLTNKLDREIHSLRAQLEAAKYDVIKYCIGTLVSISAVGLAVLRILM

SEQ ID NO: 5793 - DNA, 1408 bp, Glycine max
  misc_feature (1)..(1408): Ceres Seq. ID no. 14311854
agattagtagtatatgctttcaacaatggaagattagaaagcgccagtgtgcgcacgttagcacccaaccccatggattcctctcccccaattcgtaagggaaggaaactataacggaggagggggcaataaacaataagaaaatgttgcggataacgagattctcggggtttttctccgccgcaatgttcgtgactgttcttgttattctctccccctccttccaatccgaagccattcgatcctcccaccgattttccttccggaaagcccctcctttccgcaatgccgccgaatgcgcttctgtttccggccaaaccaccaccgtctgcgacccttccttggtccacgtggccataaccctcgacgtcgactacctccgcggctcaatcgccgccgtgcactccatcctccacaactccctctgtccggagaacatcttcttccatttcctcgtctccgacaccaacctccaaaccctagttgagtccacgttcccaaacctgaaattcaacgtctatttcttcgatccgaacatcgtcgctcacttgatctcctcctccgtgcggcaggcgctggagcagcctctcaattacgcgagaaattacctcgttgaccttctggagagttgcgtggagagggtgatttacttggactccgatctggtggtagtggatgacgtggcgaaactgtggagcgcgagtctggactcgcgtgccatcggcgcgccggagtactgccacgcgaacttcaccaagtatttcacggcggggttctggtctgagtcgaggttgtcggggacgttcgcgcagcggagggcgtgctacttcaacacgggggtgatggtgatggatctggtgaagtggaggaaggaaggatacacgaagagaattgagcgttggatggagattcagaagagtgataggatctatgagcttggttctctgccgccgtttttgctggtgttcgcgggacacgtggcacccattgagcaccggtggaaccagcacggtttgggcggggataacgtgaagggtagttgccgtgacttgcaccctggtccggttagtttgttgcattggtccggtagcggtaagccatggctccgtttaagctccaaacggccttgccctctggattctctatgggctccttttgacttgtatacacacccatcgtcttaactaattcttgctgcatgctacatacatacattcattagtcattcctgatttgaaaataaattgttgaattttattaagttaagtttgtttattataataaatactaattgttagaagaaaaaataaatatttaaagaacactagctggttatatatgttgaagccgtcgtaattagattcaggtgtctagtttgtaaaagttattgttagtactgttctggctg

SEQ ID NO: 5794 - protein, 346 aa, Glycine max
  misc_feature (1)..(346): Ceres Seq. ID no. 14311855
MLRITRFSGFFSAAMFVTVLVILSPSFQSEAIRSSHRFSFRKAPPFRNAAECASVSGQTTTVCDPSLVHVAITLDVDYLRGSIAAVHSILHNSLCPENIFFHFLVSDTNLQTLVESTFPNLKFNVYFFDPNIVAHLISSSVRQALEQPLNYARNYLVDLLESCVERVIYLDSDLVVVDDVAKLWSASLDSRAIGAPEYCHANFTKYFTAGFWSESRLSGTFAQRRACYFNTGVMVMDLVKWRKEGYTKRIERWMEIQKSDRIYELGSLPPFLLVFAGHVAPIEHRWNQHGLGGDNVKGSCRDLHPGPVSLLHWSGSGKPWLRLSSKRPCPLDSLWAPFDLYTHPSS

SEQ ID NO: 5795 - protein, 332 aa, Glycine max
  misc_feature (1)..(332): Ceres Seq. ID no. 14311856
MFVTVLVILSPSFQSEAIRSSHRFSFRKAPPFRNAAECASVSGQTTTVCDPSLVHVAITLDVDYLRGSIAAVHSILHNSLCPENIFFHFLVSDTNLQTLVESTFPNLKFNVYFFDPNIVAHLISSSVRQALEQPLNYARNYLVDLLESCVERVIYLDSDLVVVDDVAKLWSASLDSRAIGAPEYCHANFTKYFTAGFWSESRLSGTFAQRRACYFNTGVMVMDLVKWRKEGYTKRIERWMEIQKSDRIYELGSLPPFLLVFAGHVAPIEHRWNQHGLGGDNVKGSCRDLHPGPVSLLHWSGSGKPWLRLSSKRPCPLDSLWAPFDLYTHPSS

SEQ ID NO: 5796 - DNA, 1184 bp, Glycine max
  misc_feature (1)..(1184): Ceres Seq. ID no. 14311866
aatttcatcttaataatgaacactctctctgaagcctacaaagcacaccctctccacctcagtcacattattcccttagacttttcttcagcccttagcttacctgattctcacgcatggcctcactgtcaacccaatgatgatgcatcatcatcatcatcatcatcatccatacccatcatagacctcatggatcccaatgctatggacctcataggccatgcatgtgagaagtggggtgctttccaattgaagaaccatggcataccttttggtgtcattgaagatgttgaagaagaggctaaaagactttttgctcttcccactgaacagaagttgaaggctcttcgatctcccggtggtgccactgggtatggcagagcaaggatttcaccgttcttcccaaagtttatgtggcacgaaggattcaccatcattggctctccctctcacgatgccaaaaagatatggcctaatgattatgcacgcttttgtgatttgatggagaattatgagaagcaaatgaaggttctagcggatagactaacagagatgatattcaacttaatggacataagtgaggaaaaaagaaagtgggttggtgcaagcaacataagtgaagctgttcagttaaatttctacccaagttgtcccgagccaaaccgagccatgggcttagcccctcacaccgacacttctctcttcacaattcttcaccaaagtcaaatcactggtcttcaaatcttcaaggaaggaaaagggtgggttcctgtgcaccctcaccctaataccctggtcgtgcacacaggcgatctcttgcacatcatttccaacgcaaggtttcgctgtgcacttcaccgcgtaacggtgaataggacatgggaacgttactctgtggcttatttctattctccaccgatggattatgtagtttctcctttggttcactctgttgctcgttttcgtgatgtgactgtgaaggagtatattgggattaaggctaagaattttggagaagcattgtcctttattagtacttgaaactatgtatgtatcttatgattttgttatatgtattaattccttaaatatttatctagctagatactttattaatttgcttctttgtaaatttcccatttctgttagttgttaggaagtgctagatatatatcagacttaag

SEQ ID NO: 5797 - protein, 346 aa, Glycine max
  misc_feature (1)..(346): Ceres Seq. ID no. 14311867
NFILIMNTLSEAYKAHPLHLSHIIPLDFSSALSLPDSHAWPHCQPNDDASSSSSSSSIPIIDLMDPNAMDLIGHACEKWGAFQLKNHGIPFGVIEDVEEEAKRLFALPTEQKLKALRSPGGATGYGRARISPFFPKFMWHEGFTIIGSPSHDAKKIWPNDYARFCDLMENYEKQMKVLADRLTEMIFNLMDISEEKRKWVGASNISEAVQLNFYPSCPEPNRAMGLAPHTDTSLFTILHQSQITGLQIFKEGKGWVPVHPHPNTLVVHTGDLLHIISNARFRCALHRVTVNRTWERYSVAYFYSPPMDYVVSPLVHSVARFRDVTVKEYIGIKAKNFGEALSFIST

SEQ ID NO: 5798 - protein, 341 aa, Glycine max
  misc_feature (1)..(341): Ceres Seq. ID no. 14311868
MNTLSEAYKAHPLHLSHIIPLDFSSALSLPDSHAWPHCQPNDDASSSSSSSSIPIIDLMDPNAMDLIGHACEKWGAFQLKNHGIPFGVIEDVEEEAKRLFALPTEQKLKALRSPGGATGYGRARISPFFPKFMWHEGFTIIGSPSHDAKKIWPNDYARFCDLMENYEKQMKVLADRLTEMIFNLMDISEEKRKWVGASNISEAVQLNFYPSCPEPNRAMGLAPHTDTSLFTILHQSQITGLQIFKEGKGWVPVHPHPNTLVVHTGDLLHIISNARFRCALHRVTVNRTWERYSVAYFYSPPMDYVVSPLVHSVARFRDVTVKEYIGIKAKNFGEALSFIST

SEQ ID NO: 5799 - protein, 283 aa, Glycine max
  misc_feature (1)..(283): Ceres Seq. ID no. 14311869
MDPNAMDLIGHACEKWGAFQLKNHGIPFGVIEDVEEEAKRLFALPTEQKLKALRSPGGATGYGRARISPFFPKFMWHEGFTIIGSPSHDAKKIWPNDYARFCDLMENYEKQMKVLADRLTEMIFNLMDISEEKRKWVGASNISEAVQLNFYPSCPEPNRAMGLAPHTDTSLFTILHQSQITGLQIFKEGKGWVPVHPHPNTLVVHTGDLLHIISNARFRCALHRVTVNRTWERYSVAYFYSPPMDYVVSPLVHSVARFRDVTVKEYIGIKAKNFGEALSFIST

SEQ ID NO: 5800 - DNA, 1246 bp, Glycine max
  misc_feature (1)..(1246): Ceres Seq. ID no. 14311878
ttactccattcgtccttttccttttatttacaccacatagccccaccctcaccctcttacagaatgggaaggactccggtcaggtttgagagggtagcggcggcctttgacgctgacgtggcgcgtgtgaggctctgcaatagcagcgagaatgagcagcactcgccggaggactcggctgatttgtcagatctggtgaaatcgttcatggagagagggggagagggagaagatgcggttggtgttcgttcggatgatggggttgagaattttgattctgagaagagggagattttggagggaatatttgatgatgacgacggggatgccaaagaaaagattagaagagaagttcaacttgcatgggggcttgttgccgaaaaggataactcatcaccccaattcaaacaacagttgatgtctctcctacggtacagaggttttgatgctgggctctgcaaatgcaagtgggaaaaaaatacaagattcccagctggtgactatgagtacatcgacgtaaattttgcaggaaatcgctacattgttgaaatttcccttgtcacagaattcgaaatagctcgttccacagaccaatatgccgcgttacttgatgttttccctctaatatttgttggtaaaatggaagaactcaagcaggttgtgaggctaatgtgcactgctattaagggttctatgaaaagcatgaatatgtatatacctccgtggagaagaattgggtacatgcaagctaagtggtttagttcttacaaaagaataacggacgaggttgcaactaacagggcatcatcagcttttttcactacaaggtccattggatttgatgcaaggccagtgaaatcctacaattgcagggatgattatgggactaaacctgcattcagagtttgccatttgactactgcattttatgtggacagccctgggatgcaattatagtcaaatgctgcggcatgtgcattcatctaattgctttttggtgaattaatggtgttgataaatgagtgagtggaagtgccttagctcgggcataaaaagcgcttaagcaaagattttggtgcagtgttctggcggaattttgtttttattactagggatagtatcatagcaaggatgattggtaggagataataattagtgaaatcaatgtaaagtagataattggttggttggttgctccaaaatgtaatttctcttcaaattatatatattagtgatggttgtgttt

SEQ ID NO: 5801 - protein, 318 aa, Glycine max
  misc_feature (1)..(318): Ceres Seq. ID no. 14311879
LLHSSFSFYLHHIAPPSPSYRMGRTPVRFERVAAAFDADVARVRLCNSSENEQHSPEDSADLSDLVKSFMERGGEGEDAVGVRSDDGVENFDSEKREILEGIFDDDDGDAKEKIRREVQLAWGLVAEKDNSSPQFKQQLMSLLRYRGFDAGLCKCKWEKNTRFPAGDYEYIDVNFAGNRYIVEISLVTEFEIARSTDQYAALLDVFPLIFVGKMEELKQVVRLMCTAIKGSMKSMNMYIPPWRRIGYMQAKWFSSYKRITDEVATNRASSAFFTTRSIGFDARPVKSYNCRDDYGTKPAFRVCHLTTAFYVDSPGMQL

SEQ ID NO: 5802 - protein, 297 aa, Glycine max
  misc_feature (1)..(297): Ceres Seq. ID no. 14311880
MGRTPVRFERVAAAFDADVARVRLCNSSENEQHSPEDSADLSDLVKSFMERGGEGEDAVGVRSDDGVENFDSEKREILEGIFDDDDGDAKEKIRREVQLAWGLVAEKDNSSPQFKQQLMSLLRYRGFDAGLCKCKWEKNTRFPAGDYEYIDVNFAGNRYIVEISLVTEFEIARSTDQYAALLDVFPLIFVGKMEELKQVVRLMCTAIKGSMKSMNMYIPPWRRIGYMQAKWFSSYKRITDEVATNRASSAFFTTRSIGFDARPVKSYNCRDDYGTKPAFRVCHLTTAFYVDSPGMQL

SEQ ID NO: 5803 - protein, 249 aa, Glycine max
  misc_feature (1)..(249): Ceres Seq. ID no. 14311881
MERGGEGEDAVGVRSDDGVENFDSEKREILEGIFDDDDGDAKEKIRREVQLAWGLVAEKDNSSPQFKQQLMSLLRYRGFDAGLCKCKWEKNTRFPAGDYEYIDVNFAGNRYIVEISLVTEFEIARSTDQYAALLDVFPLIFVGKMEELKQVVRLMCTAIKGSMKSMNMYIPPWRRIGYMQAKWFSSYKRITDEVATNRASSAFFTTRSIGFDARPVKSYNCRDDYGTKPAFRVCHLTTAFYVDSPGMQL

SEQ ID NO: 5804 - DNA, 1365 bp, Glycine max
  misc_feature (1)..(1365): Ceres Seq. ID no. 14311890
cctttcctcctcttctgttcttttattctagggttacaaagttttccttccatacttgccggcagccgtgtggtcttgatagagcgacaccgtgccaccgcgccaccacccaaccttgcagccccaagtctgcgtttccgcagatccactgtccgcacataaaggtgtatactctgctcagttatatcatttgctaataattttcactatctttacgacgccgccaccgaccccaagcccgccgtctgcgccgcgcactccgacgccgcggcggcccatctgatcaagatcaacgggaggtttactcgttcgtgtcaagctcaaaggttgaaacaaacacgaaggcgctgaaacaaccctaagaagtaagaaccagattttatctccatacagtagaagtaaaacagtatattgtagccattcggttgagttcaaattgaaagagacaagatggccgggcaatcaaaccatgacctttcattgttttcagctgaggagcttgagttcattgctgaagatgagatcgtggacattgtacccaatctcaaaatgagtgctctcaatttcatttctggagattttggcccatttacgccccagattgttacccaagtaccactgtggttggccactgctctcaagaagagaggcaagtgctccatttgccctccccaatggatgtctgttgagaagttgagtcaagttttggaggcagagcgagactctcaagagatgtcagatcaattgccatttcattatgtggaaatctcaagacttctttttgatcatgcacgtgacaacattcctgatgtatatatggtgaggtctctaattgaggacatcagaaatgttcggtttcataaagttgaaactgatttggaagcatttaatggtcgtacaattgctgttaagattaaaaatttatctgcaatggaagtgaatattgttcgtccatttattggaagagctttacaggcattttataagcatgatagtccagagctgataccagacccagagagagtttctgataggcgcccccaagttatcaacaatgctccaagaagacaactacgaagatagtcattgtcacctattggtaacatctcttctagaatcataagcatttggcccgcttcaaaggggcatctttcatgagaaatacttcacaactttctttgctgctgacttcagtgtaaatgaatggcttgagacatggtcgaatcttcagaaagtaatgttctctcaaaatattctcataattatttgtcaagagtctgaaaaagcaaagcacttcatgggattaacatggccatgcccccatatactttatgttgttaattctattagtagtgttaagtattt

SEQ ID NO: 5805 - protein, 210 aa, Glycine max
  misc_feature (1)..(210): Ceres Seq. ID no. 14311891
MAGQSNHDLSLFSAEELEFIAEDEIVDIVPNLKMSALNFISGDFGPFTPQIVTQVPLWLATALKKRGKCSICPPQWMSVEKLSQVLEAERDSQEMSDQLPFHYVEISRLLFDHARDNIPDVYMVRSLIEDIRNVRFHKVETDLEAFNGRTIAVKIKNLSAMEVNIVRPFIGRALQAFYKHDSPELIPDPERVSDRRPQVINNAPRRQLRR

SEQ ID NO: 5806 - protein, 177 aa, Glycine max
  misc_feature (1)..(177): Ceres Seq. ID no. 14311892
MSALNFISGDFGPFTPQIVTQVPLWLATALKKRGKCSICPPQWMSVEKLSQVLEAERDSQEMSDQLPFHYVEISRLLFDHARDNIPDVYMVRSLIEDIRNVRFHKVETDLEAFNGRTIAVKIKNLSAMEVNIVRPFIGRALQAFYKHDSPELIPDPERVSDRRPQVINNAPRRQLRR

SEQ ID NO: 5807 - protein, 134 aa, Glycine max
  misc_feature (1)..(134): Ceres Seq. ID no. 14311893
MSVEKLSQVLEAERDSQEMSDQLPFHYVEISRLLFDHARDNIPDVYMVRSLIEDIRNVRFHKVETDLEAFNGRTIAVKIKNLSAMEVNIVRPFIGRALQAFYKHDSPELIPDPERVSDRRPQVINNAPRRQLRR

SEQ ID NO: 5808 - DNA, 1240 bp, Glycine max
  misc_feature (1)..(1240): Ceres Seq. ID no. 14311894
gccatttcggtcttctccaaacccctttttcctttcgctctcgcgaaacccagcagttcccactctcacaaaccctaaccacggcaccaccacattctctcgcttccccctcccttcagccatgccccaatcacgtcaccgtcgcgtaaccgtcgtcgacctcgccgcctccttagcccgccgccgcgtctcatttatcttcaacgaagctccgactctccgtacccctccaagaaccgccgccttcggtcgcggaagagctcgcgcttctccccgctcccagaacataccgccatcaactgcgcgacgtggtagaggacgcgttccgttacgctccgtgcttccggcgtggttccctaggacaccactccgtgacattactgctgtcgttcaggtaaaagtctaaactaaacgcagcgccgttttttcgtttctttcactttttgattcaatctttttatgtttttgcgtgcgtttttggttaatgctaaggcgatcgagaggagaagtgcgaggctaggagaagtcgaaggccagcgaatcggaaacactgatcctgcttcagatcgtttagtttcggaaccttccgaacctgcttctgcttctgcctctgcctctgcggtgaaatcgccgaaatcagttggagtgaaactccgaacgccgttcgggagcaaggtcccgaagatcttcctcgacatatccgagttaccggaacacgacgaatcggaggctctgacgccgcagaagaagcttctcgacaacatcgatcaggttgaggaagcggtgcgcgaagaactgaacaagctgaagagaactccgagcgcgaagaaaacagagagggaaaagcgggttcgcacattgatgtccatgaggtaaacgaattgagattttgatttttttttcatccacagagccataggcagcagagcaggggtattatagtcattttactctggactgagttgattcagcgggacagtgtttttccggttcgctttgcttgcgtcttcggcttgaagttgcaagatattattctctagttttgtttttactaactttcttgttggaacttttttgattagtagtgttcgttgatagatatatccatcattttcttgtgatggttagtgattcccagctcctgttgtacatatttcccatacatttcgggttggtgattacttcttgtgtaccaattgtaaaacagttcaagataacaatcgattcgttttttggtgcc

SEQ ID NO: 5809 - protein, 138 aa, Glycine max
  misc_feature (1)..(138): Ceres Seq. ID no. 14311895
MFLRAFLVNAKAIERRSARLGEVEGQRIGNTDPASDRLVSEPSEPASASASASAVKSPKSVGVKLRTPFGSKVPKIFLDISELPEHDESEALTPQKKLLDNIDQVEEAVREELNKLKRTPSAKKTEREKRVRTLMSMR

SEQ ID NO: 5810 - protein, 134 aa, Glycine max
  misc_feature (1)..(134): Ceres Seq. ID no. 14311896
PFRSSPNPFFLSLSRNPAVPTLTNPNHGTTTFSRFPLPSAMPQSRHRRVTVVDLAASLARRRVSFIFNEAPTLRTPPRTAAFGRGRARASPRSQNIPPSTARRGRGRVPLRSVLPAWFPRTPLRDITAVVQVKV

SEQ ID NO: 5811 - protein, 94 aa, Glycine max
  misc_feature (1)..(94): Ceres Seq. ID no. 14311897
MPQSRHRRVTVVDLAASLARRRVSFIFNEAPTLRTPPRTAAFGRGRARASPRSQNIPPSTARRGRGRVPLRSVLPAWFPRTPLRDITAVVQVKV

SEQ ID NO: 5812 - DNA, 1401 bp, Glycine max
  misc_feature (1)..(1401): Ceres Seq. ID no. 14311898
gacttagattctgattctgggattggatggagctaggcctcatggataagaatccaacgaagctggaacactttgatgacatgtggaggctcgaatccactgccacactattatctcacttgaagggggatgatggtcgacatgtcttgacattggatcgtacaatattctatccgcaaggtggtggtcaacctgcggatactggctttgtactcattcatggctttgataacaacaaatttctggtttctgatgttcggtccaaagatggaattgtttttcactatggtttctttgagaacctgggcggggaatttgagcctacactcgagaaagggaaggaggtttcactctttgttgatcagcccaggcgaaaactcaactccagattgcattcagcaggacatttgcttgatatttgtttgccaagaataggattgggaaatttagagcctagcaaagcctaccattttcctgatgggtatatcattttcctgtttttgaatctttttatgcgcctaatctgaataggttgagtcttgaaagtgatctatttaatatccaagctgactggcagtgtggtatacatcaaatcattgctgatgtaggataatattaatcatgatcaaatgggtttgctagaagtctaacccttatcttcgtcacccaaagatttgcatggtgacacaggtcttgtaatgatttttttggtgatgtttacatctttgaggggacttgcatggtaaaaaaaatctatagaagactaatataatgaataatatgtggaagaccaatttaatcaggggtttactcagaaagatctaaccttcactaatcaatctcctgctgttgtactcccatgagtattccgttgaaatgtgttcagaagttctaaagtttgcttcatacttgctattgtattgtaactattgtttccaggccttgggttgaatacaaaggtacaatttcacaaaatgaaatgcagagtaagcaaaaggatttagagctggaggccaatgcattaatttccatgggaggaaaagtttctgttgatatattaccatatgatgaagctgctaagctttgtggtgggtgtcttcctgattatgttcccaaggaaagcacacctcgcattgtgaggataagagataatcctggctgcccctgtggtggtactcacgttgctgacatttcagacatcaaacaaattaaggtatgaaatccatttatttaaactagtcagctagataggttaggtttgatattttttgtgtcaattactcagtttgctctttgtaactaataaggctttatttctttgtacatttattacgttttataagtagcaccattgaagttgtttgattgaagctgttgaattaatccaaacttggttgttct

SEQ ID NO: 5813 - protein, 166 aa, Glycine max
  misc_feature (1)..(166): Ceres Seq. ID no. 14311899
MELGLMDKNPTKLEHFDDMWRLESTATLLSHLKGDDGRHVLTLDRTIFYPQGGGQPADTGFVLIHGFDNNKFLVSDVRSKDGIVFHYGFFENLGGEFEPTLEKGKEVSLFVDQPRRKLNSRLHSAGHLLDICLPRIGLGNLEPSKAYHFPDGYIIFLFLNLFMRLI

SEQ ID NO: 5814 - protein, 161 aa, Glycine max
  misc_feature (1)..(161): Ceres Seq. ID no. 14311900
MDKNPTKLEHFDDMWRLESTATLLSHLKGDDGRHVLTLDRTIFYPQGGGQPADTGFVLIHGFDNNKFLVSDVRSKDGIVFHYGFFENLGGEFEPTLEKGKEVSLFVDQPRRKLNSRLHSAGHLLDICLPRIGLGNLEPSKAYHFPDGYIIFLFLNLFMRLI

SEQ ID NO: 5815 - protein, 148 aa, Glycine max
  misc_feature (1)..(148): Ceres Seq. ID no. 14311901
MWRLESTATLLSHLKGDDGRHVLTLDRTIFYPQGGGQPADTGFVLIHGFDNNKFLVSDVRSKDGIVFHYGFFENLGGEFEPTLEKGKEVSLFVDQPRRKLNSRLHSAGHLLDICLPRIGLGNLEPSKAYHFPDGYIIFLFLNLFMRLI

SEQ ID NO: 5816 - DNA, 1259 bp, Glycine max
  misc_feature (1)..(1259): Ceres Seq. ID no. 14311912
ataaaatctcattgtctccgaactcttctttcctcgtactccatcatttccttgttcttcttccttctcttcattctgtctctacccttcaacgcaactttctttcttttctattgagcttccaatattctcacgccttgcaatcgtagttgcaccctccaaactccttcccttttctttcatctaaaccagaaaccttttttccctcaaagagaggaatagagattaacaatcgtggatactgtgatatggttagttgtagagagagaactacaatttttgagaaatataattagggtgcgtgacaaacaatcgtggttcaggtacttgcagtaagagaacatattgtaaaactaaaagggaaaaatggccttagatcactttgaggagactgtgcaccaaaaaggaaattggaaatcttccagtgaaatcattgcagattctgatagaaatgcctctggtgactttgactgcaacatctgcctggagtgtgtgcaagatccagtggtgacactttgtggtcatctttattgctggccctgcatatacaaatggcttcattttcaaagcacctctttggatgatgaagaacaacagaggccacaatgtcctgtatgcaaatcagaagtttctcaatcctcccttgttccattatacggccgtggccaaaccacattaccttctaaagggaagccacgtcaagtaggcactgtcataccacaaagacctcatggtccaagaacacttaacactagaagtgtttcacaacctatttctcaaagttaccatccctatagtaatccttatcatcctcaacaacacttcaactcgattccaagcggttacacctcacctatgattagaacaactggttcaatagacaacacatttggaatctttggtgagatgatatatgcaagggtctttggtaaccacgtgtcaaacattcatacatacgccaattcgtacaatctttcggggaccagtaacccaaggatgagaagacatttaatgcaagttgataaatcactcagcagaataagttgtttcctcctttgctgcctagttttgtgtctgctcttattctgattgctacttcattttcatcattagttatagtgcatccttacatagaatacattcactcattgatccagatgtattctatgttagagaagctgcaaattgatgctgagttatgtgtaaattaccaatctctctacgagctatatgaagtgaataatgatattctcataccg

SEQ ID NO: 5817 - protein, 240 aa, Glycine max
  misc_feature (1)..(240): Ceres Seq. ID no. 14311913
MALDHFEETVHQKGNWKSSSEIIADSDRNASGDFDCNICLECVQDPVVTLCGHLYCWPCIYKWLHFQSTSLDDEEQQRPQCPVCKSEVSQSSLVPLYGRGQTTLPSKGKPRQVGTVIPQRPHGPRTLNTRSVSQPISQSYHPYSNPYHPQQHFNSIPSGYTSPMIRTTGSIDNTFGIFGEMIYARVFGNHVSNIHTYANSYNLSGTSNPRMRRHLMQVDKSLSRISCFLLCCLVLCLLLF

SEQ ID NO: 5818 - DNA, 1042 bp, Glycine max
  misc_feature (1)..(1042): Ceres Seq. ID no. 14311918
aaaacaaccccctccaacttctctcattctttttttctttctcttaaattaactacaaaaccaacaaccctcctccaacttcactcatattttttctttctcttaaacttttttaaggaaaaaaaaaatctaaatccttttaaaaccctattaatactaaacatcatataacattcattgttcatcaagaactatctttgtggtcgtgtttgttcaataatgctacaaaattcctccatgtcttccctcctcctccaccggatcaacggtggcggtggtgcaaccacggccaccaactgtcacgacaccgtctttatgacggtgccggatggcgtagcgcgctaccacacccacgcggtagcgccgaaccagtgctgctcctcggtagcgcaggagatcggggcctcggtcgccaccgtgtggtcagtgttgcgccgcttcgacaacccgcaggcctacaagcacttcgtgaagagctgccatgtcatcggcggggacggcgacgtcggcacgctccgggaggttcacgtcatctccggcctgcccgctgccaggagcaccgagcgcctcgagatcctcgacgacgagcgccacgtcatcagcttcagcgtcgtgggcggggaccaccgcctcgccaactaccgctccgtcaccaccctccaccccaccgcttcctccgcctccggaggatgctccggcacggtggtcgtggagtcctacgtggtggacgtgcctcccgggaacacgcgcgaagacacgcgcgtgttcgtcgacactatcgtgaagtgcaaccttcagtcgctcgcgcaaaccgcagagaacttaacgctgcgaaagaacaacaacaacgattacaagtgctgttcttaattttcctcttctttttactattttttgatttacagtgttattatatcgatatatatatatgtgtgtggggggggaggggggtgattgttataattaagtgttgtagatatcgatataatacaatcttaattttacagtgtatattatggataattactggattgttgattgt

SEQ ID NO: 5819 - protein, 216 aa, Glycine max
  misc_feature (1)..(216): Ceres Seq. ID no. 14311919
MLQNSSMSSLLLHRINGGGGATTATNCHDTVFMTVPDGVARYHTHAVAPNQCCSSVAQEIGASVATVWSVLRRFDNPQAYKHFVKSCHVIGGDGDVGTLREVHVISGLPAARSTERLEILDDERHVISFSVVGGDHRLANYRSVTTLHPTASSASGGCSGTVVVESYVVDVPPGNTREDTRVFVDTIVKCNLQSLAQTAENLTLRKNNNNDYKCCS

SEQ ID NO: 5820 - protein, 210 aa, Glycine max
  misc_feature (1)..(210): Ceres Seq. ID no. 14311920
MSSLLLHRINGGGGATTATNCHDTVFMTVPDGVARYHTHAVAPNQCCSSVAQEIGASVATVWSVLRRFDNPQAYKHFVKSCHVIGGDGDVGTLREVHVISGLPAARSTERLEILDDERHVISFSVVGGDHRLANYRSVTTLHPTASSASGGCSGTVVVESYVVDVPPGNTREDTRVFVDTIVKCNLQSLAQTAENLTLRKNNNNDYKCCS

SEQ ID NO: 5821 - protein, 184 aa, Glycine max
  misc_feature (1)..(184): Ceres Seq. ID no. 14311921
MTVPDGVARYHTHAVAPNQCCSSVAQEIGASVATVWSVLRRFDNPQAYKHFVKSCHVIGGDGDVGTLREVHVISGLPAARSTERLEILDDERHVISFSVVGGDHRLANYRSVTTLHPTASSASGGCSGTVVVESYVVDVPPGNTREDTRVFVDTIVKCNLQSLAQTAENLTLRKNNNNDYKCCS

SEQ ID NO: 5822 - DNA, 1382 bp, Glycine max
  misc_feature (1)..(1382): Ceres Seq. ID no. 14311934
atttttaaaacatatgtgtcccctcatccaagctgtgtctcccttctctctcttatattaatcactcactcacacattcgccacttccacacagcatagatcacctttccttttttcccacagaaaaaaacaccacctttctttttccgactaaaggttcgccggaaaatgcctctatcctcctcttcctcctccgccgtagactccgccgtctccggcgagatcatgctctttggcgttagagtcgtggtggactccatgcggaagagtgtgagtatgaacaacctctcgcagtacgagcttcctcgcgacgctgccaacgccaaagacgacgccgcaggatacgcctccgccgatgatgcagctccgatcaactccgacaagaaccgcgaccgcaagcgagggattccatggactaaggaagagcacaagctattcttggtggggttgcagaaagtggggaaaggtgattggagagggatctcaaggaactatgtcaaaacgaggacgccaacacaggttgctagccatgctcagaagtactttctccgccgcaccaacctcaatcgccgtcgccggagatccagcctctttgacatcaccaccgactcggtctctacaacccctatggaggaaggagtacagatccagcatcaagataatgtgtctctctttcatccagtgtaccctgtaacccctgaaggaagcaacatgaatggatttccaaagatgtccatgtatccaaaggatgttggttctggagtcatgtcagttcaagctgggaatccaatggaaacactcactttgggacaaggaaatgtggaacagaatgggccaagtactaagctagtttgtacaacccctattgttccagatcatagaggctccacagtgtctgatatcactgcaagtttgagttccattgatccaccaacactgtctctggggttatctttgtcatccagtccaagacaaacatcatcatcaatacatgcagctttacatgcactgccatacttcaacaatcaagatagcatcataagtgctgcttgaaaaagataaacatatatctgtggcccattatctatagctactttggattcacagagatgtttatcactaatctactttctctttttggcgggagaaatataaaacatgttaaaggaaaagatgatgaattagatccttctgaaggcaaggtaataagtcatgagaccaatttgatccttctgttccttgtacagaccatggaaaggtcctgtcatgtttttgtttattgtttattggccacttttatgtttgtagttactataactgaaaataaccaagtacttcctgttaatttttaatgaatataaatctggactatatcaaagcat

SEQ ID NO: 5823 - protein, 294 aa, Glycine max
  misc_feature (1)..(294): Ceres Seq. ID no. 14311935
MPLSSSSSSAVDSAVSGEIMLFGVRVVVDSMRKSVSMNNLSQYELPRDAANAKDDAAGYASADDAAPINSDKNRDRKRGIPWTKEEHKLFLVGLQKVGKGDWRGISRNYVKTRTPTQVASHAQKYFLRRTNLNRRRRRSSLFDITTDSVSTTPMEEGVQIQHQDNVSLFHPVYPVTPEGSNMNGFPKMSMYPKDVGSGVMSVQAGNPMETLTLGQGNVEQNGPSTKLVCTTPIVPDHRGSTVSDITASLSSIDPPTLSLGLSLSSSPRQTSSSIHAALHALPYFNNQDSIISAA

SEQ ID NO: 5824 - protein, 275 aa, Glycine max
  misc_feature (1)..(275): Ceres Seq. ID no. 14311936
MLFGVRVVVDSMRKSVSMNNLSQYELPRDAANAKDDAAGYASADDAAPINSDKNRDRKRGIPWTKEEHKLFLVGLQKVGKGDWRGISRNYVKTRTPTQVASHAQKYFLRRTNLNRRRRRSSLFDITTDSVSTTPMEEGVQIQHQDNVSLFHPVYPVTPEGSNMNGFPKMSMYPKDVGSGVMSVQAGNPMETLTLGQGNVEQNGPSTKLVCTTPIVPDHRGSTVSDITASLSSIDPPTLSLGLSLSSSPRQTSSSIHAALHALPYFNNQDSIISAA

SEQ ID NO: 5825 - protein, 264 aa, Glycine max
  misc_feature (1)..(264): Ceres Seq. ID no. 14311937
MRKSVSMNNLSQYELPRDAANAKDDAAGYASADDAAPINSDKNRDRKRGIPWTKEEHKLFLVGLQKVGKGDWRGISRNYVKTRTPTQVASHAQKYFLRRTNLNRRRRRSSLFDITTDSVSTTPMEEGVQIQHQDNVSLFHPVYPVTPEGSNMNGFPKMSMYPKDVGSGVMSVQAGNPMETLTLGQGNVEQNGPSTKLVCTTPIVPDHRGSTVSDITASLSSIDPPTLSLGLSLSSSPRQTSSSIHAALHALPYFNNQDSIISAA

SEQ ID NO: 5826 - DNA, 1493 bp, Glycine max
  misc_feature (1)..(1493): Ceres Seq. ID no. 14311938
gtccttcctttttctctccctcactcatccgttccgttggttcagaatattcatcaccatcgggcccagcaccaaaccccttcccctctcccccaaattagggtttctctctgggaatgtgattcagcgcgcggcagcatcaatggcggagaagagattcggcgtgatagggtacgctctggcgccgaagaagcagaacagcttcatccgcgactcgctggtgagcctagcgaaatcgcgagggattgagctcgtgcgcgtggactccgacaagcccctcgcggatcagggccccttcgactgcgtcctccacaagctctacggcgacgactggaagcgccagctccaggaattccacaccctctacccaaacgccgtcatcctcgacgcccccgaggcgatcgagcgcctccacaaccgaatctcgatgctgcaggtcgtgtcggagctccgaattgaggaccgacccgagacctttgggatccccaagcagattgtgatatacgacaaggccaccctcctggacccgcaggcctgggagagcctcaagtttcccgtgatagcgaagcctctcgttgccgacggcagcgccaagtcgcacaagatggcgctcgtgttcacgcgcgacgcactgaacaagctcaagccgccgatcgtgctgcaggagttcgtgaaccacggtggcgtgatcttcaaggtgtacgtggtgggcgagcacgtgcgctgcgtgaagcgcaagtccctccccgacgtgtccgacgaggagaaggcgctcggcggcgtttccgaggacctgatgtcgttctcgcaggtctccaacctcgccaccgtgaacgactgcgacggctattaccgtttgatgcatctcgacgacgacaccgaaatgccccccgacgccttcgtcgtcgacatcgctgggggcctcaggcgcgccctcaagctcaacctcttcaatttcgatgtcataagagacgctcgatacgggaaccgttatcttatcattgatatcaactatttccctgggtacgccaaaatgcccggctacgaggccgttttgacccagtttttctgcgaagtaatgctcaagaagaaacagcaagaggaacaacagcaagaagagggtaacgctcctaaggagaaagaggaatctcttcaagcttgagataattttgtcacacagatgttgttctgtcggtgtcggtgtttggtggtttttgggtaacccgaatttccccagtggacccattggttggcacgagttgcaaatttcgatttagggtgcagttggtacagtagggttgtttgtggctagttttttttaaccctcttcaacaacatgtatattcctttcaccattgctctctggagataggtaccttttcaaataccctcaacatttaggaaagttgtattttgcggcttaagattaccaagctagaaactgtttactttgtgttttttttactcaataacttcatttttcccattttgcc

SEQ ID NO: 5827 - protein, 386 aa, Glycine max
  misc_feature (1)..(386): Ceres Seq. ID no. 14311939
SFLFLSLTHPFRWFRIFITIGPSTKPLPLSPKLGFLSGNVIQRAAASMAEKRFGVIGYALAPKKQNSFIRDSLVSLAKSRGIELVRVDSDKPLADQGPFDCVLHKLYGDDWKRQLQEFHTLYPNAVILDAPEAIERLHNRISMLQVVSELRIEDRPETFGIPKQIVIYDKATLLDPQAWESLKFPVIAKPLVADGSAKSHKMALVFTRDALNKLKPPIVLQEFVNHGGVIFKVYVVGEHVRCVKRKSLPDVSDEEKALGGVSEDLMSFSQVSNLATVNDCDGYYRLMHLDDDTEMPPDAFVVDIAGGLRRALKLNLFNFDVIRDARYGNRYLIIDINYFPGYAKMPGYEAVLTQFFCEVMLKKKQQEEQQQEEGNAPKEKEESLQA

SEQ ID NO: 5828 - protein, 339 aa, Glycine max
  misc_feature (1)..(339): Ceres Seq. ID no. 14311940
MAEKRFGVIGYALAPKKQNSFIRDSLVSLAKSRGIELVRVDSDKPLADQGPFDCVLHKLYGDDWKRQLQEFHTLYPNAVILDAPEAIERLHNRISMLQVVSELRIEDRPETFGIPKQIVIYDKATLLDPQAWESLKFPVIAKPLVADGSAKSHKMALVFTRDALNKLKPPIVLQEFVNHGGVIFKVYVVGEHVRCVKRKSLPDVSDEEKALGGVSEDLMSFSQVSNLATVNDCDGYYRLMHLDDDTEMPPDAFVVDIAGGLRRALKLNLFNFDVIRDARYGNRYLIIDINYFPGYAKMPGYEAVLTQFFCEVMLKKKQQEEQQQEEGNAPKEKEESLQA

SEQ ID NO: 5829 - protein, 244 aa, Glycine max
  misc_feature (1)..(244): Ceres Seq. ID no. 14311941
MLQVVSELRIEDRPETFGIPKQIVIYDKATLLDPQAWESLKFPVIAKPLVADGSAKSHKMALVFTRDALNKLKPPIVLQEFVNHGGVIFKVYVVGEHVRCVKRKSLPDVSDEEKALGGVSEDLMSFSQVSNLATVNDCDGYYRLMHLDDDTEMPPDAFVVDIAGGLRRALKLNLFNFDVIRDARYGNRYLIIDINYFPGYAKMPGYEAVLTQFFCEVMLKKKQQEEQQQEEGNAPKEKEESLQA

SEQ ID NO: 5830 - DNA, 1917 bp, Glycine max
  misc_feature (1)..(1917): Ceres Seq. ID no. 14311942
atctcatttcatttatctgggtagcggagccaaacaggcttacgcggaatctgactgctgcccgaagtcattctcagtaactgctaatcactgacacggtcagctaagctaagctaccccttctctctctaaaacctttgccattgtctcccacaacaccttacaacttacaacttcaatgtctgagtcaagactcatttatttataaccaccaccagctcaggtggcgcagccaaaccaaacccacaagaggttaagaacaagtagaataacaaaacccattcttcacctctctcccatcgtaataatgggtcagagcctgagttgcagtggcaaccatgaccacggcctcttcaccgccgtgctgcacggcgaccttcaaattgtcacaactctcttggattccgacccttctctcttgcaccaaacaactctctacgatcgccactctcctcttcatattgctgcagccaatggccagatcgagattctgtctaggctcttagatggatctcttaacccagatgttttaaatcgccacaaacagactccgcttatgttggcagcaatgcacgggaacatcgcctgtgtggagaagcttcttcaagccggagctaatgttttgatgtttgatactatttacgggagaacctgcttacactattccgcttactacggccattcttcttgccttaaggctattctttccgctgctcaatctagtccagtggctgcttcttgggggtttgctcggtttgtgaatattagagatggaaaaggtgcaacgccattgcacttggcggctcgtcagaggcggtctgaatgtgtacatattctattagacagtggagctcttgtttgtgcttcaactggtggatatggctgtcctgggagcactcctcttcatctagcagctagaggaggatctctggattgcattcgtgaattgttggcatggggtgcagatcgtcttcaacgcgatgcatctgggcgtataccatatatggttgcccttaaacacaaacatggagcctgtgcatcattgctaaatcctacatctgcagaacctcttgtctggccgtctccattgaagttcatcagtgagcttaatcctgaagccaaagctttattagagcaggccttgatggatgcaaacagagaaagagagaaaaacatattgaaagggagttcttactctctgccatctccatctcattctgatggggtagctgataatacgtctgaggttagtgaatccgaattatgttgcatctgctttgagcaggtgtgcacaattgaagttcagaactgtggccaccagatgtgtgcacaatgcacactagccctgtgttgccacaacaagcccaaccctgccactgcctgtcttactccaccagtttgtccattttgtcgaagcaccataacaagacttgttgttgtgaagacggaatgccacgatgaaactgatcaagacagtgttgatatcaactgttccaagctgagcaagtcatcaaggaaactcagaaacttgaatgacattggtagcagcagcttcaagggactatctagtgttagttcattcgggaaattgggtagccgcagctctggaaggattgctgcagagtggcttgataaacagtgatggcaatttgcaattacttgtggtaatcaatgattccatattggcaaagatacggtaactacaaaggtgcttaaccggcaaggcaaaaatcaaagttaaaagggaaaggaatattatgtaattttgggaaataagcaaagtgagttgaagtgaagttcgcggtaggtaccaagtgttgttgggaaaaaaagagaaggggatgtcatgttgtagtagtattattattacttgagaatgaagaagcatcacctgcgtcgatgattttgggcatcgtc

SEQ ID NO: 5831 - protein, 444 aa, Glycine max
  misc_feature (1)..(444): Ceres Seq. ID no. 14311943
MGQSLSCSGNHDHGLFTAVLHGDLQIVTTLLDSDPSLLHQTTLYDRHSPLHIAAANGQIEILSRLLDGSLNPDVLNRHKQTPLMLAAMHGNIACVEKLLQAGANVLMFDTIYGRTCLHYSAYYGHSSCLKAILSAAQSSPVAASWGFARFVNIRDGKGATPLHLAARQRRSECVHILLDSGALVCASTGGYGCPGSTPLHLAARGGSLDCIRELLAWGADRLQRDASGRIPYMVALKHKHGACASLLNPTSAEPLVWPSPLKFISELNPEAKALLEQALMDANREREKNILKGSSYSLPSPSHSDGVADNTSEVSESELCCICFEQVCTIEVQNCGHQMCAQCTLALCCHNKPNPATACLTPPVCPFCRSTITRLVVVKTECHDETDQDSVDINCSKLSKSSRKLRNLNDIGSSSFKGLSSVSSFGKLGSRSSGRIAAEWLDKQ

SEQ ID NO: 5832 - protein, 361 aa, Glycine max
  misc_feature (1)..(361): Ceres Seq. ID no. 14311944
MLAAMHGNIACVEKLLQAGANVLMFDTIYGRTCLHYSAYYGHSSCLKAILSAAQSSPVAASWGFARFVNIRDGKGATPLHLAARQRRSECVHILLDSGALVCASTGGYGCPGSTPLHLAARGGSLDCIRELLAWGADRLQRDASGRIPYMVALKHKHGACASLLNPTSAEPLVWPSPLKFISELNPEAKALLEQALMDANREREKNILKGSSYSLPSPSHSDGVADNTSEVSESELCCICFEQVCTIEVQNCGHQMCAQCTLALCCHNKPNPATACLTPPVCPFCRSTITRLVVVKTECHDETDQDSVDINCSKLSKSSRKLRNLNDIGSSSFKGLSSVSSFGKLGSRSSGRIAAEWLDKQ

SEQ ID NO: 5833 - protein, 357 aa, Glycine max
  misc_feature (1)..(357): Ceres Seq. ID no. 14311945
MHGNIACVEKLLQAGANVLMFDTIYGRTCLHYSAYYGHSSCLKAILSAAQSSPVAASWGFARFVNIRDGKGATPLHLAARQRRSECVHILLDSGALVCASTGGYGCPGSTPLHLAARGGSLDCIRELLAWGADRLQRDASGRIPYMVALKHKHGACASLLNPTSAEPLVWPSPLKFISELNPEAKALLEQALMDANREREKNILKGSSYSLPSPSHSDGVADNTSEVSESELCCICFEQVCTIEVQNCGHQMCAQCTLALCCHNKPNPATACLTPPVCPFCRSTITRLVVVKTECHDETDQDSVDINCSKLSKSSRKLRNLNDIGSSSFKGLSSVSSFGKLGSRSSGRIAAEWLDKQ

SEQ ID NO: 5834 - DNA, 1294 bp, Glycine max
  misc_feature (1)..(1294): Ceres Seq. ID no. 14311957
gccattttcttctctacctatctgccactccacttcccttcttttctacttctcggtgagtcccatcctatcccctccttccaccaagcctacagtaacggaatcatccaatatttcaaaggaaaacatagccattagcagaatcaagggtagctagcgtatatggaagcaggagtaggaggaggaagggtaggtggtgcatgcgacaacgaaattagcgacggaatgcaatgcatgaaccaccctcacaacaacagcaacaacaatcccggtgggatttgcgccttctgtctccaagataaactccgcaaccttctctcttcttcacctcctctttcttcctcgtcttctccttccccttctttcactcctccacctcctccctctgttaaaaccgaccacgaccacaacacgcgctctcgcctccccttcctcgtacccaagaaaaacaacaacaaaaaaccctcctcctacaccaacatttcttcatcagctaatatcattttcaaacgcagcaagtccactgccacacccaaaaggaaccagtttctcgaggagaaggacttcagtcccagaaaaagaaacggtttttggtctttcctctatccttcttcttcaaaggaagctaagagctttggtccaaatggtaagtacagaggcaagtgcttgggaaaaaagagtgatcacgtgattattgtggaagaggacaagtgtttgagctcttcttcttcttcttcttcttctaaggtttcgagatctagatctgttgggtgtggtagcagaagcttctccagtgatttcttcgagaggatctcttctggcctcggcgactgcactctacggagagtggagtctcagcgtgaaggaggaaaacctaagctagctgcttctgctaatactatgaaccattgcatgaaggaaagagtgagatgtggaggaatattcagtggcttcgttatgaattcgtcttcatcaacaacgtcttcttcgtcttgggtttcttcttctgttgatgatggcagaggaaggagttggggttgggcgtttgctagtcctatgagagctttcaccaccaaagggtctcctccttcttcttcttcgaagagagatgcttctgataagaacaacgccacgcctaacttatcagccattcctaccttgctcactgttagaggctgaaagagaataaaaaatgataaactattcggaggcttttatttatttggtttatatgcacattagcatgctctgtttatcttcgctaataataataatgtaatactcagtttactcc

SEQ ID NO: 5835 - protein, 338 aa, Glycine max
  misc_feature (1)..(338): Ceres Seq. ID no. 14311958
MEAGVGGGRVGGACDNEISDGMQCMNHPHNNSNNNPGGICAFCLQDKLRNLLSSSPPLSSSSSPSPSFTPPPPPSVKTDHDHNTRSRLPFLVPKKNNNKKPSSYTNISSSANIIFKRSKSTATPKRNQFLEEKDFSPRKRNGFWSFLYPSSSKEAKSFGPNGKYRGKCLGKKSDHVIIVEEDKCLSSSSSSSSSKVSRSRSVGCGSRSFSSDFFERISSGLGDCTLRRVESQREGGKPKLAASANTMNHCMKERVRCGGIFSGFVMNSSSSTTSSSSWVSSSVDDGRGRSWGWAFASPMRAFTTKGSPPSSSSKRDASDKNNATPNLSAIPTLLTVRG

SEQ ID NO: 5836 - protein, 317 aa, Glycine max
  misc_feature (1)..(317): Ceres Seq. ID no. 14311959
MQCMNHPHNNSNNNPGGICAFCLQDKLRNLLSSSPPLSSSSSPSPSFTPPPPPSVKTDHDHNTRSRLPFLVPKKNNNKKPSSYTNISSSANIIFKRSKSTATPKRNQFLEEKDFSPRKRNGFWSFLYPSSSKEAKSFGPNGKYRGKCLGKKSDHVIIVEEDKCLSSSSSSSSSKVSRSRSVGCGSRSFSSDFFERISSGLGDCTLRRVESQREGGKPKLAASANTMNHCMKERVRCGGIFSGFVMNSSSSTTSSSSWVSSSVDDGRGRSWGWAFASPMRAFTTKGSPPSSSSKRDASDKNNATPNLSAIPTLLTVRG

SEQ ID NO: 5837 - protein, 314 aa, Glycine max
  misc_feature (1)..(314): Ceres Seq. ID no. 14311960
MNHPHNNSNNNPGGICAFCLQDKLRNLLSSSPPLSSSSSPSPSFTPPPPPSVKTDHDHNTRSRLPFLVPKKNNNKKPSSYTNISSSANIIFKRSKSTATPKRNQFLEEKDFSPRKRNGFWSFLYPSSSKEAKSFGPNGKYRGKCLGKKSDHVIIVEEDKCLSSSSSSSSSKVSRSRSVGCGSRSFSSDFFERISSGLGDCTLRRVESQREGGKPKLAASANTMNHCMKERVRCGGIFSGFVMNSSSSTTSSSSWVSSSVDDGRGRSWGWAFASPMRAFTTKGSPPSSSSKRDASDKNNATPNLSAIPTLLTVRG

SEQ ID NO: 5838 - DNA, 1286 bp, Glycine max
  misc_feature (1)..(1286): Ceres Seq. ID no. 14311965
ggccctgacgaacaatccttacatccatgggagcaagatctcttaaagaagatttgcgatgcatattacctccctgcctggtgctcaacttctgattatgttaagttgctccaatccctgtcacttcaggtattcaatatgcctaagtgctgtctcattatatatatatatatatatatatttatataatgattgtttaagttttgttgaatttttgtgtgtagatagttgacgttttgttgctatgttaacttgcttgctatgtaggacatcaagtcagaagattggtctcgctttgttgctccattttggccagcagtgatacgctcagccttcacatggaagggtctaacttcactcttgagcagtggtaagcttggaatttatattgcatttcaaaaacaaacccccccatcttctattgcaacttgcaagtcttatgtcactgatcattatttccacactagataaccctttacaactaagaacgtagtcttcatgttcagcgaaatagataaaaatatgcaacagagtcagagacagggtgcatgatatttacaagaaaatatcttttatatatataaatgattcaatcaaattacttgatgaggattatgagtgaaaatgagaggacagtcatagaaactttatcctacattccttctatttccacttctgtcaaatattcctttcatcttagctatgctacttgacttgagtatgtttggtagtttaaatttttaagggaaaagaagaggaggccaattttttaatttttaaagttaaaaaattagtaaattaacataaatttaatatccttacttttggtttatttctaataacatcataaaattctcataattgatttttaaataaattgtctttcccttttttcttctaaagtttcactcgcaaatatatcttaagtgaagcaatcaagcaagcataaaaaaggcctaatgactaatgaaaaactcagtcttcatctctggcgcaaggattaataagagtttaggcttgtcactctctgaataattaagtccattcaagtttgggagtatgactattttaaaataccagtaaagtataaagtatgtaaattaaaaaaaataatttaaatgatagataactatttactgttgataaaaaaaactaaattaaaataaaaataaggcatttgaaacttccagttttgaaaatttttaaaaaattggtttaatcggtaaaagattattttattggtgatttttaaatatctcaatatcccattatgctttaagattgac

SEQ ID NO: 5839 - protein, 62 aa, Glycine max
  misc_feature (1)..(62): Ceres Seq. ID no. 14311966
GPDEQSLHPWEQDLLKKICDAYYLPAWCSTSDYVKLLQSLSLQVFNMPKCCLIIYIYIYIFI

SEQ ID NO: 5840 - protein, 57 aa, Glycine max
  misc_feature (1)..(57): Ceres Seq. ID no. 14311967
MHITSLPGAQLLIMLSCSNPCHFRYSICLSAVSLYIYIYIYLYNDCLSFVEFLCVDS

SEQ ID NO: 5841 - protein, 44 aa, Glycine max
  misc_feature (1)..(44): Ceres Seq. ID no. 14311968
MLSCSNPCHFRYSICLSAVSLYIYIYIYLYNDCLSFVEFLCVDS

SEQ ID NO: 5842 - DNA, 1455 bp, Glycine max
  misc_feature (1)..(1455): Ceres Seq. ID no. 14311989
gttatgactctttgacttctccttcatctctttcgctggacaaaacccctttcgccggaaaacccaccgcaacctttgtggttcgcaactccgtttccggcttcaccgtgctcctcttacacgcagtatatatatatgtatgtatatggggaaaactaggtggttgataatattggttacctgtttatgcctgctttccttttctgatggcagagaactcaaggttaggcataaaaagcaacattaccaatacaatcatacagttgctacaatattagtggaatatgcttctgcggtatacttgtcagatttaactgaactttttacttggacgtgctctaggtgtaatggcttgaccaagggatttgaaatgatagagttagttgttgacgtcgagcattgcttacaggcatttgttggagtggccgatgatcctcatgccattatcattgcattcagaggaacaaatgaacacagcttacagaattggattgaagatttatattggaagcagcatgatataaattatccaggcatggatgatgcaatggtacaccgtggtttttataccgcgtaccacaatacaacaatacgtcctgcaattttagatgctgttgaaagagcaaagaagttttatggagatattgaaattatagcaacagggcattcaatgggaggggcaatggcttcattttgtggacttgatttaacggtaaatcaaaatgaaaaaaatgttcaagttatgacatttggacaacctcgtattggaaatgctgcttttgcatctctctatacgaaactagttccaaataccatccgagtcacaaatgaccatgatattgtacctcatttgcctccatactattattatttaccgcagaagacataccgccacttcccaagagaggtatggctttataacatcggattaggtagtcttgtgtacagtgttgagaagatttgtgatgaatctggtgaggatccaaattgcagcagatcggtgactgggaatagcattgctgatcacttggtctattatggcgttgacatgggatcagatgagccaagttcatgcagaattgttatggattcttatgttcagaatactaacatcaaagattcaagaggaaacttaatcttgtccagagatcctgcaacccccctcatcaaattgagtggagagggtgacaatcaggaaaatcccattaatgttgattgaattggcatcagatatctgttgcatgatatgttccagaggtttgccgtgtggcattattcttcagatttcttctttcttcatggtccatacagctgaacaattttattgaacaggctagggctggaaggagtttgtatagtcttggactcgtgtacatatgctcatacttgtatatataactaataattatatttttttacttcataattaataattcttgatactttgttaagtgc

SEQ ID NO: 5843 - protein, 359 aa, Glycine max
  misc_feature (1)..(359): Ceres Seq. ID no. 14311990
MYMGKTRWLIILVTCLCLLSFSDGRELKVRHKKQHYQYNHTVATILVEYASAVYLSDLTELFTWTCSRCNGLTKGFEMIELVVDVEHCLQAFVGVADDPHAIIIAFRGTNEHSLQNWIEDLYWKQHDINYPGMDDAMVHRGFYTAYHNTTIRPAILDAVERAKKFYGDIEIIATGHSMGGAMASFCGLDLTVNQNEKNVQVMTFGQPRIGNAAFASLYTKLVPNTIRVTNDHDIVPHLPPYYYYLPQKTYRHFPREVWLYNIGLGSLVYSVEKICDESGEDPNCSRSVTGNSIADHLVYYGVDMGSDEPSSCRIVMDSYVQNTNIKDSRGNLILSRDPATPLIKLSGEGDNQENPINVD

SEQ ID NO: 5844 - protein, 357 aa, Glycine max
  misc_feature (1)..(357): Ceres Seq. ID no. 14311991
MGKTRWLIILVTCLCLLSFSDGRELKVRHKKQHYQYNHTVATILVEYASAVYLSDLTELFTWTCSRCNGLTKGFEMIELVVDVEHCLQAFVGVADDPHAIIIAFRGTNEHSLQNWIEDLYWKQHDINYPGMDDAMVHRGFYTAYHNTTIRPAILDAVERAKKFYGDIEIIATGHSMGGAMASFCGLDLTVNQNEKNVQVMTFGQPRIGNAAFASLYTKLVPNTIRVTNDHDIVPHLPPYYYYLPQKTYRHFPREVWLYNIGLGSLVYSVEKICDESGEDPNCSRSVTGNSIADHLVYYGVDMGSDEPSSCRIVMDSYVQNTNIKDSRGNLILSRDPATPLIKLSGEGDNQENPINVD

SEQ ID NO: 5845 - protein, 282 aa, Glycine max
  misc_feature (1)..(282): Ceres Seq. ID no. 14311992
MIELVVDVEHCLQAFVGVADDPHAIIIAFRGTNEHSLQNWIEDLYWKQHDINYPGMDDAMVHRGFYTAYHNTTIRPAILDAVERAKKFYGDIEIIATGHSMGGAMASFCGLDLTVNQNEKNVQVMTFGQPRIGNAAFASLYTKLVPNTIRVTNDHDIVPHLPPYYYYLPQKTYRHFPREVWLYNIGLGSLVYSVEKICDESGEDPNCSRSVTGNSIADHLVYYGVDMGSDEPSSCRIVMDSYVQNTNIKDSRGNLILSRDPATPLIKLSGEGDNQENPINVD

SEQ ID NO: 5846 - DNA, 1577 bp, Glycine max
  misc_feature (1)..(1577): Ceres Seq. ID no. 14312016
gttcaggttctccttttaacatcttcatcttctcttttcttttgttgtcttctgtgcgcgctctctctctatgcattgatactgtttcttttattttcatctggggttcgccgcttcagctgccaccgttctcggtatctcatgtgatcttcaaagtttgttgctttcagccttttcaagctgtccatttaagtttttgagagcaagcagttttttatgaggaccgaataaaagattcaaatttctatgacgtctatcaaatcattgagatggctgatgagaaaaaagagtggattgtctgatgggggtaaatcaagtttcaagatgaaacatctgccttttctggcagttttgtgcacgataatgttattcattgtgtatagaaccacaaagtatcagtatcaccaagaagagattgacaaaaaatggagtttctggggacaaccaaaggtgtatccttcaacttatgggaagttgaaaggcttgccacgaggtataatacatgataattcagatttggagttaagaccattatggtcaagaagtagttcaagatcaaaggctgtttactctaactctaacttactggcagttccagttggtattaaacaaaagcagaatgttgatgctatggtgcaaaagtttcttcaagaaaacttcacaattattttattccattatgatggcaatgtggatggatggtggaatcttgactggagtagcaaggccatacacattattgctcggaatcaaacaaagtggtggtttgcaaaaaggtttctacatccagatatagtgtctatttatgattatatctttctctgggatgaggatctaggtgtggagcatttttcaccttcaagatatgttgaaattataaagagagaaggtttggagatatctcaaccagctcttgacccaaattcaacagagatacaccatagaattacaattagagctagaaccaagaaatttcatagagtctatgaacgcagaggcagtacaaggtgttcagatttaagtgagggaccgccgtgcactgggtttgtggaaggtatggctcctgttttctctcaatctgcctggtactgcacttggcatcttatacagaatgaccttgtccatggatggggagttgatatgaagctaggatattgtgcacagggagatcgaactaaaaaggtgggagttgttgacagcgaatatgtttttcacaagggaatacaaactctgggggggagtggtcacagaatgacaaaggtttcgaaactacaaaggacaactatgaaacaaggtggagtaggaattgatgtgcgaactgagataagaaggcaatcgacatgggaatttgaaatcttcaaagagcgttggaataaagccattggtgcagacaaaaactgggttgatccatttaagagtgaccaaagacgcataagaaaatggcgtgacacgcaacgccttgctaagaacaatatttaactctgttgcatatcttacagtttcattcacagggcattaccttttatttataggcataatttagtttgtgtagatgagtaaaaattcattcaattttg

SEQ ID NO: 5847 - protein, 410 aa, Glycine max
  misc_feature (1)..(410): Ceres Seq. ID no. 14312017
MTSIKSLRWLMRKKSGLSDGGKSSFKMKHLPFLAVLCTIMLFIVYRTTKYQYHQEEIDKKWSFWGQPKVYPSTYGKLKGLPRGIIHDNSDLELRPLWSRSSSRSKAVYSNSNLLAVPVGIKQKQNVDAMVQKFLQENFTIILFHYDGNVDGWWNLDWSSKAIHIIARNQTKWWFAKRFLHPDIVSIYDYIFLWDEDLGVEHFSPSRYVEIIKREGLEISQPALDPNSTEIHHRITIRARTKKFHRVYERRGSTRCSDLSEGPPCTGFVEGMAPVFSQSAWYCTWHLIQNDLVHGWGVDMKLGYCAQGDRTKKVGVVDSEYVFHKGIQTLGGSGHRMTKVSKLQRTTMKQGGVGIDVRTEIRRQSTWEFEIFKERWNKAIGADKNWVDPFKSDQRRIRKWRDTQRLAKNNI

SEQ ID NO: 5848 - protein, 400 aa, Glycine max
  misc_feature (1)..(400): Ceres Seq. ID no. 14312018
MRKKSGLSDGGKSSFKMKHLPFLAVLCTIMLFIVYRTTKYQYHQEEIDKKWSFWGQPKVYPSTYGKLKGLPRGIIHDNSDLELRPLWSRSSSRSKAVYSNSNLLAVPVGIKQKQNVDAMVQKFLQENFTIILFHYDGNVDGWWNLDWSSKAIHIIARNQTKWWFAKRFLHPDIVSIYDYIFLWDEDLGVEHFSPSRYVEIIKREGLEISQPALDPNSTEIHHRITIRARTKKFHRVYERRGSTRCSDLSEGPPCTGFVEGMAPVFSQSAWYCTWHLIQNDLVHGWGVDMKLGYCAQGDRTKKVGVVDSEYVFHKGIQTLGGSGHRMTKVSKLQRTTMKQGGVGIDVRTEIRRQSTWEFEIFKERWNKAIGADKNWVDPFKSDQRRIRKWRDTQRLAKNNI

SEQ ID NO: 5849 - protein, 384 aa, Glycine max
  misc_feature (1)..(384): Ceres Seq. ID no. 14312019
MKHLPFLAVLCTIMLFIVYRTTKYQYHQEEIDKKWSFWGQPKVYPSTYGKLKGLPRGIIHDNSDLELRPLWSRSSSRSKAVYSNSNLLAVPVGIKQKQNVDAMVQKFLQENFTIILFHYDGNVDGWWNLDWSSKAIHIIARNQTKWWFAKRFLHPDIVSIYDYIFLWDEDLGVEHFSPSRYVEIIKREGLEISQPALDPNSTEIHHRITIRARTKKFHRVYERRGSTRCSDLSEGPPCTGFVEGMAPVFSQSAWYCTWHLIQNDLVHGWGVDMKLGYCAQGDRTKKVGVVDSEYVFHKGIQTLGGSGHRMTKVSKLQRTTMKQGGVGIDVRTEIRRQSTWEFEIFKERWNKAIGADKNWVDPFKSDQRRIRKWRDTQRLAKNNI

SEQ ID NO: 5850 - DNA, 1396 bp, Glycine max
  misc_feature (1)..(1396): Ceres Seq. ID no. 14312047
acgtttcaaatcgcagtctcagagcaaagcagagccaagaagaagaagaagaaaaccaacataatcaacaacaacaacaacaaaaagcttgcaaattagaagaatcttcagttaaaagggaagaagaacacacaagaagaaagagaagaagaaacgcgcgcgaatgaagggagaattagagttgccacctgggttcagatttcaccccactgatgaagaattggtgaatcactacttgtgtaggaagtgcgctggtcaaccaatcgcggttcccgtcatcaaagaggtcgatttgtacaagtttgatccatggcagcttccagaaattggtttttacggcgagaaagaatggtacttcttttctcctcgggaccggaaatacccgaacggttcacggccgaaccgcgccgccggaagcggctattggaaagccaccggcgctgataaaccgatcggaaaaccgaaagcgcttgggatcaagaaagctctggttttttacgccggaaaagcccccaaaggtgtgaaaaccaattggattatgcacgaatatcgcctcgccaatgttgaccgatctgcctccaagaaaaaaaacaacaacttgaggcttgatgattgggtgttgtgtcgaatctacaacaagaaagggaagattgagaaatacaacacaggcgcagcgaagatgaatgttgagatggttcatagttttgagcacgagaacgagacgaagccagagattcataagctaggaaatgagcaattgtacatggagacttcggattcggtgccaaggttgaacacggactcgagcagttcggagcacgtggtttcgcccgatgtcacgtgcgagagggaggtgcagagcgaccccaagtggaacgatgatctggacctaaagctagaaaacgcgtttgattttcagtttaattacttggacgataataacctttccgtggatgattacctttttggcactgttcagtatcaaatgggccagctctcgcccttgcaggacatgttcatgtacctacagaagatgtgaaaactgaaaacgaaacgttttgagcaacatgggacccgcaaatatctttgttttattatttttttaaaaggaaaagtcagcatttgtatgcaattgcattgcacctaacatgtgatgtgggctaggccaagcttagcaactattcttattctttgttctagagagatgagggaatgttgaattcggctgaaatgggctatttggattggttcttggtgtaaagaaaaaatgagagaaggagattaggtgctgcagtaagtaaaaagtaagtgagcaaattgatgataggttattggagggttaatgtgtgggtgtaaggactcacttaggaaaattcttgttcattgctattccagc

SEQ ID NO: 5851 - protein, 291 aa, Glycine max
  misc_feature (1)..(291): Ceres Seq. ID no. 14312048
MKGELELPPGFRFHPTDEELVNHYLCRKCAGQPIAVPVIKEVDLYKFDPWQLPEIGFYGEKEWYFFSPRDRKYPNGSRPNRAAGSGYWKATGADKPIGKPKALGIKKALVFYAGKAPKGVKTNWIMHEYRLANVDRSASKKKNNNLRLDDWVLCRIYNKKGKIEKYNTGAAKMNVEMVHSFEHENETKPEIHKLGNEQLYMETSDSVPRLNTDSSSSEHVVSPDVTCEREVQSDPKWNDDLDLKLENAFDFQFNYLDDNNLSVDDYLFGTVQYQMGQLSPLQDMFMYLQKM

SEQ ID NO: 5852 - protein, 166 aa, Glycine max
  misc_feature (1)..(166): Ceres Seq. ID no. 14312049
MHEYRLANVDRSASKKKNNNLRLDDWVLCRIYNKKGKIEKYNTGAAKMNVEMVHSFEHENETKPEIHKLGNEQLYMETSDSVPRLNTDSSSSEHVVSPDVTCEREVQSDPKWNDDLDLKLENAFDFQFNYLDDNNLSVDDYLFGTVQYQMGQLSPLQDMFMYLQKM

SEQ ID NO: 5853 - DNA, 1774 bp, Glycine max
  misc_feature (1)..(1774): Ceres Seq. ID no. 14312069
aaaaccatcactgcattctctctgaagcctctaattctgtgtgtcagttaaagaaagaagcgcacatgccaaaagggatggcttcagtcaccacattttcactaatgttacagtttctgttctttatactattttcttcgtttggtcagctaagcttagctttcacgtcgcaagagtaccatgaggctcttgagaaatccattctcttcttcgagggacaacgatctgggaaattgccttccaaccagcaacaaacatggaggggagattctggattgtccgatggctcttcctaccatgtggacttagtaggcggttattatgatgctggagacaacgtcaagtttgggttgccaatggcctttaccactacattgttagcatggagtgtgattgaatttggaagctcaatgcaggaccaacttgaaaatgccagagctgctattcgttggagcacggattaccttcttaaggcagccaccaccacccctgacacattatatgtccaagtaggagagccgaacatggatcataggtgctgggaaagggctgaagatatggacactccacgcaacgtgtataaagtatcagctacaaacccaggttcggatgtagcagcagagacggcaactgcattggctgcttcttcaatagtattcagagattctgatccaagctattcctccaaattgcttcaagcagccatcaaagtattcaattttgcagaccgttacaggggttcttatagtgattctcttaattcggttgtctgtccattctactgctcttactctggataccatgatgagcttctctggggtgcatcatggatttataaagcatcaggaattaacacttatatacaatatatacaatccaatggccacatattaggggctgatgatgatggttacacattcagttgggatgacaagcgacctggaacaaaaatcctgctttccaaggaattcctagaggaaaattctgaagagttccaactatataaggcacatgcagacaattacatttgttcgctaatgtcgggaacacccggtttccaggctcagtacacccgaggggggcttctgtacaaagggagcgagagcaatttgcagtacgtaacatcaactagcttccttctcttgacatacgccaaatatctgaacacaaacggcggtaatgtagttcgatgtgggacttcagcagtcacgggcgaaaacctagtaacactagctaaagcacaagtggactacattctgggcaacaatccaacaaagatgtcttatatggtgggttttggagagaggtatccaaagcatatccaccacaggggttcctctctgccttccatccacgcacacactcaacacatttcatgcaacgacggctttcagtttttccattcttcctcgcccaaccctaatatccttgttggagccatcgtaggtggtcctgataacaatgacaacttctctgatgatcgacataactatcagcagtctgagccagcaacatacatcaatgcgccgtttgtaggtgctcttgcctatttctctgccaacccaccaacaacctattaggattaggaattaataatacacctataatcaagttttcaatatcgaccaatgccgttccaaatgtggttgcagacacttaaaaaacctgttgcctatcattaatgcttgtatgcttggtgttaggctgtttgttagttccttcatccttgatgaatgtttatgtttccatcaaaagtgatgtttaattattagtg

SEQ ID NO: 5854 - protein, 525 aa, Glycine max
  misc_feature (1)..(525): Ceres Seq. ID no. 14312070
NHHCILSEASNSVCQLKKEAHMPKGMASVTTFSLMLQFLFFILFSSFGQLSLAFTSQEYHEALEKSILFFEGQRSGKLPSNQQQTWRGDSGLSDGSSYHVDLVGGYYDAGDNVKFGLPMAFTTTLLAWSVIEFGSSMQDQLENARAAIRWSTDYLLKAATTTPDTLYVQVGEPNMDHRCWERAEDMDTPRNVYKVSATNPGSDVAAETATALAASSIVFRDSDPSYSSKLLQAAIKVFNFADRYRGSYSDSLNSVVCPFYCSYSGYHDELLWGASWIYKASGINTYIQYIQSNGHILGADDDGYTFSWDDKRPGTKILLSKEFLEENSEEFQLYKAHADNYICSLMSGTPGFQAQYTRGGLLYKGSESNLQYVTSTSFLLLTYAKYLNTNGGNVVRCGTSAVTGENLVTLAKAQVDYILGNNPTKMSYMVGFGERYPKHIHHRGSSLPSIHAHTQHISCNDGFQFFHSSSPNPNILVGAIVGGPDNNDNFSDDRHNYQQSEPATYINAPFVGALAYFSANPPTTY

SEQ ID NO: 5855 - protein, 504 aa, Glycine max
  misc_feature (1)..(504): Ceres Seq. ID no. 14312071
MPKGMASVTTFSLMLQFLFFILFSSFGQLSLAFTSQEYHEALEKSILFFEGQRSGKLPSNQQQTWRGDSGLSDGSSYHVDLVGGYYDAGDNVKFGLPMAFTTTLLAWSVIEFGSSMQDQLENARAAIRWSTDYLLKAATTTPDTLYVQVGEPNMDHRCWERAEDMDTPRNVYKVSATNPGSDVAAETATALAASSIVFRDSDPSYSSKLLQAAIKVFNFADRYRGSYSDSLNSVVCPFYCSYSGYHDELLWGASWIYKASGINTYIQYIQSNGHILGADDDGYTFSWDDKRPGTKILLSKEFLEENSEEFQLYKAHADNYICSLMSGTPGFQAQYTRGGLLYKGSESNLQYVTSTSFLLLTYAKYLNTNGGNVVRCGTSAVTGENLVTLAKAQVDYILGNNPTKMSYMVGFGERYPKHIHHRGSSLPSIHAHTQHISCNDGFQFFHSSSPNPNILVGAIVGGPDNNDNFSDDRHNYQQSEPATYINAPFVGALAYFSANPPTTY

SEQ ID NO: 5856 - protein, 500 aa, Glycine max
  misc_feature (1)..(500): Ceres Seq. ID no. 14312072
MASVTTFSLMLQFLFFILFSSFGQLSLAFTSQEYHEALEKSILFFEGQRSGKLPSNQQQTWRGDSGLSDGSSYHVDLVGGYYDAGDNVKFGLPMAFTTTLLAWSVIEFGSSMQDQLENARAAIRWSTDYLLKAATTTPDTLYVQVGEPNMDHRCWERAEDMDTPRNVYKVSATNPGSDVAAETATALAASSIVFRDSDPSYSSKLLQAAIKVFNFADRYRGSYSDSLNSVVCPFYCSYSGYHDELLWGASWIYKASGINTYIQYIQSNGHILGADDDGYTFSWDDKRPGTKILLSKEFLEENSEEFQLYKAHADNYICSLMSGTPGFQAQYTRGGLLYKGSESNLQYVTSTSFLLLTYAKYLNTNGGNVVRCGTSAVTGENLVTLAKAQVDYILGNNPTKMSYMVGFGERYPKHIHHRGSSLPSIHAHTQHISCNDGFQFFHSSSPNPNILVGAIVGGPDNNDNFSDDRHNYQQSEPATYINAPFVGALAYFSANPPTTY

SEQ ID NO: 5857 - DNA, 1145 bp, Glycine max
  misc_feature (1)..(1145): Ceres Seq. ID no. 14312124
attttggtaccaccacaactctctatcactcacaacattttcacacaaacactttctgaaaaaagaattcgtttcttttccctaacatggccagatcacaacagcgataccgaggtgtccgacaaaggcattggggctcttgggtctccgaaattcgacaccccatattgtaagtgccccttttgttttcactccaatgcacatttcacttatctatggactaaaaaatagaccaaatgttggtctagcaaaagaaattagtccatggcaaaccaatttatcaacctccgttaaataaaaaatgttcacatttagtgtgtgacagcatgtcaaaccaatgtttgaatctccgttaaaaaggtgtttacatatagtatctgacagtgtctcgaaacattattgattcaaactttcttctaatttgcaggaaaactaggatatggctaggaacttttgaaactgctgaggatgcagctagagcctatgatgaagcagcaaggctaatgtgtggcacaagagcaagaactaacttcccttacaaccccaatgcgtctcagtcatcatcttccaagcttctctcagcaactttaactgcaaaactgcataggtgctacatggcttctttgcaaatgacaaggccatcatcacaggcagagcctcagagagtggcttcaccaaatgtcatcacctcctccgcgagcaacttctccatgaagagtaacgaaactgagacattgttgttgccacaaaagagacaagaagaggagcaagaagcagaagggaattgggttttcaagaaggttaaggtggaaaatgctcagcagttcaagcctcttgaagaggaccacatcgagcaaatgatagaggagttgctgcattacgggtctattgagctatgctctgtgattccaccacaggctctttgaactcacattgagcaagcatttttattgttagttcacattcttactctgctaatttaatcaactaattctcttggacaatttcagtctctattattattaagtgctttaggtgctagactagactagactagaatagtactatcttctaagtgactcattggacaatgttgtatgtacagccagccaatcatgttgaaattgtgcatttgttctgttcac

SEQ ID NO: 5858 - protein, 140 aa, Glycine max
  misc_feature (1)..(140): Ceres Seq. ID no. 14312125
MCGTRARTNFPYNPNASQSSSSKLLSATLTAKLHRCYMASLQMTRPSSQAEPQRVASPNVITSSASNFSMKSNETETLLLPQKRQEEEQEAEGNWVFKKVKVENAQQFKPLEEDHIEQMIEELLHYGSIELCSVIPPQAL

SEQ ID NO: 5859 - protein, 103 aa, Glycine max
  misc_feature (1)..(103): Ceres Seq. ID no. 14312126
MASLQMTRPSSQAEPQRVASPNVITSSASNFSMKSNETETLLLPQKRQEEEQEAEGNWVFKKVKVENAQQFKPLEEDHIEQMIEELLHYGSIELCSVIPPQAL

SEQ ID NO: 5860 - protein, 98 aa, Glycine max
  misc_feature (1)..(98): Ceres Seq. ID no. 14312127
MTRPSSQAEPQRVASPNVITSSASNFSMKSNETETLLLPQKRQEEEQEAEGNWVFKKVKVENAQQFKPLEEDHIEQMIEELLHYGSIELCSVIPPQAL

SEQ ID NO: 5861 - DNA, 1470 bp, Glycine max
  misc_feature (1)..(1470): Ceres Seq. ID no. 14312140
aaacggatgccattgctgcaccccgtgaaagctctatccctctctttctttgttttccgtggaaaccaacctatcttcctttgttattttcattctgataaaacaaacatattttcttccacctttttccatctttgcaaaggggataaagggttgctagttgctaccatttatggttttattccgccatttggaggaaccttatgctcttaaaacaaataaaacccaaagggttctcttgaaaaacaccagaactttcatctaatcaaaacacgtgttggccaaaaacatcaccttctctttattatcgcatgcaagagcttttttagatgctcctttgtgttcaagattgagagaaaacataacctgggtatgatatgactacgagcatgccccgttaatgtttcaacggtttttgtttctttggttcattttcagacacccccatattcttcttctcaattgaaaaccttggtttttgaatctcccctgttttcctttgtgtgcttcaagttctttttgtctttttctagaaacctatgtcgtctgtgccggcacgaacagggcgacaaagacagcgttatgaggacaatttgcgccttgtctctggatgtattccctatagatggacaaaggacaacacagatcaaatgggggaaacccgggagataatagaagtacttatggtttcttcaccaaaacgtgatgaccttgtattcccaaagggtggatgggaggatgatgagactgttacagaagctgcttgccgcgaggctttagaggaagcaggagttaaaggaatactaagagaaattccactaggaatatgggagttcagaagcaaaaccagtcaagacttatgtagcgtggaaggaggctgcagaggatacatgtttgccttggaggtgactgaagaacttgagacatggccagagcagaaaaaccacgctcgccaatggttaaacataaaagatgcattcaaactcagccgatatgactggatgtgtaatgcacttgaggcatttttgagagtaatggcagaagacagaaagcctgagaaccaagaccagaatgtggaacttgaacccccttcaattgtagaagatatgccagaatgccaaagtatgtcacctaactgctataagagatcctctactatgcagcaccatggtatgcctcctaaagccaatcttctgtcacgtgctactcgagaaatagccatccactttggttattgacattatcaggaggacacttttgaaatatgcttatgtaatggatcaacattgtgcaataactccttaaaattgtgaaagaaaaaactatgaagttattatggcttggatgcacaatccatcaacttcattgttgtaggctctttctttctttctttccaatgtgaccatgatgtaaaatgtggtggtgaaagtctcaagtgtatatgatcttaacagttgtttgcttcacccc

SEQ ID NO: 5862 - protein, 232 aa, Glycine max
  misc_feature (1)..(232): Ceres Seq. ID no. 14312141
MSSVPARTGRQRQRYEDNLRLVSGCIPYRWTKDNTDQMGETREIIEVLMVSSPKRDDLVFPKGGWEDDETVTEAACREALEEAGVKGILREIPLGIWEFRSKTSQDLCSVEGGCRGYMFALEVTEELETWPEQKNHARQWLNIKDAFKLSRYDWMCNALEAFLRVMAEDRKPENQDQNVELEPPSIVEDMPECQSMSPNCYKRSSTMQHHGMPPKANLLSRATREIAIHFGY

SEQ ID NO: 5863 - protein, 195 aa, Glycine max
  misc_feature (1)..(195): Ceres Seq. ID no. 14312142
MGETREIIEVLMVSSPKRDDLVFPKGGWEDDETVTEAACREALEEAGVKGILREIPLGIWEFRSKTSQDLCSVEGGCRGYMFALEVTEELETWPEQKNHARQWLNIKDAFKLSRYDWMCNALEAFLRVMAEDRKPENQDQNVELEPPSIVEDMPECQSMSPNCYKRSSTMQHHGMPPKANLLSRATREIAIHFGY

SEQ ID NO: 5864 - protein, 184 aa, Glycine max
  misc_feature (1)..(184): Ceres Seq. ID no. 14312143
MVSSPKRDDLVFPKGGWEDDETVTEAACREALEEAGVKGILREIPLGIWEFRSKTSQDLCSVEGGCRGYMFALEVTEELETWPEQKNHARQWLNIKDAFKLSRYDWMCNALEAFLRVMAEDRKPENQDQNVELEPPSIVEDMPECQSMSPNCYKRSSTMQHHGMPPKANLLSRATREIAIHFGY

SEQ ID NO: 5865 - DNA, 1495 bp, Glycine max
  misc_feature (1)..(1495): Ceres Seq. ID no. 14312152
atcttcaacttgttcaactctctcaaaaccaaataaaatctttcacaactcaaaactcaagctccaaattttcactttacacctttgaattcattttttcacacatggacgagatcgacgtgcctccgttcttcgtgtgccctatttcattagagctcatgaaggaccccgtgacggtctccaccggcatcacctacgaccgcgacagcatcgagaagtggctcttcgccgaggtgaagaacgacacgtgtcccgtcacgaagcagcccctcctcccggacctcactccgaaccacacgctccgcagactcatccaagcctggtgcaccgtcaacgcctcccacggcgtccagagaatccccacaccaaaaccaccggtcgacaaaaccctcatcgagaaactcctccgcaacacctcggcttcggactccccgagcctccagctccggtccctccgaaccctcaagtccattgcctcggaatcccaatcaaacaaacgctgcatcgaatctgcagaaggcgcagttaatttcctagcaacaattataaccaccaccaccaccaccaccaccaacctactcgatgatgacatcgagttggaaataaaaacaagtacagcccacgaagcattgagccttttacacagcattcagctgtcagagtccggtttgaaggctctgttgaaccatccagaatttataaactctctaaccaagatgatgcaaagagggatctacgagtcacgcgcctacgctgttttcttgctgaattccttgtccgaggtggcggatccggcgcagttgattaacctaaaaactgatttgttcactgaattggttcaggttcttaaggatcaggtttcggagaaggtctcgaaggcgaccctgcaggcattgattcaggtgtgttcgtggggcagaaatagggtgaaggctgtggaggctggagctgtgccggttctggtggagcttcttctcgaatgcaacgagagaaaaccgatagaaatggtgctggttttgttggagattttatgtcagagtgctgacgggagggcggggctgttggcccacgcggcgggggtggtgatcgtggcgaagaagattctgagggtttcaacgatggcgaacgatagggcggcgaagattctgctttcggtgtgcagattttcccccacgccgggcttggtgcaggagatggtgcagcttggggtggtggcaaagctttgtctggtgctgcaggtggatagtgggaacaaagcaaaagagatagctagggagattctcaaattgcatgctagggcttggaggaattcgccttgcatctcacaatttgcttgcttcgtttccaatgagttcgtgaaagaaagaaaatccactttgtttttgttttgttcgtgacaccattggatgtaatcgattatttaagaaactaattccttctgtgagatctagtttgcggtgaaagaaaaccgaaagtaaatcacagttgagttttc

SEQ ID NO: 5866 - protein, 464 aa, Glycine max
  misc_feature (1)..(464): Ceres Seq. ID no. 14312153
LQLVQLSQNQIKSFTTQNSSSKFSLYTFEFIFSHMDEIDVPPFFVCPISLELMKDPVTVSTGITYDRDSIEKWLFAEVKNDTCPVTKQPLLPDLTPNHTLRRLIQAWCTVNASHGVQRIPTPKPPVDKTLIEKLLRNTSASDSPSLQLRSLRTLKSIASESQSNKRCIESAEGAVNFLATIITTTTTTTTNLLDDDIELEIKTSTAHEALSLLHSIQLSESGLKALLNHPEFINSLTKMMQRGIYESRAYAVFLLNSLSEVADPAQLINLKTDLFTELVQVLKDQVSEKVSKATLQALIQVCSWGRNRVKAVEAGAVPVLVELLLECNERKPIEMVLVLLEILCQSADGRAGLLAHAAGVVIVAKKILRVSTMANDRAAKILLSVCRFSPTPGLVQEMVQLGVVAKLCLVLQVDSGNKAKEIAREILKLHARAWRNSPCISQFACFVSNEFVKERKSTLFLFCS

SEQ ID NO: 5867 - protein, 430 aa, Glycine max
  misc_feature (1)..(430): Ceres Seq. ID no. 14312154
MDEIDVPPFFVCPISLELMKDPVTVSTGITYDRDSIEKWLFAEVKNDTCPVTKQPLLPDLTPNHTLRRLIQAWCTVNASHGVQRIPTPKPPVDKTLIEKLLRNTSASDSPSLQLRSLRTLKSIASESQSNKRCIESAEGAVNFLATIITTTTTTTTNLLDDDIELEIKTSTAHEALSLLHSIQLSESGLKALLNHPEFINSLTKMMQRGIYESRAYAVFLLNSLSEVADPAQLINLKTDLFTELVQVLKDQVSEKVSKATLQALIQVCSWGRNRVKAVEAGAVPVLVELLLECNERKPIEMVLVLLEILCQSADGRAGLLAHAAGVVIVAKKILRVSTMANDRAAKILLSVCRFSPTPGLVQEMVQLGVVAKLCLVLQVDSGNKAKEIAREILKLHARAWRNSPCISQFACFVSNEFVKERKSTLFLFCS

SEQ ID NO: 5868 - protein, 412 aa, Glycine max
  misc_feature (1)..(412): Ceres Seq. ID no. 14312155
MKDPVTVSTGITYDRDSIEKWLFAEVKNDTCPVTKQPLLPDLTPNHTLRRLIQAWCTVNASHGVQRIPTPKPPVDKTLIEKLLRNTSASDSPSLQLRSLRTLKSIASESQSNKRCIESAEGAVNFLATIITTTTTTTTNLLDDDIELEIKTSTAHEALSLLHSIQLSESGLKALLNHPEFINSLTKMMQRGIYESRAYAVFLLNSLSEVADPAQLINLKTDLFTELVQVLKDQVSEKVSKATLQALIQVCSWGRNRVKAVEAGAVPVLVELLLECNERKPIEMVLVLLEILCQSADGRAGLLAHAAGVVIVAKKILRVSTMANDRAAKILLSVCRFSPTPGLVQEMVQLGVVAKLCLVLQVDSGNKAKEIAREILKLHARAWRNSPCISQFACFVSNEFVKERKSTLFLFCS

SEQ ID NO: 5869 - DNA, 1341 bp, Glycine max
  misc_feature (1)..(1341): Ceres Seq. ID no. 14312163
gcttcgttgcttggttggttcaattgtatcagtatatactcagaagccatgatattagttgatggcattccattttctacccattcatctcaccctcagggaaaggatattctacttgatttgttggaaaatcccattctggtatcagcctcaaactctttgaaggctaactcagagaggaagttctcagtatctgatgagtctagtccagagagatcaaaatgggtttatatattccagagagaatatgctaccgttgaccccgcccttgttgattttgttggcaccgatgaagcaacaacgtgtgttggccttgttattcggaaccaaaagaatggaatgacgtcagttgcccatatggattcaccaaaaattgtagaaatgggcctctcccaaatgttatcatcactcgtcgacaacagtttggagactgagtttgatgtgcatcttattggggggtttgaagatgtctcactgcaagtctggccagggtcttctgctttgttagagaattttcaatatatagtttccactcagtgaaagagtaattgtagctggatctattgaacttttttgcagcatgcaaatggtagcacagtatcagaaagccctgcagatttggatggttattcctttcctctgtgtttaaagattgttcacactttatggtcaagagaggagaagtttcacatccgaactatctgtgttcttggacataataccagaagggattctgatggaaacacatacccctttttcaatggatttgtggcggagactacaacaggaatcatcatcccagctatctttgatagaacttctagatgtccagatgaaattgtcagaagaatacgagtatccgtgtcttatgaagatgccaactggaacggaaagttactagaaacatatgattctggcattgactgtttcaaaatcgctccttgtcgctggactcttcgccaaaatcatattgcttcatcacttctgaactattctgattccgaaattctttcaatatgttctacatcacctactgctgaagcctcagattttgtggagaatttaaaaaggcagtggaattatttgatcgagcatccacactggacagaaacctttcccaagaaacagcctcgcacttttgcaaggagttcttctgatggaaggtggataaggtgttgatgacattccaaggttgcgtaggctaatccttgtcaataattagattgccttattaaaatggtcatctctcattaaacgtttcatttctcattcctgttaagttatcaaattgcagccatctttagttttgaactaatatgatatttaattatcattgtgctg

SEQ ID NO: 5870 - protein, 179 aa, Glycine max
  misc_feature (1)..(179): Ceres Seq. ID no. 14312164
ASLLGWFNCISIYSEAMILVDGIPFSTHSSHPQGKDILLDLLENPILVSASNSLKANSERKFSVSDESSPERSKWVYIFQREYATVDPALVDFVGTDEATTCVGLVIRNQKNGMTSVAHMDSPKIVEMGLSQMLSSLVDNSLETEFDVHLIGGFEDVSLQVWPGSSALLENFQYIVSTQ

SEQ ID NO: 5871 - protein, 163 aa, Glycine max
  misc_feature (1)..(163): Ceres Seq. ID no. 14312165
MILVDGIPFSTHSSHPQGKDILLDLLENPILVSASNSLKANSERKFSVSDESSPERSKWVYIFQREYATVDPALVDFVGTDEATTCVGLVIRNQKNGMTSVAHMDSPKIVEMGLSQMLSSLVDNSLETEFDVHLIGGFEDVSLQVWPGSSALLENFQYIVSTQ

SEQ ID NO: 5872 - DNA, 2005 bp, Glycine max
  misc_feature (1)..(2005): Ceres Seq. ID no. 14312180
tctctctctctcacacacacacacacactctccccgaggtttgagagggtactggcatccaaaaaatgggttctaaaactaatgcttcgggccatagagcacgaaggccgctgtcaatatttgctgtgcttggtctttgctgtttcttttatcttttgggagcatggcaaagaagtggatctgggaagggagataaccttgcattgaaagttaataacctgatgactgactgcactgttttacccaatttgagttttgaatctcatcacaatgatgtagaaattgtcgaacctgctgagccaaaagctaaagagttcaagccgtgtgatgtgaaatatactgattatacaccttgccaagagcaagaccgagcaatgacatttcccagagagaatatgatctatagagaaaggcattgtcccgctgaaaaggagaaattgcgctgcctcattccagcccccgaagggtacacaactccttttccgtggcctaaaagccgtgattatgcctactatgctaatgttccttacaagagcctgacagtggagaaggctgttcaaaactgggtgcaattccagggaaatgtgtttaaatttccaggtggagggaccatgttccctcacggagcagatgcatatattgatgaacttgcgtcagttattccaattgctgatggttctgttagaacagcactggacactggttgtggggttgcaagctggggagcctacttgctaaagagaaatgtgctggctatgtccttcgctccaaaggacaaccatgaagcacaagttcagtttgctctagaacgaggggtgcctgctgttattggtgtccttggcaccatccaccttccatacccatcaagagccttcgatatggcccagtgttctcgatgtctaataccatggacctcaaatgagggcatgtatctaatggaagttgaccgagtcttaaggcctggtggatactggattttgtctggccccccaattaattggaaaacatactaccaaacatggaagcgatccaaggaagatctgaaggcagaacaaacaaaacttgaggagttagctgaaagtctttgttgggaaaagaagtatgaaaagggtgatattgctatttggagaaagaaaataaatgctaaatcctgcaaaagaaagtctcccaatgtttgtggtttagataatgctgatgatgtgtggtaccaaaaaatggaggtctgtaaaacccctttacctgaggtaaccagcaaaaatgaagttgccggaggagagttacagaagtttcctgctagactttttgcagtccctcctcgaatagcccagggagctattccaggggttacagctgaatcttatcaagaggacaacaaattatggaaaaagcatgttaacgcttacaaaagaatgaataaattgattggcactactagatatcggaatgtgatggacatgaatgcaggccttggaggatttgcagctgcacttgaatcacaaaagtcttgggtgatgaatgttgtgccgtcaattgctgagaacactttgggtgttgtctatgagagaggtctgatcggcatttatcatgactggtgtgaaggcttttccacatacccaaggacatatgatcttattcatgctaatggtttattcagcatataccaggacaagtgcaacctagaagacatccttctagagatggatcgcatcctaaggcctgaaggagcaatcatcatccgggatgaagttgatgttcttaaccaggttaagaaaattgttgggggcatgagatgggatgccaaactggtggatcatgaggatggccctcttgtgcctgagaagatattggttgctctcaaagtgtattgggttggcaccagcaaaaacaaaacatccaatgaggaataaaaccactattgttcgggtgtgaatcttgtacttcagcctgcagtaacatccaaggtttctaaatccaacccaaagaaggaatggggaaaaatatgaat

SEQ ID NO: 5873 - protein, 613 aa, Glycine max
  misc_feature (1)..(613): Ceres Seq. ID no. 14312181
MGSKTNASGHRARRPLSIFAVLGLCCFFYLLGAWQRSGSGKGDNLALKVNNLMTDCTVLPNLSFESHHNDVEIVEPAEPKAKEFKPCDVKYTDYTPCQEQDRAMTFPRENMIYRERHCPAEKEKLRCLIPAPEGYTTPFPWPKSRDYAYYANVPYKSLTVEKAVQNWVQFQGNVFKFPGGGTMFPHGADAYIDELASVIPIADGSVRTALDTGCGVASWGAYLLKRNVLAMSFAPKDNHEAQVQFALERGVPAVIGVLGTIHLPYPSRAFDMAQCSRCLIPWTSNEGMYLMEVDRVLRPGGYWILSGPPINWKTYYQTWKRSKEDLKAEQTKLEELAESLCWEKKYEKGDIAIWRKKINAKSCKRKSPNVCGLDNADDVWYQKMEVCKTPLPEVTSKNEVAGGELQKFPARLFAVPPRIAQGAIPGVTAESYQEDNKLWKKHVNAYKRMNKLIGTTRYRNVMDMNAGLGGFAAALESQKSWVMNVVPSIAENTLGVVYERGLIGIYHDWCEGFSTYPRTYDLIHANGLFSIYQDKCNLEDILLEMDRILRPEGAIIIRDEVDVLNQVKKIVGGMRWDAKLVDHEDGPLVPEKILVALKVYWVGTSKNKTSNEE

SEQ ID NO: 5874 - protein, 561 aa, Glycine max
  misc_feature (1)..(561): Ceres Seq. ID no. 14312182
MTDCTVLPNLSFESHHNDVEIVEPAEPKAKEFKPCDVKYTDYTPCQEQDRAMTFPRENMIYRERHCPAEKEKLRCLIPAPEGYTTPFPWPKSRDYAYYANVPYKSLTVEKAVQNWVQFQGNVFKFPGGGTMFPHGADAYIDELASVIPIADGSVRTALDTGCGVASWGAYLLKRNVLAMSFAPKDNHEAQVQFALERGVPAVIGVLGTIHLPYPSRAFDMAQCSRCLIPWTSNEGMYLMEVDRVLRPGGYWILSGPPINWKTYYQTWKRSKEDLKAEQTKLEELAESLCWEKKYEKGDIAIWRKKINAKSCKRKSPNVCGLDNADDVWYQKMEVCKTPLPEVTSKNEVAGGELQKFPARLFAVPPRIAQGAIPGVTAESYQEDNKLWKKHVNAYKRMNKLIGTTRYRNVMDMNAGLGGFAAALESQKSWVMNVVPSIAENTLGVVYERGLIGIYHDWCEGFSTYPRTYDLIHANGLFSIYQDKCNLEDILLEMDRILRPEGAIIIRDEVDVLNQVKKIVGGMRWDAKLVDHEDGPLVPEKILVALKVYWVGTSKNKTSNEE

SEQ ID NO: 5875 - protein, 510 aa, Glycine max
  misc_feature (1)..(510): Ceres Seq. ID no. 14312183
MTFPRENMIYRERHCPAEKEKLRCLIPAPEGYTTPFPWPKSRDYAYYANVPYKSLTVEKAVQNWVQFQGNVFKFPGGGTMFPHGADAYIDELASVIPIADGSVRTALDTGCGVASWGAYLLKRNVLAMSFAPKDNHEAQVQFALERGVPAVIGVLGTIHLPYPSRAFDMAQCSRCLIPWTSNEGMYLMEVDRVLRPGGYWILSGPPINWKTYYQTWKRSKEDLKAEQTKLEELAESLCWEKKYEKGDIAIWRKKINAKSCKRKSPNVCGLDNADDVWYQKMEVCKTPLPEVTSKNEVAGGELQKFPARLFAVPPRIAQGAIPGVTAESYQEDNKLWKKHVNAYKRMNKLIGTTRYRNVMDMNAGLGGFAAALESQKSWVMNVVPSIAENTLGVVYERGLIGIYHDWCEGFSTYPRTYDLIHANGLFSIYQDKCNLEDILLEMDRILRPEGAIIIRDEVDVLNQVKKIVGGMRWDAKLVDHEDGPLVPEKILVALKVYWVGTSKNKTSNEE

SEQ ID NO: 5876 - DNA, 1353 bp, Glycine max
  misc_feature (1)..(1353): Ceres Seq. ID no. 14312192
aacataacccagtgagtctacccttatctctgaccatttctttctctgaagccaactccaaaactaacagacagaaagaaagagaaaaagaaacccaattcctgtttcaactgaaacacagcacacacaacaatcatcaatttctctacaaaaaataaccccacaaagaaaacaaactgaaacaacagcaaaaaagaaatcttcacctcagcttcctctgttccgtccttcctcgtcgccgcgccggagcatctcgccgccttcatccaccgcatcattcgcgagggaactcggaggtcatcgaattcgcgaagatgtcgcggttcccgttcttcaaccgttcgaacacgattcactcgacgaaatcggaatcctcgcagaaaccctacctcgtccaccaccatctccacaatcttgaccggtccggttcggtgaaccgcttctacggttcagtggactccatgaaatcctcaatccgcggaaaaatggtgaagaagctctgcaccttattcgaatcctccaaaaaacccttgccagaaccagaatccgaatctgaatcgttttcttcttcaaaatcacgttcaaaaacagattcagattcgtgcattactatattgtttcgattacccggcacagaggacagaatagttgtgtatttaacgagccttcgcgggattcggagaactttcgaggattgcaacgcggtccgcatgatcctgaaggggttcagggtttgggtggacgagagggatgtgtctatggacttgagctacagggaggagctgcagcatgtgctgggggagcaccatgtggcgctcccccaagtttttatacgagggaagtacattggtggtgctgatgtgatcaagcatttgtttgagagtggtgacttggcgaagatgattctggaagggctccccaagctgaaacccgggttcgtgtgtgacaattgtggggacgcgaggttcgtgccgtgcgagaattgcagtgggagcaggaaggtgtttgatgaggatgaaggggaattgaagaggtgcttggaatgcaatgagaatggactcctcaggtgtccgtattgctgttcttgattttgattaatgatgattttcatgggggttaattgggttgttgctcgttgaacatgtgttttgttttgttcaagactgggtgttttactttcttatcttggattgagatggaaaactggggtgagtgggggatgtgtatattatattctaatggagggtgtaaatatttagtggtgtacaagaatttgctaaatattggttgttgatggatgatagctttctaatgggaattatgggatgttttaatatatccctttattagtcc

SEQ ID NO: 5877 - protein, 257 aa, Glycine max
  misc_feature (1)..(257): Ceres Seq. ID no. 14312193
MSRFPFFNRSNTIHSTKSESSQKPYLVHHHLHNLDRSGSVNRFYGSVDSMKSSIRGKMVKKLCTLFESSKKPLPEPESESESFSSSKSRSKTDSDSCITILFRLPGTEDRIVVYLTSLRGIRRTFEDCNAVRMILKGFRVWVDERDVSMDLSYREELQHVLGEHHVALPQVFIRGKYIGGADVIKHLFESGDLAKMILEGLPKLKPGFVCDNCGDARFVPCENCSGSRKVFDEDEGELKRCLECNENGLLRCPYCCS

SEQ ID NO: 5878 - protein, 208 aa, Glycine max
  misc_feature (1)..(208): Ceres Seq. ID no. 14312194
MKSSIRGKMVKKLCTLFESSKKPLPEPESESESFSSSKSRSKTDSDSCITILFRLPGTEDRIVVYLTSLRGIRRTFEDCNAVRMILKGFRVWVDERDVSMDLSYREELQHVLGEHHVALPQVFIRGKYIGGADVIKHLFESGDLAKMILEGLPKLKPGFVCDNCGDARFVPCENCSGSRKVFDEDEGELKRCLECNENGLLRCPYCCS

SEQ ID NO: 5879 - protein, 200 aa, Glycine max
  misc_feature (1)..(200): Ceres Seq. ID no. 14312195
MVKKLCTLFESSKKPLPEPESESESFSSSKSRSKTDSDSCITILFRLPGTEDRIVVYLTSLRGIRRTFEDCNAVRMILKGFRVWVDERDVSMDLSYREELQHVLGEHHVALPQVFIRGKYIGGADVIKHLFESGDLAKMILEGLPKLKPGFVCDNCGDARFVPCENCSGSRKVFDEDEGELKRCLECNENGLLRCPYCCS

SEQ ID NO: 5880 - DNA, 1340 bp, Glycine max
  misc_feature (1)..(1340): Ceres Seq. ID no. 14312208
gggagaaagaaagaaggaaagcaaagtagacgagtgattgcgttgcgattgacgacgacgaggaatcatgtcttccggcggcggcggtggtaagccgttcttctgccacgtgtgcagtcagaggattacgtgctccgatgagtcggaaccattctgcccgatgtgtatggaaagtttcgtagaagaatgcaaccctaacaatcccaaccctaatctcttccccgacagtgatgaatcttcggatcccgaactccccttccaccgcttctcacttctccctctcttgctctcatcagtctctaggtcccgatccgaacccgacgtgttcgacccgatggtcttcctccagaaccaccttcaggaccttcgcgccgacggtgccaacattcaagttgactttgaccatccttccaacgagaatcaaggctttcgccttgcgaacatcggcgactactttatgggccccggcctcgagcagtttattcagcagcttgccgacaacgaccccaaccgctacggaacgccgcccgccgccaaggacgccgtcgagaatctccccaccgttaccgtcgacgacgacttgctgaactccgagctgaaccagtgcgctgtctgccaggacgagttcgaaaagggttctaaggtgacacagatgccctgcaagcacgcgtatcacggcgactgcttgattccgtggcttcggctgcataattcatgccctgtgtgccgctatgaattgcccacggacgacgccgattacgagaacgaggttcacggtggtgatgctgggtcgaggacaggtgggagcgacggtggaggtgggagtaatagaccttttcgcaggactgttaggatatatttgcgccatcctgatgctggtgactctgcgcaggacggtgctgaaagggaatggagatggagaagttgagattgaaatttatgttttgtttcatgttgaaaaactggaaactatcttgtgcagctctgagcttccgtgaatagattgtagcattgcaatgtttacagaagtccttgtgaggaatgcaagaaatgttatttcccgtggcaaggaactttgttcgatcaaaggtctttgtttgttatggtagtagatagctggaacatgggaatgcacgaaaacacaactattgagattttaggtactgtgttaatgagcgttgataagaaacttcccgttacttttgtacagatcatcttccaaacatccaatattgattatcgtccttttgtacaatatgaactagtcatggtctatattgctcctgtgtgtgtgtataaaacgttttaatttagaaaaatgttcttttgacctatttaag

SEQ ID NO: 5881 - protein, 253 aa, Glycine max
  misc_feature (1)..(253): Ceres Seq. ID no. 14312209
MESFVEECNPNNPNPNLFPDSDESSDPELPFHRFSLLPLLLSSVSRSRSEPDVFDPMVFLQNHLQDLRADGANIQVDFDHPSNENQGFRLANIGDYFMGPGLEQFIQQLADNDPNRYGTPPAAKDAVENLPTVTVDDDLLNSELNQCAVCQDEFEKGSKVTQMPCKHAYHGDCLIPWLRLHNSCPVCRYELPTDDADYENEVHGGDAGSRTGGSDGGGGSNRPFRRTVRIYLRHPDAGDSAQDGAEREWRWRS

SEQ ID NO: 5882 - protein, 286 aa, Glycine max
  misc_feature (1)..(286): Ceres Seq. ID no. 14312210
MSSGGGGGKPFFCHVCSQRITCSDESEPFCPMCMESFVEECNPNNPNPNLFPDSDESSDPELPFHRFSLLPLLLSSVSRSRSEPDVFDPMVFLQNHLQDLRADGANIQVDFDHPSNENQGFRLANIGDYFMGPGLEQFIQQLADNDPNRYGTPPAAKDAVENLPTVTVDDDLLNSELNQCAVCQDEFEKGSKVTQMPCKHAYHGDCLIPWLRLHNSCPVCRYELPTDDADYENEVHGGDAGSRTGGSDGGGGSNRPFRRTVRIYLRHPDAGDSAQDGAEREWRWRS

SEQ ID NO: 5883 - protein, 255 aa, Glycine max
  misc_feature (1)..(255): Ceres Seq. ID no. 14312211
MCMESFVEECNPNNPNPNLFPDSDESSDPELPFHRFSLLPLLLSSVSRSRSEPDVFDPMVFLQNHLQDLRADGANIQVDFDHPSNENQGFRLANIGDYFMGPGLEQFIQQLADNDPNRYGTPPAAKDAVENLPTVTVDDDLLNSELNQCAVCQDEFEKGSKVTQMPCKHAYHGDCLIPWLRLHNSCPVCRYELPTDDADYENEVHGGDAGSRTGGSDGGGGSNRPFRRTVRIYLRHPDAGDSAQDGAEREWRWRS

SEQ ID NO: 5884 - DNA, 1005 bp, Glycine max
  misc_feature (1)..(1005): Ceres Seq. ID no. 14312224
acaacaattgaagcctctctgtcattttcacctcactgttctctatctctgcacgaacgacacaattgaacccttaaacgacaatggcgtggggacagtgccgttgctgcgtttggtgactgatgatgctgcgcgtcgtcgtcgtggacggaggtcgcatggggtggaatctggtgcggccgtgtgcattgtgatcaatcaatcataatgaggaaagaggattgtttgattttgtgattgaaatcgaaagagaaagaaagagagaaatttgttgtgatggctgaattagtggcccgaacaggtcgacatcagcagcgatacgaacacggttatcgccttattgccgggtgtgttccatttaggtataaagatgactgtggagactcttgttccgagaagattgttgaagtgcttatgattaattcgactagtggaccaggtcttttgtttccaaagggaggttgggagaatgatgaaactgttgaggaggctgcagttagagaagctattgaagaagcaggagttcgaggagacctaatggattttcttgggtactatgaatttaggagtaagaccctccaagatgagtgtagtccagaaggtttatgcaaagcagcaatgtttgcattgtttgtgaaagaggaacttgagtcatggcctgagcaaagcaccagaaaaaggagttgggtggctgtatcagaggcactagcaaactgtcgacatgcatggatgagggatgccctgcattgtttctgtaaatggcatgaggagtgcaagggaggatcaagcctgaactgactaaatatttgtagggggcaatgataaaaaagattagtgacatttattttaggaaagatatttcttatcaggattacatagggtgtggttgagtgtctctttttttttttttttttttgtgttcaaagctattttagaaagtatatttgaaaaccttttttcagaaagataagttatttgatgaaattctgagagcagttttaaaag

SEQ ID NO: 5885 - protein, 173 aa, Glycine max
  misc_feature (1)..(173): Ceres Seq. ID no. 14312225
MAELVARTGRHQQRYEHGYRLIAGCVPFRYKDDCGDSCSEKIVEVLMINSTSGPGLLFPKGGWENDETVEEAAVREAIEEAGVRGDLMDFLGYYEFRSKTLQDECSPEGLCKAAMFALFVKEELESWPEQSTRKRSWVAVSEALANCRHAWMRDALHCFCKWHEECKGGSSLN

SEQ ID NO: 5886 - protein, 127 aa, Glycine max
  misc_feature (1)..(127): Ceres Seq. ID no. 14312226
MINSTSGPGLLFPKGGWENDETVEEAAVREAIEEAGVRGDLMDFLGYYEFRSKTLQDECSPEGLCKAAMFALFVKEELESWPEQSTRKRSWVAVSEALANCRHAWMRDALHCFCKWHEECKGGSSLN

SEQ ID NO: 5887 - protein, 86 aa, Glycine max
  misc_feature (1)..(86): Ceres Seq. ID no. 14312227
MDFLGYYEFRSKTLQDECSPEGLCKAAMFALFVKEELESWPEQSTRKRSWVAVSEALANCRHAWMRDALHCFCKWHEECKGGSSLN

SEQ ID NO: 5888 - DNA, 1128 bp, Glycine max
  misc_feature (1)..(1128): Ceres Seq. ID no. 14312228
aaattgatacggataaggaagagtattcagtgtctcgtgtagaataatcaatggaagtaggaatgtctctgaacgcgctggttcgtcttcctctctcgaattcacgcttccacgacgatgctgctccgatgattattaggcactctctgttttcgagccgaaagcaacagcagcagcagcagagttataaggttccacagcgtcatcaagtgttcgtggttgaagccaagggcaaaaagggaatgatgtctcgtcaatttcagcgcaatgctcctcctcctttacccaagattgaagacgatggcaatcccaaattcgtcatcttcattcgcatggccaatgtatacctttggtaccctcttagtatcgtatcaggcggcaccactgctaaaataatggttgcagctaaagataattttctcggcaagtatatctacaaagacactcttgatagaaatctcgctgctgttatctacagagatgagaaggaggtacagaaatctgcattcaaacagtaccgtgtattgcgaacagctactgatttcagatacggctacaaacttgttgagaatggcaatataagagctgcactttctaccactgatgttattgagcttccaacacaagataaactaaaaaccgtgcttgacaaagtgaaagacttttttggagatgcaaaggaatcttttggaaagataacatcattgggcactactgaaacagaggagtcagaggaagacacaaaagaaaaagccaaggttaaaggatgaaactatagctggaaatgatttgcttgaattgttatgagtagcctgtggccctatgagatcagaaagctcaattatgtttatggattggttaatggggaaacttctgtgcacaacaatgctactccaggttttgttcttagatctgtaaccatcaaaattgttttatattctgcagagtgaacaccatctttacgatactgattgatcactcgtgtatgttgtaatccatgatgctttggaatggatagcatgtaggatgacatgtaatggcaccgttatcagttcaagagattcctggaattgttgtgtaaattacgggttgtaatatctatgcattttatttgacaggaatttactt

SEQ ID NO: 5889 - protein, 239 aa, Glycine max
  misc_feature (1)..(239): Ceres Seq. ID no. 14312229
MEVGMSLNALVRLPLSNSRFHDDAAPMIIRHSLFSSRKQQQQQQSYKVPQRHQVFVVEAKGKKGMMSRQFQRNAPPPLPKIEDDGNPKFVIFIRMANVYLWYPLSIVSGGTTAKIMVAAKDNFLGKYIYKDTLDRNLAAVIYRDEKEVQKSAFKQYRVLRTATDFRYGYKLVENGNIRAALSTTDVIELPTQDKLKTVLDKVKDFFGDAKESFGKITSLGTTETEESEEDTKEKAKVKG

SEQ ID NO: 5890 - protein, 235 aa, Glycine max
  misc_feature (1)..(235): Ceres Seq. ID no. 14312230
MSLNALVRLPLSNSRFHDDAAPMIIRHSLFSSRKQQQQQQSYKVPQRHQVFVVEAKGKKGMMSRQFQRNAPPPLPKIEDDGNPKFVIFIRMANVYLWYPLSIVSGGTTAKIMVAAKDNFLGKYIYKDTLDRNLAAVIYRDEKEVQKSAFKQYRVLRTATDFRYGYKLVENGNIRAALSTTDVIELPTQDKLKTVLDKVKDFFGDAKESFGKITSLGTTETEESEEDTKEKAKVKG

SEQ ID NO: 5891 - protein, 213 aa, Glycine max
  misc_feature (1)..(213): Ceres Seq. ID no. 14312231
MIIRHSLFSSRKQQQQQQSYKVPQRHQVFVVEAKGKKGMMSRQFQRNAPPPLPKIEDDGNPKFVIFIRMANVYLWYPLSIVSGGTTAKIMVAAKDNFLGKYIYKDTLDRNLAAVIYRDEKEVQKSAFKQYRVLRTATDFRYGYKLVENGNIRAALSTTDVIELPTQDKLKTVLDKVKDFFGDAKESFGKITSLGTTETEESEEDTKEKAKVKG

SEQ ID NO: 5892 - DNA, 1767 bp, Glycine max
  misc_feature (1)..(1767): Ceres Seq. ID no. 14312239
attttttctcttcttttcttttctcccttgcacaccttccatgccttctattaattctctagagatcttcttccttctccttaacctcacaactcttgaaaatcctccttatcgatccaacaagcagcaaactcactgaacaaatccacaaacagaaacaaagatcctactcgtgtagatctaataacatcaccttcttcttctcctacagatcatgaattcctttcaagaatttgactcatcaaacacaaacagtaccaaagccaccaatttcccatcatcatcatcagcagcaccagcagcaacagcaccaccatgttcttcttcttcttcttcgaccactctgagccgctacgagaaccaaaagcggcgcgactggaacacgttcgggcagtacctccgcaaccacaggcccccactctcgctctcacggtgcagcggcgcgcacgtgctggagttcctgcggtacctcgaccagttcgggaaaaccaaggttcacacgcagctttgtcccttcttcgggcacccgaaccctccagcaccgtgcccttgtcctctacgccaagcatgggggagcctcgacgcactcatagggcgcctcagagctgcttttgaagagaatggaggaaaacctgaagctaacccttttggcgctcgcgctgtgagactctaccttcgtgaagtgcgtgattcgcaagccaaggctaggggtattagctacgagaaaaagaagcgcaagcgtccccaacaaccttcattgcctccctctaataatgcaaaagttgtgatttgacaataggctgggggcatgtggacaccctttgcaattgcattagaaaaatattgtgtaaacctaaacagcagtactacttttggtagatgcagcagtaatttaagtagtggcagtaaaaaacactgtggagggcctgtgctgctggtgctgctgatgatgatgatgggaaattggtggctttggtactgtttgtgtttgatgagtcaaattcttgaaaggaattcatgatctgtaggagaagaagaaggtgatgttattagatctacacgagtaggatctttgtttctggcgagggatctggtgttattgttgagggatccctggttgcggagcctgttgcaactcccccagctgctgacactaaggctgctgttgctgaggatgacgatgatgatgatgttgatttgtttggtgaagagactgaggaagagaagaaggcagctgaggaacgggcagctgcagtgaaggcatctgcaaaaaagaaagagtctgggaaatcatctgttctgttggatgtaaaaccatgggatgatgaaactgacatgaagaagcttgaagaatcagtgagatctgttcagatggaagggttgctttggggtgcatccaaacttgttcctgttggatacggtattaagaaactgcaaattatgcttactattgtggatgacctagtttctgttgatactcttattgaggaacatctcacagttgagcccatcaatgaatatgtccagagttgtgacattgtggccttcaataaaatataaactacaatcggtgggatttggagatcatggcaactgggagaattgcaagttttagaaactatgttctagggggaactaccctgaattgagaatttttgtctttagaaacccgcttatattatttgtttctatatatctttgttttgtcatcggattatttggatagtaataatttcacctttaatgtgtcaacggattatttggatg

SEQ ID NO: 5893 - protein, 192 aa, Glycine max
  misc_feature (1)..(192): Ceres Seq. ID no. 14312240
MNSFQEFDSSNTNSTKATNFPSSSSAAPAATAPPCSSSSSSTTLSRYENQKRRDWNTFGQYLRNHRPPLSLSRCSGAHVLEFLRYLDQFGKTKVHTQLCPFFGHPNPPAPCPCPLRQAWGSLDALIGRLRAAFEENGGKPEANPFGARAVRLYLREVRDSQAKARGISYEKKKRKRPQQPSLPPSNNAKVVI

SEQ ID NO: 5894 - protein, 99 aa, Glycine max
  misc_feature (1)..(99): Ceres Seq. ID no. 14312241
MFFFFFFDHSEPLREPKAARLEHVRAVPPQPQAPTLALTVQRRARAGVPAVPRPVRENQGSHAALSLLRAPEPSSTVPLSSTPSMGEPRRTHRAPQSCF

SEQ ID NO: 5895 - DNA, 1078 bp, Glycine max
  misc_feature (1)..(1078): Ceres Seq. ID no. 14312258
gccactaccatttccaacaacatagccatgccctccatgaagacctcatcgtccaaaacctccgagtcctcgactcagttcgactcgccccactcgcctctccgatccttcccgctcttcgacaacgccgaccccttccactcgccgcaaaatgacaactcccgcgccatcgtcatcgtcgagacaacttcgactcaattcgcccaggccgcgccccccgcgccggagtccgagcaccggaacccgcctccggaggccgtggtcacccgccccgtttggccggagacgaagtcgtcggccaccgttggtcggacgcgaccgaggccggtggcgccgcccagttcggtggtgccgaagagagaaatgatggcgaaaaaagttgcattagggtttcggttaagcgaagtagtgctgtgtctgatttcgttttcggttatggccgcggacaaaactcgtggttggagcggtgattcttttgatcgctacaaggaatacaggtattgtttgtctgtgaatgtaatcgcatttgtatacgctgcgtttcaagcgtgtgatctggcgtatcaggtagtaacgggaagacgcataatcaatcaccacctgcgttaccactttgatttcttcatggatcaggttttggcgtatcttttggtatcggctgcatcatctgctgctacacgcgttgatgactggcaatcgaattggggaaaagatgatttcacagagatggcgagtgcttcaattgcgttgacctttcttgcttttgttgcctttgctattagctcgttaatctctggctacaacctctgcactctgttctcatagcaacattttaacctcgtataagctgtctttccattgtacacacaactacacactttttttttcttctttctattcctctattcttactgctgtggaggaatgcattcatgagtgttggtgccagtgatttttttttactgtacagatagacttgtatacgtacaattgagggaatactgttcgtcttaaatccgaaggatggagaaggaaatttttgtgttcaccttaaaatacaattaaatgattgtatttt

SEQ ID NO: 5896 - protein, 274 aa, Glycine max
  misc_feature (1)..(274): Ceres Seq. ID no. 14312259
ATTISNNIAMPSMKTSSSKTSESSTQFDSPHSPLRSFPLFDNADPFHSPQNDNSRAIVIVETTSTQFAQAAPPAPESEHRNPPPEAVVTRPVWPETKSSATVGRTRPRPVAPPSSVVPKREMMAKKVALGFRLSEVVLCLISFSVMAADKTRGWSGDSFDRYKEYRYCLSVNVIAFVYAAFQACDLAYQVVTGRRIINHHLRYHFDFFMDQVLAYLLVSAASSAATRVDDWQSNWGKDDFTEMASASIALTFLAFVAFAISSLISGYNLCTLFS

SEQ ID NO: 5897 - protein, 265 aa, Glycine max
  misc_feature (1)..(265): Ceres Seq. ID no. 14312260
MPSMKTSSSKTSESSTQFDSPHSPLRSFPLFDNADPFHSPQNDNSRAIVIVETTSTQFAQAAPPAPESEHRNPPPEAVVTRPVWPETKSSATVGRTRPRPVAPPSSVVPKREMMAKKVALGFRLSEVVLCLISFSVMAADKTRGWSGDSFDRYKEYRYCLSVNVIAFVYAAFQACDLAYQVVTGRRIINHHLRYHFDFFMDQVLAYLLVSAASSAATRVDDWQSNWGKDDFTEMASASIALTFLAFVAFAISSLISGYNLCTLFS

SEQ ID NO: 5898 - protein, 262 aa, Glycine max
  misc_feature (1)..(262): Ceres Seq. ID no. 14312261
MKTSSSKTSESSTQFDSPHSPLRSFPLFDNADPFHSPQNDNSRAIVIVETTSTQFAQAAPPAPESEHRNPPPEAVVTRPVWPETKSSATVGRTRPRPVAPPSSVVPKREMMAKKVALGFRLSEVVLCLISFSVMAADKTRGWSGDSFDRYKEYRYCLSVNVIAFVYAAFQACDLAYQVVTGRRIINHHLRYHFDFFMDQVLAYLLVSAASSAATRVDDWQSNWGKDDFTEMASASIALTFLAFVAFAISSLISGYNLCTLFS

SEQ ID NO: 5899 - DNA, 1192 bp, Glycine max
  misc_feature (1)..(1192): Ceres Seq. ID no. 14312262
ttctttccttcattccaaaccacacccaccacttcttccgatcagatgtccgacgatcactggatcaaggtcgccatggctgacgattctctcgtcgtcgaccttctcctccgcctccaccgccctccaccgccgccaccgccctgtctaaacctccactggacggtgcgtcagcggcgctccagatctgctcacaacaaagcggagtccaccagggccagccccaccacgccgctttcctggagcggcgccacgtcagcaagcggcggcaacctcgatggctatgaggagtacagccgcccaagcaaaccaacccaaacctcaagatctaaggttgctaatcccagcgaaacaaccactaccagaaagaccaggagaaaaaagaccttagctgaactaaaagcggaggaggatttgttgctgaaagaaagaagaaatttgaaaaaagaactggcattcttgcgtctcactgttgagaaacatagagccacaaatgaaagcataaagagaaagaagcttgattttgagtcacggcagaattctagtgctgctgctacggcctctgaggtgtctgggaaagctgtgaatggctcatttcaatttgtaaaagcagagtgtcatccatctaattcagtctcacatgacgattcacctgtttgtgcagcaaatgtttctcccaaagcacaagataatattggtaaccaagaatctacattcgtgctccctgatctaaatttgcctgtcgatgaggatatcagcgccaatatcatgcattatattgaactaagctaataaaggataggatctcgaatgacattccgcatactgataagttagacgaacatcatcttgcaagtatgcctaatagtcgtaatagtataaggtatagcatgtcagtcctaacaaattagattttgctactgtaattgtagatgttaaaccattcactttttccacttggtcaaaactgatgtggaaattgtttttttcttcttttttttttcattcatgaaactgagggtagtgtagaaatcctaacacatcaggcttagttccattctttttttcttcacaggtttctacattatccaaaattctttgtggcaaccctcgaccgtcctttattatagatatattttctgataaatgtaattaggtgttctatagataattcaagaattttggttctttt

SEQ ID NO: 5900 - protein, 263 aa, Glycine max
  misc_feature (1)..(263): Ceres Seq. ID no. 14312263
FFPSFQTTPTTSSDQMSDDHWIKVAMADDSLVVDLLLRLHRPPPPPPPCLNLHWTVRQRRSRSAHNKAESTRASPTTPLSWSGATSASGGNLDGYEEYSRPSKPTQTSRSKVANPSETTTTRKTRRKKTLAELKAEEDLLLKERRNLKKELAFLRLTVEKHRATNESIKRKKLDFESRQNSSAAATASEVSGKAVNGSFQFVKAECHPSNSVSHDDSPVCAANVSPKAQDNIGNQESTFVLPDLNLPVDEDISANIMHYIELS

SEQ ID NO: 5901 - protein, 248 aa, Glycine max
  misc_feature (1)..(248): Ceres Seq. ID no. 14312264
MSDDHWIKVAMADDSLVVDLLLRLHRPPPPPPPCLNLHWTVRQRRSRSAHNKAESTRASPTTPLSWSGATSASGGNLDGYEEYSRPSKPTQTSRSKVANPSETTTTRKTRRKKTLAELKAEEDLLLKERRNLKKELAFLRLTVEKHRATNESIKRKKLDFESRQNSSAAATASEVSGKAVNGSFQFVKAECHPSNSVSHDDSPVCAANVSPKAQDNIGNQESTFVLPDLNLPVDEDISANIMHYIELS

SEQ ID NO: 5902 - protein, 238 aa, Glycine max
  misc_feature (1)..(238): Ceres Seq. ID no. 14312265
MADDSLVVDLLLRLHRPPPPPPPCLNLHWTVRQRRSRSAHNKAESTRASPTTPLSWSGATSASGGNLDGYEEYSRPSKPTQTSRSKVANPSETTTTRKTRRKKTLAELKAEEDLLLKERRNLKKELAFLRLTVEKHRATNESIKRKKLDFESRQNSSAAATASEVSGKAVNGSFQFVKAECHPSNSVSHDDSPVCAANVSPKAQDNIGNQESTFVLPDLNLPVDEDISANIMHYIELS

SEQ ID NO: 5903 - DNA, 1761 bp, Glycine max
  misc_feature (1)..(1761): Ceres Seq. ID no. 14312300
gagcttgagagacaaatgtggcacataagagaacagattgggagagaaaaaagtacacgacccgagaaagcaaaagggcatgcacgtcatcgtggaaagaaagaaaactcttctcttcttcccagagaaagaaagaaacacatttcccttccaaggaaagaaaataaaaacgtaacatcattggaatcaaaatcaggatgatgggtagttgcccttgtttcgggttgtggagctggaagaccaaagggaagaccgtcaaggctcaggaggaacaaaacaagaatcgcaaatctctcgatgtctctgaaacttcttcaggacttggaccagaagaaaacccaacagagagtgacagttctcataaggctcagatatttaccttccgagagcttgcaacagcaacaaaaaattttagggatgaaacctttattgggcaaggtggatttggcactgtttataaaggaacaatcggaaaaataaatcaggttgtagctgttaaaagacttgatactactgttgtccaaggggagaaagaatttctggtggaagttctcatgctttcccttctacgccattccaaccttgttaatatgattggttactgtgctgaaggggatcaacgtcttcttgtgtatgagtacatggctttaggatctttagaatctcatcttcatgatgtttcacctgatgaagaaccactcgattggaataccagaatgatgatagcttttggggcagcaaaaggactaaattatctgcaccatgaagcaaagccctctgttatatacagggatctgaaatcatccaacatactattggatgaaggtttccatccaaaactttctgattttgggcttgcaaaatttggtccaaccggagaacaatcgtatgttgccactagggtcatgggaacacaaggttactgtgcccctgaatatgccactagtggaaaattaacgatgagatctgacatttacagttttggggttgtgttattggaactaattactggacgcagagcatatgatgataatggtggccctgaaaagcatcttgtagaatgggcacgcccaatgtttagagacaaaaagagttatccaagatttgcagatccgcggcttaaaggttgctacccaggaacagctctctcgaatgccattgaattggcagccatgtgtcttcgtgaagagccacgtcaacggcctaatgcaggtcatatagtggaagctctcaaattcttgtcatccaaaccatataccccgaaagtatccattacagtcaacacaacaggtatggagagtggagattctccaaaagaaacaccagcgattttgcctcaagaatcagaaagagagcgagctgttgcagaggccaagctgtggggtgagacatggaggcagagacgacaaagtgagcaaagtagtcctgaaggaagcaaatagggggtaccagaaagaaaaccttcaaagcagattagaagtggctagtatctaaaaaggtatagggaaagtaaagaaacttcaaaagataatgtgttcaagatttaaatgtagctaataaaattagttggccagctaaatttaaaaagtgtcgtttaggcacttgtgaatttgaggctcaactttacatgctttgacatgagtttttagattttatggttgctcttgctttgctgcattgaaaaatatgatacattactactacttctatgttctaactctaactgctggagcctggaagcaaacacaaattttttaacag

SEQ ID NO: 5904 - protein, 414 aa, Glycine max
  misc_feature (1)..(414): Ceres Seq. ID no. 14312301
MMGSCPCFGLWSWKTKGKTVKAQEEQNKNRKSLDVSETSSGLGPEENPTESDSSHKAQIFTFRELATATKNFRDETFIGQGGFGTVYKGTIGKINQVVAVKRLDTTVVQGEKEFLVEVLMLSLLRHSNLVNMIGYCAEGDQRLLVYEYMALGSLESHLHDVSPDEEPLDWNTRMMIAFGAAKGLNYLHHEAKPSVIYRDLKSSNILLDEGFHPKLSDFGLAKFGPTGEQSYVATRVMGTQGYCAPEYATSGKLTMRSDIYSFGVVLLELITGRRAYDDNGGPEKHLVEWARPMFRDKKSYPRFADPRLKGCYPGTALSNAIELAAMCLREEPRQRPNAGHIVEALKFLSSKPYTPKVSITVNTTGMESGDSPKETPAILPQESERERAVAEAKLWGETWRQRRQSEQSSPEGSK

SEQ ID NO: 5905 - protein, 413 aa, Glycine max
  misc_feature (1)..(413): Ceres Seq. ID no. 14312302
MGSCPCFGLWSWKTKGKTVKAQEEQNKNRKSLDVSETSSGLGPEENPTESDSSHKAQIFTFRELATATKNFRDETFIGQGGFGTVYKGTIGKINQVVAVKRLDTTVVQGEKEFLVEVLMLSLLRHSNLVNMIGYCAEGDQRLLVYEYMALGSLESHLHDVSPDEEPLDWNTRMMIAFGAAKGLNYLHHEAKPSVIYRDLKSSNILLDEGFHPKLSDFGLAKFGPTGEQSYVATRVMGTQGYCAPEYATSGKLTMRSDIYSFGVVLLELITGRRAYDDNGGPEKHLVEWARPMFRDKKSYPRFADPRLKGCYPGTALSNAIELAAMCLREEPRQRPNAGHIVEALKFLSSKPYTPKVSITVNTTGMESGDSPKETPAILPQESERERAVAEAKLWGETWRQRRQSEQSSPEGSK

SEQ ID NO: 5906 - protein, 295 aa, Glycine max
  misc_feature (1)..(295): Ceres Seq. ID no. 14312303
MLSLLRHSNLVNMIGYCAEGDQRLLVYEYMALGSLESHLHDVSPDEEPLDWNTRMMIAFGAAKGLNYLHHEAKPSVIYRDLKSSNILLDEGFHPKLSDFGLAKFGPTGEQSYVATRVMGTQGYCAPEYATSGKLTMRSDIYSFGVVLLELITGRRAYDDNGGPEKHLVEWARPMFRDKKSYPRFADPRLKGCYPGTALSNAIELAAMCLREEPRQRPNAGHIVEALKFLSSKPYTPKVSITVNTTGMESGDSPKETPAILPQESERERAVAEAKLWGETWRQRRQSEQSSPEGSK

SEQ ID NO: 5907 - DNA, 1390 bp, Glycine max
  misc_feature (1)..(1390): Ceres Seq. ID no. 14312324
aactccaacacgccctccaagcataaaatttgcaggattagacatttccagcaacacttgaagttgtcaatcaatggccatgaagccctcaacttccacaagtgggtctggcaagaagattagaaagccttatactattaccaaatctagggagagctggtctgaggaagagcacgacaagtttctcgaagctcttcaactatttgacagagattggaagaaaattgaagattttgttggttcaaaatcagttattcagattagaagtcatgcccagaagtacttcttgaaagttcaaaagagcgggacagtagcacatgtgcctcctcctcggcctaagcgcaaagcttctcatccttatccacaaaaggcatccaaaaatgttttgttgccaatgccagcttccatggtttatgtttcttccactagtacccttccaccagggtatgtcacatgggatgaaaattccttgctcatgaattctggatccaacaaatcagtgccttgtaaggatgagctcgccaatcttcttggaaatgaagctgatattggatcaaaggggataacacgaattgaccacagcagtcttagtggtgttgggaactctactagaaatctgcctgctactgagatgccaaaacaagggaaacaggctcaggttattcatggtttgccagattttgctgatgtttacagcttcattggaagtgtttttgatccagacacagaaggccatgtccagaagctgaaggaaatggatcctataaattttgaaactgttttgttgttaatgaaaaacctcactgtcaatttgtctagtcctgactttgagcccgttagggaggtcatgtcatcatacgatgtccatacaaaaacagtaggagttaccgcaggaattgacgtcaagaagcagacaaatgatctatcatgtcaaacagcttgacaaccattaattgaacttattatcaaatttggatggaagaccgaggttttgcccaaccagcagcattagcaatgcattcacattaactcgttgtgaaacttgaaaatgcaaccaaaccatcagcctatgtaaccacaaccaggagagtttgttttaatggaagtgctagcaaagccaaaaatatattcatcgggtaattctaaggtgcacaaggttttgtagtattgcagtgattctagtacttatttatggaatgtggttttcaagtagacacatgggtctaactgtaagataagtttgatggctcaggtgtattaattggagaggtggggggctagtcatagtagcttatatcaatgtggcctaactttcaatgtaaatcataaagagcatcataacaggaagtggtcccaatttctaattctacttacttttttttttagcatc

SEQ ID NO: 5908 - protein, 289 aa, Glycine max
  misc_feature (1)..(289): Ceres Seq. ID no. 14312325
MAMKPSTSTSGSGKKIRKPYTITKSRESWSEEEHDKFLEALQLFDRDWKKIEDFVGSKSVIQIRSHAQKYFLKVQKSGTVAHVPPPRPKRKASHPYPQKASKNVLLPMPASMVYVSSTSTLPPGYVTWDENSLLMNSGSNKSVPCKDELANLLGNEADIGSKGITRIDHSSLSGVGNSTRNLPATEMPKQGKQAQVIHGLPDFADVYSFIGSVFDPDTEGHVQKLKEMDPINFETVLLLMKNLTVNLSSPDFEPVREVMSSYDVHTKTVGVTAGIDVKKQTNDLSCQTA

SEQ ID NO: 5909 - protein, 287 aa, Glycine max
  misc_feature (1)..(287): Ceres Seq. ID no. 14312326
MKPSTSTSGSGKKIRKPYTITKSRESWSEEEHDKFLEALQLFDRDWKKIEDFVGSKSVIQIRSHAQKYFLKVQKSGTVAHVPPPRPKRKASHPYPQKASKNVLLPMPASMVYVSSTSTLPPGYVTWDENSLLMNSGSNKSVPCKDELANLLGNEADIGSKGITRIDHSSLSGVGNSTRNLPATEMPKQGKQAQVIHGLPDFADVYSFIGSVFDPDTEGHVQKLKEMDPINFETVLLLMKNLTVNLSSPDFEPVREVMSSYDVHTKTVGVTAGIDVKKQTNDLSCQTA

SEQ ID NO: 5910 - protein, 182 aa, Glycine max
  misc_feature (1)..(182): Ceres Seq. ID no. 14312327
MPASMVYVSSTSTLPPGYVTWDENSLLMNSGSNKSVPCKDELANLLGNEADIGSKGITRIDHSSLSGVGNSTRNLPATEMPKQGKQAQVIHGLPDFADVYSFIGSVFDPDTEGHVQKLKEMDPINFETVLLLMKNLTVNLSSPDFEPVREVMSSYDVHTKTVGVTAGIDVKKQTNDLSCQTA

SEQ ID NO: 5911 - DNA, 1206 bp, Glycine max
  misc_feature (1)..(1206): Ceres Seq. ID no. 14312330
acgacacgccagccagatccacaaatcggaagaatcagagcgccgtcggaaaccgccgtccacggcggtgaaactcgccttcgcatcctctcgtcttcgaacccgaagcctctctcggttcctcactcttctcacatcgccaaaaactcaaattcacgatggaagagttggagcagtggaaggaacaactttcgcacttcgctaacctagctttggatcgtcttcgcgaggttcccccgaatcagctctacgctgctgctgcaatcgcgattttcacaactctgcttcttctctcaatacggttgttcaagcgcgcgaagtccaacaccattgttttgaccgggctcagtgggagtggaaaaactgttctcttctatcagcttagggatggctcaactcatcagggtacagttacatcgatggagcctaatgaaggcacttttattcttcacaatgagaaaaccaggaagggcaagataaagcctgttcatgttgttgatgttcctgggcattctcggcttcgacccaaactggatgagtacttgcctcaagcagctggggtagtttttgtagtagatgctttggactttttaccaaactgccgtgctgcttcagagtacctttatgatctattgactaaaggaagtgttgtgaggaagaagattccaatgcttattctctgcaacaaaacagacaaagtcactgctcatactaaagagtttatccgaaaacagatggagaaggaaatagacaaattacgggcatcaagaagtgcaatatcagcagctgacatcgcaaatgagttcaccctgggggtacccggtgagccgttttcttttacccagtgctctaacaaagtgacaactgcagacgcttctggtttaactggggaaatatctcagctggaagagtttatcagagaacatgtaaagcgatagctggatattgtgtttaaacttgcggatttttgttgaactgaatgaatatgtagcgttgctcttcttggttgttatttctttgatttcaaagaactgtctggataagaagaggcaaaaaagagaaaatggggttttgggggtggggttggggtgttcggagtaggaatcactatgttgggatcaatgaggatttacttcattttaagtcctggtatattgattggactataatgatttatcaaattgtatccatacttcatttactttt

SEQ ID NO: 5912 - protein, 259 aa, Glycine max
  misc_feature (1)..(259): Ceres Seq. ID no. 14312331
MEELEQWKEQLSHFANLALDRLREVPPNQLYAAAAIAIFTTLLLLSIRLFKRAKSNTIVLTGLSGSGKTVLFYQLRDGSTHQGTVTSMEPNEGTFILHNEKTRKGKIKPVHVVDVPGHSRLRPKLDEYLPQAAGVVFVVDALDFLPNCRAASEYLYDLLTKGSVVRKKIPMLILCNKTDKVTAHTKEFIRKQMEKEIDKLRASRSAISAADIANEFTLGVPGEPFSFTQCSNKVTTADASGLTGEISQLEEFIREHVKR

SEQ ID NO: 5913 - protein, 172 aa, Glycine max
  misc_feature (1)..(172): Ceres Seq. ID no. 14312332
MEPNEGTFILHNEKTRKGKIKPVHVVDVPGHSRLRPKLDEYLPQAAGVVFVVDALDFLPNCRAASEYLYDLLTKGSVVRKKIPMLILCNKTDKVTAHTKEFIRKQMEKEIDKLRASRSAISAADIANEFTLGVPGEPFSFTQCSNKVTTADASGLTGEISQLEEFIREHVKR

SEQ ID NO: 5914 - DNA, 1687 bp, Glycine max
  misc_feature (1)..(1687): Ceres Seq. ID no. 14312347
gaagctatcacagctccagctcctggttccactttcgctcttcacaaaatgaaccgagtgataaagaagaccgtttcaaatatctgtgctctcaaggttccaagaaagtctttttgtagtactgagggtgtgaaagttgctggttgctctattccagaggtttccaatgaccatgagaagaagcaggctattagcaaagttattccacaatatgatattgctattgttggaggaggcatggttggcatggctttatcttttttcttggcaagtaatccaatgacaaagcagttgagtgttgcaattattgatagcaatccagctcttggaagtagcttgcacatcaagaaggaagatccccctgatccaagagtcagtacagtaactcctgcttctatttcttttctccaagatgctggtgcatggaaatatgttgagcaaaatagacgtgcttattttaatacaatgcaggtctgggattatactggtttggggtatgctagatatcatgcaagagatgtaaataaagactttctagggtgcgtggcagagaataaagtgctccataatgccttattgtcatgtgtaaaggattctgatttcaagacaacaatctatcctttgaggttaagttcaatgactttgaatacaagctctatgtctatggcggaggagaatccaacatccaaagaaccaccatctgctcaaggtcatggtgcagaactgcagcttagtgatggcagtagcatatatgcaaagttggtggttggcgctgatggaggaaaatcacatgttagggagttagcaggaatcaaaacaactggatggaattactcccagaatgcaataatctgcacggtggagcatacttatgaaaatgaatgtgcatggcaacgttttctaccaacaggtccaattgctcttttacccatgggtgataagtttagcaatattgtttggaccatgagcccaacagagtcaaataaccgcaagtcaattaccgaggaagaatttttaaaggatgtgaattatgctttagattatggacatggacctcatcctacatcaagcttatcaggaactcgagacgtgttctcttggtttaaaacggatgcaacactatcaactaatgaattctttgaaattcctccaaaagtaacaaggttggcatctgaaaggatggtgtttcctttgtctttaaggcatgccaattcctatgcattgaaacgtgtggttcttattggggatgcagcccacacagtccatcctcttgctggtcaaggagttaatttgggttttggagatgcattttctctttcaagaattattgcagaggggattgctttgggcactgatattggagaggtaaatatgttaaagaagtatgaagcagagagaaaaacagcaaatattatgatgatggcaatccttgatggcgtccaaaaagcctattctattgattttggaccttttaatattctgcgagctgcagccttccatggggcaaactatatatcaccactcaaaagaagtatcatttcctatgcttcaggggaacataaattacccattttcttctgaatacagaaatgtcatttaggttaagaagtggacctacaaaatgcagggtgagaatatcaactccctaacttatttaatatattcactttactttggagattaaaag

SEQ ID NO: 5915 - protein, 526 aa, Glycine max
  misc_feature (1)..(526): Ceres Seq. ID no. 14312348
EAITAPAPGSTFALHKMNRVIKKTVSNICALKVPRKSFCSTEGVKVAGCSIPEVSNDHEKKQAISKVIPQYDIAIVGGGMVGMALSFFLASNPMTKQLSVAIIDSNPALGSSLHIKKEDPPDPRVSTVTPASISFLQDAGAWKYVEQNRRAYFNTMQVWDYTGLGYARYHARDVNKDFLGCVAENKVLHNALLSCVKDSDFKTTIYPLRLSSMTLNTSSMSMAEENPTSKEPPSAQGHGAELQLSDGSSIYAKLVVGADGGKSHVRELAGIKTTGWNYSQNAIICTVEHTYENECAWQRFLPTGPIALLPMGDKFSNIVWTMSPTESNNRKSITEEEFLKDVNYALDYGHGPHPTSSLSGTRDVFSWFKTDATLSTNEFFEIPPKVTRLASERMVFPLSLRHANSYALKRVVLIGDAAHTVHPLAGQGVNLGFGDAFSLSRIIAEGIALGTDIGEVNMLKKYEAERKTANIMMMAILDGVQKAYSIDFGPFNILRAAAFHGANYISPLKRSIISYASGEHKLPIFF

SEQ ID NO: 5916 - protein, 510 aa, Glycine max
  misc_feature (1)..(510): Ceres Seq. ID no. 14312349
MNRVIKKTVSNICALKVPRKSFCSTEGVKVAGCSIPEVSNDHEKKQAISKVIPQYDIAIVGGGMVGMALSFFLASNPMTKQLSVAIIDSNPALGSSLHIKKEDPPDPRVSTVTPASISFLQDAGAWKYVEQNRRAYFNTMQVWDYTGLGYARYHARDVNKDFLGCVAENKVLHNALLSCVKDSDFKTTIYPLRLSSMTLNTSSMSMAEENPTSKEPPSAQGHGAELQLSDGSSIYAKLVVGADGGKSHVRELAGIKTTGWNYSQNAIICTVEHTYENECAWQRFLPTGPIALLPMGDKFSNIVWTMSPTESNNRKSITEEEFLKDVNYALDYGHGPHPTSSLSGTRDVFSWFKTDATLSTNEFFEIPPKVTRLASERMVFPLSLRHANSYALKRVVLIGDAAHTVHPLAGQGVNLGFGDAFSLSRIIAEGIALGTDIGEVNMLKKYEAERKTANIMMMAILDGVQKAYSIDFGPFNILRAAAFHGANYISPLKRSIISYASGEHKLPIFF

SEQ ID NO: 5917 - protein, 447 aa, Glycine max
  misc_feature (1)..(447): Ceres Seq. ID no. 14312350
MVGMALSFFLASNPMTKQLSVAIIDSNPALGSSLHIKKEDPPDPRVSTVTPASISFLQDAGAWKYVEQNRRAYFNTMQVWDYTGLGYARYHARDVNKDFLGCVAENKVLHNALLSCVKDSDFKTTIYPLRLSSMTLNTSSMSMAEENPTSKEPPSAQGHGAELQLSDGSSIYAKLVVGADGGKSHVRELAGIKTTGWNYSQNAIICTVEHTYENECAWQRFLPTGPIALLPMGDKFSNIVWTMSPTESNNRKSITEEEFLKDVNYALDYGHGPHPTSSLSGTRDVFSWFKTDATLSTNEFFEIPPKVTRLASERMVFPLSLRHANSYALKRVVLIGDAAHTVHPLAGQGVNLGFGDAFSLSRIIAEGIALGTDIGEVNMLKKYEAERKTANIMMMAILDGVQKAYSIDFGPFNILRAAAFHGANYISPLKRSIISYASGEHKLPIFF

SEQ ID NO: 5918 - DNA, 1159 bp, Glycine max
  misc_feature (1)..(1159): Ceres Seq. ID no. 14312351
aatagatgctcattcatgatcatacctatggctgctgtttcttgcgtgtttcttttctttctttcttgtctatttctaaaatccatatctcaagccagcgcccagataatgttaaccgaatcctgtgataataacagcaacggcacctataacaccaatctcaacacccttttatctactctctcttccaacactgaaattaactatggtttctacaacttctcatatggtcaaaatgaagacaaagttaacgccattgggctctgcagaggagaccttaagccagatgagtgtcgtagttgtctcaacgatgccagaagcaatctcacagtcaattgtccaaaccaggaggaagagaaagagggaattttgcaccttgacaaatgcatgttgcgctactcaaatcgctcaatatttagcgtcatggagacttctcctacgctttatatgtggaattccaccaatgcaaccgacgtggatcagttcaatcaggtgctccagaacctgatgaggactctaactgagagagctgcatcgggtgactctcgtcgtaagtatgcagagggaagttcgtctgctccaaattttcaaaccatacatggtcttgtgcagtgtactcctgatttgtctcagcaagactgcaaacaatgcttggatcgtgtggctatctcacaaatcccaagttgttgcaatggcaagatcatgggtggtaaagttcttacaccaagttgtaatactagattcgaaacttaccggcatcttccgtcttcaaaaggaaatagcgacgcgtcacgaactgtactcctcgtcgccatggcagtgctagtcgttagcgttgatttggtgctcggttttatctgaaatgaaaactcgccaacttcactgcagctattatctatatggaaataattcttggacactcttttattaaagtattaccaataccaactaccaatcttttttttacaacttacactgaaattgcctttttctttcagtatatacatcttgagatatataggaagagaagggagataagattgatgatgtaacatcacagattaaaaaaaaaagttagatagataaaatgaaaggcattattagtaggatgtttgtaaattatagatgtctgtcaccattctatatatatccaccgttt

SEQ ID NO: 5919 - protein, 286 aa, Glycine max
  misc_feature (1)..(286): Ceres Seq. ID no. 14312352
NRCSFMIIPMAAVSCVFLFFLSCLFLKSISQASAQIMLTESCDNNSNGTYNTNLNTLLSTLSSNTEINYGFYNFSYGQNEDKVNAIGLCRGDLKPDECRSCLNDARSNLTVNCPNQEEEKEGILHLDKCMLRYSNRSIFSVMETSPTLYMWNSTNATDVDQFNQVLQNLMRTLTERAASGDSRRKYAEGSSSAPNFQTIHGLVQCTPDLSQQDCKQCLDRVAISQIPSCCNGKIMGGKVLTPSCNTRFETYRHLPSSKGNSDASRTVLLVAMAVLVVSVDLVLGFI

SEQ ID NO: 5920 - protein, 281 aa, Glycine max
  misc_feature (1)..(281): Ceres Seq. ID no. 14312353
MIIPMAAVSCVFLFFLSCLFLKSISQASAQIMLTESCDNNSNGTYNTNLNTLLSTLSSNTEINYGFYNFSYGQNEDKVNAIGLCRGDLKPDECRSCLNDARSNLTVNCPNQEEEKEGILHLDKCMLRYSNRSIFSVMETSPTLYMWNSTNATDVDQFNQVLQNLMRTLTERAASGDSRRKYAEGSSSAPNFQTIHGLVQCTPDLSQQDCKQCLDRVAISQIPSCCNGKIMGGKVLTPSCNTRFETYRHLPSSKGNSDASRTVLLVAMAVLVVSVDLVLGFI

SEQ ID NO: 5921 - protein, 277 aa, Glycine max
  misc_feature (1)..(277): Ceres Seq. ID no. 14312354
MAAVSCVFLFFLSCLFLKSISQASAQIMLTESCDNNSNGTYNTNLNTLLSTLSSNTEINYGFYNFSYGQNEDKVNAIGLCRGDLKPDECRSCLNDARSNLTVNCPNQEEEKEGILHLDKCMLRYSNRSIFSVMETSPTLYMWNSTNATDVDQFNQVLQNLMRTLTERAASGDSRRKYAEGSSSAPNFQTIHGLVQCTPDLSQQDCKQCLDRVAISQIPSCCNGKIMGGKVLTPSCNTRFETYRHLPSSKGNSDASRTVLLVAMAVLVVSVDLVLGFI

SEQ ID NO: 5922 - DNA, 1337 bp, Glycine max
  misc_feature (1)..(1337): Ceres Seq. ID no. 14312357
ggcgaccacgtttgcaatttataaccttcctatccactctcttcaatttgttctgccatttggtaacactgttttcaccctttttctaatgctagtggttttctctctccctctctgcctctagtagttacaatttgcaaatagagtcatcatcatcatgtcacacccaaagggataaaaaaaaaaaaaaccaaaacttgtaacacatgggagttgttgaacaagaaatggaagaggaagagaaagaaaaacatacaaacaaccaagaccaaaacaaccataaccacccttcttctctccacccaattaaggaagagtgtgttagtgtgagaaaaccctttagtggtgatagagtgaagagagatgaatggagtgaaggggcagtgtcaaccctccttgaggcttatgaggccaaatgggtgctaagaaacagagccaaactcaagggccatgattgggaggatgtggcacggcacgtgtcggcacgtgccaactgcaccaaatcaccaaagacttcaacgcagtgtaagaacaaggttgagtccatgaagaagagatacagatcagaatcagcagcaacagcagatcatgcatcatcatcatggcctctttattcacggcttgatcttcttcttaggggaactggacccgtgttgtcgtcgccgccgccgccgccaccggcgatgatgccggcggcgatgccggttctgtctccggtggagccgtcgcaaccgccgcagctgtcgccgcctccggcggctccttcagggccacttgctaatgcacaaaactcgcatggatccaacggaattgatgagaagcttgctaaggaagatgggttaggaactaagtcatctgatcaagtatctagcaagaatccattggactcagatagcagcacgccagcactttatagcaagaaggacgggttaagatgcaacaagaggaagaagaaaacaattgacaacacagggcgaagaaggaaagagtgtgtggagatagcagaaagcttaagatggcttacagaagctatgataaggtctgaacaagcaagaatggacacaatgaaggagatagagaggatgagagttgaagctgaggccaaaagaggggaaatggaccttaagagaactgaaataattgccaatacacagttagagattgctaggatctttgcaagtgtcaacaataaaggtgttgattcatctctaagaattggaagaagttaagggtaggttatggaagataattaataaaaatgttattattgtatatgcacataaagttatcaaataatgctattaatataataaaatttgagtaaataacttatttcc

SEQ ID NO: 5923 - protein, 340 aa, Glycine max
  misc_feature (1)..(340): Ceres Seq. ID no. 14312358
MGVVEQEMEEEEKEKHTNNQDQNNHNHPSSLHPIKEECVSVRKPFSGDRVKRDEWSEGAVSTLLEAYEAKWVLRNRAKLKGHDWEDVARHVSARANCTKSPKTSTQCKNKVESMKKRYRSESAATADHASSSWPLYSRLDLLLRGTGPVLSSPPPPPPAMMPAAMPVLSPVEPSQPPQLSPPPAAPSGPLANAQNSHGSNGIDEKLAKEDGLGTKSSDQVSSKNPLDSDSSTPALYSKKDGLRCNKRKKKTIDNTGRRRKECVEIAESLRWLTEAMIRSEQARMDTMKEIERMRVEAEAKRGEMDLKRTEIIANTQLEIARIFASVNNKGVDSSLRIGRS

SEQ ID NO: 5924 - protein, 333 aa, Glycine max
  misc_feature (1)..(333): Ceres Seq. ID no. 14312359
MEEEEKEKHTNNQDQNNHNHPSSLHPIKEECVSVRKPFSGDRVKRDEWSEGAVSTLLEAYEAKWVLRNRAKLKGHDWEDVARHVSARANCTKSPKTSTQCKNKVESMKKRYRSESAATADHASSSWPLYSRLDLLLRGTGPVLSSPPPPPPAMMPAAMPVLSPVEPSQPPQLSPPPAAPSGPLANAQNSHGSNGIDEKLAKEDGLGTKSSDQVSSKNPLDSDSSTPALYSKKDGLRCNKRKKKTIDNTGRRRKECVEIAESLRWLTEAMIRSEQARMDTMKEIERMRVEAEAKRGEMDLKRTEIIANTQLEIARIFASVNNKGVDSSLRIGRS

SEQ ID NO: 5925 - protein, 227 aa, Glycine max
  misc_feature (1)..(227): Ceres Seq. ID no. 14312360
MKKRYRSESAATADHASSSWPLYSRLDLLLRGTGPVLSSPPPPPPAMMPAAMPVLSPVEPSQPPQLSPPPAAPSGPLANAQNSHGSNGIDEKLAKEDGLGTKSSDQVSSKNPLDSDSSTPALYSKKDGLRCNKRKKKTIDNTGRRRKECVEIAESLRWLTEAMIRSEQARMDTMKEIERMRVEAEAKRGEMDLKRTEIIANTQLEIARIFASVNNKGVDSSLRIGRS

SEQ ID NO: 5926 - DNA, 1353 bp, Glycine max
  misc_feature (1)..(1353): Ceres Seq. ID no. 14312391
aaggtctggacagtggcgtggaaggcgaatcagccactggcactgaacaattaaccattaacaagaacaagaacatttcaagggaggacatagtaatggacatggttctgcattcagccttgtacccaccatctctgtcttgttcctcttctactactggaacaagatggcccaattcccgggttggtgttagtttgagttggaggagcttgtccttggtgccttgtgcactgaaggcatattatgattctgaattggagaataaaaagcatctacttctgacctctgtccaagacacgcaaaggggcctcttaacaactcctgatcaacgctcttgtatcgaggaggctctggtgagtctcgaaggatgcaacattggctctcaccctatcaatctctccaacttggatggaacatggcgcctccagtacacttctgcctctgatgttctcattcttctccaagctgctgctactcttcctttctttcaagttggacagatctttcaaaaatttgaatgtcgtgatcaatctaatggaggtgttatccgcaatgttgttcgatggagcattccaaatttgttagaggaacaagaaggtgctacactgcttgtatccgccaagtttaatgtagtatctgtccgtaatatctaccttcagtttcaagagatcacaatccaagatataaatattagtgaagagctgcaggctctaatagctccagcaatactaccaagatcttttataagtcttcagattttgcaatttctccgcactttcaaagcttaaatccctgtgagggatccaggaaggcaatcagttggaggactatattaccttagctatttggatgataatatgcttttgggtcgtgctgttggtggaggaggggtatttgtgtttacgagagcccaatctctctactgatgagcaccgagcaggagttaaaacttgtgtttgccagcaataacactcaatgagcctctgtttatagaagtgaccccatggagagagcaagaaattgattcaaagcatatagcgcataaggaattctgcaaagcttattgaagaaggctattatgtgcagttgtcgtgttgactttagtcgaactgcttttttgtttatgtatgtatatttgcattgtttgtatcaatttggttatatattggcaaagtacgaagatggtgagtgttcaatgtaagtgatacaactcgtgggaaaatgataaggagcccagtcctcgctatgtgcagtgtaggcatcttataattatgttatgttgcataggatagatagtattatgtctcttgttagttttcttatctagttagtttaatctgtgatttttaactt

SEQ ID NO: 5927 - protein, 261 aa, Glycine max
  misc_feature (1)..(261): Ceres Seq. ID no. 14312392
GLDSGVEGESATGTEQLTINKNKNISREDIVMDMVLHSALYPPSLSCSSSTTGTRWPNSRVGVSLSWRSLSLVPCALKAYYDSELENKKHLLLTSVQDTQRGLLTTPDQRSCIEEALVSLEGCNIGSHPINLSNLDGTWRLQYTSASDVLILLQAAATLPFFQVGQIFQKFECRDQSNGGVIRNVVRWSIPNLLEEQEGATLLVSAKFNVVSVRNIYLQFQEITIQDINISEELQALIAPAILPRSFISLQILQFLRTFKA

SEQ ID NO: 5928 - protein, 230 aa, Glycine max
  misc_feature (1)..(230): Ceres Seq. ID no. 14312393
MDMVLHSALYPPSLSCSSSTTGTRWPNSRVGVSLSWRSLSLVPCALKAYYDSELENKKHLLLTSVQDTQRGLLTTPDQRSCIEEALVSLEGCNIGSHPINLSNLDGTWRLQYTSASDVLILLQAAATLPFFQVGQIFQKFECRDQSNGGVIRNVVRWSIPNLLEEQEGATLLVSAKFNVVSVRNIYLQFQEITIQDINISEELQALIAPAILPRSFISLQILQFLRTFKA

SEQ ID NO: 5929 - protein, 228 aa, Glycine max
  misc_feature (1)..(228): Ceres Seq. ID no. 14312394
MVLHSALYPPSLSCSSSTTGTRWPNSRVGVSLSWRSLSLVPCALKAYYDSELENKKHLLLTSVQDTQRGLLTTPDQRSCIEEALVSLEGCNIGSHPINLSNLDGTWRLQYTSASDVLILLQAAATLPFFQVGQIFQKFECRDQSNGGVIRNVVRWSIPNLLEEQEGATLLVSAKFNVVSVRNIYLQFQEITIQDINISEELQALIAPAILPRSFISLQILQFLRTFKA

SEQ ID NO: 5930 - DNA, 1382 bp, Glycine max
  misc_feature (1)..(1382): Ceres Seq. ID no. 14312416
aaaaaacccctaaagtctcattcttcttccccgcagcgccgcacagactcatcaaactcgttgtgactgcagctgcacagattttcctcttctctgtgcctttgcgagaacgcgcgtttggtttcaattcaatggcgggaggtaaagcgaagaaggaaaaggggaagccccatcagcagcagaagcacatgccctaccaaggcggaatatcgttccacaaatcaaagggtcagcacattctcaagaaccccttgctcgtcgattccattgtggagaaggccggcgtcaagagcaccgacgtcatcctcgagatcggtcccgggaccggtaacttgacgaagaagcttctcgaagccggcaagaaggtcatcgccgtcgagatcgatccccggatggttctcgagctccagagacggttccagggtacccctcactccaatcgcctcacggttatccaaggtgatgtgttgaagactgaacttccttattttgacatttgtgttgcaaacattccctaccaaatatcttctcctctcacattcaagttactcaagcacgaacctgcttttagggctgcaatcataatgttccagagagaatttgccatgagactggttgctcagcccggtgataaactatattgtcgtctcacggtcaacactcaactacatgctcgagtcttccacctcctcaaagttggaagaaacaacttcaggccccctcccaaggtggattcctctgtggtgcgaattgagcccaggaaaccccgtattgaagttaagcaaaaggagtgggatgggtttttgcggatttgttttaacaggaagaacaaaacacttggttcgatatttaggcagaagagtgtgatctccttgcttgaaaaaaactataggactgtgcgggcactggaacttgggcaagaagattcactaaaggaagtggatgctaaaatggacttctctagttttggtgatgatcgaggtatggagatggatgatgatggagcagatgatgatgaaatggaagttgaggatggggaagcagatgaggtgcaatctgaattcaaggacaaggttttgggtgttctgaaagagggagattttgaagagaagaggtcatccaagctcacattgcaggaattcctatacctgctttctctgtttaacaaaactggcatacacttctattgattttagattatcaattttctcgatagtttcttccctatttaaatctacactattctttcaataggcttatcattattcagaagttttccaagagagagtgatatcaaaaactgttaactatttatgcattgtattttgttaagctccatcgtggatgtatactactctatataatctttaggaggtttgatc

SEQ ID NO: 5931 - protein, 395 aa, Glycine max
  misc_feature (1)..(395): Ceres Seq. ID no. 14312417
KTPKVSFFFPAAPHRLIKLVVTAAAQIFLFSVPLRERAFGFNSMAGGKAKKEKGKPHQQQKHMPYQGGISFHKSKGQHILKNPLLVDSIVEKAGVKSTDVILEIGPGTGNLTKKLLEAGKKVIAVEIDPRMVLELQRRFQGTPHSNRLTVIQGDVLKTELPYFDICVANIPYQISSPLTFKLLKHEPAFRAAIIMFQREFAMRLVAQPGDKLYCRLTVNTQLHARVFHLLKVGRNNFRPPPKVDSSVVRIEPRKPRIEVKQKEWDGFLRICFNRKNKTLGSIFRQKSVISLLEKNYRTVRALELGQEDSLKEVDAKMDFSSFGDDRGMEMDDDGADDDEMEVEDGEADEVQSEFKDKVLGVLKEGDFEEKRSSKLTLQEFLYLLSLFNKTGIHFY

SEQ ID NO: 5932 - protein, 352 aa, Glycine max
  misc_feature (1)..(352): Ceres Seq. ID no. 14312418
MAGGKAKKEKGKPHQQQKHMPYQGGISFHKSKGQHILKNPLLVDSIVEKAGVKSTDVILEIGPGTGNLTKKLLEAGKKVIAVEIDPRMVLELQRRFQGTPHSNRLTVIQGDVLKTELPYFDICVANIPYQISSPLTFKLLKHEPAFRAAIIMFQREFAMRLVAQPGDKLYCRLTVNTQLHARVFHLLKVGRNNFRPPPKVDSSVVRIEPRKPRIEVKQKEWDGFLRICFNRKNKTLGSIFRQKSVISLLEKNYRTVRALELGQEDSLKEVDAKMDFSSFGDDRGMEMDDDGADDDEMEVEDGEADEVQSEFKDKVLGVLKEGDFEEKRSSKLTLQEFLYLLSLFNKTGIHFY

SEQ ID NO: 5933 - protein, 333 aa, Glycine max
  misc_feature (1)..(333): Ceres Seq. ID no. 14312419
MPYQGGISFHKSKGQHILKNPLLVDSIVEKAGVKSTDVILEIGPGTGNLTKKLLEAGKKVIAVEIDPRMVLELQRRFQGTPHSNRLTVIQGDVLKTELPYFDICVANIPYQISSPLTFKLLKHEPAFRAAIIMFQREFAMRLVAQPGDKLYCRLTVNTQLHARVFHLLKVGRNNFRPPPKVDSSVVRIEPRKPRIEVKQKEWDGFLRICFNRKNKTLGSIFRQKSVISLLEKNYRTVRALELGQEDSLKEVDAKMDFSSFGDDRGMEMDDDGADDDEMEVEDGEADEVQSEFKDKVLGVLKEGDFEEKRSSKLTLQEFLYLLSLFNKTGIHFY

SEQ ID NO: 5934 - DNA, 1592 bp, Glycine max
  misc_feature (1)..(1592): Ceres Seq. ID no. 14312423
ttttttacaaaacttggatcttttctttcttaaaaccaaaggcacgctgaagcctcacaatagtgcaagtgatcccaaccaggttggcaccccacacgctatcattcatctgcagcacaccaagagatatagatctagttccttatgtcattgccatatcaagttctcattttgaacaatgacatatggatgttttctaaaattctacaacttactcttagtggagactatttatggttggagaaaattccatgtcattgtttgatttgagaacttgttaacaaggatataaatagcttgatataggttttgtcctatttttctttgatcaactatgccttctttctttgcaatctcaatttacaattggtgtgattcttaataatactaattaattcccatgaattaattgtcagagcatggttgcaatgatggtgaagcatctttaggttcaccccttgctggacgattgtttgtgctagttggtgcgggaggtgcagggaaagcactggcatttggtgctaaaagcagaggagctcgtctagtcatctttgacattgattttggtataaaacaaaggcacatatgttgtctactataaaatttaattttcctttgattctctctcgtgatagagttgaagttttaccaacatcaacatacctgtcacaccttccaattactttccccaaaaagtgccacaaagggtaggtggggtgggtggaattacagaaacacccttacctcaatctgcataactttgatcaatcaagtttaatactacctttttttttgttacgtcaagtttaataccttgatgtagcatattatagtttttcacgaatttcactgttatacaaaaactgctctatatctagagattatgttgcattgacatgttttcttattctcttgtgttcaaaaagatagagcaaaatctcttgcttgtgctgtatttggtgaagctcagcctttcaaagagttggtcaactttcagccagagaaaggggcaattcttgcgaatgcaacacctgtaggaatgcatcccaatacagacagaattcctgtggcagaggctactttggaagactaccggttagtctttgatgctgtgtatactccaagaagaaccagattgttgaacgaagcggatgctgcaggagcaataactgtggctggggtagaaatgttcctaaggcaggccattggtcagttcaatcttttcactggcctagaagcacctgaagaatttatgcgggaaattgttttatccaaattttgaaggcgccgctttcataaattgatcctacaacttgaaggaggctgcatgcctgcacctatcaagaaattcttgtatcacattgcataacatttttctttaaaaaaaatcccttatttttagttgggacgacaactataatgcaacataataaattgaaataataggcaaaatagcaaaagttgttgtgggcgcagctgaaagacatggttcaacttaatttgtggttttaggaataaaaatgttgtgattctctgaagaagaaaaaaatgttgtcatagcttcataggtaatattaacttgggccttacac

SEQ ID NO: 5935 - protein, 80 aa, Glycine max
  misc_feature (1)..(80): Ceres Seq. ID no. 14312424
MHPNTDRIPVAEATLEDYRLVFDAVYTPRRTRLLNEADAAGAITVAGVEMFLRQAIGQFNLFTGLEAPEEFMREIVLSKF

SEQ ID NO: 5936 - protein, 57 aa, Glycine max
  misc_feature (1)..(57): Ceres Seq. ID no. 14312425
FLQNLDLFFLKTKGTLKPHNSASDPNQVGTPHAIIHLQHTKRYRSSSLCHCHIKFSF

SEQ ID NO: 5937 - protein, 46 aa, Glycine max
  misc_feature (1)..(46): Ceres Seq. ID no. 14312426
MFSYSLVFKKIEQNLLLVLYLVKLSLSKSWSTFSQRKGQFLRMQHL

SEQ ID NO: 5938 - DNA, 932 bp, Glycine max
  misc_feature (1)..(932): Ceres Seq. ID no. 14312537
gatttaatctacttgatgcttgacaaggctgatgaacagactgacaggcgccttgctaaacatattgtgtccctacactttgagaatcccgagaacgtggaacaggacgtgttggacatttctacattaaccgattatgttagctatgcccgaaagcacatacacccacagctttctgatgaagccgctgaagaattgactagaggttacgtagaaataagaaaaagaggaaattttcctgggagtagcaaaaaggtgataacagcaacaccaaggcagattgagagtctgatacgcctaagtgaagcattggctcggatgcgcttctcagaatgggttgaaaagcatgatgtaatggaggcatttcggcttttggaagttgcaatgcagcagtctgcaacggatcattctactggaactattgacatggatcttattactactggagtttcggcaagtgaaagaatgaggcgagaaagtctgcaacaagcaactcgtaacataatcatggagaaaatgcagattgggggaccatctatgcgcttattggagttattggaagaattgaagaaacaggatactggtagcgaagttcatcttaatgatctaaggaatgcaattgctactctggctacagaaggatttgttaccatgcacggtgacattgtaaaaagatcttgatggcacgagacagtagtgacatcaggggactgtcttatagttattaattatagtgggttactgtttttattctttaaccttcttacccaatcatatgcatccggagttcaatgttacgtacatatttttatatacggtgtcttgtgaatgcatctattggtagttatttggttttatctttttccttatccgaacatctttactgttaggtgtttcattttataattaaacatgtattacctttcttgacg

SEQ ID NO: 5939 - protein, 226 aa, Glycine max
  misc_feature (1)..(226): Ceres Seq. ID no. 14312538
DLIYLMLDKADEQTDRRLAKHIVSLHFENPENVEQDVLDISTLTDYVSYARKHIHPQLSDEAAEELTRGYVEIRKRGNFPGSSKKVITATPRQIESLIRLSEALARMRFSEWVEKHDVMEAFRLLEVAMQQSATDHSTGTIDMDLITTGVSASERMRRESLQQATRNIIMEKMQIGGPSMRLLELLEELKKQDTGSEVHLNDLRNAIATLATEGFVTMHGDIVKRS

SEQ ID NO: 5940 - protein, 221 aa, Glycine max
  misc_feature (1)..(221): Ceres Seq. ID no. 14312539
MLDKADEQTDRRLAKHIVSLHFENPENVEQDVLDISTLTDYVSYARKHIHPQLSDEAAEELTRGYVEIRKRGNFPGSSKKVITATPRQIESLIRLSEALARMRFSEWVEKHDVMEAFRLLEVAMQQSATDHSTGTIDMDLITTGVSASERMRRESLQQATRNIIMEKMQIGGPSMRLLELLEELKKQDTGSEVHLNDLRNAIATLATEGFVTMHGDIVKRS

SEQ ID NO: 5941 - protein, 120 aa, Glycine max
  misc_feature (1)..(120): Ceres Seq. ID no. 14312540
MRFSEWVEKHDVMEAFRLLEVAMQQSATDHSTGTIDMDLITTGVSASERMRRESLQQATRNIIMEKMQIGGPSMRLLELLEELKKQDTGSEVHLNDLRNAIATLATEGFVTMHGDIVKRS

SEQ ID NO: 5942 - DNA, 886 bp, Glycine max
  misc_feature (1)..(886): Ceres Seq. ID no. 14312646
taaatcagtcttttagggatcagggcatgaagtctattcaaactgcacaaccagcaccagatccatttggtttgcttggcctgttaagtgtgatcaggatgagtgatcctgacctgacatctcttgctcttggaattgatcttactacactggggttaaatttgaattcatcagaaaatcttcacaagacctttgggtctccatggactgatgaatcagctaagggagatccagagtttacagtgccacaatgttattttgccaaacagccacctgctctacatcaaggttatttttccaagttttcggtggaaacattgttttacatattttatagcatgcccaaagatgaagcccaattatatgccgccagtgagctttacaacagaggttggttttatcacaaagaacatcgtttatggttaataagagttcccaacatggagccgctggttaaaacaaacacatatgagagaggatcttatcactgtttcgatccaagcatatttgaaaccgtccgcaaggataattttgttctacattatgaaatgttggaaaagagaccacatctgcctcaactttgaggaggaaacaaaaacctttttactgtaaagtttcgattatggatttaatgccttggagtcattttgcagtattagtattcttcaatttggcgtttcttcctatctggtcgccttagtgatccaagctagtattttatttttccttgccttaatataaacaataattaggatacataggataacctagctgtctgacaaacatggttttctgcccattagctaatgcacaggaaaaacacctggatcgaaaatggatgtactttccgaaataattttatcttaatctgaatgttaggatcaag

SEQ ID NO: 5943 - protein, 193 aa, Glycine max
  misc_feature (1)..(193): Ceres Seq. ID no. 14312647
NQSFRDQGMKSIQTAQPAPDPFGLLGLLSVIRMSDPDLTSLALGIDLTTLGLNLNSSENLHKTFGSPWTDESAKGDPEFTVPQCYFAKQPPALHQGYFSKFSVETLFYIFYSMPKDEAQLYAASELYNRGWFYHKEHRLWLIRVPNMEPLVKTNTYERGSYHCFDPSIFETVRKDNFVLHYEMLEKRPHLPQL

SEQ ID NO: 5944 - protein, 185 aa, Glycine max
  misc_feature (1)..(185): Ceres Seq. ID no. 14312648
MKSIQTAQPAPDPFGLLGLLSVIRMSDPDLTSLALGIDLTTLGLNLNSSENLHKTFGSPWTDESAKGDPEFTVPQCYFAKQPPALHQGYFSKFSVETLFYIFYSMPKDEAQLYAASELYNRGWFYHKEHRLWLIRVPNMEPLVKTNTYERGSYHCFDPSIFETVRKDNFVLHYEMLEKRPHLPQL

SEQ ID NO: 5945 - protein, 161 aa, Glycine max
  misc_feature (1)..(161): Ceres Seq. ID no. 14312649
MSDPDLTSLALGIDLTTLGLNLNSSENLHKTFGSPWTDESAKGDPEFTVPQCYFAKQPPALHQGYFSKFSVETLFYIFYSMPKDEAQLYAASELYNRGWFYHKEHRLWLIRVPNMEPLVKTNTYERGSYHCFDPSIFETVRKDNFVLHYEMLEKRPHLPQL

SEQ ID NO: 5946 - DNA, 981 bp, Glycine max
  misc_feature (1)..(981): Ceres Seq. ID no. 14312658
gttcttgctgcttatgttcctacagaactagtagcaacaattggcaacaaggtgatgttatctagtggctacaatttgctgtctggaacatccatggcatgccctcatgcttctggtgttgctgctcttttgaaagctgcacacactaaatggagtgctgctgctataaggtttatgtcaacaaaagtcggaaggagttgataggccgcaatggtccacatttagtcatgttaactactcaggttctctttcatccacatttggtagcaaggctactcactgtaaggtcgattctagaagaaaaatgctactcactgtgtcatgcaatgcagaagacatgttgcttccacgcggtaattttacattttctgatacttgctgtgaagaaactagacaagagagtttctaatcaccaaacaaatgatgagtttctcgaattgataaacagtattgacataatccggcatccaaatattgttgagcttattgggtactgtgcatagcatggccaaaggcttcttatttatgagtattgcagtaatgggtcgttgcaggatgcactccattcagatgatgaattcaaaacaagattgtcatggaatagtaggtacaagtaaactgaattttacctacagtagaccgtaggtacaagtaaactgacttttacctacagttagagattataggtataaattaatattttttacctacacatttgaaatagtaggtgttacctataatgatagttaaatttgactgtaggtaaaaatatatccgtaggtaaagcctatagtgacagactattagttgtcactgtataccccctcaaagttgacgcaaaaaacgtctgtaggacaaagtcctttatacatctacctacggattttggacttctagtgatagattttgactgtaggtaaaagtcattttccttgtagatatatttttaaaaaattaaaattataatcaaaatattttttc

SEQ ID NO: 5947 - protein, 117 aa, Glycine max
  misc_feature (1)..(117): Ceres Seq. ID no. 14312659
MECCCYKVYVNKSRKELIGRNGPHLVMLTTQVLFHPHLVARLLTVRSILEEKCYSLCHAMQKTCCFHAVILHFLILAVKKLDKRVSNHQTNDEFLELINSIDIIRHPNIVELIGYCA

SEQ ID NO: 5948 - protein, 91 aa, Glycine max
  misc_feature (1)..(91): Ceres Seq. ID no. 14312660
MLTTQVLFHPHLVARLLTVRSILEEKCYSLCHAMQKTCCFHAVILHFLILAVKKLDKRVSNHQTNDEFLELINSIDIIRHPNIVELIGYCA

SEQ ID NO: 5949 - protein, 66 aa, Glycine max
  misc_feature (1)..(66): Ceres Seq. ID no. 14312661
VLAAYVPTELVATIGNKVMLSSGYNLLSGTSMACPHASGVAALLKAAHTKWSAAAIRFMSTKVGRS

SEQ ID NO: 5950 - DNA, 1141 bp, Glycine max
  misc_feature (1)..(1141): Ceres Seq. ID no. 14312777
aaaaaaaaaaaaaacgcgcactctatataagtgcattttttccctttctctttcatcaaattgtgcttgtgattgtctttgtatcacgaaaactatacgattcgattccttgttttcaatggacaccttcttcaattctcaatcttcttcttcttcgagaagccgctggagttacgatactctcaagaatttccgtgagatctctccgctggttcagaatcacatcaaacgggtttattttacgttatgttgcgctgtggtggctgctgctgttggagcttttcttcatgttctgtggaacattgggggttttctcaccacgttggcttccattggaagcatggtttggttgctatctacaccccctgttgaagagcaaaagaggttgtctctgttgatggcttcggccttgtttcagggcgcttccattggacctctgattgatttggctattgccattgatcctagccttattgttagtgcatttgtggcaacttctttggcttttgcttgcttctctgcggcagctttagttgcaaggcgtagggagtacctctaccttggtggtttgctttcttctgggctgtccattcttatgtggttgcactttgcttcctctctctttgggggctcaattgcactcttcaagtttgagctgtactttgggcttttggtgtttgtgggctacgttatagtagacactcaagaaattattgaaagggctcactttggtgacctggattatgtgaagcatgcattgacattgttcactgatttggctgcaatctttgtgcgaattcttattataatgttgaagaattcatctgagagaaatgagaagaagaagaaaaggagagattagtaggctgaccgaccgactcgagctcaggcttctctacagtaatttagtttgtggagaatacataattagctgtttagatgatgttggtcccttgtgtagttagttagctatgtgtttgctgtaatggtaaatgtcaggatttcttttaaacatcttcatatgtatttgccaatatcataatgtgtcgtataacatcataccttggtttaagcagcatgttgacgaaaccttcactaaattttatttttgggtttagtttattttatacattaagtggac

SEQ ID NO: 5951 - protein, 286 aa, Glycine max
  misc_feature (1)..(286): Ceres Seq. ID no. 14312778
KKKKTRTLYKCIFSLSLSSNCACDCLCITKTIRFDSLFSMDTFFNSQSSSSSRSRWSYDTLKNFREISPLVQNHIKRVYFTLCCAVVAAAVGAFLHVLWNIGGFLTTLASIGSMVWLLSTPPVEEQKRLSLLMASALFQGASIGPLIDLAIAIDPSLIVSAFVATSLAFACFSAAALVARRREYLYLGGLLSSGLSILMWLHFASSLFGGSIALFKFELYFGLLVFVGYVIVDTQEIIERAHFGDLDYVKHALTLFTDLAAIFVRILIIMLKNSSERNEKKKKRRD

SEQ ID NO: 5952 - protein, 247 aa, Glycine max
  misc_feature (1)..(247): Ceres Seq. ID no. 14312779
MDTFFNSQSSSSSRSRWSYDTLKNFREISPLVQNHIKRVYFTLCCAVVAAAVGAFLHVLWNIGGFLTTLASIGSMVWLLSTPPVEEQKRLSLLMASALFQGASIGPLIDLAIAIDPSLIVSAFVATSLAFACFSAAALVARRREYLYLGGLLSSGLSILMWLHFASSLFGGSIALFKFELYFGLLVFVGYVIVDTQEIIERAHFGDLDYVKHALTLFTDLAAIFVRILIIMLKNSSERNEKKKKRRD

SEQ ID NO: 5953 - protein, 173 aa, Glycine max
  misc_feature (1)..(173): Ceres Seq. ID no. 14312780
MVWLLSTPPVEEQKRLSLLMASALFQGASIGPLIDLAIAIDPSLIVSAFVATSLAFACFSAAALVARRREYLYLGGLLSSGLSILMWLHFASSLFGGSIALFKFELYFGLLVFVGYVIVDTQEIIERAHFGDLDYVKHALTLFTDLAAIFVRILIIMLKNSSERNEKKKKRRD

SEQ ID NO: 5954 - DNA, 1632 bp, Glycine max
  misc_feature (1)..(1632): Ceres Seq. ID no. 14312785
actgtcataacataagagtcgtggacgcggttggctgttgctgtctacggttccaacttccaagttacaagcttcacccattttataaaagttacggttcggttccgctgcattcgtgctttctagcaacacaaaatgagcgccatctctttcagttccacccatttgcacagttggaaaaatcccaaggggtttggaaaggtgagaaagcaacgagatgggaagctacttgtcaagtgttccagcaagagtgggaacccaacttcattgcaaaatggggttcgtgttggtgttcttggagctagtggctacactggttctgaggttatgcgactcttggctaatcatccacagtttgggattgcactgatgactgctgataggaaagctgggcagccaatctcttctgtattcccacatttgagcactcgggacttgccagatttgattgcaataaaggatgcaaacttttctgatgtggatgctgtattctgttgtttgcctcatggaactactcaggaaattattaaaggcctaccaaagcacttgaagattgttgatctttctgcagattttcgtctaaaagatctttctgagtatgaagagtggtatggtcagccgcatagagcaccagatttgcagaaagaagctatatatggattaacagaggttttaagggaggaaataaagaatgcacgtctagttgctaatcctggttgttatccaacttctgttcaacttcctcttgtcccattgataaaggctagtcttattgagcttaaaaatattatcattgatgctaaatctggtgtgagtggagcagggcgcagtgccaaagaaaatttattgttcactgaagtaactgaaggtctcaattcttatggtgttaccctacatcgccatgttcctgaaattgagcagggacttgctgatgcttcaggttcaaaagtaactgttagttttacaccacatctaattccaatgagccgtggtatgtaatcaactatttatgtggaaatggctccaggagtgagaattgaggacctgtaccagcaactgaagctctcatatgagaatgaagaatttgtttttgtgttggaaaatggagtcattcctcgaactcacagcgttaaagggactaattactgtttaatcaatgtttttccagaccgaattcctggaagagcaatcattatatctgttattgataatctagtgaagggagcttcaggtcaagctttacaaaaccttaatttgttaatgggatttccagaaaatttgggacttcattacctgcctctttttccatagagtagttgtcttgtccaactagagctccaattctgcagtcacagttccaccaaaatacttgatggagcagaggaaatattttcaagttatgtattttcgttctctagattgtaatgtgagattcttcaagaatttagaagggaattgattatggcattggcagggatactatagcaatttctgtcttttttgtcctttgttttgatctgtaatgttagaaatcactgaaggtggtggcgtgtagttttccaagtttgggttttggtttatttgtaatgccaatattttagtggactatgaaatcaccatctcaagtttttg

SEQ ID NO: 5955 - protein, 287 aa, Glycine max
  misc_feature (1)..(287): Ceres Seq. ID no. 14312786
MSAISFSSTHLHSWKNPKGFGKVRKQRDGKLLVKCSSKSGNPTSLQNGVRVGVLGASGYTGSEVMRLLANHPQFGIALMTADRKAGQPISSVFPHLSTRDLPDLIAIKDANFSDVDAVFCCLPHGTTQEIIKGLPKHLKIVDLSADFRLKDLSEYEEWYGQPHRAPDLQKEAIYGLTEVLREEIKNARLVANPGCYPTSVQLPLVPLIKASLIELKNIIIDAKSGVSGAGRSAKENLLFTEVTEGLNSYGVTLHRHVPEIEQGLADASGSKVTVSFTPHLIPMSRGM

SEQ ID NO: 5956 - protein, 223 aa, Glycine max
  misc_feature (1)..(223): Ceres Seq. ID no. 14312787
MRLLANHPQFGIALMTADRKAGQPISSVFPHLSTRDLPDLIAIKDANFSDVDAVFCCLPHGTTQEIIKGLPKHLKIVDLSADFRLKDLSEYEEWYGQPHRAPDLQKEAIYGLTEVLREEIKNARLVANPGCYPTSVQLPLVPLIKASLIELKNIIIDAKSGVSGAGRSAKENLLFTEVTEGLNSYGVTLHRHVPEIEQGLADASGSKVTVSFTPHLIPMSRGM

SEQ ID NO: 5957 - protein, 209 aa, Glycine max
  misc_feature (1)..(209): Ceres Seq. ID no. 14312788
MTADRKAGQPISSVFPHLSTRDLPDLIAIKDANFSDVDAVFCCLPHGTTQEIIKGLPKHLKIVDLSADFRLKDLSEYEEWYGQPHRAPDLQKEAIYGLTEVLREEIKNARLVANPGCYPTSVQLPLVPLIKASLIELKNIIIDAKSGVSGAGRSAKENLLFTEVTEGLNSYGVTLHRHVPEIEQGLADASGSKVTVSFTPHLIPMSRGM

SEQ ID NO: 5958 - DNA, 1238 bp, Glycine max
  misc_feature (1)..(1238): Ceres Seq. ID no. 14312789
tttcaccgatttcatgttgtgtacttggagaccaatgcgaaatgctgccaaaattttgtcaaatttaacaaaatagaattaaccctgatgtatgaagctaccataaaagacggtcttcccaaatgggatagggccacacctataataaaaaagtgagattttcatgcatcgaataactttgagagtatgaccgagttattacttagatggatcgaagttggatgaatgaaagtcgcatcagcccagaatatgaggaaggcgtcgagcaattcttacaatttgcttcagaaagaggtcaaccggatgaagatggaaaatattattgtccttgcatcaattgtttgaatgaaagacgacaaatactggatgacatacgagagcatctgttgtgtgatggaattaagaggaattatacgacgtggatatggcatggtgaaatgacagacatgcagagtgggcaacaatccgaaccgtttgatgtagaaatgggagatcgcttggaggatatgattcgtgaccttggacaagagtcttttcagcaagcacatgcccctatgtatgatacattacaaactgattcaaagaaacctttgtatccggggtgcaagaattcgttgacgctgttgtcggcagttttaagtctggttaatatcaaagccagatatgggtggagtgacaaaaactttagttcactgcttcaagtagtgcacgacatgcttccagaggaaaacacattgcctaaaagttactatcaagcaaagaaaatattgtgtcccatgggtatggagtatcagaagattcatgtttgcccgaatgattgcatattatacagacatcaatttcaagaaatgtacaataagaatctatgtttgtattcaatagtgctttgaaaggacttgacgatactcaacaaagtaaatccaagactcctgctaggtggattgttgttaaatgtaatagacaaaaaggaagcactgagtgtgagtattacgtcatgcattggatgtcaactataatcttaggaaatttccagaataattgggaaatgtatttcactgatcctagaccattggaaccagaaagattgaaggcacttcgcaaccagtgggcaaagtactatttgaaagtgaaaaatgaaacttaggatgtttagacaatcttgtaattgtagtttatatttacttaatttacaattcatgtctcaacattaaatatgttttaaattcatagtaattagt

SEQ ID NO: 5959 - protein, 227 aa, Glycine max
  misc_feature (1)..(227): Ceres Seq. ID no. 14312790
MDRSWMNESRISPEYEEGVEQFLQFASERGQPDEDGKYYCPCINCLNERRQILDDIREHLLCDGIKRNYTTWIWHGEMTDMQSGQQSEPFDVEMGDRLEDMIRDLGQESFQQAHAPMYDTLQTDSKKPLYPGCKNSLTLLSAVLSLVNIKARYGWSDKNFSSLLQVVHDMLPEENTLPKSYYQAKKILCPMGMEYQKIHVCPNDCILYRHQFQEMYNKNLCLYSIVL

SEQ ID NO: 5960 - protein, 222 aa, Glycine max
  misc_feature (1)..(222): Ceres Seq. ID no. 14312791
MNESRISPEYEEGVEQFLQFASERGQPDEDGKYYCPCINCLNERRQILDDIREHLLCDGIKRNYTTWIWHGEMTDMQSGQQSEPFDVEMGDRLEDMIRDLGQESFQQAHAPMYDTLQTDSKKPLYPGCKNSLTLLSAVLSLVNIKARYGWSDKNFSSLLQVVHDMLPEENTLPKSYYQAKKILCPMGMEYQKIHVCPNDCILYRHQFQEMYNKNLCLYSIVL

SEQ ID NO: 5961 - protein, 150 aa, Glycine max
  misc_feature (1)..(150): Ceres Seq. ID no. 14312792
MTDMQSGQQSEPFDVEMGDRLEDMIRDLGQESFQQAHAPMYDTLQTDSKKPLYPGCKNSLTLLSAVLSLVNIKARYGWSDKNFSSLLQVVHDMLPEENTLPKSYYQAKKILCPMGMEYQKIHVCPNDCILYRHQFQEMYNKNLCLYSIVL

SEQ ID NO: 5962 - DNA, 1224 bp, Glycine max
  misc_feature (1)..(1224): Ceres Seq. ID no. 14312793
taatcgtagattaacatctttgccaaagtcgctgtctaagttgaggtctcttacttctttagtgctccgccaatgttcaaaattgaaagatatacctccactgggagatctacaagcattgtcaagattggacatttccggttgtaattcgctcctcagggtaccggaaggcttgcaaaatctaaaaaagttgcaatggcttagtctttcccgcaagctgaatttatcattagtaccgttatgcgtactgcccggtttgagcaatatgcaatatctggatctccgcggttggtctggtataaaagtagaagatgtaaaagggatgactatgcttgaatgttttgcagtaagctttctcgatcaggattactacaaccgttctgtgcaagaaattcaggacactggttatggacctcaaacctattttatctattttggaaaatttaaggattacacacttggattttctgagaatcttatttatggtgaattcaagcatcgaagggtatgttttggagattgcgatggattacactatttactgccaagagaccttgcagaattacttgtaagtggcaatgatcaatgggaatgcttatgtgctcctctgtcatctaatggttctctatctttaaagcacattaccattcgggactgcacaaaattgaagagtttattctgtgtatcttgtcccttatgcactaatatccaaaacctcaaatctttgacacttaataatttggatagtttaagtgtcatctgcaaggaagatgttgctggtttaacacaatctttatctcggaggggggtgttttctcatctcaaggaattgagtatcagtggatgccatcaaatagagaagttgctgacgccagggttagtgccacaacttcaaaacctgaagtctatatcggtatcgaactgccaatcaataaaggagatatttgcaggagatagttcccacaacattgcacttcccaatttaaccaacttgcaactatactggttaccagacttaaagacagtgtgcaaaggaattttactcattaactctgaggatatattgcacatcaacaattgtcccaattatgaaaaacccagaattagtcgtgtatgattgattctgttgattcagattatggtacttattttatgtggcttagtctttgtattcgtaattcttgcaaagaaaaaacaaaatcataatttgctttttgaaatagc

SEQ ID NO: 5963 - protein, 371 aa, Glycine max
  misc_feature (1)..(371): Ceres Seq. ID no. 14312794
NRRLTSLPKSLSKLRSLTSLVLRQCSKLKDIPPLGDLQALSRLDISGCNSLLRVPEGLQNLKKLQWLSLSRKLNLSLVPLCVLPGLSNMQYLDLRGWSGIKVEDVKGMTMLECFAVSFLDQDYYNRSVQEIQDTGYGPQTYFIYFGKFKDYTLGFSENLIYGEFKHRRVCFGDCDGLHYLLPRDLAELLVSGNDQWECLCAPLSSNGSLSLKHITIRDCTKLKSLFCVSCPLCTNIQNLKSLTLNNLDSLSVICKEDVAGLTQSLSRRGVFSHLKELSISGCHQIEKLLTPGLVPQLQNLKSISVSNCQSIKEIFAGDSSHNIALPNLTNLQLYWLPDLKTVCKGILLINSEDILHINNCPNYEKPRISRV

SEQ ID NO: 5964 - protein, 283 aa, Glycine max
  misc_feature (1)..(283): Ceres Seq. ID no. 14312795
MQYLDLRGWSGIKVEDVKGMTMLECFAVSFLDQDYYNRSVQEIQDTGYGPQTYFIYFGKFKDYTLGFSENLIYGEFKHRRVCFGDCDGLHYLLPRDLAELLVSGNDQWECLCAPLSSNGSLSLKHITIRDCTKLKSLFCVSCPLCTNIQNLKSLTLNNLDSLSVICKEDVAGLTQSLSRRGVFSHLKELSISGCHQIEKLLTPGLVPQLQNLKSISVSNCQSIKEIFAGDSSHNIALPNLTNLQLYWLPDLKTVCKGILLINSEDILHINNCPNYEKPRISRV

SEQ ID NO: 5965 - protein, 264 aa, Glycine max
  misc_feature (1)..(264): Ceres Seq. ID no. 14312796
MTMLECFAVSFLDQDYYNRSVQEIQDTGYGPQTYFIYFGKFKDYTLGFSENLIYGEFKHRRVCFGDCDGLHYLLPRDLAELLVSGNDQWECLCAPLSSNGSLSLKHITIRDCTKLKSLFCVSCPLCTNIQNLKSLTLNNLDSLSVICKEDVAGLTQSLSRRGVFSHLKELSISGCHQIEKLLTPGLVPQLQNLKSISVSNCQSIKEIFAGDSSHNIALPNLTNLQLYWLPDLKTVCKGILLINSEDILHINNCPNYEKPRISRV

SEQ ID NO: 5966 - DNA, 1432 bp, Glycine max
  misc_feature (1)..(1432): Ceres Seq. ID no. 14312851
attactgatatttctctgttaatattctgctccaattacccttctaaatctttgcgctcacttgtcagtatctttcctttgttctgcactgcttttcttgtgcatagtagtaagtgataatgctttgaattcgatgatctttctttcttcaggacgatggccgctacttttaaacaccatcctacgggacttcacggttggggcgctccgagatcttctagaaatctcccaagcttcttctcaatgcgtttcccctgcagcactcgccaccatcacattcgtgcttccgtttctcaccactcatcaaccgaggctgagagtgctttgatattgattcgtcatggggagtctttgtggaatgagaagaacttgttcacgggatgttgcgatgtacctttgaccaatagaggtgtagaggaagctattgaagctggtcagaggattagctatatacccattgatatgatctttacgtccgcactcattcgtgcacagatgaccgctatgcttgcaatgactcagcactcccagaagaaggttcctattatcatccatgatgagagtgaacaggcaacaacttggactcaagtttacagtgaaaaaaccaccaagcaatctattccagttattacagcatggcagttgaatgaaagaatgtatggggagttacagggtcttaataagcaggagactgcagaaagatacggaaaggagaaggtgcatgaatggcgtcggagttttgacattcctcctcccaagggtgagagcctggaaatgtgttttcagagagctgttccgtattttaaagattttattgaaccccaactaaaatcaggaaagcacgtgatggttgctgctcatggaaactcattgaggtctattataatgtatctggacggattaacttctcaagaggtcactagtttagagatatcaactgggataccattgctttacatatacaaagaggggaagtttaacagtagaggaagtcctgtggggcctacagaagctggtgtttatgcatacactcagagtttagctgtttacagacaacagttggatgacatgtctagttgttattgatcctgcatttcaaagatcaaaatggtataaatatcgatattcatttttggtgggtgactctctgaatgttcatatgctaaacatcaatttgaaaattactggaaggaattgaccaatccatgacacttttaaatctgcaacctgcatagcgagacgtagaagccctgaaaaatttctgtactgtagcaaccaaagtagcaccaaaacaattttggttaaagagagtgaaaaacgggattagtaaatgacaatgtaagtttagaacttgtttgtgcctgaatggaagtgaacttataggtatagcttccatgtttagaacttacagggaattgaatttacggtaaat

SEQ ID NO: 5967 - protein, 309 aa, Glycine max
  misc_feature (1)..(309): Ceres Seq. ID no. 14312852
MAATFKHHPTGLHGWGAPRSSRNLPSFFSMRFPCSTRHHHIRASVSHHSSTEAESALILIRHGESLWNEKNLFTGCCDVPLTNRGVEEAIEAGQRISYIPIDMIFTSALIRAQMTAMLAMTQHSQKKVPIIIHDESEQATTWTQVYSEKTTKQSIPVITAWQLNERMYGELQGLNKQETAERYGKEKVHEWRRSFDIPPPKGESLEMCFQRAVPYFKDFIEPQLKSGKHVMVAAHGNSLRSIIMYLDGLTSQEVTSLEISTGIPLLYIYKEGKFNSRGSPVGPTEAGVYAYTQSLAVYRQQLDDMSSCY

SEQ ID NO: 5968 - protein, 280 aa, Glycine max
  misc_feature (1)..(280): Ceres Seq. ID no. 14312853
MRFPCSTRHHHIRASVSHHSSTEAESALILIRHGESLWNEKNLFTGCCDVPLTNRGVEEAIEAGQRISYIPIDMIFTSALIRAQMTAMLAMTQHSQKKVPIIIHDESEQATTWTQVYSEKTTKQSIPVITAWQLNERMYGELQGLNKQETAERYGKEKVHEWRRSFDIPPPKGESLEMCFQRAVPYFKDFIEPQLKSGKHVMVAAHGNSLRSIIMYLDGLTSQEVTSLEISTGIPLLYIYKEGKFNSRGSPVGPTEAGVYAYTQSLAVYRQQLDDMSSCY

SEQ ID NO: 5969 - protein, 207 aa, Glycine max
  misc_feature (1)..(207): Ceres Seq. ID no. 14312854
MIFTSALIRAQMTAMLAMTQHSQKKVPIIIHDESEQATTWTQVYSEKTTKQSIPVITAWQLNERMYGELQGLNKQETAERYGKEKVHEWRRSFDIPPPKGESLEMCFQRAVPYFKDFIEPQLKSGKHVMVAAHGNSLRSIIMYLDGLTSQEVTSLEISTGIPLLYIYKEGKFNSRGSPVGPTEAGVYAYTQSLAVYRQQLDDMSSCY

SEQ ID NO: 5970 - DNA, 1475 bp, Glycine max
  misc_feature (1)..(1475): Ceres Seq. ID no. 14312866
aagatttccaacaacccctctctgcaaaacgcttcgcataaggtacttatgcgcgataagactgtactggtaaccggcggagccggttacatcggcagccacaccgttcttcagctcttgctcggaggtttcagagccgtcgtcctcgacaacctcgaaaattcctccgaggttgccatccacagagtcagggagctcgccggcgaatttgggaacaacctctcctttcacaaggtggacctacgggacagagctgctctagaccaaatattttcttccacacaattcgatgctgtcatacattttgctggactgaaagcagtaggagaaagtgtgcaaaaacctttactatactataacaacaacttgactgggacaatcactctattggaagtcatggctgcccatggatgcaagaagctcgtgttttcatcttcagcaactgtatatggttggccaaaggaggttccatgcacagaagagttccctctgtcagcaatgaacccatatggacgaactaagcttatcattgaagaaatttgccgtgatgtccactgtgcagagccagattgtaaaataattttgttaagatacttcaacccagttggtgcacaccttagtggttatattggggaggatcctcgtggaattccaaacaatctcatgccatttgttcagcaagtagcagttggccgacggcctgcactgacagtttttggaaatgattataatacaagtgatggcactggggttcgggattacattcatgttgttgatttagcagatgggcacattgctgcattgcttaaactagatgaacctaatataggttgtgaggtttataacctgggaacaggaaagggaacatcagttttggagatggttagagcttttgaaatggcatctggaaagaaaattccacttgtgatggctggccgtagacctggtgatgctgaaattgtttatgcatcaacaaagaaagcggaaagagagcttaaatggaaggcaaaatatggcattgatgagatgtgccgtgatcaatggaactgggctagcaaaaacccttatggctatggagatcagggctccaccgattaaccacttagttttctctttgggttcttttctgaactcacccacaccgtagtccgtaggtcttgtgaatttagttttcccaaaagcttttctttctttagtgatcttaaggtgacaaagtacttgtattattactattcatagttacatagtaagtaagtagtggtttactatactgtaatttaaaggttctctaggttccttcttacaggttattgattattagattcggattctctcatgttccacatgagcagcatcctgttttgtaaatctaaatcacatgtttgtttaaagtgtgactaacaggtatccttacctcattattgagattaatttattttgaatgttacctttagtaataaatagcatttttcatg

SEQ ID NO: 5971 - protein, 365 aa, Glycine max
  misc_feature (1)..(365): Ceres Seq. ID no. 14312867
KISNNPSLQNASHKVLMRDKTVLVTGGAGYIGSHTVLQLLLGGFRAVVLDNLENSSEVAIHRVRELAGEFGNNLSFHKVDLRDRAALDQIFSSTQFDAVIHFAGLKAVGESVQKPLLYYNNNLTGTITLLEVMAAHGCKKLVFSSSATVYGWPKEVPCTEEFPLSAMNPYGRTKLIIEEICRDVHCAEPDCKIILLRYFNPVGAHLSGYIGEDPRGIPNNLMPFVQQVAVGRRPALTVFGNDYNTSDGTGVRDYIHVVDLADGHIAALLKLDEPNIGCEVYNLGTGKGTSVLEMVRAFEMASGKKIPLVMAGRRPGDAEIVYASTKKAERELKWKAKYGIDEMCRDQWNWASKNPYGYGDQGSTD

SEQ ID NO: 5972 - protein, 349 aa, Glycine max
  misc_feature (1)..(349): Ceres Seq. ID no. 14312868
MRDKTVLVTGGAGYIGSHTVLQLLLGGFRAVVLDNLENSSEVAIHRVRELAGEFGNNLSFHKVDLRDRAALDQIFSSTQFDAVIHFAGLKAVGESVQKPLLYYNNNLTGTITLLEVMAAHGCKKLVFSSSATVYGWPKEVPCTEEFPLSAMNPYGRTKLIIEEICRDVHCAEPDCKIILLRYFNPVGAHLSGYIGEDPRGIPNNLMPFVQQVAVGRRPALTVFGNDYNTSDGTGVRDYIHVVDLADGHIAALLKLDEPNIGCEVYNLGTGKGTSVLEMVRAFEMASGKKIPLVMAGRRPGDAEIVYASTKKAERELKWKAKYGIDEMCRDQWNWASKNPYGYGDQGSTD

SEQ ID NO: 5973 - protein, 233 aa, Glycine max
  misc_feature (1)..(233): Ceres Seq. ID no. 14312869
MAAHGCKKLVFSSSATVYGWPKEVPCTEEFPLSAMNPYGRTKLIIEEICRDVHCAEPDCKIILLRYFNPVGAHLSGYIGEDPRGIPNNLMPFVQQVAVGRRPALTVFGNDYNTSDGTGVRDYIHVVDLADGHIAALLKLDEPNIGCEVYNLGTGKGTSVLEMVRAFEMASGKKIPLVMAGRRPGDAEIVYASTKKAERELKWKAKYGIDEMCRDQWNWASKNPYGYGDQGSTD

SEQ ID NO: 5974 - DNA, 836 bp, Glycine max
  misc_feature (1)..(836): Ceres Seq. ID no. 14312878
ctgatgtaaagatgttgttgatcataccccttattgcatattcaggtctacaacaagcatttgtgtgggctgaatttaccaagtatgttgtaactcctgcaattggtatttctggtgtgggtagttcaatggcagcatacggggcttttgatggaatattttctctgcttgctggtcgtctcacctctggtctcacatctattacaacaatagtttctgctggactttttgctcaggcagtcgtattagtcttacttctgctaaatttcagcataagtagtggattgcttggtactgtttacatactcttcttggctggtttattgggcatcggtgatggagttttaatgacacaacttaatgcattgattggaatactatttaagcatgacacggaaggggcttttgctcagctaaaaatatggcaatgcgctacaattgctatcgtgttctttttcgccccgctcgtctcgttcaaagccgtgcttgtgattatgcttgctctcctttgcttctcattctgcattttcctattgcttgctctgaaggtcgggaagacatcatcaccctccaccagtcagcgaatttaaaactgcttaaactgtagattttttgtatacaatctcagtctgtctttctcgcgtgtagcacgtccactctggactatgtctttatttttgtggtgaaatttcggtcagttgaatgagcttgtacaaattgtgacaaatcagtgtgtttggtaacacatttgttaccgctctggttggacgtggttccgcgaagcaattaatagttgcttttgcattgttttttttacgtgaatttctcataaacat

SEQ ID NO: 5975 - protein, 195 aa, Glycine max
  misc_feature (1)..(195): Ceres Seq. ID no. 14312879
DVKMLLIIPLIAYSGLQQAFVWAEFTKYVVTPAIGISGVGSSMAAYGAFDGIFSLLAGRLTSGLTSITTIVSAGLFAQAVVLVLLLLNFSISSGLLGTVYILFLAGLLGIGDGVLMTQLNALIGILFKHDTEGAFAQLKIWQCATIAIVFFFAPLVSFKAVLVIMLALLCFSFCIFLLLALKVGKTSSPSTSQRI

SEQ ID NO: 5976 - protein, 192 aa, Glycine max
  misc_feature (1)..(192): Ceres Seq. ID no. 14312880
MLLIIPLIAYSGLQQAFVWAEFTKYVVTPAIGISGVGSSMAAYGAFDGIFSLLAGRLTSGLTSITTIVSAGLFAQAVVLVLLLLNFSISSGLLGTVYILFLAGLLGIGDGVLMTQLNALIGILFKHDTEGAFAQLKIWQCATIAIVFFFAPLVSFKAVLVIMLALLCFSFCIFLLLALKVGKTSSPSTSQRI

SEQ ID NO: 5977 - protein, 153 aa, Glycine max
  misc_feature (1)..(153): Ceres Seq. ID no. 14312881
MAAYGAFDGIFSLLAGRLTSGLTSITTIVSAGLFAQAVVLVLLLLNFSISSGLLGTVYILFLAGLLGIGDGVLMTQLNALIGILFKHDTEGAFAQLKIWQCATIAIVFFFAPLVSFKAVLVIMLALLCFSFCIFLLLALKVGKTSSPSTSQRI

SEQ ID NO: 5978 - DNA, 1255 bp, Glycine max
  misc_feature (1)..(1255): Ceres Seq. ID no. 14312882
aaaaaagcccatgttatcttgttcttttcctccactatgttttttttttttgcaattatctttcttatttaaaagatgaagcaagcaaacagaatcccctcttttgatcttggtttcaatattcatcatcaaatcactggtcctccttttatagaaatcttagatctgcttttaacacaaggttttggtggagaagaagaagcaaagacgacggtgtataaatacaagagtagaagaagaagaagaagcaattagagggagagttagtgagcaaggtggatcgaaggcaagggaagaggtctctccctcctcatgaggagaaaaaagaagctttcaactttcctattattcatccaacaccatctcaaaatcgaaaggaacaagcttcaccatcacccttttcactcctcatgagtaacaacaaaaacaacaccttcttccccaccccacatggccaaataagcacttctgaatttgttaatagccaaaatccgccccaggctacaaatcaaggcattgatgatattaggaaaaagcactatagaggagttaggcagagaccatggggcaaatgggcagcagaaataagagaccctaagaaagcagctagagtgtggcttggcacctttgacacggcagaggctgcagctatggcttatgatgctgctgcattgaggttcaaaggaaacaaagccaaactcaattttcctgaacgtgttgttatgccaatacaaccacaaacaaataacaataattccacttcttcatcagctcctactacacaatcatcttcttctcttccaccaccacaatctctacataataatagttctctttcagcagaagggtttccaaatcttgaggagtatgcaaggttgctgagttgtagcgatgatgatgattttcaacgtgttgcattggggctctaccagcatcacaataatgaggattttatttgtggttcatcacaaccaccaccagtgccgttttttgtgtcctcttcttcttcttcttctgcaatgacatcgtcatattctgattttttgggccaaggagggagtactggttttgatgaagggaacaagagggggtcgtagttttatgtctctgaattttgagcactgcatgcaggttgcttccacaacaattaaggaagttcaaatctctcatctcttatatgttcttttgtttttattattccaattacaaaataacacctgaggtataaaatctataatactcatctttcgtcttt

SEQ ID NO: 5979 - protein, 228 aa, Glycine max
  misc_feature (1)..(228): Ceres Seq. ID no. 14312883
MSNNKNNTFFPTPHGQISTSEFVNSQNPPQATNQGIDDIRKKHYRGVRQRPWGKWAAEIRDPKKAARVWLGTFDTAEAAAMAYDAAALRFKGNKAKLNFPERVVMPIQPQTNNNNSTSSSAPTTQSSSSLPPPQSLHNNSSLSAEGFPNLEEYARLLSCSDDDDFQRVALGLYQHHNNEDFICGSSQPPPVPFFVSSSSSSSAMTSSYSDFLGQGGSTGFDEGNKRGS

SEQ ID NO: 5980 - protein, 148 aa, Glycine max
  misc_feature (1)..(148): Ceres Seq. ID no. 14312884
MAYDAAALRFKGNKAKLNFPERVVMPIQPQTNNNNSTSSSAPTTQSSSSLPPPQSLHNNSSLSAEGFPNLEEYARLLSCSDDDDFQRVALGLYQHHNNEDFICGSSQPPPVPFFVSSSSSSSAMTSSYSDFLGQGGSTGFDEGNKRGS

SEQ ID NO: 5981 - protein, 124 aa, Glycine max
  misc_feature (1)..(124): Ceres Seq. ID no. 14312885
MPIQPQTNNNNSTSSSAPTTQSSSSLPPPQSLHNNSSLSAEGFPNLEEYARLLSCSDDDDFQRVALGLYQHHNNEDFICGSSQPPPVPFFVSSSSSSSAMTSSYSDFLGQGGSTGFDEGNKRGS

SEQ ID NO: 5982 - DNA, 1102 bp, Glycine max
  misc_feature (1)..(1102): Ceres Seq. ID no. 14312886
agaaagcggagacacattgataaataataaaaaaaaggcgggaaagaaagggtgggtcaaaattttgagagccacacccagctttgaatcctccaacaaaatctccgttccgggtttttgcaatcgggagagtgcgagagagacaatacactacacggttgctgcattattgctttcagaggaactcattgcagtcattgattgtaagcaatggaaaaaatgcctgaacaaggtgccaatgcatcattattgccttctaatggaattggatccaggttctccaatttgaacaagtctttcaaatattctcttagatctttgctcacttcatgctcaaaggaggaattttataaagcattttcaagtttctctaacattgaaaaggaattgctccatcgcctatttcttcaggtcattacttcgttgcatgaaaacttagaggatgggtttgagactgtctgtcttcaaacacaggcaggagctactcttgatgctgtggagaaaattgtagaagaacaagatctggatgtcttgttttcagataggagtaacataatggatgttgctgagaatctgtctatggcaaagaagaatgaaatccaacacttaaagcatatggttcaattgggagaggaacataatcaaatgttgcgcacccgactacaactccttaaggaaggcaatcaagtattgtctggtgcctcacaagctgttgagaagttcaaaagcatgaatttaaattatggggcaaacagcggcgatgagatccatgatgtataacatgtcttgctcatgctctcctgcaaattgactaaggttcattctgtggtgaatcattcccatgcttttatgttgtagcaatgcttctaaagattatattaattcacgagtaaatctacatcttagtccttgatattaaagtgtcatgtattttagaagctaagattttagaaatcgtgtattagttcctgaatttttaaaacaccaagtgaatgttaaacattgtatgagtgactttcgttcttttaaatgagccttctgggtcatcctttcaaacactttcataactgattggatcatgcatcatgaactagatattttc

SEQ ID NO: 5983 - protein, 189 aa, Glycine max
  misc_feature (1)..(189): Ceres Seq. ID no. 14312887
MEKMPEQGANASLLPSNGIGSRFSNLNKSFKYSLRSLLTSCSKEEFYKAFSSFSNIEKELLHRLFLQVITSLHENLEDGFETVCLQTQAGATLDAVEKIVEEQDLDVLFSDRSNIMDVAENLSMAKKNEIQHLKHMVQLGEEHNQMLRTRLQLLKEGNQVLSGASQAVEKFKSMNLNYGANSGDEIHDV

SEQ ID NO: 5984 - protein, 186 aa, Glycine max
  misc_feature (1)..(186): Ceres Seq. ID no. 14312888
MPEQGANASLLPSNGIGSRFSNLNKSFKYSLRSLLTSCSKEEFYKAFSSFSNIEKELLHRLFLQVITSLHENLEDGFETVCLQTQAGATLDAVEKIVEEQDLDVLFSDRSNIMDVAENLSMAKKNEIQHLKHMVQLGEEHNQMLRTRLQLLKEGNQVLSGASQAVEKFKSMNLNYGANSGDEIHDV

SEQ ID NO: 5985 - protein, 95 aa, Glycine max
  misc_feature (1)..(95): Ceres Seq. ID no. 14312889
ESGDTLINNKKKAGKKGWVKILRATPSFESSNKISVPGFCNRESARETIHYTVAALLLSEELIAVIDCKQWKKCLNKVPMHHYCLLMELDPGSPI

SEQ ID NO: 5986 - DNA, 1358 bp, Glycine max
  misc_feature (1)..(1358): Ceres Seq. ID no. 14312893
gttcgttccctctcaaccaaaaccaaccacttcatgttatcattgctatgacccttcaagcttttcatggctctgcatgttgtttccgttcccaccttcttcacttttcttcttccaccgcttcatctccaccattccttgcttcgaggaggttccaatcatgcccttcaacaagaaaatctctcaagttgaattgcagttcaagtggcaataatggtgaccaagattaccttctggatgctccagtttctgttggagatggattctctttcagtggagggaagtattcagatggccctagtccaagtgatgaatggtttaagcaagggaaaaaggttaaagcctattcaatacctggcactggtgaaaaggcaaaagatccaatttttggacttgctatgggttccggttctcaagctactggcgatcgtttcagatggttttgtgttgaaagcggaagtgctgataatccttcagtgatattaatccatggtttcccttcacaggcatattcttaccgcaaagttcttccagtactctccaaggactatcacgtcatagcctttgactggctaggatttgggttttctgacaagcctcaacccagatatgggtttgactacacactggatgagtatgtctcatcattggagtcacttattgatgaactggctgctactaaagtctcacttgttgtccagggatatttttcgcctgttgtagccaagtatgccagcattcaccaggaaaaagtcagaaacttaatactccttaatccgcctctaacagcccaacatgccaagcttccaccaacattgtccatattcagcaactttctactaggtgaaatattttcacaggatccattaagggccagtgacaaagctctaacaagctgtggcccctataaaatgaaagaagaagatgcaatggtctatcgaagaccctatcttacatctggttcctctggctttgctctaaatgcaattagcaggaacatgaacaaagacctcaagagatatgtggaggatatgcaaacaatactgaaggacaaaaattggaaagttcaaaccacaatatgttggggccaaagagaccgctggttgagctatgatggagtggaggatttctgcaaggattccaatcataaactcattgatgttcctacggctggtcatcatgtgcaggaagattgtggcgaagaagttggacaacttattcgtgggataataagcaaaaggaccaagatataggatattttctcattgcttcttgagatgctgaacaaatttttttgttacatggattcctatcttttccttggtctctatccttccaataaatcttgattcaattcc

SEQ ID NO: 5987 - protein, 416 aa, Glycine max
  misc_feature (1)..(416): Ceres Seq. ID no. 14312894
SFPLNQNQPLHVIIAMTLQAFHGSACCFRSHLLHFSSSTASSPPFLASRRFQSCPSTRKSLKLNCSSSGNNGDQDYLLDAPVSVGDGFSFSGGKYSDGPSPSDEWFKQGKKVKAYSIPGTGEKAKDPIFGLAMGSGSQATGDRFRWFCVESGSADNPSVILIHGFPSQAYSYRKVLPVLSKDYHVIAFDWLGFGFSDKPQPRYGFDYTLDEYVSSLESLIDELAATKVSLVVQGYFSPVVAKYASIHQEKVRNLILLNPPLTAQHAKLPPTLSIFSNFLLGEIFSQDPLRASDKALTSCGPYKMKEEDAMVYRRPYLTSGSSGFALNAISRNMNKDLKRYVEDMQTILKDKNWKVQTTICWGQRDRWLSYDGVEDFCKDSNHKLIDVPTAGHHVQEDCGEEVGQLIRGIISKRTKI

SEQ ID NO: 5988 - protein, 401 aa, Glycine max
  misc_feature (1)..(401): Ceres Seq. ID no. 14312895
MTLQAFHGSACCFRSHLLHFSSSTASSPPFLASRRFQSCPSTRKSLKLNCSSSGNNGDQDYLLDAPVSVGDGFSFSGGKYSDGPSPSDEWFKQGKKVKAYSIPGTGEKAKDPIFGLAMGSGSQATGDRFRWFCVESGSADNPSVILIHGFPSQAYSYRKVLPVLSKDYHVIAFDWLGFGFSDKPQPRYGFDYTLDEYVSSLESLIDELAATKVSLVVQGYFSPVVAKYASIHQEKVRNLILLNPPLTAQHAKLPPTLSIFSNFLLGEIFSQDPLRASDKALTSCGPYKMKEEDAMVYRRPYLTSGSSGFALNAISRNMNKDLKRYVEDMQTILKDKNWKVQTTICWGQRDRWLSYDGVEDFCKDSNHKLIDVPTAGHHVQEDCGEEVGQLIRGIISKRTKI

SEQ ID NO: 5989 - protein, 284 aa, Glycine max
  misc_feature (1)..(284): Ceres Seq. ID no. 14312896
MGSGSQATGDRFRWFCVESGSADNPSVILIHGFPSQAYSYRKVLPVLSKDYHVIAFDWLGFGFSDKPQPRYGFDYTLDEYVSSLESLIDELAATKVSLVVQGYFSPVVAKYASIHQEKVRNLILLNPPLTAQHAKLPPTLSIFSNFLLGEIFSQDPLRASDKALTSCGPYKMKEEDAMVYRRPYLTSGSSGFALNAISRNMNKDLKRYVEDMQTILKDKNWKVQTTICWGQRDRWLSYDGVEDFCKDSNHKLIDVPTAGHHVQEDCGEEVGQLIRGIISKRTKI

SEQ ID NO: 5990 - DNA, 941 bp, Glycine max
  misc_feature (1)..(941): Ceres Seq. ID no. 14312901
aaaaaaaaacatggaaaggatatagattatagaatacagaggcaccgacgtagcgacggtcaaggtccacaatccacaatccgcaaccgaataacccactacccacagatttctctctctctctctctgttggattggatcctaatatctgtgttccactttcagaggttgctccttcattcacgcccttgctctcttcaaatctattttcttcctctgctctatctatctcttgttatttttccctctcacgccaatcaccatgccttctccttcagatcaccaccgcccccaaccaaaacctaatcccaacctcctttctctgttcctcaaaccaatcatcatgctccttctcacctccctcttcttcctcttcctcggcttcgctgccttcctcctcctcaacctcttcctcctcggcggcgccttccaccgccttcgcttccgcccctccgttaccaccgcacccacctcctccaacggcctcccccctcgcgaaatcaacaagctcccccgctttcgtgtcgccaatggatccgagacccgacccgactccaattgcgtcgtctgcctggacgcattccataacgcccaatggtgccgaaagcttgctgcgtgcgggcacgtgtttcaccgcaggtgcgtcgacacgtggctccttaaggtcgccgcatgccccacgtgccgcacacccgtgggattcaatgccggtgctacggtacatgacccgcctcagcggtctgaccatttgcatacctgcggaactgactccaatgctctcaccacccttttatagcttgtaagttttcgtttttaagcctttcccaaaccatgtaaggatatcaagtaattgtttttttaatctatgtatatgaattgtagcaatagttttttctcccatttcgacgactattgggaagaaatgaaccaacttaattcac

SEQ ID NO: 5991 - protein, 177 aa, Glycine max
  misc_feature (1)..(177): Ceres Seq. ID no. 14312902
MPSPSDHHRPQPKPNPNLLSLFLKPIIMLLLTSLFFLFLGFAAFLLLNLFLLGGAFHRLRFRPSVTTAPTSSNGLPPREINKLPRFRVANGSETRPDSNCVVCLDAFHNAQWCRKLAACGHVFHRRCVDTWLLKVAACPTCRTPVGFNAGATVHDPPQRSDHLHTCGTDSNALTTLL

SEQ ID NO: 5992 - protein, 150 aa, Glycine max
  misc_feature (1)..(150): Ceres Seq. ID no. 14312903
MLLLTSLFFLFLGFAAFLLLNLFLLGGAFHRLRFRPSVTTAPTSSNGLPPREINKLPRFRVANGSETRPDSNCVVCLDAFHNAQWCRKLAACGHVFHRRCVDTWLLKVAACPTCRTPVGFNAGATVHDPPQRSDHLHTCGTDSNALTTLL

SEQ ID NO: 5993 - protein, 101 aa, Glycine max
  misc_feature (1)..(101): Ceres Seq. ID no. 14312904
KKKHGKDIDYRIQRHRRSDGQGPQSTIRNRITHYPQISLSLSLLDWILISVFHFQRLLLHSRPCSLQIYFLPLLYLSLVIFPSHANHHAFSFRSPPPPTKT

SEQ ID NO: 5994 - DNA, 1440 bp, Glycine max
  misc_feature (1)..(1440): Ceres Seq. ID no. 14312907
aactctcagcgcccagcctacagcctccaggtgtgttttgttttgcagatccaacactctctctatttatatccaactgtaccatctcccacttccttattctcaaccctttttatcttttcatcaattcaattcaaaccacgccttcccctgttcacaaccttgcccacacactgcattgttctaattaaacatgtcaccctcactgttaccaccatcacaacacaaccaccatttctaactcaacaacaaccaaaaaaaaaaagattctggagcatcatttcttggattctggttcgcgttggtcacatccatcaaacacccctatactctttcttggcgtgcgtcaggtattcatttttacggcaaccctgacagagtaataagacagttaccgtgttgtacgtgtccttcaaacgtcacccacttcaacacataaaccatcgtttttcccaccagatttatattcattcgtcgtatttaaacccaccacaccaaccaaccatacattatcgttgcaattgttgttacaagcttaggttagggtctgtttggtgataatttagaatcttagatggggaattgccaagctgcggaagcggctacggttgtgattcagcatcctgggaacaagatcgagagggtttattggtcgcttagcgcacacgaggttatgaactcgaatcctgggcactatgttgcgcttgtcgtgtcctcgcccacgctcaaggccgagaatggcgctccgatgaagcagcttaagcttctccgacccgacgatactttgcatattggccaggtttatcggttgatcagcttcgaagatgtgttgaaggagtttgcttccaagaaatgtggtaaacttgggaaattgctcaaggagacgggtagtcatgggattcagatgaagcacaaggactctagagctacaaatcctagcccaaattccaaaaccgaattcggttccattaagggtttctccatttttgtcaaactcactgaccatgaaacttgcggaatgttgatgttgtgtgtggtccaatatatctatcctcttcagcaaaattgcttccttttcgtgtattgattattatatatgtttttataaacacgctctggcacgagcagcgtctgcgatcagttataaacccctcgagaaaataatgctatatgttatctacaaactccacagtccacagcagatgagataacctatctaggctacaagataaaaacaaaagtcctgcactcaattcaaatcttagatccgacatgccccagatagtgcctagctccactaggcaccattaacagattaatgtttgtatgtagcttggttgttttgcttggatggaatcacgggtcaatggtgtaatcactttatcccttgcttttttcattcaattctgcctttaattcaaaagacagggtatttgttct

SEQ ID NO: 5995 - protein, 170 aa, Glycine max
  misc_feature (1)..(170): Ceres Seq. ID no. 14312908
MGNCQAAEAATVVIQHPGNKIERVYWSLSAHEVMNSNPGHYVALVVSSPTLKAENGAPMKQLKLLRPDDTLHIGQVYRLISFEDVLKEFASKKCGKLGKLLKETGSHGIQMKHKDSRATNPSPNSKTEFGSIKGFSIFVKLTDHETCGMLMLCVVQYIYPLQQNCFLFVY

SEQ ID NO: 5996 - protein, 137 aa, Glycine max
  misc_feature (1)..(137): Ceres Seq. ID no. 14312909
MNSNPGHYVALVVSSPTLKAENGAPMKQLKLLRPDDTLHIGQVYRLISFEDVLKEFASKKCGKLGKLLKETGSHGIQMKHKDSRATNPSPNSKTEFGSIKGFSIFVKLTDHETCGMLMLCVVQYIYPLQQNCFLFVY

SEQ ID NO: 5997 - protein, 124 aa, Glycine max
  misc_feature (1)..(124): Ceres Seq. ID no. 14312910
NSQRPAYSLQVCFVLQIQHSLYLYPTVPSPTSLFSTLFIFSSIQFKPRLPLFTTLPTHCIVLIKHVTLTVTTITTQPPFLTQQQPKKKRFWSIISWILVRVGHIHQTPLYSFLACVRYSFLRQP

SEQ ID NO: 5998 - DNA, 1838 bp, Glycine max
  misc_feature (1)..(1838): Ceres Seq. ID no. 14312951
aacgctgcctccaaggtgatcgatcatcaatccatccatttaattgcatttctagaaattgaattattagtttttttctcctccttggtctgcatttgcttgattccgtgatttagttttgtaacagaaaacacaagagggtaaaatctttgactctaataagtacaattattgaatagggttttggaacagaaatgagaatagggtaaatgaatatatattaggaaaaaaagttaaatacatttttagtcctttaagctatgtttgagattaaaaatctattatatttgtagagattaaaaatatttaatattttaaaatattattaagataaatatattgtcaatttacatgtaatttttttacaatatcaattaattataagtcatacaaattgatataaattaaagtaattattataaaaatgagcaaacttttatcattcagcgcaagaatttgtgattgattagacaataattgtgcattctaattataattaatagtttttttttataatttttatcttttaataattgagtataattaacatgatatgggagttttaaaaagaatagttaaagggtaaagtaaggaaataattaaaagataaagtagtgaatagtttcgaaagtagttaaagaataaaatagtctagttaaaaacaaatgttttgtctgtgttaatttgttcctaatgctacgaagaagcaaatgtagtccttgggtaaatttaatttttctaatgttaaggaccaaatttaccagtattgtaaatttcagggacaaaatagtgttaataatgtcaaggacccaaattgatcgtttgtgccaaactagattaaattgatgttttgcttattcttcttatggtattcatggaataaacattagagtgcttgtaaatgagtaatgactactggcccaatatttcttcaaaaaaaatatgtttggggctctttgaaaatttaactaaaacattcattagttgttctctccccttctatctgagaaaattagtcactacacattgtcaagggtgtggacagtgttcacaagtcaatggatgcggttgaagcagcaaagttgttagctcggacaagtggtgcaatagttgcagtgtcaggagccacggacattgtcacagatggaaatcgagttgttggggctcataatggggtggcgatgatgcagaaaataacagcaacgggatgttcagtcactgcactgattgctgcctttgttgccgttgacaaaagccatgctttggatgccgcagtgtctgcattagctgtatttggtgttgctggtgagctaggaatgaagatggctaaaggtcctgcatcgcttcgaatgcacttgatagatgaactctatgggcttgatgaatctgccttgaattctcatgttaatgtcaccagtttgtgatgaaatgtgaagatctgcattcaaattgataattaattatcataaaattcgcatgtatcatagttgatagttgtctatcaatggtgtccattggttgaattggaaggtggatcgtattagttagcaatagagatccctctataatttatgtcaataataatcactggtagctacctctggtaataacagtttgttcctgtagttaaaaatatctcatggtttcagcccttaatttagtttggtcaacattttgtatgtataggtttattttgttgaaagttaacttcgtaatttctgtttgatgtataggaatgggtttggtggaaattgtttatgaactcctgatgcattgttaatcagattgtgaaccggtaaagttgagtgtatatatgaattaacaaataacattttctc

SEQ ID NO: 5999 - protein, 121 aa, Glycine max
  misc_feature (1)..(121): Ceres Seq. ID no. 14312952
MDAVEAAKLLARTSGAIVAVSGATDIVTDGNRVVGAHNGVAMMQKITATGCSVTALIAAFVAVDKSHALDAAVSALAVFGVAGELGMKMAKGPASLRMHLIDELYGLDESALNSHVNVTSL

SEQ ID NO: 6000 - protein, 80 aa, Glycine max
  misc_feature (1)..(80): Ceres Seq. ID no. 14312953
MMQKITATGCSVTALIAAFVAVDKSHALDAAVSALAVFGVAGELGMKMAKGPASLRMHLIDELYGLDESALNSHVNVTSL

SEQ ID NO: 6001 - protein, 79 aa, Glycine max
  misc_feature (1)..(79): Ceres Seq. ID no. 14312954
MQKITATGCSVTALIAAFVAVDKSHALDAAVSALAVFGVAGELGMKMAKGPASLRMHLIDELYGLDESALNSHVNVTSL

SEQ ID NO: 6002 - DNA, 1416 bp, Glycine max
  misc_feature (1)..(1416): Ceres Seq. ID no. 14312973
ttatcccaaaactatttggttgacatgattccaaaatccttggagtcaattcgtgatctcaaatttatcaatctttcttataacatgttagaaggtgagattcccaacggtggagctttcaaaaatttcacagctcaatctttcatattcaataaagcactttgtggaaatgcacggttacaagtccccccatgcagtgaattaatgaagagaaaaaggtcaaatgcacatatgtttttcatcaaatgcatattgcctgtaatgttgtcaaccattttggttgttttatgtgtgttccttctgaaaaagagtcgaagaaaaaagcatggtggtggtgatcctgctgaagtcagttcatcaactgtattagcaacaagaacaatttcctacaatgaactttcacgggcaaccaatggatttgatgagagtaatttgcttggtaagggtagttttggctctgtgttcaaaggtatacttccaaataggatggttgttgcagtcaaattatttaatttggaccttgaattgggatcaaggagctttagtgtagaatgtgaagtaatgcggaatctgcgacaccgaaatctcatcaagatcatttgtagttgctcaaattctgattacaagcttttagtaatggaattcatgtccaatggcaaccttgaaagatggttgtattctcataactattatttagacttcttgcaaaggctaaatataatgatagatgtggcttctgcattggaatatatgcatcatggtgcttcgccaactgtggttcattgtgatgtaaagcctagtaatgtcttattggatgaagatatggttgcacatgttagtgacttaggcattgccaaacttcttgatgaaggacaatcccaagagtataccaagaccatggctacatttggctacattgcaccagagtttggatccaaggggactatttctacaaaaggagatgtgtacagttttgggattttgttgatggaaacattctcaagaaagaagccaacagatgaaatgtttgttgaaggattgagcataaaaggttggattagtgaatcattaccccatgccaatactcaagttgtggattccaatttgttagaggatgaagaacacagtgctgatgacataatatcatctatatcatctatttatagaatagccctgaattgttgtgcagatttgcctgaagaaagaatgaatatgacggatgttgctgcatcactaaacaaaatcaaggtcatgtttcagaaaaataacaagtacatgcgagcacaagtccatgcaacctaagtttatatagacatcaaatcaatttataatttggcattaaaataatgtactttttgaattgctaagaaaatcctacttgacattatgaatgcactaaaaaaaaaaaaaaaaaag

SEQ ID NO: 6003 - protein, 433 aa, Glycine max
  misc_feature (1)..(433): Ceres Seq. ID no. 14312974
LSQNYLVDMIPKSLESIRDLKFINLSYNMLEGEIPNGGAFKNFTAQSFIFNKALCGNARLQVPPCSELMKRKRSNAHMFFIKCILPVMLSTILVVLCVFLLKKSRRKKHGGGDPAEVSSSTVLATRTISYNELSRATNGFDESNLLGKGSFGSVFKGILPNRMVVAVKLFNLDLELGSRSFSVECEVMRNLRHRNLIKIICSCSNSDYKLLVMEFMSNGNLERWLYSHNYYLDFLQRLNIMIDVASALEYMHHGASPTVVHCDVKPSNVLLDEDMVAHVSDLGIAKLLDEGQSQEYTKTMATFGYIAPEFGSKGTISTKGDVYSFGILLMETFSRKKPTDEMFVEGLSIKGWISESLPHANTQVVDSNLLEDEEHSADDIISSISSIYRIALNCCADLPEERMNMTDVAASLNKIKVMFQKNNKYMRAQVHAT

SEQ ID NO: 6004 - protein, 425 aa, Glycine max
  misc_feature (1)..(425): Ceres Seq. ID no. 14312975
MIPKSLESIRDLKFINLSYNMLEGEIPNGGAFKNFTAQSFIFNKALCGNARLQVPPCSELMKRKRSNAHMFFIKCILPVMLSTILVVLCVFLLKKSRRKKHGGGDPAEVSSSTVLATRTISYNELSRATNGFDESNLLGKGSFGSVFKGILPNRMVVAVKLFNLDLELGSRSFSVECEVMRNLRHRNLIKIICSCSNSDYKLLVMEFMSNGNLERWLYSHNYYLDFLQRLNIMIDVASALEYMHHGASPTVVHCDVKPSNVLLDEDMVAHVSDLGIAKLLDEGQSQEYTKTMATFGYIAPEFGSKGTISTKGDVYSFGILLMETFSRKKPTDEMFVEGLSIKGWISESLPHANTQVVDSNLLEDEEHSADDIISSISSIYRIALNCCADLPEERMNMTDVAASLNKIKVMFQKNNKYMRAQVHAT

SEQ ID NO: 6005 - protein, 405 aa, Glycine max
  misc_feature (1)..(405): Ceres Seq. ID no. 14312976
MLEGEIPNGGAFKNFTAQSFIFNKALCGNARLQVPPCSELMKRKRSNAHMFFIKCILPVMLSTILVVLCVFLLKKSRRKKHGGGDPAEVSSSTVLATRTISYNELSRATNGFDESNLLGKGSFGSVFKGILPNRMVVAVKLFNLDLELGSRSFSVECEVMRNLRHRNLIKIICSCSNSDYKLLVMEFMSNGNLERWLYSHNYYLDFLQRLNIMIDVASALEYMHHGASPTVVHCDVKPSNVLLDEDMVAHVSDLGIAKLLDEGQSQEYTKTMATFGYIAPEFGSKGTISTKGDVYSFGILLMETFSRKKPTDEMFVEGLSIKGWISESLPHANTQVVDSNLLEDEEHSADDIISSISSIYRIALNCCADLPEERMNMTDVAASLNKIKVMFQKNNKYMRAQVHAT

SEQ ID NO: 6006 - DNA, 1539 bp, Glycine max
  misc_feature (1)..(1539): Ceres Seq. ID no. 14312981
aagcgaacacggttagtagcggcagagaaaggagatggaatcggcgggggagtggctggagaaggcgttggtggagttgtgctccaagattgaaactggcttgggtttaggtttggaccaagacatcatcaaaggcctcgtctcttactgtgaccttgccgagccacgagatgccaaagagtaccttgacaatataatcggtcaggatgcagggaaaactgtgattgaagaatatttacgacggagaggttactcagaatccagcatcggctcaaatgttccaactaccaaattacatgcgtatgtcaaaccgccttcagttgagacatctgctagtggaactaagaaatcatttaaaacaccgaaagtggcaggccgcggtaatcatgcagaaccgaacaagaatgcgagtagcagtaatcaggaaaatcagactccaactgtagttagtgaatcaaaaacatcgcaaaaggggaaccaattgaattccaagaagaagaaagccgggaaagttgtctcacttgctgaggctgccaaaggatccattgtgttccagcagggaagaccatgctcctgtcaagcacgtcgtcacgggctggtcagcaactgcttatcttgtggcaaaatagtctgtgaacaagaaggagaggggccttgccatttttgtggtgcacttgtgttaagagagggcagctcgtatgctggtctggaagaaagtttgcctcccttgtcagagtctgaggctgttgctgaagcttatgcaaagagactggttgaatatgaccgaaactctgcagctcgtacaacagttattgatgaccaaagtgactactatgagattgatggaaacagttggttgtcaaaggaggagaaagaactgttgaagaagaaacaagaggagatggaagaagctgagaaagccaaacgtaatagagttgttgtgacttttgatctagttggccgcaaggtccttgtaaataaagatgaagcttcagaattacagtttgaaaatagaatattgcgtcctccggatgcaagggaagtgaaccgtatcaaaccaaatccaactctaacgtttcaacctgtttttgtggacctgggctttggtaggaaatccactaaagataagcaatcacataaaggcataagcaagggcttgtgcttggagattacagggcgagtgcagcatgatagaaatgaccagaagtatgttatgatggaaaaccaattggcaacagcttcaaatgaaaatgtttggcaagtatcttcaggaaatggaatgcacatcatggaagatgatggtcaatgtttactgaactatgataagtaaagtgccttatccagcttttagcgattattgttacattcttcatttgctttctcccattttctttttgatttgcgcgtctaagccatgaaattgatggtcctaattacttttttcagaaagaaagttaagaattttaggcagcgctatttttgtttatacactgctcagatattaaatatcagtcaactactattatctatttgtattag

SEQ ID NO: 6007 - protein, 431 aa, Glycine max
  misc_feature (1)..(431): Ceres Seq. ID no. 14312982
MESAGEWLEKALVELCSKIETGLGLGLDQDIIKGLVSYCDLAEPRDAKEYLDNIIGQDAGKTVIEEYLRRRGYSESSIGSNVPTTKLHAYVKPPSVETSASGTKKSFKTPKVAGRGNHAEPNKNASSSNQENQTPTVVSESKTSQKGNQLNSKKKKAGKVVSLAEAAKGSIVFQQGRPCSCQARRHGLVSNCLSCGKIVCEQEGEGPCHFCGALVLREGSSYAGLEESLPPLSESEAVAEAYAKRLVEYDRNSAARTTVIDDQSDYYEIDGNSWLSKEEKELLKKKQEEMEEAEKAKRNRVVVTFDLVGRKVLVNKDEASELQFENRILRPPDAREVNRIKPNPTLTFQPVFVDLGFGRKSTKDKQSHKGISKGLCLEITGRVQHDRNDQKYVMMENQLATASNENVWQVSSGNGMHIMEDDGQCLLNYDK

SEQ ID NO: 6008 - DNA, 1621 bp, Glycine max
  misc_feature (1)..(1621): Ceres Seq. ID no. 14312985
ttttcgtgcaccaatgtccttttatgactctacaccattgggaaggatacttagtagagtctcatcagatctaagcattgtggatcttgatataccctttattctcagtttcactgtggtaggtgttatatacttctattctaatctgacagtcctagctattatttcttggcaagtcttggttatcgccataccaatggtatatctttcaattcgcctgcagagatactacttttccactgcaaaagaagtgatgcgcgtgaatggcacaacaaaatcctttgtagctaatcatatagctgaaactactgctggagttgtgacaataagagcctttgaagaagaagatcgtttctttgagaagaatcttgatctaattgacagcaatgctagtcctttcttccatagttttagctcaaatgagtggctgatccaaagattagaaatagttagtgcagtactgctttcctccgcagcactatgcatggttatgcttccaccagagactttcagctctggatttcttggcttgtctctctcttatggctttacactaaatgcttccttacaatttttaattcaaagccaatgcagtctagaaaattacataatatctgtagagaggctaaatcaatatatgcatatacctggtgaggcccaagaagtaatagaaggaaatcgtccttcctcgaattggccagttgctggtaaagtagaactaaatgacttgaagatacgatacaggcctgatggaccacttgtacttcatggaatcacatgcacattcaaagcagggcacaagattggaattgttggcaggacaggcagtgggaagtccactcttataggcgctttatttcgtcttgtggagccagcaggtggaaaaattgtagtcgatggcgtagatatatcttctattggtcttcatgatttgaggtcacgttttggtgttatacctcaggatcctaccctttttaatgggactgttagatataatttggaccctttatctcaacactctgatcacgagatatgggaggttcttgggaagtgtcaattgcgagaagctgtgcaagagaaagaagagggcctgaactccccagttgttgaagatggatcaaactggagcatgggacaaaggcaattattttgtttggggcgtgttcttttaaggagaagtaggatattggtgctggatgaagcaactgcatcaattgacaatgcaactgatttgattctgcagaagaccattaggactgagtttgcagattgtacagtgatcacagtagcacacaggataccaaccgtgatggattgcactatggttctttcaatcagagatggaaaattggtggagtatgatgatccaatgtgcctgatgaagaaagaaggatcgctattcaatcagcttgttaatgaatactggtctcattttcaatctgcagaatcacattgatactgcaaaatgtttattttcttttgtcgacattgttatccatctttctttggtattagctacaagtcaatatgtgaggcttgaggagttcggaaggaattggatgaatgaaaagaaacggtgcatgagtatttgaatgtgttgtattagagtttatttgttaag

SEQ ID NO: 6009 - protein, 484 aa, Glycine max
  misc_feature (1)..(484): Ceres Seq. ID no. 14312986
FRAPMSFYDSTPLGRILSRVSSDLSIVDLDIPFILSFTVVGVIYFYSNLTVLAIISWQVLVIAIPMVYLSIRLQRYYFSTAKEVMRVNGTTKSFVANHIAETTAGVVTIRAFEEEDRFFEKNLDLIDSNASPFFHSFSSNEWLIQRLEIVSAVLLSSAALCMVMLPPETFSSGFLGLSLSYGFTLNASLQFLIQSQCSLENYIISVERLNQYMHIPGEAQEVIEGNRPSSNWPVAGKVELNDLKIRYRPDGPLVLHGITCTFKAGHKIGIVGRTGSGKSTLIGALFRLVEPAGGKIVVDGVDISSIGLHDLRSRFGVIPQDPTLFNGTVRYNLDPLSQHSDHEIWEVLGKCQLREAVQEKEEGLNSPVVEDGSNWSMGQRQLFCLGRVLLRRSRILVLDEATASIDNATDLILQKTIRTEFADCTVITVAHRIPTVMDCTMVLSIRDGKLVEYDDPMCLMKKEGSLFNQLVNEYWSHFQSAESH

SEQ ID NO: 6010 - protein, 480 aa, Glycine max
  misc_feature (1)..(480): Ceres Seq. ID no. 14312987
MSFYDSTPLGRILSRVSSDLSIVDLDIPFILSFTVVGVIYFYSNLTVLAIISWQVLVIAIPMVYLSIRLQRYYFSTAKEVMRVNGTTKSFVANHIAETTAGVVTIRAFEEEDRFFEKNLDLIDSNASPFFHSFSSNEWLIQRLEIVSAVLLSSAALCMVMLPPETFSSGFLGLSLSYGFTLNASLQFLIQSQCSLENYIISVERLNQYMHIPGEAQEVIEGNRPSSNWPVAGKVELNDLKIRYRPDGPLVLHGITCTFKAGHKIGIVGRTGSGKSTLIGALFRLVEPAGGKIVVDGVDISSIGLHDLRSRFGVIPQDPTLFNGTVRYNLDPLSQHSDHEIWEVLGKCQLREAVQEKEEGLNSPVVEDGSNWSMGQRQLFCLGRVLLRRSRILVLDEATASIDNATDLILQKTIRTEFADCTVITVAHRIPTVMDCTMVLSIRDGKLVEYDDPMCLMKKEGSLFNQLVNEYWSHFQSAESH

SEQ ID NO: 6011 - protein, 419 aa, Glycine max
  misc_feature (1)..(419): Ceres Seq. ID no. 14312988
MVYLSIRLQRYYFSTAKEVMRVNGTTKSFVANHIAETTAGVVTIRAFEEEDRFFEKNLDLIDSNASPFFHSFSSNEWLIQRLEIVSAVLLSSAALCMVMLPPETFSSGFLGLSLSYGFTLNASLQFLIQSQCSLENYIISVERLNQYMHIPGEAQEVIEGNRPSSNWPVAGKVELNDLKIRYRPDGPLVLHGITCTFKAGHKIGIVGRTGSGKSTLIGALFRLVEPAGGKIVVDGVDISSIGLHDLRSRFGVIPQDPTLFNGTVRYNLDPLSQHSDHEIWEVLGKCQLREAVQEKEEGLNSPVVEDGSNWSMGQRQLFCLGRVLLRRSRILVLDEATASIDNATDLILQKTIRTEFADCTVITVAHRIPTVMDCTMVLSIRDGKLVEYDDPMCLMKKEGSLFNQLVNEYWSHFQSAESH

SEQ ID NO: 6012 - DNA, 1056 bp, Glycine max
  misc_feature (1)..(1056): Ceres Seq. ID no. 14313014
aaatctgaaccaaaccacaaacacttaatttctcatctcatcatttctaattctacctcttttctcttgcactaacaatccaagatgaataccaacaacgacaccgaaaaaaaccaatcatttccagaagcacaaggagcatcatcatcatcatcttctccacccaatgttgggactgagaattggggaactcacataatgggcacccctgctgttccaagcagccacccagataacaaaaaagcagctttacaaagtggacaacctcaaccagttcaatactaccatgaccaacatcaacatccctacgtgcaacatagcccagttgacaaaccaagcaacagtcccatggagtcaatccttaacatgttcgattcatggagcaaaaaagctgaagccaccgcacacaacgtctggcacaaccttaaaactggtccatcagtgtcttcagctgcactggggaagatgaatctgactgtgaaagcaatatcagagggtggatttgagtccctctacaagcaaacattcacaacctatccaaacgagaagctcaagaagagctttgcttgttacctttcaacatcaacaggtcctgttgcaggaaccctttacctgtccaatattcatgtagcgttttgcagcgatcgccctttgtgtttcactgcaccctctggccaagaaacttggacatactacaaggtaatggtgcctttgggaaaggttggagtggtcaacccagtgaccatgagggaaaacccatcagaaaagtacattcaggttgtaacggtggaagggcatgatttttggttcatgggttttgttaattttgacaaagcagttaagaacatctcagaaggtatctcacattttgtagcgccaggagtggccgtgccatccactagtggttcggaagctaatcgaaagaactttcagtgatttctagtttttggagtactatgatgtatactaattttgtttagaatttgactttgcggtttgtgtcgtatactagaacaatactttgttgtaaaaaaacttaggagtgtatgctataag

SEQ ID NO: 6013 - protein, 283 aa, Glycine max
  misc_feature (1)..(283): Ceres Seq. ID no. 14313015
MNTNNDTEKNQSFPEAQGASSSSSSPPNVGTENWGTHIMGTPAVPSSHPDNKKAALQSGQPQPVQYYHDQHQHPYVQHSPVDKPSNSPMESILNMFDSWSKKAEATAHNVWHNLKTGPSVSSAALGKMNLTVKAISEGGFESLYKQTFTTYPNEKLKKSFACYLSTSTGPVAGTLYLSNIHVAFCSDRPLCFTAPSGQETWTYYKVMVPLGKVGVVNPVTMRENPSEKYIQVVTVEGHDFWFMGFVNFDKAVKNISEGISHFVAPGVAVPSTSGSEANRKNFQ

SEQ ID NO: 6014 - protein, 245 aa, Glycine max
  misc_feature (1)..(245): Ceres Seq. ID no. 14313016
MGTPAVPSSHPDNKKAALQSGQPQPVQYYHDQHQHPYVQHSPVDKPSNSPMESILNMFDSWSKKAEATAHNVWHNLKTGPSVSSAALGKMNLTVKAISEGGFESLYKQTFTTYPNEKLKKSFACYLSTSTGPVAGTLYLSNIHVAFCSDRPLCFTAPSGQETWTYYKVMVPLGKVGVVNPVTMRENPSEKYIQVVTVEGHDFWFMGFVNFDKAVKNISEGISHFVAPGVAVPSTSGSEANRKNFQ

SEQ ID NO: 6015 - protein, 195 aa, Glycine max
  misc_feature (1)..(195): Ceres Seq. ID no. 14313017
MESILNMFDSWSKKAEATAHNVWHNLKTGPSVSSAALGKMNLTVKAISEGGFESLYKQTFTTYPNEKLKKSFACYLSTSTGPVAGTLYLSNIHVAFCSDRPLCFTAPSGQETWTYYKVMVPLGKVGVVNPVTMRENPSEKYIQVVTVEGHDFWFMGFVNFDKAVKNISEGISHFVAPGVAVPSTSGSEANRKNFQ

SEQ ID NO: 6016 - DNA, 1446 bp, Glycine max
  misc_feature (1)..(1446): Ceres Seq. ID no. 14313034
agaagcatttttttgcattgctttcatctgtctggaaagtggcatcacacgttgaccacaggcgaaatccatcaccctcctgtaatggtctctatttcgatcagagtttctatacttccattggccagccttcacaaaattccttgaagaaatcctctgaaaggatggcatttgcaaatttggccccgagcaagaatttagtagcagctgcacttgatgatatcacaactaggcaagtgaatgacaaagtcattctgtctaaccaaggggaagacatgccagtgagtgcagatcagctggatataacactggagtttgcaaaagaggatagcgacgtcctatcttcatttccatctgttataaatttatcaatacatgggactgaaccaacaccatctttaaataagctaacaggagaagatgatcttaaagttggtttgttcattgctgagaatcgtttcagggaggctgcaagagtttgtggagaagacagctctggatgggcatcatctgcattcccaaccaacgatacaaggtctcgacctggatccaggttacaatcctccggaaagcggaagtcttctgtatctgactcttctaagccttctaggtcaaagtccaaaaaagcttcaatggatcgtagtgaaatgcatccctatcaggctgactcaatgttccagtcaatgccatcacttaaagatctgagaattgatctcacttcattaactactgatgaagttggaattgatggtatggatagcattttctcctttgacttgaatggggaaagttcattggaaatggagagtgttggaatgatcccacatgattatgttgctggtttaatctcagaccttgatgatagtacagcattccctgaatatactgacattagataaggatgaaatcaagcctgaaatgcagttttgaaatgacctttggcttaccaagtggcatactcttggcaagttagtcttgatcagttcatgaattgctgttggcttacaattggaaatgcattcttgcagttcgctccttggcatgccatttttggatatacagacaaaacatttcaaaggctagcctgctgaaggtttcgatatgaaaatatagagatgtagaacgctgtcaatgatttaatttcttacttggaattatgtattggcttggtggttcagctcgaattttgacagcgccattcttccatagatcagtgctgattggtaagaagcccttcattttctcttccctctaatggtgcacatggatttgccttggatgttttgcatgctcacgtacatatgtttttagctgaggcatgcctagggtttagttctttaacttgcaacattttgttatgccaacagaacaatttagtcctttagtggctagttcattagtcccattcatttagaacaacacttcacatgatttaacatgagtttc

SEQ ID NO: 6017 - protein, 298 aa, Glycine max
  misc_feature (1)..(298): Ceres Seq. ID no. 14313035
KHFFALLSSVWKVASHVDHRRNPSPSCNGLYFDQSFYTSIGQPSQNSLKKSSERMAFANLAPSKNLVAAALDDITTRQVNDKVILSNQGEDMPVSADQLDITLEFAKEDSDVLSSFPSVINLSIHGTEPTPSLNKLTGEDDLKVGLFIAENRFREAARVCGEDSSGWASSAFPTNDTRSRPGSRLQSSGKRKSSVSDSSKPSRSKSKKASMDRSEMHPYQADSMFQSMPSLKDLRIDLTSLTTDEVGIDGMDSIFSFDLNGESSLEMESVGMIPHDYVAGLISDLDDSTAFPEYTDIR

SEQ ID NO: 6018 - protein, 244 aa, Glycine max
  misc_feature (1)..(244): Ceres Seq. ID no. 14313036
MAFANLAPSKNLVAAALDDITTRQVNDKVILSNQGEDMPVSADQLDITLEFAKEDSDVLSSFPSVINLSIHGTEPTPSLNKLTGEDDLKVGLFIAENRFREAARVCGEDSSGWASSAFPTNDTRSRPGSRLQSSGKRKSSVSDSSKPSRSKSKKASMDRSEMHPYQADSMFQSMPSLKDLRIDLTSLTTDEVGIDGMDSIFSFDLNGESSLEMESVGMIPHDYVAGLISDLDDSTAFPEYTDIR

SEQ ID NO: 6019 - protein, 207 aa, Glycine max
  misc_feature (1)..(207): Ceres Seq. ID no. 14313037
MPVSADQLDITLEFAKEDSDVLSSFPSVINLSIHGTEPTPSLNKLTGEDDLKVGLFIAENRFREAARVCGEDSSGWASSAFPTNDTRSRPGSRLQSSGKRKSSVSDSSKPSRSKSKKASMDRSEMHPYQADSMFQSMPSLKDLRIDLTSLTTDEVGIDGMDSIFSFDLNGESSLEMESVGMIPHDYVAGLISDLDDSTAFPEYTDIR

SEQ ID NO: 6020 - DNA, 1526 bp, Glycine max
  misc_feature (1)..(1526): Ceres Seq. ID no. 14313049
gatggctcaagagatgaatgagcctgcaatgaacatcatagagcagtctcaagttgctcctccacagggctcccttccttcaacaattatccccctcactttcctcgacattccatggctcctcagccgccacgccagacgcatcttcttctacgactttccctttcctaccacccacttcttgcaaacagcacttcctattctgaaacattctctttcccacacactccaacacttcttcccctttgcctccaatctcatcctccctccacacccccacgtcccttacatccgttaccttgagggtgactctctctcattcactgtcgcagagtccagtcctgcagacttcactcttctcacatcagattcccctcgagactcctatgactggcaaccccttgctccggtgctaccctcgcaacgtacttctcacgacggcacgtgcgagttccccctcatggccattcaggtaacgatgataccaaactctggattcagcatctgtgttatcttcgaccacgttgcaggagatgggagaacccttcatcatttcatgaagttttgggcctccgtttgcaaggccaaaggagatttggatttcccttgctctatgcctctacccttatatgataggaacatagtcaaagaccccaaagggctcatgcacgtttacatgcaagacctgagaaattcagcgttgctaactaaacagttccgaggggttttacgtggtgtttacactgacaaggtacgtgcgactttcatattcagtagcgaacaagctcagaaattaaaaaaatgggtctctcttaaatgtaacggttcgcggactttacatatatcaacctttgtggtgacatgttctttgatatgggtgtgtatgctcagatcagaacaaaaggaaaaggaaggtaataatgagccatgcaacatcggattttccgcagactgtcataaccatcctcagttttcattaccttcaaactactttgggaattgtttgatccctctcattacaaggctaaagaggggtgagttggtggaacaaaatgggattgttgcagctgcaaatgccattgaaaagaacattagagatttcaagagtgatgctttgagatgggccgaaacaacgatgtcagatattagaggcttaaggaaatctggtcaatctcttgtagtgattgttggctcgccaaagctgaccgcgtacaacactgactttggttgggggaagcccgtgaagtctgaagtggtgaatcttgattctgtgggaacagtttctctctctgattgtagggaccaagaaggtggaattcaggttggaatggtactcgagaggattcgaatgaacaatttcaccagcatcttggaagaacaccttagtcatgttgccgttcttgactaattaaaccattcacgtattagtcatcaataaactgtatctttcacgctctgcgtttaatttgtttgttatactcttttatggttttaaataaatattaaaagtattgttgttcggtatg

SEQ ID NO: 6021 - protein, 468 aa, Glycine max
  misc_feature (1)..(468): Ceres Seq. ID no. 14313050
MAQEMNEPAMNIIEQSQVAPPQGSLPSTIIPLTFLDIPWLLSRHARRIFFYDFPFPTTHFLQTALPILKHSLSHTLQHFFPFASNLILPPHPHVPYIRYLEGDSLSFTVAESSPADFTLLTSDSPRDSYDWQPLAPVLPSQRTSHDGTCEFPLMAIQVTMIPNSGFSICVIFDHVAGDGRTLHHFMKFWASVCKAKGDLDFPCSMPLPLYDRNIVKDPKGLMHVYMQDLRNSALLTKQFRGVLRGVYTDKVRATFIFSSEQAQKLKKWVSLKCNGSRTLHISTFVVTCSLIWVCMLRSEQKEKEGNNEPCNIGFSADCHNHPQFSLPSNYFGNCLIPLITRLKRGELVEQNGIVAAANAIEKNIRDFKSDALRWAETTMSDIRGLRKSGQSLVVIVGSPKLTAYNTDFGWGKPVKSEVVNLDSVGTVSLSDCRDQEGGIQVGMVLERIRMNNFTSILEEHLSHVAVLD

SEQ ID NO: 6022 - protein, 464 aa, Glycine max
  misc_feature (1)..(464): Ceres Seq. ID no. 14313051
MNEPAMNIIEQSQVAPPQGSLPSTIIPLTFLDIPWLLSRHARRIFFYDFPFPTTHFLQTALPILKHSLSHTLQHFFPFASNLILPPHPHVPYIRYLEGDSLSFTVAESSPADFTLLTSDSPRDSYDWQPLAPVLPSQRTSHDGTCEFPLMAIQVTMIPNSGFSICVIFDHVAGDGRTLHHFMKFWASVCKAKGDLDFPCSMPLPLYDRNIVKDPKGLMHVYMQDLRNSALLTKQFRGVLRGVYTDKVRATFIFSSEQAQKLKKWVSLKCNGSRTLHISTFVVTCSLIWVCMLRSEQKEKEGNNEPCNIGFSADCHNHPQFSLPSNYFGNCLIPLITRLKRGELVEQNGIVAAANAIEKNIRDFKSDALRWAETTMSDIRGLRKSGQSLVVIVGSPKLTAYNTDFGWGKPVKSEVVNLDSVGTVSLSDCRDQEGGIQVGMVLERIRMNNFTSILEEHLSHVAVLD

SEQ ID NO: 6023 - protein, 459 aa, Glycine max
  misc_feature (1)..(459): Ceres Seq. ID no. 14313052
MNIIEQSQVAPPQGSLPSTIIPLTFLDIPWLLSRHARRIFFYDFPFPTTHFLQTALPILKHSLSHTLQHFFPFASNLILPPHPHVPYIRYLEGDSLSFTVAESSPADFTLLTSDSPRDSYDWQPLAPVLPSQRTSHDGTCEFPLMAIQVTMIPNSGFSICVIFDHVAGDGRTLHHFMKFWASVCKAKGDLDFPCSMPLPLYDRNIVKDPKGLMHVYMQDLRNSALLTKQFRGVLRGVYTDKVRATFIFSSEQAQKLKKWVSLKCNGSRTLHISTFVVTCSLIWVCMLRSEQKEKEGNNEPCNIGFSADCHNHPQFSLPSNYFGNCLIPLITRLKRGELVEQNGIVAAANAIEKNIRDFKSDALRWAETTMSDIRGLRKSGQSLVVIVGSPKLTAYNTDFGWGKPVKSEVVNLDSVGTVSLSDCRDQEGGIQVGMVLERIRMNNFTSILEEHLSHVAVLD

SEQ ID NO: 6024 - DNA, 1337 bp, Glycine max
  misc_feature (1)..(1337): Ceres Seq. ID no. 14313064
actcgaactcatcatttctaattgttctgatccatatatatcatactttctttgtaataacttaaagaaccccacaaaaacaccaaccatgtccacaattgcaaagagagatttgagttctaatgaagaagagagtgagctgagaagaggtccttggactcttgaagaagacagcttactcatacactatattgctcgtcatggtgaaggccgttggaatatgttagccaaaagtgcaggattgaagaggactggaaaaagttgcagacttagatggctgaattatttgaaaccagacattaagagagggaacctcactccacaggagcaactcttgatccttgaactccattccaagtggggtaacaggtggtcaaaaattgctcagcatctgccaggaagaacagacaatgagatcaagaactattggagaacaaggatacagaaacaggcacgccaacttaacattgaatctggtagcaagagattcattgatgctgtcaagtgtttttggatgccaagattgctccaaaagatggaacagagcaattctccaagccctcatcactcttccatgacaaacatgatgaatttagggaattccggagaagcttctatgagttcaatgtcaagcagcttcaatattaatccttctatgtcttcttcctcatctcctccacaaagggaatttattatggatgatgcaaatcattttaatactatgtccaaccccatcaatccatccccagattccttccaattttcacagctacttgaaatttctgaacaccccaaaagtccttcaaatgtgtttgagaacaatgtttgcagttatccaatccaggacaattgctatgttgataccaataactatggcatggaaggcataaacatggatcccctttcagcaatggatacttacgacttcccacagtttgattttcagacagcaggaaatggatggatgctagacagcatgggggattctactttatggaacatggaggctatgtgacagtgttggcaagagaaggcatgcatctcaagctcttttcatcgtgggatgttatattatcgaaagaaaaaaaagtttgaagattcttatgctatactgattcttagtgtgagtatacattctcataggtagaaattagtactaagtgtaaggttatttgatatgaacctcttgaaatatagtattttaaatagaaaatgcaggagatggtattagagttcccctgtttcagatttattagaagttggaaaagttgtaatttgaccaagacagtgtatcttggctgttataagtggcattttgaacataattcgttttaaag

SEQ ID NO: 6025 - protein, 337 aa, Glycine max
  misc_feature (1)..(337): Ceres Seq. ID no. 14313065
LELIISNCSDPYISYFLCNNLKNPTKTPTMSTIAKRDLSSNEEESELRRGPWTLEEDSLLIHYIARHGEGRWNMLAKSAGLKRTGKSCRLRWLNYLKPDIKRGNLTPQEQLLILELHSKWGNRWSKIAQHLPGRTDNEIKNYWRTRIQKQARQLNIESGSKRFIDAVKCFWMPRLLQKMEQSNSPSPHHSSMTNMMNLGNSGEASMSSMSSSFNINPSMSSSSSPPQREFIMDDANHFNTMSNPINPSPDSFQFSQLLEISEHPKSPSNVFENNVCSYPIQDNCYVDTNNYGMEGINMDPLSAMDTYDFPQFDFQTAGNGWMLDSMGDSTLWNMEAM

SEQ ID NO: 6026 - protein, 308 aa, Glycine max
  misc_feature (1)..(308): Ceres Seq. ID no. 14313066
MSTIAKRDLSSNEEESELRRGPWTLEEDSLLIHYIARHGEGRWNMLAKSAGLKRTGKSCRLRWLNYLKPDIKRGNLTPQEQLLILELHSKWGNRWSKIAQHLPGRTDNEIKNYWRTRIQKQARQLNIESGSKRFIDAVKCFWMPRLLQKMEQSNSPSPHHSSMTNMMNLGNSGEASMSSMSSSFNINPSMSSSSSPPQREFIMDDANHFNTMSNPINPSPDSFQFSQLLEISEHPKSPSNVFENNVCSYPIQDNCYVDTNNYGMEGINMDPLSAMDTYDFPQFDFQTAGNGWMLDSMGDSTLWNMEAM

SEQ ID NO: 6027 - protein, 264 aa, Glycine max
  misc_feature (1)..(264): Ceres Seq. ID no. 14313067
MLAKSAGLKRTGKSCRLRWLNYLKPDIKRGNLTPQEQLLILELHSKWGNRWSKIAQHLPGRTDNEIKNYWRTRIQKQARQLNIESGSKRFIDAVKCFWMPRLLQKMEQSNSPSPHHSSMTNMMNLGNSGEASMSSMSSSFNINPSMSSSSSPPQREFIMDDANHFNTMSNPINPSPDSFQFSQLLEISEHPKSPSNVFENNVCSYPIQDNCYVDTNNYGMEGINMDPLSAMDTYDFPQFDFQTAGNGWMLDSMGDSTLWNMEAM

SEQ ID NO: 6028 - DNA, 1394 bp, Glycine max
  misc_feature (1)..(1394): Ceres Seq. ID no. 14313107
atattgttttgattgttcattcaagttcaaacttgaatttgattcatctgatctaaccaatgaaatcaaaatcgggattcgattgcagttgcaggtctctctatttggtgcttattacttattattaaggtttctttcttctgttgaaatggtctttagtaattatatttctgccaatgaatctcattgtttaattctgattatacctttcccgaaatgcaattagcgtcaaatggtgacaaggaagaatgttcagaaagcgaacccatcttgaatcatcaccatcttcatttgccaccacccggagaatcctccttttcctgtgaaattattcctatttctgctgctgcttccggcgatgatgatttacaaaacgttcgggttgatgagacttgtcatctcgtaaatgcagatcagccacaatgccgaatatgcctcgatattgtaggagaagatttaattgctccatgccattgcaaaggtacgcaaaagtacgtccacagatcatgtctcgataattggagatccaccaaggaggggttcgcgttttctcactgtacagagtgcagagctgtcttcatattacgtgcaaatgtcccaccagatcggtggtggttgagattaaaatttcagttccttgttgctagagatcatgcattcattttcataattgttcagctggttgttgctttcttgggagtgcttgtgtacaaattttatggagatgaactgagggaaatgtttggttatgaagaacatccatatggattttatacaatggctgttctagccattgttttggttggtttgctctatggcttcttcatagcgataatatgtggtcaaagaatcaatgaacgccactaccatgttcttgccaaacaagaattgactaaggaatatgtggttgaagatcgagaacatgtaaagaatgtgcctgaacttgaccccagccatgtgacagagctaaggatgttgggcctttactagttggatgcatcttctgcatagtcacattgaatttgttgtatttgcggcttgtctccatggtccccttcacatttgtagatcacattggtctgttcagagtgatgccccattaatatggctgtttgggcaccaactggcagtgcacagccacatgggtgttgtttattgtactctattttgattctttatttttaatttatatttttctggcgaaacttgtgaaagaaacatgcagttcacctagaaaattgctcttgtgaatcaatgttgtttggtggagtataaaggaaaaaggtgcagatcctatgaacatgagatattttgtatttgtaacttgtataagtcccttgatgtaacttattttacaatattttttttcatttctatacaaaatattataatcg

SEQ ID NO: 6029 - protein, 257 aa, Glycine max
  misc_feature (1)..(257): Ceres Seq. ID no. 14313108
MQLASNGDKEECSESEPILNHHHLHLPPPGESSFSCEIIPISAAASGDDDLQNVRVDETCHLVNADQPQCRICLDIVGEDLIAPCHCKGTQKYVHRSCLDNWRSTKEGFAFSHCTECRAVFILRANVPPDRWWLRLKFQFLVARDHAFIFIIVQLVVAFLGVLVYKFYGDELREMFGYEEHPYGFYTMAVLAIVLVGLLYGFFIAIICGQRINERHYHVLAKQELTKEYVVEDREHVKNVPELDPSHVTELRMLGLY

SEQ ID NO: 6030 - DNA, 1596 bp, Glycine max
  misc_feature (1)..(1596): Ceres Seq. ID no. 14313147
tttttttgtcccaaaaataataaactgttaattttttttccacaaatggcacccagttttgattgcgtttcgagccttctctgtgccgaagacaacagtatttttgacgaaaacgattatgggggttcggtggaggttttggaggacgcgtggcaggatcctagatatcgtcgaaaccttagtcaaagtgagaacttggatgtcccaaatgggttttttccattgcagagtgatgagtgcttgagactgatggtggagaaggaatgggatcacttgcctaatggtgattatgtgaataggctgaggagtggggatttggattttggggccagaaaagaggccattgattggattgaaaaggttcaacagcactttggttttggacccctctgtgcatatctatccataaactacttggaccgtttcctttctgcatatgaattaccaaagcacagagcttggacaatgcaattgttggctgtggggtgcttatctctggcagccaaaatggaagagactgatgtccctttctctcttgatttgcaggtgggtgaatctaagtatatatttgaggctaaaacaatacagagaatggagcttctggtgctgagcacattgagatggagaatgcaggcaattaccccattttccttcattgaccatttcctttacaagatcaatgatgatcaaagtccaattggagcttcaattttgcaatccatccagcttatactgagcactgtaagaggaattgacttcttagaattcagaccctcagagattgcagcagcagtggcaatatctgtggtgggggagggccaaacagtgcacactgagaaagcaatttctgttctgattcagcttgtggaaaaggagagggtcttgaagtgtgttaaaatgatccaagagctggcatcaaatagtggtggttctgccaagggtgctagtgcttctgtttctgtccctagcgtgcccgaaagcccactaggggtgttggtcactgcatgcttcagctacaaaagtgatgacacaaatgctgcttcatatgcaaattcttcacataacattagtccagatgctaaaaggaggaagctaaacaaaacctttggataatagtcattgtggcctgtgattttcaacgtcattcctaggatgcctttacttaaaaaaataagatgttatgtgctttgaaggtgccccctcaagggaatacccaatgaaggaagtaggaatgtagatagggaaagtgaaaaaataaaaaaccatgcataaaagggtgccaaaaagataaaggtggatcgtgactagtgggagatttttaagggatggaatcaacaaatttcatgctccaagccggatgtgaccactcaacaccagctgttaaatattttataggtctttttaacagctataaaagaggtagtgaaagaggagggaataagaaagaaggactagtgtatttgtatgtgtaagtacattttgtctttttacttttaaatgagggagttaaatagaaacccataaggcagaaaaaaaaaaaaaacaaaacaaaataagatgcagagctactagtattgagaaatatttgcggcattc

SEQ ID NO: 6031 - protein, 370 aa, Glycine max
  misc_feature (1)..(370): Ceres Seq. ID no. 14313148
FFCPKNNKLLIFFPQMAPSFDCVSSLLCAEDNSIFDENDYGGSVEVLEDAWQDPRYRRNLSQSENLDVPNGFFPLQSDECLRLMVEKEWDHLPNGDYVNRLRSGDLDFGARKEAIDWIEKVQQHFGFGPLCAYLSINYLDRFLSAYELPKHRAWTMQLLAVGCLSLAAKMEETDVPFSLDLQVGESKYIFEAKTIQRMELLVLSTLRWRMQAITPFSFIDHFLYKINDDQSPIGASILQSIQLILSTVRGIDFLEFRPSEIAAAVAISVVGEGQTVHTEKAISVLIQLVEKERVLKCVKMIQELASNSGGSAKGASASVSVPSVPESPLGVLVTACFSYKSDDTNAASYANSSHNISPDAKRRKLNKTFG

SEQ ID NO: 6032 - protein, 355 aa, Glycine max
  misc_feature (1)..(355): Ceres Seq. ID no. 14313149
MAPSFDCVSSLLCAEDNSIFDENDYGGSVEVLEDAWQDPRYRRNLSQSENLDVPNGFFPLQSDECLRLMVEKEWDHLPNGDYVNRLRSGDLDFGARKEAIDWIEKVQQHFGFGPLCAYLSINYLDRFLSAYELPKHRAWTMQLLAVGCLSLAAKMEETDVPFSLDLQVGESKYIFEAKTIQRMELLVLSTLRWRMQAITPFSFIDHFLYKINDDQSPIGASILQSIQLILSTVRGIDFLEFRPSEIAAAVAISVVGEGQTVHTEKAISVLIQLVEKERVLKCVKMIQELASNSGGSAKGASASVSVPSVPESPLGVLVTACFSYKSDDTNAASYANSSHNISPDAKRRKLNKTFG

SEQ ID NO: 6033 - protein, 287 aa, Glycine max
  misc_feature (1)..(287): Ceres Seq. ID no. 14313150
MVEKEWDHLPNGDYVNRLRSGDLDFGARKEAIDWIEKVQQHFGFGPLCAYLSINYLDRFLSAYELPKHRAWTMQLLAVGCLSLAAKMEETDVPFSLDLQVGESKYIFEAKTIQRMELLVLSTLRWRMQAITPFSFIDHFLYKINDDQSPIGASILQSIQLILSTVRGIDFLEFRPSEIAAAVAISVVGEGQTVHTEKAISVLIQLVEKERVLKCVKMIQELASNSGGSAKGASASVSVPSVPESPLGVLVTACFSYKSDDTNAASYANSSHNISPDAKRRKLNKTFG

SEQ ID NO: 6034 - DNA, 1776 bp, Glycine max
  misc_feature (1)..(1776): Ceres Seq. ID no. 14313155
agaaaaaaaaaaagaaggaaaaaggggctagacggcatgttggactgatttgaccttgaagaaggggtcattcatatgatcccgtgtttgtttgggtctttcttcattcttcaaccaacccattccttcccccacgcgccattctccggccaccgtcgacgacggaacgccgttcaccgcttcatattctcccaaaggcttcggcgaccgcccgtgatggataaagtcttcaacaagctccgcaatttggacgcttacccaaaagtcaatgaagatttttacaaccgcacgctcgccggcggcgttgtcaccgtcgtttccgccgccgtcatgctctttctcttcttttccgagctaagtttatacctctacacagttacggagagtaagcttttggtggatacttcaaggggagataccttgcacatcaattttgatgtcacttttcctgctgttcgatgttcaatactcagcttagatgcaatggatattagtggcgagcagcatcttgacatacgacataatatagtgaagaaaagaattgatgctaatggtaatgtgatagaagagaggaaggatggaattggtgcaccaaagattgagagacccttacagaaacatggtggcagacttggacatgatgaaaagtattgtggttcatgttttggtgcagaagagtcagatgaacactgttgtaattcttgtgaagaagtgcgtgaagcatataggaaaaagggctgggcaatgacaaatatggatttgattgatcagtgtcaaagagagggttatgtgcaaagggtaaaggatgaagaaggtgaaggatgcaatcttcaaggatctcttgaagttaataaagtagcaggaaattttcattttgcaactgggaaaagctttcttcagtctgctatatttctggctgatctgcttgctctacaggataatcattataatattagccatcggatcaacaaattaagttttggtcaccatttccctggattggtaaatcctcttgacggggtaaagtgggtgcaaggacctgctcatggcatgtaccagtatttcataaaggtggtccctacaatatacacagacattagaggccgtgttatccattcaaatcagtattctgtgactgagcatttcaagagttcagagctgggtgttgcagttcctggagttttcttcttttatgacatatctccaatcaaggtcaactttaaagaggaacatattccatttttacatttcctgaccaatatttgtgcaattattggaggtgtatttactgttgcgggaataatagattcatcgatatattatggtcagagaacaatcaagaggaagatggagcttggaaaatttacatgatgtggtcaaattctgcatgagtgctctaatatcctaattgatttgacgtatttggttggctggtgcattgagtatcgtttataatgtggtagcatatgcacataatgccaagggtaagcagagccgtaggttcggttgatgcatgaagtgtattttttggatcatgatttttcctttaatgtgtagcaatttctattaagttgctactttggtgggtttttaatatatggatgaagatgaggaatgcaaagagttgttgggaactttttagatatttttgctgcataatacatgacatggttgattatgcataacatacagttcttgtgttgctgttccccgtgctgtaatctagccaatgttttcattgaacttgaagaatttgaagctgctaagttaggattt

SEQ ID NO: 6035 - protein, 431 aa, Glycine max
  misc_feature (1)..(431): Ceres Seq. ID no. 14313156
MIPCLFGSFFILQPTHSFPHAPFSGHRRRRNAVHRFIFSQRLRRPPVMDKVFNKLRNLDAYPKVNEDFYNRTLAGGVVTVVSAAVMLFLFFSELSLYLYTVTESKLLVDTSRGDTLHINFDVTFPAVRCSILSLDAMDISGEQHLDIRHNIVKKRIDANGNVIEERKDGIGAPKIERPLQKHGGRLGHDEKYCGSCFGAEESDEHCCNSCEEVREAYRKKGWAMTNMDLIDQCQREGYVQRVKDEEGEGCNLQGSLEVNKVAGNFHFATGKSFLQSAIFLADLLALQDNHYNISHRINKLSFGHHFPGLVNPLDGVKWVQGPAHGMYQYFIKVVPTIYTDIRGRVIHSNQYSVTEHFKSSELGVAVPGVFFFYDISPIKVNFKEEHIPFLHFLTNICAIIGGVFTVAGIIDSSIYYGQRTIKRKMELGKFT

SEQ ID NO: 6036 - protein, 384 aa, Glycine max
  misc_feature (1)..(384): Ceres Seq. ID no. 14313157
MDKVFNKLRNLDAYPKVNEDFYNRTLAGGVVTVVSAAVMLFLFFSELSLYLYTVTESKLLVDTSRGDTLHINFDVTFPAVRCSILSLDAMDISGEQHLDIRHNIVKKRIDANGNVIEERKDGIGAPKIERPLQKHGGRLGHDEKYCGSCFGAEESDEHCCNSCEEVREAYRKKGWAMTNMDLIDQCQREGYVQRVKDEEGEGCNLQGSLEVNKVAGNFHFATGKSFLQSAIFLADLLALQDNHYNISHRINKLSFGHHFPGLVNPLDGVKWVQGPAHGMYQYFIKVVPTIYTDIRGRVIHSNQYSVTEHFKSSELGVAVPGVFFFYDISPIKVNFKEEHIPFLHFLTNICAIIGGVFTVAGIIDSSIYYGQRTIKRKMELGKFT

SEQ ID NO: 6037 - protein, 346 aa, Glycine max
  misc_feature (1)..(346): Ceres Seq. ID no. 14313158
MLFLFFSELSLYLYTVTESKLLVDTSRGDTLHINFDVTFPAVRCSILSLDAMDISGEQHLDIRHNIVKKRIDANGNVIEERKDGIGAPKIERPLQKHGGRLGHDEKYCGSCFGAEESDEHCCNSCEEVREAYRKKGWAMTNMDLIDQCQREGYVQRVKDEEGEGCNLQGSLEVNKVAGNFHFATGKSFLQSAIFLADLLALQDNHYNISHRINKLSFGHHFPGLVNPLDGVKWVQGPAHGMYQYFIKVVPTIYTDIRGRVIHSNQYSVTEHFKSSELGVAVPGVFFFYDISPIKVNFKEEHIPFLHFLTNICAIIGGVFTVAGIIDSSIYYGQRTIKRKMELGKFT

SEQ ID NO: 6038 - DNA, 1982 bp, Glycine max
  misc_feature (1)..(1982): Ceres Seq. ID no. 14313167
atgatttctactctctttactctttagtttttttgttttgtatatattaaggcggcacagcacaggcctaagtgggtgtaagtgagtcttgggagtgagtcactcttcctgcagaacccagatctgtagacaatatgggaagcactggtttgctacatttgatatgccttgtcattgctttagtaagtgtgtcgcttgtgcaagcagaagatgcgtataagtatttcacatggacggtgacttatgggactctttatcccttggctagtccccagcaggttattcttatcaatggtcagtttcctgggcctagacttgacttggtaactaatgaaaatgtaattctcaaccttatcaacaagctggacgaaccatttttactcacttggaacggtattaaacaaaggaagaattcatggcaagatggagttttgggaaccaactgccccattcctccaaactcaaattacacatacaagtttcaggccaaggatcagattggcacatatacatactttccatcaactcaactgcataaagcagctggagggtttggagcactcaatgtttatcacagatctgtcatcccaatcccttatccaaaccctgatggagattttactctactcgttggtgattggtacaagaccaaccacaagacactaaggcaaactttagattctggaaaatctcttgcatttcctgatggcctccttattaatggtcaggctcattctaccttcactggtaaccaggggaaaacctatatgtttaggatctcaaatgtaggcttgtcaacctcaattaacttcagaattcagggtcataccctaaaattagttgaggttgaaggatcacacactgttcagaacctatacgattcacttgatgtgcatgttgggcaatcagttgcagtgttagtaaccttgaatcagcctccaaaggactactacattgttgcctcaacaagatttaccgagacacctctcactacaactgcagtactacactatgcaaactctttttcctctgcattaggacccgtgcctgctccccccgttgataaatatgactttgattggtccatgaagcaagctagaacctacagatggaatctgacagcaaatgctgctaggcctaatccacaagggtcattccattatgggaagattactcctacaaaagtaattaagttggccaattcagcacctttgatcaatggaaagctccgttatgctgttaacagtgtctcatatgttaaccctgacacccctctcaagcttgctgattacttcaacattcccggagtcttcagtgtgaatttactccaaaactctccctcaaacggtccaggatacataggcacctcagtgttgcaaacttctctccatgattttattgaggttattttccagaacaacgaaaacaccatgcaatcttggcatcttgatggttatgatttttgggtcattggtcatggtttcggccagtggacagatgctagcagaaaaacatataatctagtggatgccctgactagacacactgcacaggtgtatccaaaatcctggactactatattggtgtctttggataaccaaggcatgtggaacttgaggtctgcaatatgggaaagacaatatcttgggcaacagttctatcttagagtgtggaatgcacagaaaagccttgctaatgaatatgacattcccaataatgttctgctttgtggcaaagctgttggacatcacccttagtatatatatcggtgtattttctggtcatgagggcttgactacacaactagaattatttttcctttttcttaagaaagaaaaggacaatgtgggagaagtcaatttctccaaatttcggatagacttgcgtatatttgagaaaaaagtcttgtattaatttttcgttgctcgtttatgtattaacaattgagttcatacttaatttatttatagctgtaagttgtg

SEQ ID NO: 6039 - protein, 540 aa, Glycine max
  misc_feature (1)..(540): Ceres Seq. ID no. 14313168
MGSTGLLHLICLVIALVSVSLVQAEDAYKYFTWTVTYGTLYPLASPQQVILINGQFPGPRLDLVTNENVILNLINKLDEPFLLTWNGIKQRKNSWQDGVLGTNCPIPPNSNYTYKFQAKDQIGTYTYFPSTQLHKAAGGFGALNVYHRSVIPIPYPNPDGDFTLLVGDWYKTNHKTLRQTLDSGKSLAFPDGLLINGQAHSTFTGNQGKTYMFRISNVGLSTSINFRIQGHTLKLVEVEGSHTVQNLYDSLDVHVGQSVAVLVTLNQPPKDYYIVASTRFTETPLTTTAVLHYANSFSSALGPVPAPPVDKYDFDWSMKQARTYRWNLTANAARPNPQGSFHYGKITPTKVIKLANSAPLINGKLRYAVNSVSYVNPDTPLKLADYFNIPGVFSVNLLQNSPSNGPGYIGTSVLQTSLHDFIEVIFQNNENTMQSWHLDGYDFWVIGHGFGQWTDASRKTYNLVDALTRHTAQVYPKSWTTILVSLDNQGMWNLRSAIWERQYLGQQFYLRVWNAQKSLANEYDIPNNVLLCGKAVGHHP

SEQ ID NO: 6040 - protein, 329 aa, Glycine max
  misc_feature (1)..(329): Ceres Seq. ID no. 14313169
MFRISNVGLSTSINFRIQGHTLKLVEVEGSHTVQNLYDSLDVHVGQSVAVLVTLNQPPKDYYIVASTRFTETPLTTTAVLHYANSFSSALGPVPAPPVDKYDFDWSMKQARTYRWNLTANAARPNPQGSFHYGKITPTKVIKLANSAPLINGKLRYAVNSVSYVNPDTPLKLADYFNIPGVFSVNLLQNSPSNGPGYIGTSVLQTSLHDFIEVIFQNNENTMQSWHLDGYDFWVIGHGFGQWTDASRKTYNLVDALTRHTAQVYPKSWTTILVSLDNQGMWNLRSAIWERQYLGQQFYLRVWNAQKSLANEYDIPNNVLLCGKAVGHHP

SEQ ID NO: 6041 - DNA, 999 bp, Glycine max
  misc_feature (1)..(999): Ceres Seq. ID no. 14313302
accatgataggaactccaataagcaaaagccaattgatacgtgcatatcacaaaaactactcttacacaccaaaaaaatcctctatcaccaaactcacctataccctcaaactcaaggccctatagtccaagcaagtgagtgagtgttacaacttacacagcatggaatatagtcaatatactacttattcagcagaaggtgttgaggcagaaacttacacaagtagctgcaccaccccatcaagatcaaagaagagaaacaacaacaacacaagaaggttcagtgatgaacaaatcaaatcattggagaccatgtttgagtcagagacaaggcttgagcctagaaagaagttgcagcttgcaagagagcttggattgcagccaaggcaagttgctatatggtttcagaacaagagggctagatggaagtcaaagcaacttgagagagactatggcatactccaatccaattataacactttggcttcacgttttgaagctctgaagaaggaaaaacaaacattactaattcagttgcagaagctgaatcatctaatgcagaagccaatggagccaagtcagagatgcacacaagttgaagcagcaaacagcatggacagtgaatcagaaaatggaggcaccatgaaatgtaaagctgagggaaagccaagcccatcatcattggaaagatcagaacatgtacttggtgttctgtctgatgatgacactagcataaaggtggaagactttaacctagaagatgaacatggccttctgaattttgttgagcatgctgatggttccttgacttcaccagaagattggagtgcttttgaatccaatgatctatttggccaatcaaccactgatgattaccaatggtgggacttctggtcctgaatgaaacagaataaccaaaattttgtggaggaaatatatatatatatatatatatatatatatatatatatatatgatgaatgcttcatgtttggttcc

SEQ ID NO: 6042 - protein, 245 aa, Glycine max
  misc_feature (1)..(245): Ceres Seq. ID no. 14313303
MEYSQYTTYSAEGVEAETYTSSCTTPSRSKKRNNNNTRRFSDEQIKSLETMFESETRLEPRKKLQLARELGLQPRQVAIWFQNKRARWKSKQLERDYGILQSNYNTLASRFEALKKEKQTLLIQLQKLNHLMQKPMEPSQRCTQVEAANSMDSESENGGTMKCKAEGKPSPSSLERSEHVLGVLSDDDTSIKVEDFNLEDEHGLLNFVEHADGSLTSPEDWSAFESNDLFGQSTTDDYQWWDFWS

SEQ ID NO: 6043 - protein, 195 aa, Glycine max
  misc_feature (1)..(195): Ceres Seq. ID no. 14313304
MFESETRLEPRKKLQLARELGLQPRQVAIWFQNKRARWKSKQLERDYGILQSNYNTLASRFEALKKEKQTLLIQLQKLNHLMQKPMEPSQRCTQVEAANSMDSESENGGTMKCKAEGKPSPSSLERSEHVLGVLSDDDTSIKVEDFNLEDEHGLLNFVEHADGSLTSPEDWSAFESNDLFGQSTTDDYQWWDFWS

SEQ ID NO: 6044 - DNA, 1231 bp, Glycine max
  misc_feature (1)..(1231): Ceres Seq. ID no. 14313333
attctcttctttgattcgaataagttctccggccccattcctccctcactctccgctatctccggcctccgcttcctcatgactctttatgctctccaatgaattgagatgagggatatgagacaataggttcccaagttttcgtggttctccgaatcatagagatggaacgcgtctctgaatttcctcacaaaaaggatacagcagtaaagttttcttcagcttggtggttgtgcaacatgatgatgaagaagcatccaacaggcaaggttttttttttttttgctttgctgttatgcatatttgtttccttttggtagtaacattgatcttgcctattgaatgttcttttgctattgaatgctcttttctttgttattttgttggttttgttgctccaagttaaagtagttttcgctgctccatggttttgcaacgtcacccgtgaggaagtatccagacattgactcatattcctgcacatcagcaaagggccgcactcttccattccacccttcccctgcaacgtaaatgccacaatcatttggactccgttagtttctctcaattcccttcgttttatctttttgtcatttgattcaacaacttctcttgatttatatcaatttttgtctcttttaattatgggtctcaccaccccaattccgtgtttctttctaattttgtatccgttttttacaatctgggaactttttgtgtaacccaagcagtgaaaagtgttgtttacatgttttgttgctgagaacggtttaattatagagaaggagcaatgatacatcgagaaggtttagaagggtgcaagcgaaacacaaagcaatgaacaatatcaatgattatgcagaatccctctttcagttgtgctcagaaaatggtgcggggccagaaagagatgaacttgattttgagtttttgggaaacaaaacaggagagccttatttgattcagactaatgtatacaagaatgggactggtgggcgtaagatgaggcacatgctttggtttgaccccacagaggactaccacacctattccattcacgagggaagaattagaatgatatcatgttaaaaaggcatttgcttagttgattctaactaactaactgttatgtaattttaattttttgagttatttgctgctagctaggggacttattaggaaataattgaacatcaacatgtcatttgaaccttatgatcagaattgaaat

SEQ ID NO: 6045 - protein, 83 aa, Glycine max
  misc_feature (1)..(83): Ceres Seq. ID no. 14313334
MNNINDYAESLFQLCSENGAGPERDELDFEFLGNKTGEPYLIQTNVYKNGTGGRKMRHMLWFDPTEDYHTYSIHEGRIRMISC

SEQ ID NO: 6046 - protein, 51 aa, Glycine max
  misc_feature (1)..(51): Ceres Seq. ID no. 14313335
MERVSEFPHKKDTAVKFSSAWWLCNMMMKKHPTGKVFFFFALLLCIFVSFW

SEQ ID NO: 6047 - DNA, 1141 bp, Glycine max
  misc_feature (1)..(1141): Ceres Seq. ID no. 14313397
gagccatacaaaaggtctcaaaaactgcggttcctgagtagagaggtttgtttgttgtcgtttgagaggattcgatcaagcgaatcttgttttcgaagctcaaattgaattgaacagtaaattcctggaagggaacgaagcagaaaatgggagacacaaaccacgcgtccaccgtcgatgacgatttgcttctcaaaaacttcttcgccgaagttagcgaagttgaaagagacaacgaagtgcttaggattctctcttgttttaagttgaatccatttgagtatctaaacctaccatttgattcatcaattgatgatgtgaaaaagcagtaccgcaagttatcattaatggttcacccggataaatgtaagcatccacaagcaaaggaggcttttggagcattagcgaaagctcaacagttactaatggatcaaaatgaaagagattatattcttagccaagttaattcagctaaagaagaacttagagcaaagaggaagaagcagctgaagaaagatacagcttcaaaaatgaaatctttggttgaagagggaaaatatgacaaacagtatgaacaatcagaggaattccggcaggagctcaaagtcaaagttcgtgaactattaacagaacaagaatggaggagaagaaaaatgcaaatgaggatatctgaggaggaaggcagattaaaaagggatgaagaggaacagaaagaaatgtggaaaagaaagcgtgaacatgaggaggaatgggaaggaacacgagaaaagagggtatccagttggagagattttatgaagggtggaaagaagaataagaaaggagaaattcggccaccgaagctgaagacagaagatcccaacaaatcctacgttcaaaggcctgtaaaaagaggttaggggttctgccgttgagtttgaagatcacagcaatcaattgaaaccaggagttcgagagaacttatttatgcaggccatcttttgtgtatcagttagatacttttaaacagatttattactggagtcatttgaggcatgttaatggtgtagacctccgacgaatgactctatccactttgcatcccaatactgataaataggaattactggtcatccgcagcgagccattttagtgttaggtt

SEQ ID NO: 6048 - protein, 250 aa, Glycine max
  misc_feature (1)..(250): Ceres Seq. ID no. 14313398
MGDTNHASTVDDDLLLKNFFAEVSEVERDNEVLRILSCFKLNPFEYLNLPFDSSIDDVKKQYRKLSLMVHPDKCKHPQAKEAFGALAKAQQLLMDQNERDYILSQVNSAKEELRAKRKKQLKKDTASKMKSLVEEGKYDKQYEQSEEFRQELKVKVRELLTEQEWRRRKMQMRISEEEGRLKRDEEEQKEMWKRKREHEEEWEGTREKRVSSWRDFMKGGKKNKKGEIRPPKLKTEDPNKSYVQRPVKRG

SEQ ID NO: 6049 - protein, 183 aa, Glycine max
  misc_feature (1)..(183): Ceres Seq. ID no. 14313399
MVHPDKCKHPQAKEAFGALAKAQQLLMDQNERDYILSQVNSAKEELRAKRKKQLKKDTASKMKSLVEEGKYDKQYEQSEEFRQELKVKVRELLTEQEWRRRKMQMRISEEEGRLKRDEEEQKEMWKRKREHEEEWEGTREKRVSSWRDFMKGGKKNKKGEIRPPKLKTEDPNKSYVQRPVKRG

SEQ ID NO: 6050 - protein, 157 aa, Glycine max
  misc_feature (1)..(157): Ceres Seq. ID no. 14313400
MDQNERDYILSQVNSAKEELRAKRKKQLKKDTASKMKSLVEEGKYDKQYEQSEEFRQELKVKVRELLTEQEWRRRKMQMRISEEEGRLKRDEEEQKEMWKRKREHEEEWEGTREKRVSSWRDFMKGGKKNKKGEIRPPKLKTEDPNKSYVQRPVKRG

SEQ ID NO: 6051 - DNA, 1392 bp, Glycine max
  misc_feature (1)..(1392): Ceres Seq. ID no. 14313413
acggtctctccatacaccgccaccacatagaaccactgatcgacacgtttgcgccttcattaagctgaggaatagttgtaacttagggacaatgacgtcttcagtggttgaaggtggacgcgacgaggggaaacacgaaccctcggatttcatcacggaaaccatgaatctgacgtctccaaacctttcacttcttcccagtgaaactgaaacattcttgagcgcagcaatttccctcaaggacaaggtggtggaggagacttggaaccggagagatcaagtggttgatccgacggtgtacacgggtctgttgggcaccgccttcacttgcttgcggtcgtaccaggttaccggttgccggaacgacttgatattatgcagcgatatcattgacacgtgtgtcaccgctgcacgtgcctccctcaggcacgtgacttttttgtgtggtagaggaggcgtttatgcgcttggtgctgtcgttgccaattacatggaggaccttccaaagcgtgacctgtttttgggtctattctttgaggtggcaaaagagagagccctaccagttggaccagaggaaggtggttttggaatgtcatatgatcttctgtatggacgagctggattcttatggggtgcattgtttgtgaacaagcacctaggagatgatgcagtgcccaaagacattttgatgcctattattgatgcagtgttggcgggtggtagagcaggagcatctgatgttgaagactgtccattgatgtatagatggcatggaactaggtacttgggtgcagcaaatggccttgctggtatccttcatgtgctgctacattttccacttcctagagaggatgctgaggatgtcaagggaactttgaggtacctcatgagtaagcgtttccctcacagtggaaactacccctccagtgaagggaatccgagggataagttagtgcaatggggtcatggtgcaactggcatggccatcacattgtctaaagcagcacaggtatttccaaatgacagagaactacgagatgctgcaatagaagcaggagaagttgtatggaagagtggattggtgaagaaggtgggacttgcagatggggtatctggaaatgcctatgccttcctttccctctacagactcactaaagagagcatatacgaagagagagcaaagtcattcgcttccttcatgtatgataatgcaaaatctctggcttctgccaatggctattcactttcccaaggacttgctgggacagtatgcctctggtttgatctacttgcacccgacagctctaggttcccaggttatgaactatagatggttccagtagagatggaaaatgttaggtagacaccaatcataagtgatatgatcttgac

SEQ ID NO: 6052 - protein, 442 aa, Glycine max
  misc_feature (1)..(442): Ceres Seq. ID no. 14313414
RSLHTPPPHRTTDRHVCAFIKLRNSCNLGTMTSSVVEGGRDEGKHEPSDFITETMNLTSPNLSLLPSETETFLSAAISLKDKVVEETWNRRDQVVDPTVYTGLLGTAFTCLRSYQVTGCRNDLILCSDIIDTCVTAARASLRHVTFLCGRGGVYALGAVVANYMEDLPKRDLFLGLFFEVAKERALPVGPEEGGFGMSYDLLYGRAGFLWGALFVNKHLGDDAVPKDILMPIIDAVLAGGRAGASDVEDCPLMYRWHGTRYLGAANGLAGILHVLLHFPLPREDAEDVKGTLRYLMSKRFPHSGNYPSSEGNPRDKLVQWGHGATGMAITLSKAAQVFPNDRELRDAAIEAGEVVWKSGLVKKVGLADGVSGNAYAFLSLYRLTKESIYEERAKSFASFMYDNAKSLASANGYSLSQGLAGTVCLWFDLLAPDSSRFPGYEL

SEQ ID NO: 6053 - protein, 412 aa, Glycine max
  misc_feature (1)..(412): Ceres Seq. ID no. 14313415
MTSSVVEGGRDEGKHEPSDFITETMNLTSPNLSLLPSETETFLSAAISLKDKVVEETWNRRDQVVDPTVYTGLLGTAFTCLRSYQVTGCRNDLILCSDIIDTCVTAARASLRHVTFLCGRGGVYALGAVVANYMEDLPKRDLFLGLFFEVAKERALPVGPEEGGFGMSYDLLYGRAGFLWGALFVNKHLGDDAVPKDILMPIIDAVLAGGRAGASDVEDCPLMYRWHGTRYLGAANGLAGILHVLLHFPLPREDAEDVKGTLRYLMSKRFPHSGNYPSSEGNPRDKLVQWGHGATGMAITLSKAAQVFPNDRELRDAAIEAGEVVWKSGLVKKVGLADGVSGNAYAFLSLYRLTKESIYEERAKSFASFMYDNAKSLASANGYSLSQGLAGTVCLWFDLLAPDSSRFPGYEL

SEQ ID NO: 6054 - protein, 388 aa, Glycine max
  misc_feature (1)..(388): Ceres Seq. ID no. 14313416
MNLTSPNLSLLPSETETFLSAAISLKDKVVEETWNRRDQVVDPTVYTGLLGTAFTCLRSYQVTGCRNDLILCSDIIDTCVTAARASLRHVTFLCGRGGVYALGAVVANYMEDLPKRDLFLGLFFEVAKERALPVGPEEGGFGMSYDLLYGRAGFLWGALFVNKHLGDDAVPKDILMPIIDAVLAGGRAGASDVEDCPLMYRWHGTRYLGAANGLAGILHVLLHFPLPREDAEDVKGTLRYLMSKRFPHSGNYPSSEGNPRDKLVQWGHGATGMAITLSKAAQVFPNDRELRDAAIEAGEVVWKSGLVKKVGLADGVSGNAYAFLSLYRLTKESIYEERAKSFASFMYDNAKSLASANGYSLSQGLAGTVCLWFDLLAPDSSRFPGYEL

SEQ ID NO: 6055 - DNA, 1275 bp, Glycine max
  misc_feature (1)..(1275): Ceres Seq. ID no. 14313575
aaacttatcctaacaggcaatcgaacaactgcttaacatatattacgaatgacaaacttgctcaaagtaattgttagctatgtactacgattgtgtagccttaataactacatcacttgaaatatcattgtttttcctcaaagcccacctagcgggggcaagactttgtcattgatatcgatctttttcatcaattttttaaaatagcattttctacttatctaaaattccattctatgatcaggtgctgataacctaattcctgtggagttggcactgaagatagtcagtaagataagatcgaaggagagattcacagtttatattgtcatcccaatgtggcctgaaggttccccttcttctacttcagtgcaagagatactcttttggcagggacaaacaatgaaaatgatgtatgaaatcatagctctggagttaaaatctatgcagcttgatagtcatccacaagattacctcaatttttactgtcttggaaaccgagagcagttgacaactgaagtttcaagttcaagtaattcaccttcagataatggcgaaacggtttcagcctcacaaaagttccgacggtttatgatttatgtacatgccaaaggaatgattgtggatgatgaatatgtaattcttgggtctgccaatataaatcaacgatctttggctggatccagagatactgagatagcaatgggtgcacatcaaccgcatcatacatggagtcagaaaaagaggcatccacatggtcaggtatatgggtatagaatgtctttgtgggcagaacacatggaaaccatagaagcttgcttcaaggagcctgaaagcttggagtgtgtgaaaagtgtgaacaagattgctgaagacaactggaagaagtacacagctgatgactatactccattgcaagggcacataatgaagtatcccgtgtgtgtaaatgcctatgggaaggtaaagtccttaactggatttgagtctttcccagatgttggtggcaaggtgcttggctcccggtctacccttcctgacgctctaactacatagcataccctcttaatttctacgtgaaaataagtaccaaagtctcagagaagaagagagagggatcaattggattttgctggcgtgcttggtgtaaactgttaaaaagaggccttgcccctgcatttttttaaaccatttacacggtggtatagtatgcaacaggctgcgtatatagtaaattattattaatcagtggactgtatgtcacagccacattgt

SEQ ID NO: 6056 - protein, 239 aa, Glycine max
  misc_feature (1)..(239): Ceres Seq. ID no. 14313576
MWPEGSPSSTSVQEILFWQGQTMKMMYEIIALELKSMQLDSHPQDYLNFYCLGNREQLTTEVSSSSNSPSDNGETVSASQKFRRFMIYVHAKGMIVDDEYVILGSANINQRSLAGSRDTEIAMGAHQPHHTWSQKKRHPHGQVYGYRMSLWAEHMETIEACFKEPESLECVKSVNKIAEDNWKKYTADDYTPLQGHIMKYPVCVNAYGKVKSLTGFESFPDVGGKVLGSRSTLPDALTT

SEQ ID NO: 6057 - protein, 217 aa, Glycine max
  misc_feature (1)..(217): Ceres Seq. ID no. 14313577
MKMMYEIIALELKSMQLDSHPQDYLNFYCLGNREQLTTEVSSSSNSPSDNGETVSASQKFRRFMIYVHAKGMIVDDEYVILGSANINQRSLAGSRDTEIAMGAHQPHHTWSQKKRHPHGQVYGYRMSLWAEHMETIEACFKEPESLECVKSVNKIAEDNWKKYTADDYTPLQGHIMKYPVCVNAYGKVKSLTGFESFPDVGGKVLGSRSTLPDALTT

SEQ ID NO: 6058 - protein, 215 aa, Glycine max
  misc_feature (1)..(215): Ceres Seq. ID no. 14313578
MMYEIIALELKSMQLDSHPQDYLNFYCLGNREQLTTEVSSSSNSPSDNGETVSASQKFRRFMIYVHAKGMIVDDEYVILGSANINQRSLAGSRDTEIAMGAHQPHHTWSQKKRHPHGQVYGYRMSLWAEHMETIEACFKEPESLECVKSVNKIAEDNWKKYTADDYTPLQGHIMKYPVCVNAYGKVKSLTGFESFPDVGGKVLGSRSTLPDALTT

SEQ ID NO: 6059 - DNA, 1246 bp, Glycine max
  misc_feature (1)..(1246): Ceres Seq. ID no. 14313583
acaagcatctctgttcagagcctcattaagtttttctctctttcacttatttattgactctccataagcccttcaaacctctctctattcctctctactagtcaccttctcccttccattcactccacttcttaacacccccaaacagaacaacggcagagcaagcagccagaaaaatggtgttgctgtccaaagcaacaacagaacaatactcctacatcaagaactacatgccaactgcattctcctcaacaattcccatagtggacctctccaaacccgatgcaaagaccctcatagtgaaggcttgtgaggagtttggattcttcaaagtcatcaaccatggtgttcccattgaagctatatcccaattggaatccgaagccttcaagttcttctctatgccactcaatgagaaggaaaaagcagggcctcccaaaccatttgggtgtctattaaacagttacatgtcttctgtgagaaaaatggcatgcgagattcttgagttgatggcagaaggattgaagattcagcaaaagaatgtgtttagcaagcttctgatggataaacagagtgactctgttttcagggtgaatcactaccctgcttgtcctgaacttgccgtgaatggtcagaacttgattgggttcggagaacatacagacccacaaatcatttctttacttaggtccaacaacacttcaggccttcagatttttcttagagatggaaactggatttcagtcccacctgatcacaaatctttcttcataaatgttggtgattctcttcaggttatgaccaatggaagatttcggagtgtgagacatagagttttggcaaatggatttaagtctaggctctcaatgatttactttggaggtccacctttgagtgaaaaaatagcgccattaccttctctcatgaaaggaaaagaaagcttatataaagaatttacgtggtttgagtacaagaattcaacctatggttcaagattggctgataataggcttggacattttgagagaattgttgcttgataatatgtagagaattatgggggcacttgtcaatacaaaatgggggttacaatagtctatatactataaatgttttttctttttcttttttctactttaaggttatttatcaattagaatgcctcacagatataggacaacgcatacaccccttttgcttcaacactagtgaatgcatctgatgtagttaacaatggagatttgat

SEQ ID NO: 6060 - protein, 287 aa, Glycine max
  misc_feature (1)..(287): Ceres Seq. ID no. 14313584
MVLLSKATTEQYSYIKNYMPTAFSSTIPIVDLSKPDAKTLIVKACEEFGFFKVINHGVPIEAISQLESEAFKFFSMPLNEKEKAGPPKPFGCLLNSYMSSVRKMACEILELMAEGLKIQQKNVFSKLLMDKQSDSVFRVNHYPACPELAVNGQNLIGFGEHTDPQIISLLRSNNTSGLQIFLRDGNWISVPPDHKSFFINVGDSLQVMTNGRFRSVRHRVLANGFKSRLSMIYFGGPPLSEKIAPLPSLMKGKESLYKEFTWFEYKNSTYGSRLADNRLGHFERIVA

SEQ ID NO: 6061 - protein, 269 aa, Glycine max
  misc_feature (1)..(269): Ceres Seq. ID no. 14313585
MPTAFSSTIPIVDLSKPDAKTLIVKACEEFGFFKVINHGVPIEAISQLESEAFKFFSMPLNEKEKAGPPKPFGCLLNSYMSSVRKMACEILELMAEGLKIQQKNVFSKLLMDKQSDSVFRVNHYPACPELAVNGQNLIGFGEHTDPQIISLLRSNNTSGLQIFLRDGNWISVPPDHKSFFINVGDSLQVMTNGRFRSVRHRVLANGFKSRLSMIYFGGPPLSEKIAPLPSLMKGKESLYKEFTWFEYKNSTYGSRLADNRLGHFERIVA

SEQ ID NO: 6062 - protein, 212 aa, Glycine max
  misc_feature (1)..(212): Ceres Seq. ID no. 14313586
MPLNEKEKAGPPKPFGCLLNSYMSSVRKMACEILELMAEGLKIQQKNVFSKLLMDKQSDSVFRVNHYPACPELAVNGQNLIGFGEHTDPQIISLLRSNNTSGLQIFLRDGNWISVPPDHKSFFINVGDSLQVMTNGRFRSVRHRVLANGFKSRLSMIYFGGPPLSEKIAPLPSLMKGKESLYKEFTWFEYKNSTYGSRLADNRLGHFERIVA

SEQ ID NO: 6063 - DNA, 1261 bp, Glycine max
  misc_feature (1)..(1261): Ceres Seq. ID no. 14313599
ggtaataaggcaaaaccctctctctctctctctcaatttgtttacctcttcaactcaaccacacttctaagatcaaaagctacctttgttgctttgagtttgaactttgaatcaatcaatcaatcaaagtgggtggtgactcatggaagtgaaaggaaggataagcaactccaccatcaccaccaccacaatccaaagtgaggatgagatggaccttcgaagaggtccttggaccgtcgatgaggatcttgctctcatcaattacattgctaatcatggtgaaggtcgatggaactccctagctcgttcagctggactcaaacgaactggcaagagctgcagattgagatggttgaattatttgcgtcccgatgttcgacgtggcaacatcacacttgaagaacagcttcttattctcgagctccatggtcgctggggaaaccgatggtctaaaattgctcaatatttgcctggaagaaccgataatgagataaagaattattggagaacccgtgtccaaaagcaagccaagcaactcaaatgtgacgtgaatagcaagcaattcaaggatgccatgcgctacctttggatgccaaggctggtggagcgcattcaagccgccgccgtggccgccaccactgccacggccaccgtgggttctccaactgcatcagctagtgctactacaaccatcaccactaacaacaacgccaccacatacaactacgagaacaacaacaacaacaaccttaacaacagttttgaagtgcacagtgggaacatgatgttgagaaatccagcaatcatgaacattaataattttgttggttcacacagttacactccagagaataatagtacgggtgcctcatcggattcatttggtgctcaggtttcgcctgtctcggacttgactcaggattattacaataatgtcacggttgggaataataacaacaacaataaccctaatcctgagtattaccaacaagcacatgatcaattgagtttcttagactgcatcacaagcccttcagggttgttcgatttccagtccatggaaccaaacaccccgtggattcagagtaatgttggggacacgtcaaccaacggtttctggaatgttgaaaacatgttgctctttcaacaactctctgacaacatgtgaaacatcaattcgtaggagaattcatggtgagagggactaaaaaaactgtgaagggttgtgaaatttacagatgataaaattatataattaagt

SEQ ID NO: 6064 - protein, 341 aa, Glycine max
  misc_feature (1)..(341): Ceres Seq. ID no. 14313600
MEVKGRISNSTITTTTIQSEDEMDLRRGPWTVDEDLALINYIANHGEGRWNSLARSAGLKRTGKSCRLRWLNYLRPDVRRGNITLEEQLLILELHGRWGNRWSKIAQYLPGRTDNEIKNYWRTRVQKQAKQLKCDVNSKQFKDAMRYLWMPRLVERIQAAAVAATTATATVGSPTASASATTTITTNNNATTYNYENNNNNNLNNSFEVHSGNMMLRNPAIMNINNFVGSHSYTPENNSTGASSDSFGAQVSPVSDLTQDYYNNVTVGNNNNNNNPNPEYYQQAHDQLSFLDCITSPSGLFDFQSMEPNTPWIQSNVGDTSTNGFWNVENMLLFQQLSDNM

SEQ ID NO: 6065 - protein, 319 aa, Glycine max
  misc_feature (1)..(319): Ceres Seq. ID no. 14313601
MDLRRGPWTVDEDLALINYIANHGEGRWNSLARSAGLKRTGKSCRLRWLNYLRPDVRRGNITLEEQLLILELHGRWGNRWSKIAQYLPGRTDNEIKNYWRTRVQKQAKQLKCDVNSKQFKDAMRYLWMPRLVERIQAAAVAATTATATVGSPTASASATTTITTNNNATTYNYENNNNNNLNNSFEVHSGNMMLRNPAIMNINNFVGSHSYTPENNSTGASSDSFGAQVSPVSDLTQDYYNNVTVGNNNNNNNPNPEYYQQAHDQLSFLDCITSPSGLFDFQSMEPNTPWIQSNVGDTSTNGFWNVENMLLFQQLSDNM

SEQ ID NO: 6066 - protein, 197 aa, Glycine max
  misc_feature (1)..(197): Ceres Seq. ID no. 14313602
MRYLWMPRLVERIQAAAVAATTATATVGSPTASASATTTITTNNNATTYNYENNNNNNLNNSFEVHSGNMMLRNPAIMNINNFVGSHSYTPENNSTGASSDSFGAQVSPVSDLTQDYYNNVTVGNNNNNNNPNPEYYQQAHDQLSFLDCITSPSGLFDFQSMEPNTPWIQSNVGDTSTNGFWNVENMLLFQQLSDNM

SEQ ID NO: 6067 - DNA, 1441 bp, Glycine max
  misc_feature (1)..(1441): Ceres Seq. ID no. 14313607
ttttttctgcaactgttgcactatcttctgattttcgcaagaagctaaaacgaggctcaattaaacaaaagcaatcattgacagatggattgaattctatcgaaactctttctgagcgtgcaggaatgagatctaatgcagcaattattgatcttactaatccgtctatattagcaactaagcttgaggagtcatttattgaatgcagagaagaagataaagatgcctatttgtactatattttgactgtccatggacaaggacgcacaatagttttctgtacttcaattgcagctttacgccatatttcttccatactgcgcattcttggcatcaatgtttggactcttcatgcccaaatgcagcagcgtgctcgtttgaaggccatggatcgctttcgtgaaaatgaaaatggcatacttgttgctacagatgttgctgcaaggggtcttgatattcctggtgttagaactgttgtccactatcagcttccacattcagcagaggtttatgttcatagaagtggaagaacagccagagcttctgctgaaggttgtagtattgctttaatatcatcaagagatacatcaaagtttgcttcattgtgcaagtcattttccaaggataactttcagcggtttcctttagagaactcttacatgccagaggtcctaaaacgattatctcttgcacgtcaaatagacaagataacaaggaaggattcccaggaaaaggctgagaaaaactggtttgataggaattctagctcagtagaattagttacagaaagttatgacagcgaagaggaacaagtgaacaaacataagcaaatgaaggccagctctagacaattgaagaaattgcaggaggatctcaaaatactgatttcacgtccattacaatcaaaaacattttcacatcgatatttagctggggctggtgtctcacccctcatgcaggagcaattgcaacaattagcaaggcaaaaactaagtgatcaccagggttcaggactaggcaaaaaggggaagttggtagtgattggtcaagattgtgtggatgcacttcaggcacttcgaagtgctggtgaagaggtgcgaatggatgccaaggatttggctggaaaacagagaaatatgcagaatttaaaaagaaagcgtaaagaggagaaaaagcgtttgcgtgatcagcgtagaaagcagaagaaaaagctaaaatacggggatgaatagaattgtatacataactgagccattagttaaaattttgcatcaaccaaagttttcattagttgctgaattttttaaggcagcgtctgtagtttctccttcctagttttagagcttcgaatttgagtttgaatatatatatatatatatatatatatatatatactgtatcgagcagtggatgtgatcatgtgattgagtttatattaatc

SEQ ID NO: 6068 - protein, 409 aa, Glycine max
  misc_feature (1)..(409): Ceres Seq. ID no. 14313608
FSATVALSSDFRKKLKRGSIKQKQSLTDGLNSIETLSERAGMRSNAAIIDLTNPSILATKLEESFIECREEDKDAYLYYILTVHGQGRTIVFCTSIAALRHISSILRILGINVWTLHAQMQQRARLKAMDRFRENENGILVATDVAARGLDIPGVRTVVHYQLPHSAEVYVHRSGRTARASAEGCSIALISSRDTSKFASLCKSFSKDNFQRFPLENSYMPEVLKRLSLARQIDKITRKDSQEKAEKNWFDRNSSSVELVTESYDSEEEQVNKHKQMKASSRQLKKLQEDLKILISRPLQSKTFSHRYLAGAGVSPLMQEQLQQLARQKLSDHQGSGLGKKGKLVVIGQDCVDALQALRSAGEEVRMDAKDLAGKQRNMQNLKRKRKEEKKRLRDQRRKQKKKLKYGDE

SEQ ID NO: 6069 - protein, 368 aa, Glycine max
  misc_feature (1)..(368): Ceres Seq. ID no. 14313609
MRSNAAIIDLTNPSILATKLEESFIECREEDKDAYLYYILTVHGQGRTIVFCTSIAALRHISSILRILGINVWTLHAQMQQRARLKAMDRFRENENGILVATDVAARGLDIPGVRTVVHYQLPHSAEVYVHRSGRTARASAEGCSIALISSRDTSKFASLCKSFSKDNFQRFPLENSYMPEVLKRLSLARQIDKITRKDSQEKAEKNWFDRNSSSVELVTESYDSEEEQVNKHKQMKASSRQLKKLQEDLKILISRPLQSKTFSHRYLAGAGVSPLMQEQLQQLARQKLSDHQGSGLGKKGKLVVIGQDCVDALQALRSAGEEVRMDAKDLAGKQRNMQNLKRKRKEEKKRLRDQRRKQKKKLKYGDE

SEQ ID NO: 6070 - protein, 290 aa, Glycine max
  misc_feature (1)..(290): Ceres Seq. ID no. 14313610
MQQRARLKAMDRFRENENGILVATDVAARGLDIPGVRTVVHYQLPHSAEVYVHRSGRTARASAEGCSIALISSRDTSKFASLCKSFSKDNFQRFPLENSYMPEVLKRLSLARQIDKITRKDSQEKAEKNWFDRNSSSVELVTESYDSEEEQVNKHKQMKASSRQLKKLQEDLKILISRPLQSKTFSHRYLAGAGVSPLMQEQLQQLARQKLSDHQGSGLGKKGKLVVIGQDCVDALQALRSAGEEVRMDAKDLAGKQRNMQNLKRKRKEEKKRLRDQRRKQKKKLKYGDE

SEQ ID NO: 6071 - DNA, 1162 bp, Glycine max
  misc_feature (1)..(1162): Ceres Seq. ID no. 14313617
tgcaatgagactcagaggcttgcacattactttggaaatgcacttgaagcacgcttggatggaacaggctacaaggtttgtagtgctctatcatccaaaagaacctttgccaaagacatgataaaagcttaccatgtatacgcttcagtgtgcccctttgaaaagctagcaatcatttttgccaacaattcaatttggaatccaagtgtggatgcaaaagcaattcacatcatagactttggcatccgctatggcttcaaatggcctgcacttatcagccgtctatcaagacgttctggtgggccacccaagctacgaatcacggggatagatgtgccacaacctggtttaaggccacaagagagggtgctcgagacagggcgtagacttgcaaatttttgcaagcgtttcaatgttccatttgagttcaatgctattgcacagagatgggacaccatcagagttgaagacctcaagatagagccaaacgaatttgtagctgtgaactgcttgtttcagtttgagcatctgcttgacgagacagtggtgttgaataattccagggatgctgttctgaggttgattaagaatgcaaatccagacatatttgtgcatggcattgtcaacggatcctatgatgtaccattctttgtgtcacggttccgggaggctctctttcattacactgcattgtttgacatgcttgacaccaacgttgctcgtcaagatcccatgaggttgatgtttgagaaggagttgtttggacgggagatagtgaacatcatagcttgcgaaggttttgagagggttgagagaccacaaacatacaagcaatggcagcttcggaacatgagaaatgggtttaggctgcttcctctggatcatcgaatcattggcaaattaaaggataggttgagagatgatgcgcacaacaataatttcttgcttgaggttgatggcgactgggtgctacaaggttggaagggtcgaattctatatgcttcctcttgttgggtacctgcatagcataggccttgaacattatttattccagattacaaaaatctagtcttacacacaactattagtacgtctccttcaatctccctagctcatttgttgttttttatgataaggaaaaaccaaagttatagttagtttc

SEQ ID NO: 6072 - protein, 341 aa, Glycine max
  misc_feature (1)..(341): Ceres Seq. ID no. 14313618
CNETQRLAHYFGNALEARLDGTGYKVCSALSSKRTFAKDMIKAYHVYASVCPFEKLAIIFANNSIWNPSVDAKAIHIIDFGIRYGFKWPALISRLSRRSGGPPKLRITGIDVPQPGLRPQERVLETGRRLANFCKRFNVPFEFNAIAQRWDTIRVEDLKIEPNEFVAVNCLFQFEHLLDETVVLNNSRDAVLRLIKNANPDIFVHGIVNGSYDVPFFVSRFREALFHYTALFDMLDTNVARQDPMRLMFEKELFGREIVNIIACEGFERVERPQTYKQWQLRNMRNGFRLLPLDHRIIGKLKDRLRDDAHNNNFLLEVDGDWVLQGWKGRILYASSCWVPA

SEQ ID NO: 6073 - protein, 302 aa, Glycine max
  misc_feature (1)..(302): Ceres Seq. ID no. 14313619
MIKAYHVYASVCPFEKLAIIFANNSIWNPSVDAKAIHIIDFGIRYGFKWPALISRLSRRSGGPPKLRITGIDVPQPGLRPQERVLETGRRLANFCKRFNVPFEFNAIAQRWDTIRVEDLKIEPNEFVAVNCLFQFEHLLDETVVLNNSRDAVLRLIKNANPDIFVHGIVNGSYDVPFFVSRFREALFHYTALFDMLDTNVARQDPMRLMFEKELFGREIVNIIACEGFERVERPQTYKQWQLRNMRNGFRLLPLDHRIIGKLKDRLRDDAHNNNFLLEVDGDWVLQGWKGRILYASSCWVPA

SEQ ID NO: 6074 - DNA, 1425 bp, Glycine max
  misc_feature (1)..(1425): Ceres Seq. ID no. 14313662
attttacactttcattacctttcacacgtgctctctcaatctctcacgtagctctctcactctcacactgatccaactccaccacaagtcagagaatccgcagatttggccaaagaatctgtagatctgacatccaaagttttaaatacactatcccctcccacctcctcgatcgtgtgtattgtgaacatcactgccacggtcatcgtcactagagtccagtgctagcttttggagcactgtgccaaattatgtcgtgccgctcatcgtcgattcagattcacaatgctaaaaacctgtcataattagattcacagtttttataaatcggtctttgcaatcgacaatctctttcttttcttttcgtgtttagggatttagtctgattcctctgtgtttcttgttattgtgcaggcattacttgcgttttctttgaatctgattttgttactattaccaaatccaaagaggctgcgtgggatttcctcaagcttgaaatatttgtcaccgatatggcttgctatggtgttttagaatttgtgatggaaagtggggccaaaggatgcgaggtttgtttatggactcctaatattgtattgcatcatgtaatggtttggttgttattgttgtttgacctgagtaggtcattactagtggaaaactgagagctctgagagccaagtccatgaaattcaaggatggatacatgatttcttttggacaaccagtcaaggattatattgactcagtagtgagacacgtgctactaagatagggtgctcttggtatcaaggttaagatcatgcttgattgggatcctaaagggaatcagagtcctaaaactccctttcctgatcttgtcacgatccacactccaaaggaggaagaatacaagtagcctccagctgtattggcaaatgatattgagtgaaagcttgtgcaaagattaaagagtaaagtctttggatctacatccaacaaaaccatgtgacaaatattgttgggggctcaattggctggagaagatatcttgatcatcttatcagttcactatgtcatgataaagatatatctagcatggaacttcttctcttacagctgcttgacagttcatgttcaagaaagagagcttgcatcagggaatagtcttcgtggttatatccacttagttgacttggcaggaagctataaaggtaacaggtaaaggatgtgtaaaggtcatctttttactacaccagaacagtgggaacaactttgtcttgaagttagaagtgttgatgttttcagaattcagcttctttccttggtgtttttttttttggttttatctactcttagttctcagtcacggcttagttattctgaagaataatgaagttgtcatttggcaatccttaattatgaaaatgaggaagcatttgtgtc

SEQ ID NO: 6075 - protein, 54 aa, Glycine max
  misc_feature (1)..(54): Ceres Seq. ID no. 14313663
MCKGHLFTTPEQWEQLCLEVRSVDVFRIQLLSLVFFFLVLSTLSSQSRLSYSEE

SEQ ID NO: 6076 - protein, 50 aa, Glycine max
  misc_feature (1)..(50): Ceres Seq. ID no. 14313664
MACYGVLEFVMESGAKGCEVCLWTPNIVLHHVMVWLLLLFDLSRSLLVEN

SEQ ID NO: 6077 - protein, 48 aa, Glycine max
  misc_feature (1)..(48): Ceres Seq. ID no. 14313665
MIKIYLAWNFFSYSCLTVHVQERELASGNSLRGYIHLVDLAGSYKGNR

SEQ ID NO: 6078 - DNA, 1321 bp, Glycine max
  misc_feature (1)..(1321): Ceres Seq. ID no. 14313674
tctagattcacgtgttgtagaatcaacaacagattttcctcagaagttcttctactgcttttggtggggtttgcgcaatttaagttctcttggacaaaatctaaagactagtactgatgtctcagaaatagcttttgcaatcttcattgccatctttggattggtcttattctcattacttattggaaacatgcagaaatatctgcaatctacaactgtaagagtggaggagatgagagtgaagagacaggacgcagaacagtggatgtcccaccgtatgctacctgagaacttgagggaaagaattagaaagtacgaacagtaccaatggcaagaaaataggggtgttgaggaggaggcattaattcgtaaccttcctaaagatctcagaagggacattaagcgtcacctttgcttaactttagttaaaaaagtgccaatgtttgagaaaatggatgagcagttgttggatgcaatgtgtgatagactgaagccagtcctttatactgagaagagctacattgttcgtgaagaagatccagttgatgagatgcttttcattatgcgcggaaaagtttcgaccatgacaacgaatggtggaagaactggtttcttcaactccatgttcctcaaggctggtgacttttgtggagaggaacttctgacatgggctttggatcccaactcctcctcaaatctacccatttcaaccaggacagtagaaactatatcagaagttgaagcctttgctctcacggctgatgacttgaagtttgttgcttcccaatttcgacgccttcacagcaaacagctccaacacgctttcaggttctattcctcacagtggaagacatgggctgctactttcatacaagcagcttggcgtcgatactggaaaaagaagattgagaggtcattgcgcgaagcagaagatgagctacaagatgctttggcaaatgaggaagagtctagtctaagccttggtgcaaccatatatgcatcaaggtttgctgccaatgcactgcgaaatttgagagaaaatagcagacacaatagaatgcaacagagactactacctctgttacctccaaagccagctgaaccagatttcacttctcagaaacactaatttgcaaataggaataagtacatgttaatgttatccatactccatagctattttgtgtgtatattttgggagggttgcttaggaattgcttcaacaactacatgtggatatgtaggggtaatatttcatcaaaatttaattaaacaatcatttagattacaattttttaaataaccgtctagttaatactgc

SEQ ID NO: 6079 - protein, 375 aa, Glycine max
  misc_feature (1)..(375): Ceres Seq. ID no. 14313675
LDSRVVESTTDFPQKFFYCFWWGLRNLSSLGQNLKTSTDVSEIAFAIFIAIFGLVLFSLLIGNMQKYLQSTTVRVEEMRVKRQDAEQWMSHRMLPENLRERIRKYEQYQWQENRGVEEEALIRNLPKDLRRDIKRHLCLTLVKKVPMFEKMDEQLLDAMCDRLKPVLYTEKSYIVREEDPVDEMLFIMRGKVSTMTTNGGRTGFFNSMFLKAGDFCGEELLTWALDPNSSSNLPISTRTVETISEVEAFALTADDLKFVASQFRRLHSKQLQHAFRFYSSQWKTWAATFIQAAWRRYWKKKIERSLREAEDELQDALANEEESSLSLGATIYASRFAANALRNLRENSRHNRMQQRLLPLLPPKPAEPDFTSQKH

SEQ ID NO: 6080 - protein, 312 aa, Glycine max
  misc_feature (1)..(312): Ceres Seq. ID no. 14313676
MQKYLQSTTVRVEEMRVKRQDAEQWMSHRMLPENLRERIRKYEQYQWQENRGVEEEALIRNLPKDLRRDIKRHLCLTLVKKVPMFEKMDEQLLDAMCDRLKPVLYTEKSYIVREEDPVDEMLFIMRGKVSTMTTNGGRTGFFNSMFLKAGDFCGEELLTWALDPNSSSNLPISTRTVETISEVEAFALTADDLKFVASQFRRLHSKQLQHAFRFYSSQWKTWAATFIQAAWRRYWKKKIERSLREAEDELQDALANEEESSLSLGATIYASRFAANALRNLRENSRHNRMQQRLLPLLPPKPAEPDFTSQKH

SEQ ID NO: 6081 - protein, 298 aa, Glycine max
  misc_feature (1)..(298): Ceres Seq. ID no. 14313677
MRVKRQDAEQWMSHRMLPENLRERIRKYEQYQWQENRGVEEEALIRNLPKDLRRDIKRHLCLTLVKKVPMFEKMDEQLLDAMCDRLKPVLYTEKSYIVREEDPVDEMLFIMRGKVSTMTTNGGRTGFFNSMFLKAGDFCGEELLTWALDPNSSSNLPISTRTVETISEVEAFALTADDLKFVASQFRRLHSKQLQHAFRFYSSQWKTWAATFIQAAWRRYWKKKIERSLREAEDELQDALANEEESSLSLGATIYASRFAANALRNLRENSRHNRMQQRLLPLLPPKPAEPDFTSQKH

SEQ ID NO: 6082 - DNA, 1421 bp, Glycine max
  misc_feature (1)..(1421): Ceres Seq. ID no. 14313702
aaatgttgtaaccatccctacctctttgtgggtgactatgatatccataaacacaaggaggagattttcagagcatcaggaaagtttgaacttcttgaccgtttgcttccaaaacttcgtagagctggtcacagagtcctccttttttctcagatgactcggctcatggacattcttgaaatttatctgcgacttaatgattttaaatttcttagacttgatggctcaacaaaaactgaggaaagaggttccctactacggaaattcaatgcacctgattctgcatactttatgtttctcttgagcacccgtgccggaggtcttggtttgaacttacaaacagcagatactgttataatctttgacagcgattggaacccacaaatggatcaacaagccgaggatcgagcacatcgcattggacaaaaaaaggaagttagagtttttgtgttagttagtgtgggatctattgaagaggtgattttagagcgtgctaaacaaaagatgggcattgatgccaaagtcattcaggcagggctctttaacacaacttctacagcacaagacagaagagaaatgttgcaggagattatgcgtagaggtactagctcacttggtacggatgtcccgagtgagagagaaattaaccgccttgcggcccgatctgatgaggaattttggctgtttgagaaaatggatgaagagcgaaggcaaaaggagaattacagatctcgtctcatggaagagcatgaactgccggattgggtatactctccactaaataaggatgataaggtcaaaatatttgacagtggtagtgttactggaaagcgtaaaagaaatgaagtggtatatgcagatacattaagtgacctacaatggatgaaggctgtggagaacggacaggacatatctaagctttcagtcaaagggaaaagaagagaccacctccctgttgacaaccatgcacaagctagtgatgacatggggacagaagaacggttatttagaagtgaagacactttcgacgtgacacctgcctctaagagactcaagcccgaagaaataaattcccagaaacatgaaaacgaagatgtcagtgttggtggtttgaacgagcatatattttcctggaatactcgtagaaagaagagatcaggctaccttggccagggttcattctctgatagtagagggcagaattcaaatggaagagcaaactggaactgatagttctaatttagtcatggatgccagaaattttccctacatttgtattgtgattctgcttcattgtgtttgtcaaggtaaatggtagattacactcgatcagcaaatgtagataccagcaaattccttctggcagttgtgaagtttatcagtgtgaatgtaaaatctaattgatgaaacacatttcccct

SEQ ID NO: 6083 - protein, 409 aa, Glycine max
  misc_feature (1)..(409): Ceres Seq. ID no. 14313703
KCCNHPYLFVGDYDIHKHKEEIFRASGKFELLDRLLPKLRRAGHRVLLFSQMTRLMDILEIYLRLNDFKFLRLDGSTKTEERGSLLRKFNAPDSAYFMFLLSTRAGGLGLNLQTADTVIIFDSDWNPQMDQQAEDRAHRIGQKKEVRVFVLVSVGSIEEVILERAKQKMGIDAKVIQAGLFNTTSTAQDRREMLQEIMRRGTSSLGTDVPSEREINRLAARSDEEFWLFEKMDEERRQKENYRSRLMEEHELPDWVYSPLNKDDKVKIFDSGSVTGKRKRNEVVYADTLSDLQWMKAVENGQDISKLSVKGKRRDHLPVDNHAQASDDMGTEERLFRSEDTFDVTPASKRLKPEEINSQKHENEDVSVGGLNEHIFSWNTRRKKRSGYLGQGSFSDSRGQNSNGRANWN

SEQ ID NO: 6084 - protein, 358 aa, Glycine max
  misc_feature (1)..(358): Ceres Seq. ID no. 14313704
MTRLMDILEIYLRLNDFKFLRLDGSTKTEERGSLLRKFNAPDSAYFMFLLSTRAGGLGLNLQTADTVIIFDSDWNPQMDQQAEDRAHRIGQKKEVRVFVLVSVGSIEEVILERAKQKMGIDAKVIQAGLFNTTSTAQDRREMLQEIMRRGTSSLGTDVPSEREINRLAARSDEEFWLFEKMDEERRQKENYRSRLMEEHELPDWVYSPLNKDDKVKIFDSGSVTGKRKRNEVVYADTLSDLQWMKAVENGQDISKLSVKGKRRDHLPVDNHAQASDDMGTEERLFRSEDTFDVTPASKRLKPEEINSQKHENEDVSVGGLNEHIFSWNTRRKKRSGYLGQGSFSDSRGQNSNGRANWN

SEQ ID NO: 6085 - protein, 354 aa, Glycine max
  misc_feature (1)..(354): Ceres Seq. ID no. 14313705
MDILEIYLRLNDFKFLRLDGSTKTEERGSLLRKFNAPDSAYFMFLLSTRAGGLGLNLQTADTVIIFDSDWNPQMDQQAEDRAHRIGQKKEVRVFVLVSVGSIEEVILERAKQKMGIDAKVIQAGLFNTTSTAQDRREMLQEIMRRGTSSLGTDVPSEREINRLAARSDEEFWLFEKMDEERRQKENYRSRLMEEHELPDWVYSPLNKDDKVKIFDSGSVTGKRKRNEVVYADTLSDLQWMKAVENGQDISKLSVKGKRRDHLPVDNHAQASDDMGTEERLFRSEDTFDVTPASKRLKPEEINSQKHENEDVSVGGLNEHIFSWNTRRKKRSGYLGQGSFSDSRGQNSNGRANWN

SEQ ID NO: 6086 - DNA, 1136 bp, Glycine max
  misc_feature (1)..(1136): Ceres Seq. ID no. 14313718
aaacaaacatcaaacccatttttctatttttttttcttttcttttctctcttacacaccttccatgccttctcttttcaagagatctttcttccttctcctcctcctccttcatctccacaactcttaaaaaccctcctcatcgatccaacaagcagcaacctcactgaatctacaaacagtaacaaagattattactcgtagatccaataacagtaataacacctcagtttcttctcttaacagatcatgaattcctttcaagaatttgactcatcaaacacggacagtaacagtaccaaagccatcatcaacttcacatcaggtaacagcaccaatttcccaccagcgccaccaccatcatcatcttcaccgccatgttcctcttcttcttctggcaccaccaccctgagccgctacgagaaccaaaagcgccgcgactggaacacgttcgggcagtacctccgcaaccacaggcccccactctcgcttgcacggtgcagcggcgcgcacgtgctggagttcctgcggtacctggaccagttcgggaaaaccaaggttcacacgcagctttgtccattcttcgggcacccgaaccctcctgcagcgtgcccttgccttctacggcaagcgtgggggagcctggatgcactcatagggcgcctcagagctgcctttgaagagaatggagggaagcctgaggctaaccctttcggtgctcgcgctgtcagactctaccttcgcgaagtgcgtgattcgcaagccaaggctaggggaattagctacgagaagaagaagcgcaagcgtccccaacaacctcctttgcctccctcaaataatgcaaaagttgtgatttgacaatgggctgggggcactgcaatatgggcacaccctttgcaatggcattagaaaaatattgtgtaaacctaaactgcagtactctcggtagatgcagcagtaatttatgtagtggcagtaataaacactagggagggctgtgcatgtgtgtctgtgacaaatcaacaatatcacaacattgtccgatttgtattaataaaataaaaatgtgtatgaactcttgaagatgttatgaagaaaataataatggatctcaagatcttgtcagtttccatattg

SEQ ID NO: 6087 - protein, 202 aa, Glycine max
  misc_feature (1)..(202): Ceres Seq. ID no. 14313719
MNSFQEFDSSNTDSNSTKAIINFTSGNSTNFPPAPPPSSSSPPCSSSSSGTTTLSRYENQKRRDWNTFGQYLRNHRPPLSLARCSGAHVLEFLRYLDQFGKTKVHTQLCPFFGHPNPPAACPCLLRQAWGSLDALIGRLRAAFEENGGKPEANPFGARAVRLYLREVRDSQAKARGISYEKKKRKRPQQPPLPPSNNAKVVI

SEQ ID NO: 6088 - DNA, 1882 bp, Glycine max
  misc_feature (1)..(1882): Ceres Seq. ID no. 14313739
ggaggtttctgttcgtttcatttcatttggtcacacagtgttgtcggccactttctctctctttcgcgcttcaactttcgtttttgcactgattgaaattgtgaggagcaacagaccacttgagatagtttaactcagctgcagggatggatctgtggggtgctcatcatcgacttttgttcattggtcggcatgaggaagatggaactcctgatacttctatgggagaggaatcaaacgatgaagaagaaaaaataattaaaactgaacccgtctttgtgcctgaaattaagaaaaggaaacgccttagccttagtcagcttaaagaggtgaaagaggagtcacatgggaagcaaagcagtagcaagcctaagagaaagaagcatgatagtagggatagatggtcagctgagaggtatcaattggctgagcaaaacatgtgggaggtactaaaggctgaaggggcgtcatttgaaaacccaataacccgacctgcactaagattggctgcccgcaaacacattggagatactggacttttagatcacttactgaagcacattgatggtaaagtggcacctggagggactgagagattccgaagatggttcaacaccaatggaatcatggagtattggttggagagtgctgacttggacaaggtgcgccaggaggcaggggtgcaggaccctttctggataccgccatctgcatatagggcagccggtgccccttcccaaaatattgattcttctgatgaattgaaacagcttaaaatagaactgacacaaatgaagaaagatatgcatgagctcattgccaagaaggaagagaaaagtgatattaacatgatggaggagacacacaaggaatttgtgaagtggaaatttatgactgaccatcgccttactgaaatcatgacttctttgaaggatgttcagggaaagtatggtgaattgatgatttggaaaactacagttgcgcaacaacttatggaaataactaataaattgaatgatcttcaagcatctagggaatgcaccacttatagtcctccttcagaaaggtggaaagattggatagaaagcaccaacctagacaatattcaggaagatgcatttgctacttggattgggaatccagagctacttaatgttccacaagaggttatacttgaagatcccaacacgaccatgccaacacagccacccagtgaagaactgactaacaagaagagcgatgtgctggagttagtacctgtaaaactagaagatcaaccaaatgtaacccctgattcttctacaactgttaattcgaagtcagaccttgacaactcattgattatgtttcaggagatgtttatggatttatacaaatggaaagagaaaatggaacagcagctgatggaggtatcgaatactgtatatggtatgcttgcaatgaagtagacatcactccgaagtatcgaggctaagataggatataaccaccgtttcgttctcaagttttctttgttactcttaaaactggtaaagtttagatattgtacagcattaacaatctgatcctgaaaatctatgccaaccactaagttcacagaagaggttgagtctcaccctgctggctgagctgcaaattgtcgatatgtctgactggccttttacagtatacttggccttttaaattgaatgacttaaggtaggtcttcagtggtaatgaaattggttgttttctcaacttattgggtaagattatgagttcctttagtataggtctttaggtaggctacccgtatttaacgtattagctgaaactatcttgttagagcttgtacttaacctatttggtaacaagttgccatatatatatatagaatttctac

SEQ ID NO: 6089 - protein, 433 aa, Glycine max
  misc_feature (1)..(433): Ceres Seq. ID no. 14313740
MDLWGAHHRLLFIGRHEEDGTPDTSMGEESNDEEEKIIKTEPVFVPEIKKRKRLSLSQLKEVKEESHGKQSSSKPKRKKHDSRDRWSAERYQLAEQNMWEVLKAEGASFENPITRPALRLAARKHIGDTGLLDHLLKHIDGKVAPGGTERFRRWFNTNGIMEYWLESADLDKVRQEAGVQDPFWIPPSAYRAAGAPSQNIDSSDELKQLKIELTQMKKDMHELIAKKEEKSDINMMEETHKEFVKWKFMTDHRLTEIMTSLKDVQGKYGELMIWKTTVAQQLMEITNKLNDLQASRECTTYSPPSERWKDWIESTNLDNIQEDAFATWIGNPELLNVPQEVILEDPNTTMPTQPPSEELTNKKSDVLELVPVKLEDQPNVTPDSSTTVNSKSDLDNSLIMFQEMFMDLYKWKEKMEQQLMEVSNTVYGMLAMK

SEQ ID NO: 6090 - protein, 408 aa, Glycine max
  misc_feature (1)..(408): Ceres Seq. ID no. 14313741
MGEESNDEEEKIIKTEPVFVPEIKKRKRLSLSQLKEVKEESHGKQSSSKPKRKKHDSRDRWSAERYQLAEQNMWEVLKAEGASFENPITRPALRLAARKHIGDTGLLDHLLKHIDGKVAPGGTERFRRWFNTNGIMEYWLESADLDKVRQEAGVQDPFWIPPSAYRAAGAPSQNIDSSDELKQLKIELTQMKKDMHELIAKKEEKSDINMMEETHKEFVKWKFMTDHRLTEIMTSLKDVQGKYGELMIWKTTVAQQLMEITNKLNDLQASRECTTYSPPSERWKDWIESTNLDNIQEDAFATWIGNPELLNVPQEVILEDPNTTMPTQPPSEELTNKKSDVLELVPVKLEDQPNVTPDSSTTVNSKSDLDNSLIMFQEMFMDLYKWKEKMEQQLMEVSNTVYGMLAMK

SEQ ID NO: 6091 - protein, 336 aa, Glycine max
  misc_feature (1)..(336): Ceres Seq. ID no. 14313742
MWEVLKAEGASFENPITRPALRLAARKHIGDTGLLDHLLKHIDGKVAPGGTERFRRWFNTNGIMEYWLESADLDKVRQEAGVQDPFWIPPSAYRAAGAPSQNIDSSDELKQLKIELTQMKKDMHELIAKKEEKSDINMMEETHKEFVKWKFMTDHRLTEIMTSLKDVQGKYGELMIWKTTVAQQLMEITNKLNDLQASRECTTYSPPSERWKDWIESTNLDNIQEDAFATWIGNPELLNVPQEVILEDPNTTMPTQPPSEELTNKKSDVLELVPVKLEDQPNVTPDSSTTVNSKSDLDNSLIMFQEMFMDLYKWKEKMEQQLMEVSNTVYGMLAMK

SEQ ID NO: 6092 - DNA, 1744 bp, Glycine max
  misc_feature (1)..(1744): Ceres Seq. ID no. 14313743
atactcacactcaacacaatcttgggagaggtaacaacaacagctctggtttttctttgcagccttcacagctagctaacacaaaaatgagaatcttgagttacctttacattgttctcatttgcattattcaagactcaagagagcttaaatagggaaagaggaacaaggcctttttcagttacctctaaatccagttcttgcaattccatttgtgagtgagttgttggaattggaatttggaagtagctaggcagtgtctcaaattaatggcatccatgtctcttattcttctttggttcctcttttttgctagtgaaatgatgtcaatgggaaatagtttacacaaggggcacatggtaatggaagaggaggaactgttgggattgtttgaagtgatggatgctcttctggaagacccttactgggcccaagcacatccaaagccatgcactgatactccatggccaggtgttgagtgtgaacttggcagcaataaccaacaaatctttcatgtcaccaaaatccacattggtcctgatatagtcttcccattctcaccttgcaaaccctcagcttatctctcacactccttgctgaaactcaagtatataaaaaccctttcaatttttaactgttttgttgcttcaccagttactctacccaaaactctctttggtcctttctcttcactagaacacttagctttggagaataacccttccctctatggtgaaatacctacaagtttgggaggtgttgctggtcttagggtcctgagcctctcccagaacagcttacaaggaaacatccctagccagattggtggtttggttagtctagagcaacttgaccttagttataacaacttgagtggtcaaatcccaaaggaaattggaggtttgaaaagcatgaccatattggacctaagttgcaatgcagttgaagggtttctgccttgttctcttggaaagcttcaacttctccagaagatggatttgcactctaacagactcagtgaaaacattcctcctgatataggaaacctcaagaggttagtcttgcttgatttgagtcataattttattgtagggcctattagtgaaaccttctcaagtttagaccttttggaatatttactcattgatgacaaccccattaaaggagggataccccagttcatagggaagcttaagaagctcaaatcattgagtttatcagggtgtggattaacaggttctataccctactctttctcttccttgaaaaatcttacagctctctccttaggtaacaatagtcttattggacaagttcctccaaatttgggttcactcccaagcctagatcaactgaatatcagccacaacaagctgagtggggttctagagctacctggtgacttcattcaaaagttaggtaaaagattggatttaagaggaaacagtgaactctgcatcaatgatcagtcaaagaagaagaacctctcttcttacttggaaatcccttcttgtttgaacacacgacagagaaatgatgataattattttgccggtggaccacttcaagatctttcaggactaaagccgtcttggtatgatagcaacccaagttcatgttcatcatggcctaatgatctacatgtcatcatatttaccttggttttaaacctggttatctgattcctgaatatcattttgtgtaacactagaaattaatattatataaatgttattctactctg

SEQ ID NO: 6093 - protein, 470 aa, Glycine max
  misc_feature (1)..(470): Ceres Seq. ID no. 14313744
MASMSLILLWFLFFASEMMSMGNSLHKGHMVMEEEELLGLFEVMDALLEDPYWAQAHPKPCTDTPWPGVECELGSNNQQIFHVTKIHIGPDIVFPFSPCKPSAYLSHSLLKLKYIKTLSIFNCFVASPVTLPKTLFGPFSSLEHLALENNPSLYGEIPTSLGGVAGLRVLSLSQNSLQGNIPSQIGGLVSLEQLDLSYNNLSGQIPKEIGGLKSMTILDLSCNAVEGFLPCSLGKLQLLQKMDLHSNRLSENIPPDIGNLKRLVLLDLSHNFIVGPISETFSSLDLLEYLLIDDNPIKGGIPQFIGKLKKLKSLSLSGCGLTGSIPYSFSSLKNLTALSLGNNSLIGQVPPNLGSLPSLDQLNISHNKLSGVLELPGDFIQKLGKRLDLRGNSELCINDQSKKKNLSSYLEIPSCLNTRQRNDDNYFAGGPLQDLSGLKPSWYDSNPSSCSSWPNDLHVIIFTLVLNLVI

SEQ ID NO: 6094 - protein, 467 aa, Glycine max
  misc_feature (1)..(467): Ceres Seq. ID no. 14313745
MSLILLWFLFFASEMMSMGNSLHKGHMVMEEEELLGLFEVMDALLEDPYWAQAHPKPCTDTPWPGVECELGSNNQQIFHVTKIHIGPDIVFPFSPCKPSAYLSHSLLKLKYIKTLSIFNCFVASPVTLPKTLFGPFSSLEHLALENNPSLYGEIPTSLGGVAGLRVLSLSQNSLQGNIPSQIGGLVSLEQLDLSYNNLSGQIPKEIGGLKSMTILDLSCNAVEGFLPCSLGKLQLLQKMDLHSNRLSENIPPDIGNLKRLVLLDLSHNFIVGPISETFSSLDLLEYLLIDDNPIKGGIPQFIGKLKKLKSLSLSGCGLTGSIPYSFSSLKNLTALSLGNNSLIGQVPPNLGSLPSLDQLNISHNKLSGVLELPGDFIQKLGKRLDLRGNSELCINDQSKKKNLSSYLEIPSCLNTRQRNDDNYFAGGPLQDLSGLKPSWYDSNPSSCSSWPNDLHVIIFTLVLNLVI

SEQ ID NO: 6095 - protein, 453 aa, Glycine max
  misc_feature (1)..(453): Ceres Seq. ID no. 14313746
MMSMGNSLHKGHMVMEEEELLGLFEVMDALLEDPYWAQAHPKPCTDTPWPGVECELGSNNQQIFHVTKIHIGPDIVFPFSPCKPSAYLSHSLLKLKYIKTLSIFNCFVASPVTLPKTLFGPFSSLEHLALENNPSLYGEIPTSLGGVAGLRVLSLSQNSLQGNIPSQIGGLVSLEQLDLSYNNLSGQIPKEIGGLKSMTILDLSCNAVEGFLPCSLGKLQLLQKMDLHSNRLSENIPPDIGNLKRLVLLDLSHNFIVGPISETFSSLDLLEYLLIDDNPIKGGIPQFIGKLKKLKSLSLSGCGLTGSIPYSFSSLKNLTALSLGNNSLIGQVPPNLGSLPSLDQLNISHNKLSGVLELPGDFIQKLGKRLDLRGNSELCINDQSKKKNLSSYLEIPSCLNTRQRNDDNYFAGGPLQDLSGLKPSWYDSNPSSCSSWPNDLHVIIFTLVLNLVI

SEQ ID NO: 6096 - DNA, 1388 bp, Glycine max
  misc_feature (1)..(1388): Ceres Seq. ID no. 14313758
gaaccatcattgcgccttgcagcagctacgccttctacttaaatcgtaagaaggaactctctctccaccgtcccatcctctttccactcaacttctgccaatgcgtccgtttgcacctcaagtcgcacgcttcacgaacagatcaacttcatcctcaccagcactacagtccgcagcaagttattttacatccggttaccgcagcactccttctcccacacaacaacaaaccagaatgtcttcctccaccgagactggcgagcttaagctcgagagcaccgtcaagaccgccactggtgtcgagctcagcaacgagcagaggactatcgtgtcttcagtgctggacctcttcgctggcaggccctcccttgccaagctacagctctggaaggacgatgccgtcttcagcgaccccatcactgtcgcaaagggcaggaaggagtttgagcctcaatggtacggcctccaaaccgccttctccgaaatcgagcgcaaagaccacagcgtcacctcctccggcaaccccatcgagctagacatgaccacaatgtacaaggtcaagggtatcggcaaggagacgaccatcaccagcaaggtcaacatcttccacgagaacggcaagatcacccgcgtcgaggacaagtggaacggcaacctccccgactctggcatcgcaaatgcattccgacgactcaacgccgttagtgtccccaagatggtcggcgtgcccaagaacgcagaggaggatgccaagcgcggcaattagaagcgctgctacattgtagcctcccactgctttcgtttcggctttctactcggtggttttcgttctgttgtcaaggagtcggacgttcaacctgcgacagcgcctggcattatgaggaatcctggtcctcagggtggacaagatcgaccgcgcgattctgcaacggctgtgcatttcgagcctgctttgagcgacattccggaagaggctgcttctactggggcttcaccacctccggctgcatcgtcctcggtctcagatccttcagcttcatcttcttctcaacctcgcgatcccgcgccaactgttcactttgatcctaacttgaagaaaccgaagaagggtcgtccctctactgcgactgctttaccttcagacgggtcacctcctccaccaattcggccctatcttaagcagcctccgcaatcgctaccgccgactcccgagtcagagccacctgaggcgtcgaatgctcctccggcagttgctgaagccgaagcgagttcggggaagcgggtgtcgcctctacgtttgctgggttttcgttgattaagatacttttacggttggacagtacacacagcattattcttagcaggatgtatcactattcattatgatg

SEQ ID NO: 6097 - protein, 221 aa, Glycine max
  misc_feature (1)..(221): Ceres Seq. ID no. 14313759
MRPFAPQVARFTNRSTSSSPALQSAASYFTSGYRSTPSPTQQQTRMSSSTETGELKLESTVKTATGVELSNEQRTIVSSVLDLFAGRPSLAKLQLWKDDAVFSDPITVAKGRKEFEPQWYGLQTAFSEIERKDHSVTSSGNPIELDMTTMYKVKGIGKETTITSKVNIFHENGKITRVEDKWNGNLPDSGIANAFRRLNAVSVPKMVGVPKNAEEDAKRGN

SEQ ID NO: 6098 - protein, 177 aa, Glycine max
  misc_feature (1)..(177): Ceres Seq. ID no. 14313760
TIIAPCSSYAFYLNRKKELSLHRPILFPLNFCQCVRLHLKSHASRTDQLHPHQHYSPQQVILHPVTAALLLPHNNKPECLPPPRLASLSSRAPSRPPLVSSSATSRGLSCLQCWTSSLAGPPLPSYSSGRTMPSSATPSLSQRAGRSLSLNGTASKPPSPKSSAKTTASPPPATPSS

SEQ ID NO: 6099 - protein, 176 aa, Glycine max
  misc_feature (1)..(176): Ceres Seq. ID no. 14313761
MSSSTETGELKLESTVKTATGVELSNEQRTIVSSVLDLFAGRPSLAKLQLWKDDAVFSDPITVAKGRKEFEPQWYGLQTAFSEIERKDHSVTSSGNPIELDMTTMYKVKGIGKETTITSKVNIFHENGKITRVEDKWNGNLPDSGIANAFRRLNAVSVPKMVGVPKNAEEDAKRGN

SEQ ID NO: 6100 - DNA, 1441 bp, Glycine max
  misc_feature (1)..(1441): Ceres Seq. ID no. 14313803
aactaaactgagaaaaagaagagagagaatcatccttccttttccgagaaagaggaagaaaacgccgagaaaacacagaaaccgatttcgccatcatccatcaaagatccacaaattcattcattcattcagcaatcccaattcattaatctgcaaaatgggttttggatgttgaagcgggggaggattgacaatttgcgatggaaagggaaaattggagagaacacatcaacagcaatagcaatgggaattattacgataggtttgtgtgtgattacgacaacggagaacgaagccctgcaaagccttcttcgcctcccagacttggctacatcgaacaccatgtttccaaattcgataccttggccggtgtcgctatcaagtacggtgttgaggtggcagacataagaaagatgaatagccttgttacagaccatcaaatgtttgcacttaaaactctccacattccgctacctgcaaggcatcctccatctccttatttgtcaaatggttccagtactccaggacatggtaactcggatcacagtccacctaatcaggcacaccatgatctgcttgattcattccaatccctgagaataaagtcatcagagcggaaggtctccccagccatgaactcattacagggctactatggacttaaggggaccccaagtccctcagaagatggtccattccccagaaacttacctatgtctgaccgacctctgagtcatcaccggaaatccagaagtttggtcaatgtaattttggaagaaattatggaaaaatcagatgatgcactggctgcagaaaccagggaagttggctccaataaatggaatgacaaacttggcctgagacatcagaaatctgtagctgactttattaggataccggagttgcttttgagggaggataatagcagcagtggtgttcttccatcaagaacaggaaagggcttagctctgagacagaaagcagctaaccgaaccacagcaacaactgattctgaaccaattggtttgaatcctgcggcgttgggcatgggggatgcttctctaattgatggttcatccggggtcaggaaatcatcaagcacttcttgtttacaggatcaagataacagtggctcctcgtccatttggccaaccaaaatgtggaatttgaaaccagacttacaagccctctcaactgcagccattggaaaaccaatctttgatggctttcccaagccaataactggtcggaaaaataaagctgctcttgattaatgtatagaaaatttatgaacacagttttgaccccgtttgtcaggttatggaatcattagccgctacaccagtgggtagattggaggaagtaagacaatgtagaagggacataaaaaatcaaacatcatattttatttctctttgaataggggcattatttttatgcc

SEQ ID NO: 6101 - protein, 357 aa, Glycine max
  misc_feature (1)..(357): Ceres Seq. ID no. 14313804
MERENWREHINSNSNGNYYDRFVCDYDNGERSPAKPSSPPRLGYIEHHVSKFDTLAGVAIKYGVEVADIRKMNSLVTDHQMFALKTLHIPLPARHPPSPYLSNGSSTPGHGNSDHSPPNQAHHDLLDSFQSLRIKSSERKVSPAMNSLQGYYGLKGTPSPSEDGPFPRNLPMSDRPLSHHRKSRSLVNVILEEIMEKSDDALAAETREVGSNKWNDKLGLRHQKSVADFIRIPELLLREDNSSSGVLPSRTGKGLALRQKAANRTTATTDSEPIGLNPAALGMGDASLIDGSSGVRKSSSTSCLQDQDNSGSSSIWPTKMWNLKPDLQALSTAAIGKPIFDGFPKPITGRKNKAALD

SEQ ID NO: 6102 - protein, 286 aa, Glycine max
  misc_feature (1)..(286): Ceres Seq. ID no. 14313805
MNSLVTDHQMFALKTLHIPLPARHPPSPYLSNGSSTPGHGNSDHSPPNQAHHDLLDSFQSLRIKSSERKVSPAMNSLQGYYGLKGTPSPSEDGPFPRNLPMSDRPLSHHRKSRSLVNVILEEIMEKSDDALAAETREVGSNKWNDKLGLRHQKSVADFIRIPELLLREDNSSSGVLPSRTGKGLALRQKAANRTTATTDSEPIGLNPAALGMGDASLIDGSSGVRKSSSTSCLQDQDNSGSSSIWPTKMWNLKPDLQALSTAAIGKPIFDGFPKPITGRKNKAALD

SEQ ID NO: 6103 - protein, 277 aa, Glycine max
  misc_feature (1)..(277): Ceres Seq. ID no. 14313806
MFALKTLHIPLPARHPPSPYLSNGSSTPGHGNSDHSPPNQAHHDLLDSFQSLRIKSSERKVSPAMNSLQGYYGLKGTPSPSEDGPFPRNLPMSDRPLSHHRKSRSLVNVILEEIMEKSDDALAAETREVGSNKWNDKLGLRHQKSVADFIRIPELLLREDNSSSGVLPSRTGKGLALRQKAANRTTATTDSEPIGLNPAALGMGDASLIDGSSGVRKSSSTSCLQDQDNSGSSSIWPTKMWNLKPDLQALSTAAIGKPIFDGFPKPITGRKNKAALD

SEQ ID NO: 6104 - DNA, 1544 bp, Glycine max
  misc_feature (1)..(1544): Ceres Seq. ID no. 14313807
gtcattcttgatggttctggagttcagaacaataataaagcgcaatcaacaagtgataaaattggaatgtctgattcaaaaaataaaatcgatgaagatgagactaatcctatcagtgcaggtagattttgtgaaaccatgcagggtgagacatctgtggaaaatatagttcttcgaaggcatactaatcctgatgctgcagctagaaatgggaaatcactaccaccagtgtatttttatgccctagaaagtgatcagcctatactggatatattaaagccgtctatagtcattgtttaccatccagatatgacctttgttagggaaattgaagtctacaaagctgagaatccctcaaaaaggttgaaagtatattttattttctatgaagattcaagtgaggttcagaagtttgaagcaagtatacgtagagagaatggagcatttgaatctttaattaggcaaaaatctttgatgatgattccagttgaccagagtgggcattctttaggattgaattctactttagagtcagatttaaatactcctcaaaacttcgtaaccagaaaagcaggtgggagaaaggaagctgagaaagaaatgcaggttattgtggacatgcgggagttcatgagcagccttccaaatgttcttcatcaaaagggaatgaacatcattccagtgaccctagaagttggtgactatattctatcaccattaatttgtgtggaaagaaaaagtattcaagatctctttatgagcttcacatcaggtcgtctataccaccaggtggagacaatggtacgatattacagaatacctgtactcttgatcgagttttcacaggataagagcttttcattccagtctgctagtgatattggtgatgatgtgacaccaaatagcattatatcaaagttgtctttgcttgctctacacttcccccgactacgaataatctggtctcgaagtttgcatgctactgccgaaatatttgcttcactgaaggcaaatcaagacgagccagatgaaacaaaagcaatcagagtgggtgtcccttcggaagaaggaattgtggaaaatgatgtgagggctgaaaattacaatacatccgctgtggagtttctaagacgatgtccaggtgttacagactcaaactacagggccataatggatggctgtaagagcttggcagaacttgcacttcttcctgtagagaagttagcggaattaatgggtggtcataaagctgctaggactcttagagattttctagatgctaaatacccaactttgttgtgagactatttgaataatttatttgtacaaaaaggtgctatccatttattcaagtcttctgttgtttcgattctacatcattgaattatgatggcaatccattgtaggaaattggaaaacgatccattgagttatttaatatttctccttctcgtggttcagtctgttgtaatttaacaatattgtattacttcacactaggtgagttcggttactgtggcagtgggatgttgtatatgtttaac

SEQ ID NO: 6105 - protein, 433 aa, Glycine max
  misc_feature (1)..(433): Ceres Seq. ID no. 14313808
VILDGSGVQNNNKAQSTSDKIGMSDSKNKIDEDETNPISAGRFCETMQGETSVENIVLRRHTNPDAAARNGKSLPPVYFYALESDQPILDILKPSIVIVYHPDMTFVREIEVYKAENPSKRLKVYFIFYEDSSEVQKFEASIRRENGAFESLIRQKSLMMIPVDQSGHSLGLNSTLESDLNTPQNFVTRKAGGRKEAEKEMQVIVDMREFMSSLPNVLHQKGMNIIPVTLEVGDYILSPLICVERKSIQDLFMSFTSGRLYHQVETMVRYYRIPVLLIEFSQDKSFSFQSASDIGDDVTPNSIISKLSLLALHFPRLRIIWSRSLHATAEIFASLKANQDEPDETKAIRVGVPSEEGIVENDVRAENYNTSAVEFLRRCPGVTDSNYRAIMDGCKSLAELALLPVEKLAELMGGHKAARTLRDFLDAKYPTLL

SEQ ID NO: 6106 - protein, 411 aa, Glycine max
  misc_feature (1)..(411): Ceres Seq. ID no. 14313809
MSDSKNKIDEDETNPISAGRFCETMQGETSVENIVLRRHTNPDAAARNGKSLPPVYFYALESDQPILDILKPSIVIVYHPDMTFVREIEVYKAENPSKRLKVYFIFYEDSSEVQKFEASIRRENGAFESLIRQKSLMMIPVDQSGHSLGLNSTLESDLNTPQNFVTRKAGGRKEAEKEMQVIVDMREFMSSLPNVLHQKGMNIIPVTLEVGDYILSPLICVERKSIQDLFMSFTSGRLYHQVETMVRYYRIPVLLIEFSQDKSFSFQSASDIGDDVTPNSIISKLSLLALHFPRLRIIWSRSLHATAEIFASLKANQDEPDETKAIRVGVPSEEGIVENDVRAENYNTSAVEFLRRCPGVTDSNYRAIMDGCKSLAELALLPVEKLAELMGGHKAARTLRDFLDAKYPTLL

SEQ ID NO: 6107 - protein, 387 aa, Glycine max
  misc_feature (1)..(387): Ceres Seq. ID no. 14313810
MQGETSVENIVLRRHTNPDAAARNGKSLPPVYFYALESDQPILDILKPSIVIVYHPDMTFVREIEVYKAENPSKRLKVYFIFYEDSSEVQKFEASIRRENGAFESLIRQKSLMMIPVDQSGHSLGLNSTLESDLNTPQNFVTRKAGGRKEAEKEMQVIVDMREFMSSLPNVLHQKGMNIIPVTLEVGDYILSPLICVERKSIQDLFMSFTSGRLYHQVETMVRYYRIPVLLIEFSQDKSFSFQSASDIGDDVTPNSIISKLSLLALHFPRLRIIWSRSLHATAEIFASLKANQDEPDETKAIRVGVPSEEGIVENDVRAENYNTSAVEFLRRCPGVTDSNYRAIMDGCKSLAELALLPVEKLAELMGGHKAARTLRDFLDAKYPTLL

SEQ ID NO: 6108 - DNA, 1328 bp, Glycine max
  misc_feature (1)..(1328): Ceres Seq. ID no. 14313847
acttcttccaatttcaaattcttcactcacccagtcgcgcttttctctgaatttcacgatgcgcacgtccagaaaagcagaaccctccaacaacgacgtcgtttcttcggaacacagaaactggagcaacatcttcaaatcgctggttcagatggtgtgcagccagcagaaccagcttcactccttcgcgagccgccacaagtttctcgaagaccgccttcgaatgcagcacgaagggtgggtctccgatgttcgatgtcacaaggatcaaatttctcagatgaatgggatgttgacgtttgaggagaagaaacagtcgctcgaggcggcaaaggcggattttgcgcttagtttgaagcacagagaggctgctatgttgaaatggattttagagcatgcagaggatgagttggcggattttaaagcctggtttgaaatcctttcttgtaaatcctctaatggagaagatcaaggaacagcatttaaggatactgacttgaagaagaaaggaagcacggatagagggaacatgtccactaggaatactgcagaaaaagagaagtattccagtgaaaacaaagatgaatttagtaggttaaaaggtgaatatgataagcttgctttagaaaaatattcggaggtgacgacactcttggcagaaaagaaatttatgtggaatcaatataatgtaatggagaatgattatgctgataaattaaggactaaagaagctgaagtagaaaaagcaaatgaaaagataaagatacttgtttctagcatggagcagctacagtctgaaaattatgaaaaggatagtaaaatatcagagttacaaagtaaaatggctgagatggaagctgagacaaaaagattgaacaatgaaatatctgaactctcagtggagttggaatctttaagaaagttcaggaacagccaagttacaccatctgttttaaatcgctgcacagaaggaactaaagcacctgagtcaggagttgttaagagcaacaagagtagaagaaatatgactctgaaaaaagaaatatgtactcctgatgctccagttcctgccaaatcctctgaaaaggggacaaaaacaaaaagcatgaagaggaaagaggctccagttattcccacttctgagactccgaaactgttctcttccggcttcaaggttccaaaactgaagtcctctgtaagggtcacatgacagatgacaccttccgataacttttagtgtgttacttaggatatgttagtcttgtacacgcgacttttgtattatatgctccttgtgtaaactatgtattatgaatgagctttctgtc

SEQ ID NO: 6109 - protein, 402 aa, Glycine max
  misc_feature (1)..(402): Ceres Seq. ID no. 14313848
LLPISNSSLTQSRFSLNFTMRTSRKAEPSNNDVVSSEHRNWSNIFKSLVQMVCSQQNQLHSFASRHKFLEDRLRMQHEGWVSDVRCHKDQISQMNGMLTFEEKKQSLEAAKADFALSLKHREAAMLKWILEHAEDELADFKAWFEILSCKSSNGEDQGTAFKDTDLKKKGSTDRGNMSTRNTAEKEKYSSENKDEFSRLKGEYDKLALEKYSEVTTLLAEKKFMWNQYNVMENDYADKLRTKEAEVEKANEKIKILVSSMEQLQSENYEKDSKISELQSKMAEMEAETKRLNNEISELSVELESLRKFRNSQVTPSVLNRCTEGTKAPESGVVKSNKSRRNMTLKKEICTPDAPVPAKSSEKGTKTKSMKRKEAPVIPTSETPKLFSSGFKVPKLKSSVRVT

SEQ ID NO: 6110 - protein, 383 aa, Glycine max
  misc_feature (1)..(383): Ceres Seq. ID no. 14313849
MRTSRKAEPSNNDVVSSEHRNWSNIFKSLVQMVCSQQNQLHSFASRHKFLEDRLRMQHEGWVSDVRCHKDQISQMNGMLTFEEKKQSLEAAKADFALSLKHREAAMLKWILEHAEDELADFKAWFEILSCKSSNGEDQGTAFKDTDLKKKGSTDRGNMSTRNTAEKEKYSSENKDEFSRLKGEYDKLALEKYSEVTTLLAEKKFMWNQYNVMENDYADKLRTKEAEVEKANEKIKILVSSMEQLQSENYEKDSKISELQSKMAEMEAETKRLNNEISELSVELESLRKFRNSQVTPSVLNRCTEGTKAPESGVVKSNKSRRNMTLKKEICTPDAPVPAKSSEKGTKTKSMKRKEAPVIPTSETPKLFSSGFKVPKLKSSVRVT

SEQ ID NO: 6111 - protein, 352 aa, Glycine max
  misc_feature (1)..(352): Ceres Seq. ID no. 14313850
MVCSQQNQLHSFASRHKFLEDRLRMQHEGWVSDVRCHKDQISQMNGMLTFEEKKQSLEAAKADFALSLKHREAAMLKWILEHAEDELADFKAWFEILSCKSSNGEDQGTAFKDTDLKKKGSTDRGNMSTRNTAEKEKYSSENKDEFSRLKGEYDKLALEKYSEVTTLLAEKKFMWNQYNVMENDYADKLRTKEAEVEKANEKIKILVSSMEQLQSENYEKDSKISELQSKMAEMEAETKRLNNEISELSVELESLRKFRNSQVTPSVLNRCTEGTKAPESGVVKSNKSRRNMTLKKEICTPDAPVPAKSSEKGTKTKSMKRKEAPVIPTSETPKLFSSGFKVPKLKSSVRVT

SEQ ID NO: 6112 - DNA, 1539 bp, Glycine max
  misc_feature (1)..(1539): Ceres Seq. ID no. 14313863
acatacatacactgattcgaatgcatcatctcctagtgcaaacacagctatcttaggattggttgtagttgataatagagacaaggaaaaagtagtagatttgagttcttctctgtcaaaggaagacaaaagattgaacaatatgcaccaagattttgttcttccctctccaaaagaaatttctgtgtgcatgacaggaaacagtacaagtagttctagaaccttgaagttgagccgaagtagaagttgtatagcaagtatcatgaggaatttatcttcagattggtttgaagatgaagacgtaattcagaacactcctccaatagggaatgaaaaagccttccctggaagaccagagggctttccgaagaacatttatgcactaaattacaatgccaatgcagagaggctttcatgtaatggccatgggaattctgtgcaaaattcttctgttcatgatgttcagaatgtgaaatcctccactaacaaggaaagagagggtaatggtcccttggctccaaaaggaaaggaaacagaaaatcttaacaggttgagtttactggctgaccatgaggttccggggacaggattggatcccatcttgtctgcaaagaatgtcaaagatattggcttggatcccatgcaagctgatggagaaactcactcacactcacattggccttcaaaattccagaggctacaaagagagatcattgaattctgggatgcgtgtaatgtttcattggttcacaggacttactttttccttctattcaaaggggaaccatcagattctatttatatggaggtagagttgagaagactatcataccttacgcaaactttttcccaaggcaatcaaactgtggaagatggacgaaccctcacacctgagttaagcatgagatatcttagaaaagagaggcaaatgctgagcaagcaaatgcataagcgactgtctaaatatgatagacagaacctgtacttgaaatggggccttcgtttgagttcaaagcataggagtttgcagttggcccatcaattgtggagtgacacaaaagacatggaccacgttagagacagtgcatcaattgttgcaaagctggttggtttagtagagccagaacaggcatttaaggagatgtttggactcaactttaccccacaacccacgagtagaaaatcttttagttggacagccagtgtgaggcatattttgtgactttggattactttttaggtagtagcttggtatggccatgtgaaaatgtagataattcttttctccccttatcttagaaacaaattgctttctgctgtatgcttctaactctgattgctattgattgtaaagaatgtgcaattctatggttgcagatttgttcatctgtcctaggttggttccaggtagaacatcatgaatagttcaatatggattgttacctgggaaaaaatatgcaatgtgattttttacgtgtgtgctttattgtaacagtccattctttagttaacattaagaatcataaaacctagacgaac

SEQ ID NO: 6113 - protein, 406 aa, Glycine max
  misc_feature (1)..(406): Ceres Seq. ID no. 14313864
HTYTDSNASSPSANTAILGLVVVDNRDKEKVVDLSSSLSKEDKRLNNMHQDFVLPSPKEISVCMTGNSTSSSRTLKLSRSRSCIASIMRNLSSDWFEDEDVIQNTPPIGNEKAFPGRPEGFPKNIYALNYNANAERLSCNGHGNSVQNSSVHDVQNVKSSTNKEREGNGPLAPKGKETENLNRLSLLADHEVPGTGLDPILSAKNVKDIGLDPMQADGETHSHSHWPSKFQRLQREIIEFWDACNVSLVHRTYFFLLFKGEPSDSIYMEVELRRLSYLTQTFSQGNQTVEDGRTLTPELSMRYLRKERQMLSKQMHKRLSKYDRQNLYLKWGLRLSSKHRSLQLAHQLWSDTKDMDHVRDSASIVAKLVGLVEPEQAFKEMFGLNFTPQPTSRKSFSWTASVRHIL

SEQ ID NO: 6114 - protein, 359 aa, Glycine max
  misc_feature (1)..(359): Ceres Seq. ID no. 14313865
MHQDFVLPSPKEISVCMTGNSTSSSRTLKLSRSRSCIASIMRNLSSDWFEDEDVIQNTPPIGNEKAFPGRPEGFPKNIYALNYNANAERLSCNGHGNSVQNSSVHDVQNVKSSTNKEREGNGPLAPKGKETENLNRLSLLADHEVPGTGLDPILSAKNVKDIGLDPMQADGETHSHSHWPSKFQRLQREIIEFWDACNVSLVHRTYFFLLFKGEPSDSIYMEVELRRLSYLTQTFSQGNQTVEDGRTLTPELSMRYLRKERQMLSKQMHKRLSKYDRQNLYLKWGLRLSSKHRSLQLAHQLWSDTKDMDHVRDSASIVAKLVGLVEPEQAFKEMFGLNFTPQPTSRKSFSWTASVRHIL

SEQ ID NO: 6115 - protein, 343 aa, Glycine max
  misc_feature (1)..(343): Ceres Seq. ID no. 14313866
MTGNSTSSSRTLKLSRSRSCIASIMRNLSSDWFEDEDVIQNTPPIGNEKAFPGRPEGFPKNIYALNYNANAERLSCNGHGNSVQNSSVHDVQNVKSSTNKEREGNGPLAPKGKETENLNRLSLLADHEVPGTGLDPILSAKNVKDIGLDPMQADGETHSHSHWPSKFQRLQREIIEFWDACNVSLVHRTYFFLLFKGEPSDSIYMEVELRRLSYLTQTFSQGNQTVEDGRTLTPELSMRYLRKERQMLSKQMHKRLSKYDRQNLYLKWGLRLSSKHRSLQLAHQLWSDTKDMDHVRDSASIVAKLVGLVEPEQAFKEMFGLNFTPQPTSRKSFSWTASVRHIL

SEQ ID NO: 6116 - DNA, 1523 bp, Glycine max
  misc_feature (1)..(1523): Ceres Seq. ID no. 14313893
aatgcagtcaaacaataacatatcgtaaaaagtactactatagttgctgttttgttgaagaagaaaacaaagtagaagcaaagttctttaagagtgaaagagaccatttttgcaaccccaattgatcagctcttgaaacaaacatgaagaagaacacctctgcgatggagaatgccggtggcatcaaggcatggagtttccgtcgccaccagcttttggttagaagggtgatgcaattaaccatgttcattgctggacttcctgtgttgtgggtgtttctctctaactctgcctcttccattgaattccataccttctcacattacttcactgctcagtcaacaaaggctggttatgaatcaaagctagagagtgtttttagaactgcgtctatgaaggataagacagtgataatcacaactttaaacgatgcatgggcaaagccaggttcggtatttgacctctttcttgagagttttcgcctagggaatgagacacaatggcttttaaatcacttggtggtaataacttgggaccaaaagacaaatgcttattgccttgctttgcacaaacattgttaccaagttgaaactaaaggtgccaatttcaccggtgaagtattattcatgaccccgacatacctacacatgatgtgtagaagaactgaattcctcacttctgttcttgagatgggatataactttgtgttcacggatactgatataatgtggcttagagatcccttcaaacaattttatgaagatgcagatttccaaatagcttgtgatgctttcaatggcaactcctctgacatatacaactatccaaatggagggtttaaatacataaaatcgaataaccgaactatttggtttaacaagttctggttcaactctagcaaagagtacccagggttgggtgagcaggctgtgttcaataagatcaaaatgcaccccttaatttcccacatgaagctgaagattaggttccttagcactagctattttggagggttttgtgagcctagcaaggacttcaacaaggtctcaacaatgcatgccaattgttgtgttggcatagacaacaaagtcaatgatcttaaaattttgcttgaggattggaagaagtatatggcattgtctgaaattgacaaaaaacagtcaaatcttacttggagcgtaccacaaagttgcagtaagtcctttgaacatgccaaagaaaggaagaataaagggaggttgcgacgggctttggttgaaactgtttgatgcatttataaagaggtttgagaatgattgactcaaattttggatcaaagcaaaaggtttactttgccaagccaattcttttgcaatggaaaagaaatgtgtggaagtggtacacccattgaaaatgtaggaaacagagaaaagtttgttcaaagttttattatgagatgtaatatatgcagtatgtacaataatttatataacagtttgtataacattttttttgggtttatatctatcattataaaatgtaac

SEQ ID NO: 6117 - protein, 374 aa, Glycine max
  misc_feature (1)..(374): Ceres Seq. ID no. 14313894
MKKNTSAMENAGGIKAWSFRRHQLLVRRVMQLTMFIAGLPVLWVFLSNSASSIEFHTFSHYFTAQSTKAGYESKLESVFRTASMKDKTVIITTLNDAWAKPGSVFDLFLESFRLGNETQWLLNHLVVITWDQKTNAYCLALHKHCYQVETKGANFTGEVLFMTPTYLHMMCRRTEFLTSVLEMGYNFVFTDTDIMWLRDPFKQFYEDADFQIACDAFNGNSSDIYNYPNGGFKYIKSNNRTIWFNKFWFNSSKEYPGLGEQAVFNKIKMHPLISHMKLKIRFLSTSYFGGFCEPSKDFNKVSTMHANCCVGIDNKVNDLKILLEDWKKYMALSEIDKKQSNLTWSVPQSCSKSFEHAKERKNKGRLRRALVETV

SEQ ID NO: 6118 - protein, 367 aa, Glycine max
  misc_feature (1)..(367): Ceres Seq. ID no. 14313895
MENAGGIKAWSFRRHQLLVRRVMQLTMFIAGLPVLWVFLSNSASSIEFHTFSHYFTAQSTKAGYESKLESVFRTASMKDKTVIITTLNDAWAKPGSVFDLFLESFRLGNETQWLLNHLVVITWDQKTNAYCLALHKHCYQVETKGANFTGEVLFMTPTYLHMMCRRTEFLTSVLEMGYNFVFTDTDIMWLRDPFKQFYEDADFQIACDAFNGNSSDIYNYPNGGFKYIKSNNRTIWFNKFWFNSSKEYPGLGEQAVFNKIKMHPLISHMKLKIRFLSTSYFGGFCEPSKDFNKVSTMHANCCVGIDNKVNDLKILLEDWKKYMALSEIDKKQSNLTWSVPQSCSKSFEHAKERKNKGRLRRALVETV

SEQ ID NO: 6119 - protein, 345 aa, Glycine max
  misc_feature (1)..(345): Ceres Seq. ID no. 14313896
MQLTMFIAGLPVLWVFLSNSASSIEFHTFSHYFTAQSTKAGYESKLESVFRTASMKDKTVIITTLNDAWAKPGSVFDLFLESFRLGNETQWLLNHLVVITWDQKTNAYCLALHKHCYQVETKGANFTGEVLFMTPTYLHMMCRRTEFLTSVLEMGYNFVFTDTDIMWLRDPFKQFYEDADFQIACDAFNGNSSDIYNYPNGGFKYIKSNNRTIWFNKFWFNSSKEYPGLGEQAVFNKIKMHPLISHMKLKIRFLSTSYFGGFCEPSKDFNKVSTMHANCCVGIDNKVNDLKILLEDWKKYMALSEIDKKQSNLTWSVPQSCSKSFEHAKERKNKGRLRRALVETV

SEQ ID NO: 6120 - DNA, 1654 bp, Glycine max
  misc_feature (1)..(1654): Ceres Seq. ID no. 14313897
gtgcttcgttgtgctacgccacgaaagaatttcttgttttctgctttcgaataaacgaataagaagccttcacaccgcttcgttgtgctgtgcttgcttctcttttattctttctattagtattcgtttcgttttctccgccgtttccgtagctcggcttcagcagcaccagaaccaggtgtctactatctgactacacatgtgctgttattgtcttccaattgggtgaagtctgattgaagagcaatgcagaaggatactagtaccaccgccccatcaaccacaagtggtcgggttaggcaccgaaaacgctcaaatgaggttattccggaagttagtaaagcaaatgggaccaagttactggttaatgacaaaagcaaatacaagtctatgctaattcgagcatattcatctgtatggatgattggcggctttgttttgatcatttatatgggtcacctctacatcactgcaatggtggttgttatccaaatcttcatggcaagggagctgttcaatctactcaggagagctcatgaagataggcagctgccaggatttaggctattaaattggcattttttcttcactgcaatgttatttgtttatggacgaattctgagtcaatgcctggttaacacagtaacttcagacatggttttatattggctagtgagcaatcttataaagtatcacatggttatctgctactccctgtacattgcaggatttatgtggttcattctcacgttgaagaagaagatgtacaagtaccaatttggccagtatgcttggacacacatgattctaattgttgtatttggccagtcctccttcaccgtggcaagcatttttgaagggattttctggtttcttctcccagcaacacttattgtcattaatgatattgctgcttatatctttggtttcttctttggaagaacccctttgatcaagttatctccaaagaaaacttgggagggttttataggggcatctgttaccaccatcatctctgcatttatgcttgctaacatcatgggtcgctctcagtggctaacgtgtccaaggaaggatttgtcaactggttggcttcactgtgatcctggtccactgtttaagccagaatcttatcccttacctggatgtatttctcactggttttcttggaaagagatatcaatcctaccaattcaatggcattctttatgtctaggcttgtttgcttcaattattgcaccttttggaggcttctttgcaagtggctttaaaagggcttttaaaataaaggactttggtgatagtattccgggacatggtggaattaccgacagaatggattgccagatggttatggccgtgtttgcatacatatatcatcagtcatttgttgtgccgcaaactctctcggttgaaatgattttggaccagatatcgatgaacctaacattcgatgagcaacaagctctatattggaggcttggggaaattttacaacaggggtttgctaggatgtcttagattcatggcgaggtgtatttgttctgtcaccttctattgtattccttcacatacaggggaaaaggaaaagatactatgtacatgtgtttgttttctatcttttgagtgaaacaaattaaaggttcagaagctg

SEQ ID NO: 6121 - protein, 424 aa, Glycine max
  misc_feature (1)..(424): Ceres Seq. ID no. 14313898
MQKDTSTTAPSTTSGRVRHRKRSNEVIPEVSKANGTKLLVNDKSKYKSMLIRAYSSVWMIGGFVLIIYMGHLYITAMVVVIQIFMARELFNLLRRAHEDRQLPGFRLLNWHFFFTAMLFVYGRILSQCLVNTVTSDMVLYWLVSNLIKYHMVICYSLYIAGFMWFILTLKKKMYKYQFGQYAWTHMILIVVFGQSSFTVASIFEGIFWFLLPATLIVINDIAAYIFGFFFGRTPLIKLSPKKTWEGFIGASVTTIISAFMLANIMGRSQWLTCPRKDLSTGWLHCDPGPLFKPESYPLPGCISHWFSWKEISILPIQWHSLCLGLFASIIAPFGGFFASGFKRAFKIKDFGDSIPGHGGITDRMDCQMVMAVFAYIYHQSFVVPQTLSVEMILDQISMNLTFDEQQALYWRLGEILQQGFARMS

SEQ ID NO: 6122 - protein, 376 aa, Glycine max
  misc_feature (1)..(376): Ceres Seq. ID no. 14313899
MLIRAYSSVWMIGGFVLIIYMGHLYITAMVVVIQIFMARELFNLLRRAHEDRQLPGFRLLNWHFFFTAMLFVYGRILSQCLVNTVTSDMVLYWLVSNLIKYHMVICYSLYIAGFMWFILTLKKKMYKYQFGQYAWTHMILIVVFGQSSFTVASIFEGIFWFLLPATLIVINDIAAYIFGFFFGRTPLIKLSPKKTWEGFIGASVTTIISAFMLANIMGRSQWLTCPRKDLSTGWLHCDPGPLFKPESYPLPGCISHWFSWKEISILPIQWHSLCLGLFASIIAPFGGFFASGFKRAFKIKDFGDSIPGHGGITDRMDCQMVMAVFAYIYHQSFVVPQTLSVEMILDQISMNLTFDEQQALYWRLGEILQQGFARMS

SEQ ID NO: 6123 - protein, 366 aa, Glycine max
  misc_feature (1)..(366): Ceres Seq. ID no. 14313900
MIGGFVLIIYMGHLYITAMVVVIQIFMARELFNLLRRAHEDRQLPGFRLLNWHFFFTAMLFVYGRILSQCLVNTVTSDMVLYWLVSNLIKYHMVICYSLYIAGFMWFILTLKKKMYKYQFGQYAWTHMILIVVFGQSSFTVASIFEGIFWFLLPATLIVINDIAAYIFGFFFGRTPLIKLSPKKTWEGFIGASVTTIISAFMLANIMGRSQWLTCPRKDLSTGWLHCDPGPLFKPESYPLPGCISHWFSWKEISILPIQWHSLCLGLFASIIAPFGGFFASGFKRAFKIKDFGDSIPGHGGITDRMDCQMVMAVFAYIYHQSFVVPQTLSVEMILDQISMNLTFDEQQALYWRLGEILQQGFARMS

SEQ ID NO: 6124 - DNA, 1088 bp, Glycine max
  misc_feature (1)..(1088): Ceres Seq. ID no. 14313917
atatctgctcactataatccttatgcatcaacctttgagaaaccactaagttccaaattcagttcaagtatttatagacaggaagatgaaataatccatggtaacaattatgcttcttctagattgaaccatactcctgtaaatggggaaggtgatggtgtggttggattaagacagtcagcttcctcatcaaaatcagctagagctcttggtcagattttacctaggtctggtggtgaccaatatgacccgatttttgacagcattgaaccatcatcctcttctctgaaaaaaattgattttgatcagaagaaggaagttacaggtgaatccaacatcagcctaaggcccaaaagttcttacatgtctttggactcggatgagaagaacaagcaggaggaggttggggctgttgcctctaccacttctcaaaatattgatgaatatggtgaaacagcagatgcagaagttggtgctgttgaaaatgagagcctaagtgatgatgtggatgttgcaaaactgacttcaggggaggttgagattaatcaggtcaagtctcctgggaaaagaaaaaagagtaaggattccagatcaatgaaattgttcaaagtttccattgcaaactttgtaaaggaggttttgaaaccatcatggcggcaaggtaatatgagtaaggtggctttcaaaaccattgtgaaaaagactgtggataaagtgtcaggagccatgaaaggccaccgtgtacccaagtcccaaacgaagataagtcaatatattgattcatcacagcgaaagttgactaaacttgtgatgggttatgttgacaagtatgtcaaggtatgaaagtgaagtatgcaaatgtttctccaacattaaatgtcaatataggtgcatcatttcaacaggaaacatcgatgcttccctggagttgtctcctctcaattaaaggcatactaggtaggtgcgagaatgattgatcaacattcaagttcctcaagttttggtcgtccccaatatgtatgtattgtattttctacttgttattctttgtgatttgcttttaatttatagtttccacctcatgttat

SEQ ID NO: 6125 - protein, 280 aa, Glycine max
  misc_feature (1)..(280): Ceres Seq. ID no. 14313918
ISAHYNPYASTFEKPLSSKFSSSIYRQEDEIIHGNNYASSRLNHTPVNGEGDGVVGLRQSASSSKSARALGQILPRSGGDQYDPIFDSIEPSSSSLKKIDFDQKKEVTGESNISLRPKSSYMSLDSDEKNKQEEVGAVASTTSQNIDEYGETADAEVGAVENESLSDDVDVAKLTSGEVEINQVKSPGKRKKSKDSRSMKLFKVSIANFVKEVLKPSWRQGNMSKVAFKTIVKKTVDKVSGAMKGHRVPKSQTKISQYIDSSQRKLTKLVMGYVDKYVKV

SEQ ID NO: 6126 - protein, 159 aa, Glycine max
  misc_feature (1)..(159): Ceres Seq. ID no. 14313919
MSLDSDEKNKQEEVGAVASTTSQNIDEYGETADAEVGAVENESLSDDVDVAKLTSGEVEINQVKSPGKRKKSKDSRSMKLFKVSIANFVKEVLKPSWRQGNMSKVAFKTIVKKTVDKVSGAMKGHRVPKSQTKISQYIDSSQRKLTKLVMGYVDKYVKV

SEQ ID NO: 6127 - DNA, 2311 bp, Glycine max
  misc_feature (1)..(2311): Ceres Seq. ID no. 14313943
aagcgtcgagcctctgttctgttcatttgcatttccatttttcacactctctctgctttcaccatgtggacacttcgtcgagcttctcttcgtctcagtacgagccaaggacttaacgcgggagctacccgtgcttcggctgtcaaattagtgccaatcactgttgaagaaaatgaggctggtatccctcagtctcgtcaaatcactcacagtagatttctgtccgctgacacattttgccgcacgggtcgggtgtccctgaaatttgctgtgggcacgcgtgaactttcctcacaagctggtgctagcagcacgaaagtggatgatgatgatttggagggtgggttgtctgagctggagatacagggaagtaatgatgaatctgatgctgacctgtctgatgaagacgaggatggtggaaaaccagttgatgagatggacttatcagatgctgacccaaccaagaaaaaatcacaaggtagaaggactcaatcggaactattcaaggcaattgcaaatgctcctgggttgtctgttgattctgctctcaataagtgggttgagcatgggaaagaactaagtcggaaggagatcttgttggctgtgcgtgagcttcggagacgtaaaatgtatgggagggctttccagctctttcagtggttagagtcaaacaagaagcttgaatttatggagagtgattatgcttctcaacttgatttgattgccaagttgcgtggcctcccaaaggcagagaaatacattgagagtgttccagaatcttttagaggctagctattataccgaacattactggctaactgtgctagtcagaacaatttgattgcaacagagaaaatattcaacaaaatgaaggacttggatttaccacttacagcatttgcttgtaaccagttgctgcttttgtataagaagctggacaagaagaaaatagctgatgttttactgctgatggaaaaagagaatgtcaaaccttctctttttacttacagaatcttaatagactcaaagggccagtccaatgatattgctggaatggagcaagtgtttgagacaatgaaggaagaaggctttgaaccagacatccaaatacaggcactcttggctaggcattacacctcatctgggcttaaagaaaaagctgaagctatgttgaaggagatggaaggtgaaaacttgaaagagaatcagtgggtatgtgcaactttgctccgcctttatgcaaacctgggaaaggctgatgaagtggagagaatttggaaggtctgtgaatcaaaacctcgagttgaggactgcctggctgcagttgaagcctggggaaagttaaataaaattgaagaagcagaggcagtttttgagatggtgtcaaagaaatggaaacttaattccaagaattactcagttcttctgaagatttatgcaaataataagatgctaacgaagggtaaggaacttgtcaagctaatggctgatagtggggtgaggataggcccattaacatgggatgcacttgtgaaactgtatatccaagctggggaagttgagaaggcagactctattttgcataaggcaatccaacagaatcagctgcagccaatgtttaccacctatttggctattttagagcagtatgcaaagaggggtgacgtccataactcggagaagattttccttaaaatgagacaagcaggttatacgtcccgaataagtcagttccaagttctaatacaggcatatgtaaacgccaaggttccagcgtatggaatcagagagaggattaaagctgataacctatttcccaacaaaacgttggctaaccagttggctctagttgatgcatttaggaaaaatgcagtttccgatttgcttgattgaggcatatttagtattctgcaagggttgtttcctacgctttccatgcaactattattattagttgaatagtagattgcacatttagtttgaatgaatgttgtcttgcactgctatctataagttagatacacttttgccttttaagcgcattatattaatgcttaaatactgcttttatgattttattatgcccgcttgtttttagttgtaaagctttctttttttaaaatttagaggctacaatcttcttcccgataggataacaaaatagtagataaatgttgttttgctccccttccctcttgagtgaaataaaattaatgctttatgtagtatcttagtatctggtcaaaatgaaaagaaaatgtagtatcttttcatcttcaaactaaataaattttactataaagttttcaac

SEQ ID NO: 6128 - protein, 341 aa, Glycine max
  misc_feature (1)..(341): Ceres Seq. ID no. 14313944
MKDLDLPLTAFACNQLLLLYKKLDKKKIADVLLLMEKENVKPSLFTYRILIDSKGQSNDIAGMEQVFETMKEEGFEPDIQIQALLARHYTSSGLKEKAEAMLKEMEGENLKENQWVCATLLRLYANLGKADEVERIWKVCESKPRVEDCLAAVEAWGKLNKIEEAEAVFEMVSKKWKLNSKNYSVLLKIYANNKMLTKGKELVKLMADSGVRIGPLTWDALVKLYIQAGEVEKADSILHKAIQQNQLQPMFTTYLAILEQYAKRGDVHNSEKIFLKMRQAGYTSRISQFQVLIQAYVNAKVPAYGIRERIKADNLFPNKTLANQLALVDAFRKNAVSDLLD

SEQ ID NO: 6129 - protein, 307 aa, Glycine max
  misc_feature (1)..(307): Ceres Seq. ID no. 14313945
MEKENVKPSLFTYRILIDSKGQSNDIAGMEQVFETMKEEGFEPDIQIQALLARHYTSSGLKEKAEAMLKEMEGENLKENQWVCATLLRLYANLGKADEVERIWKVCESKPRVEDCLAAVEAWGKLNKIEEAEAVFEMVSKKWKLNSKNYSVLLKIYANNKMLTKGKELVKLMADSGVRIGPLTWDALVKLYIQAGEVEKADSILHKAIQQNQLQPMFTTYLAILEQYAKRGDVHNSEKIFLKMRQAGYTSRISQFQVLIQAYVNAKVPAYGIRERIKADNLFPNKTLANQLALVDAFRKNAVSDLLD

SEQ ID NO: 6130 - protein, 279 aa, Glycine max
  misc_feature (1)..(279): Ceres Seq. ID no. 14313946
MEQVFETMKEEGFEPDIQIQALLARHYTSSGLKEKAEAMLKEMEGENLKENQWVCATLLRLYANLGKADEVERIWKVCESKPRVEDCLAAVEAWGKLNKIEEAEAVFEMVSKKWKLNSKNYSVLLKIYANNKMLTKGKELVKLMADSGVRIGPLTWDALVKLYIQAGEVEKADSILHKAIQQNQLQPMFTTYLAILEQYAKRGDVHNSEKIFLKMRQAGYTSRISQFQVLIQAYVNAKVPAYGIRERIKADNLFPNKTLANQLALVDAFRKNAVSDLLD

SEQ ID NO: 6131 - DNA, 1359 bp, Glycine max
  misc_feature (1)..(1359): Ceres Seq. ID no. 14313947
acattgccacataacacaacatcgaaaccctctctccctctccctctcttcctctccctctcttccaaccattccgaatgtgaacaagttgttgttgttgaacggtattatatatagtgtgtagtgtggtggtttttttttctcttcttgaaggtgcaaaaatgaatgatggtagacaaatgggggtgcattacgtagacgctgggttcccttatgctgttaatgataacttcgtggattttttccaaggattcactcatgtgcccgtcaattatgcctttgctggctcaattcctgatcaggaaagtgtctactggtcaatgaacatgaatccctataagtttggattgtctggtcctgggagtacatcttactatagttcttatgaggtaaatggtcatttgccgagaatggagatagatagggctgagtgggaatacccttcgacaattaccactgtggaagaaccagctacaacagattctccacctagaagagatggagtcacgagcatgcagaccatccctgaagaatgcagtccaaatcatcatgagtccaacagtagtagccaggtcatatggcaagacaacatctatcctgatgatatgacttatgaggaactactggacctgggggaggcagttgggactcaaagccgaggtctttcccaagaacttattgatatgcttccaacctcaaagtacaaatttggtagtttattcaagagaaaaaattctgggaaaaggtgtgtaatttgtcagatgacatacagaagaggtgaccagcaaatgaaattgccatgcagccatgtctatcatggtgaatgcatcaccaagtggcttagcattaacaagaaatgtcctgtttgcaacactgaggtttttggcgaggaatcaacgcattagcatcaaggtggcaaaagaggatcctttttgctctattaatttttgcttctcatccaactcaccctctccctcccattctcttttttaagttttaattttttacacgtaggtaggtgtagtatgaagaactatggcagctctcacacaatatatgttttgtttactagaaacaacctattggagtcgcatcttcttgtggttaatgtgtgattttgtgtgtattcatgcaatatatattctcttagcttttgtgccccttcctttggtatttgggattgaaaaatctgcttctcagccattgaccaacatagaagtgttgagattttggagtaacaatctcatgagcatgctaaatggattgaaaaaggaaatgtgtggaatgctcggggatatggagatcttaatttgagaaaagtgcatgtttcgatatccagtgaaaaattacttgaagcat

SEQ ID NO: 6132 - protein, 247 aa, Glycine max
  misc_feature (1)..(247): Ceres Seq. ID no. 14313948
MNDGRQMGVHYVDAGFPYAVNDNFVDFFQGFTHVPVNYAFAGSIPDQESVYWSMNMNPYKFGLSGPGSTSYYSSYEVNGHLPRMEIDRAEWEYPSTITTVEEPATTDSPPRRDGVTSMQTIPEECSPNHHESNSSSQVIWQDNIYPDDMTYEELLDLGEAVGTQSRGLSQELIDMLPTSKYKFGSLFKRKNSGKRCVICQMTYRRGDQQMKLPCSHVYHGECITKWLSINKKCPVCNTEVFGEESTH

SEQ ID NO: 6133 - protein, 241 aa, Glycine max
  misc_feature (1)..(241): Ceres Seq. ID no. 14313949
MGVHYVDAGFPYAVNDNFVDFFQGFTHVPVNYAFAGSIPDQESVYWSMNMNPYKFGLSGPGSTSYYSSYEVNGHLPRMEIDRAEWEYPSTITTVEEPATTDSPPRRDGVTSMQTIPEECSPNHHESNSSSQVIWQDNIYPDDMTYEELLDLGEAVGTQSRGLSQELIDMLPTSKYKFGSLFKRKNSGKRCVICQMTYRRGDQQMKLPCSHVYHGECITKWLSINKKCPVCNTEVFGEESTH

SEQ ID NO: 6134 - protein, 194 aa, Glycine max
  misc_feature (1)..(194): Ceres Seq. ID no. 14313950
MNMNPYKFGLSGPGSTSYYSSYEVNGHLPRMEIDRAEWEYPSTITTVEEPATTDSPPRRDGVTSMQTIPEECSPNHHESNSSSQVIWQDNIYPDDMTYEELLDLGEAVGTQSRGLSQELIDMLPTSKYKFGSLFKRKNSGKRCVICQMTYRRGDQQMKLPCSHVYHGECITKWLSINKKCPVCNTEVFGEESTH

SEQ ID NO: 6135 - DNA, 1349 bp, Glycine max
  misc_feature (1)..(1349): Ceres Seq. ID no. 14313951
gatctaaatctaacggaaaatattaccttcattatctcagcttctatgaaaaagcaactatactcatcacccacttactcctcccaccaaaaatccacacccggtgttaacatgagagaaagattggttcgcttgactgaaactgtcaatgaactcagaaccaacgtcgaaaccgaagtccaaaaccaggataacctcgaaaaagttagctcaaagaactacactcttatgaacacacaaatcaaggctttgagaaaagctttcaacacccttgctgatgtgattatggaagagttggacgctattaaatcagatgttgctcgtgattctcaggaggctaatgccgctattttccgcaagcttgatgagcttggttcacaagttaatagacttcaaaatgagaagcaggatcaaagggaacaaatgagtaatgttgaacagagtttgagagaaagaatagaagctttggaaagaaagcaagatgagaccagtcaagatgtccaagcagtcgtagaaaacaccaaagaagacaatagagtcctttatgaaaagctccacagtgtcattagaagtaacacttcaaagattgaccagttagctcaggacaatgaaaatgtgaatattgctttagatgaattaaagaacaagagcaatactgatggttctaatataaaggacatattccacaagattggcgaagtggatgatgaactaaagcaccatactcatgaactagccaataagcttggtgataccagaaaccagattactacacttagagaaagcttaaagggagacatttcaaacgctgctaaagctcaaattgagataaccagaagggttgaagaagtgaacactagacttaatgagaaggttcatgctgatcagttaagtgctcaacaaagattctctgaaattgaggacttggtcaatcaagttcaacatgagttccaggataatgttcaagagttggcaaagattcacaaggaaagttcgactcagattattgtggactttgaaaaggcgattagttctattaataatgacaataagatcttgtataagaagtttgcagtattggaaggatcagtaggaaagaatagagaagatcttggggcgatgatatcagatcatgagcatagtgttagcagaaagaatgagcaacttaacagagcggtctttgatatatgcagacaattgaatattaataatcctttgctttcgtattgatttacttttgatttagtatgatccgttcaattttttttacttttgaaatttatttgcataaaaaactgactatgaatacttctataaagatttttatgaataaagatccttcttagaac

SEQ ID NO: 6136 - protein, 409 aa, Glycine max
  misc_feature (1)..(409): Ceres Seq. ID no. 14313952
DLNLTENITFIISASMKKQLYSSPTYSSHQKSTPGVNMRERLVRLTETVNELRTNVETEVQNQDNLEKVSSKNYTLMNTQIKALRKAFNTLADVIMEELDAIKSDVARDSQEANAAIFRKLDELGSQVNRLQNEKQDQREQMSNVEQSLRERIEALERKQDETSQDVQAVVENTKEDNRVLYEKLHSVIRSNTSKIDQLAQDNENVNIALDELKNKSNTDGSNIKDIFHKIGEVDDELKHHTHELANKLGDTRNQITTLRESLKGDISNAAKAQIEITRRVEEVNTRLNEKVHADQLSAQQRFSEIEDLVNQVQHEFQDNVQELAKIHKESSTQIIVDFEKAISSINNDNKILYKKFAVLEGSVGKNREDLGAMISDHEHSVSRKNEQLNRAVFDICRQLNINNPLLSY

SEQ ID NO: 6137 - protein, 394 aa, Glycine max
  misc_feature (1)..(394): Ceres Seq. ID no. 14313953
MKKQLYSSPTYSSHQKSTPGVNMRERLVRLTETVNELRTNVETEVQNQDNLEKVSSKNYTLMNTQIKALRKAFNTLADVIMEELDAIKSDVARDSQEANAAIFRKLDELGSQVNRLQNEKQDQREQMSNVEQSLRERIEALERKQDETSQDVQAVVENTKEDNRVLYEKLHSVIRSNTSKIDQLAQDNENVNIALDELKNKSNTDGSNIKDIFHKIGEVDDELKHHTHELANKLGDTRNQITTLRESLKGDISNAAKAQIEITRRVEEVNTRLNEKVHADQLSAQQRFSEIEDLVNQVQHEFQDNVQELAKIHKESSTQIIVDFEKAISSINNDNKILYKKFAVLEGSVGKNREDLGAMISDHEHSVSRKNEQLNRAVFDICRQLNINNPLLSY

SEQ ID NO: 6138 - protein, 372 aa, Glycine max
  misc_feature (1)..(372): Ceres Seq. ID no. 14313954
MRERLVRLTETVNELRTNVETEVQNQDNLEKVSSKNYTLMNTQIKALRKAFNTLADVIMEELDAIKSDVARDSQEANAAIFRKLDELGSQVNRLQNEKQDQREQMSNVEQSLRERIEALERKQDETSQDVQAVVENTKEDNRVLYEKLHSVIRSNTSKIDQLAQDNENVNIALDELKNKSNTDGSNIKDIFHKIGEVDDELKHHTHELANKLGDTRNQITTLRESLKGDISNAAKAQIEITRRVEEVNTRLNEKVHADQLSAQQRFSEIEDLVNQVQHEFQDNVQELAKIHKESSTQIIVDFEKAISSINNDNKILYKKFAVLEGSVGKNREDLGAMISDHEHSVSRKNEQLNRAVFDICRQLNINNPLLSY

SEQ ID NO: 6139 - DNA, 1095 bp, Glycine max
  misc_feature (1)..(1095): Ceres Seq. ID no. 14313959
acaaactcacttcacctgtttcgtgcaaaaacaattcctgttgtctctccacagtccctccctcacattctctctctagctttttagagagagagagagagaagaagaagaagacatggagatcaagaagaggtttggggtgttgatgtgtgcagaggattcggagtacgtgaaaaaagtgtacggagggtattctggggttttcgtgagaatgctggcggaggagggagagacatgggacgtgtacaaggtggcgcgtggggagtttcctgacgaagatgatttgggtctctatgatgggtttgtgatcactggcagctgcagtgacgcacatggcaacgacacatgggtcagtgatcttctcaacttgcttcgcaaactcgattccatcaacaccaagatcctcggcatttgctttggccaccagatacttgggcgtgcattgggagggaaggtgactcgttctactactggatgggatcttggtgtcagaaccataacattgtcaccatctttgcgatttgctttgtcttctcttgatcttccatcaagactttccattatcgaatgccacagggatgagatccgagagctaccagccaaggcagaggttattgcttggtcggataagactggaattgaaatgttcaggtatggagatcacattatgggaatccaaggtcaccctgagtactccaaagacattcttttgcaccttattgaccgtctcattcaacgcaattacatcatagatgcttttggtaaacaagcaagggagagggctgcgttgtgggagccagatagggaggcttggaagaaactctgtgtcacttttttgaagggtagattgtgacataaaaatggcattgaaaagaggaatttcagttctgtaaagaagcgataatatttaaaagtagtcgtatgggaggggtctatgcatagaagttataggttggtagcactaatgtggtgtgttaattagttggctttgttaggttgccagccattaatgttgataggtgctttctatgtaagctcaactatatcaatggtcaaataattagagcaataaaaagtttcagtgttctcccgttt

SEQ ID NO: 6140 - protein, 245 aa, Glycine max
  misc_feature (1)..(245): Ceres Seq. ID no. 14313960
MEIKKRFGVLMCAEDSEYVKKVYGGYSGVFVRMLAEEGETWDVYKVARGEFPDEDDLGLYDGFVITGSCSDAHGNDTWVSDLLNLLRKLDSINTKILGICFGHQILGRALGGKVTRSTTGWDLGVRTITLSPSLRFALSSLDLPSRLSIIECHRDEIRELPAKAEVIAWSDKTGIEMFRYGDHIMGIQGHPEYSKDILLHLIDRLIQRNYIIDAFGKQARERAALWEPDREAWKKLCVTFLKGRL

SEQ ID NO: 6141 - protein, 235 aa, Glycine max
  misc_feature (1)..(235): Ceres Seq. ID no. 14313961
MCAEDSEYVKKVYGGYSGVFVRMLAEEGETWDVYKVARGEFPDEDDLGLYDGFVITGSCSDAHGNDTWVSDLLNLLRKLDSINTKILGICFGHQILGRALGGKVTRSTTGWDLGVRTITLSPSLRFALSSLDLPSRLSIIECHRDEIRELPAKAEVIAWSDKTGIEMFRYGDHIMGIQGHPEYSKDILLHLIDRLIQRNYIIDAFGKQARERAALWEPDREAWKKLCVTFLKGRL

SEQ ID NO: 6142 - protein, 213 aa, Glycine max
  misc_feature (1)..(213): Ceres Seq. ID no. 14313962
MLAEEGETWDVYKVARGEFPDEDDLGLYDGFVITGSCSDAHGNDTWVSDLLNLLRKLDSINTKILGICFGHQILGRALGGKVTRSTTGWDLGVRTITLSPSLRFALSSLDLPSRLSIIECHRDEIRELPAKAEVIAWSDKTGIEMFRYGDHIMGIQGHPEYSKDILLHLIDRLIQRNYIIDAFGKQARERAALWEPDREAWKKLCVTFLKGRL

SEQ ID NO: 6143 - DNA, 1390 bp, Glycine max
  misc_feature (1)..(1390): Ceres Seq. ID no. 14314015
attcattgcacgcagttcctggaaagtagcaaagtaaagctctcttggttttgggaaccgaaacctaagaaaaacgcagaatctgtttcggaaagcgaaggaggcatggcatttgagtccaacgaagttgcagccacaacgctccaagccatatgctacaagcgcggttccctccagcttctcgatcagagaaagctccctctggagacagtttacttggaaattcgggattcaacggatggctggaatgccatacgggaaatggtggtccggggagcacctgctattgcaattgcagcggcactctctttggctgtggaggtgttcaatttagattttaatgggtcagctactgatgctgtatccttgctgcagaagaaattagaatatcttgtcacaagtcggccaactgcagtgaacctatcagatgctgcgacaaaactcaaagaagtgatatcaaatgctgctgctaccacttcagagggaaggagtgttttccaagtgtatatagatgctgctgaagttatgcttgaggatgatgttgcgtcaaatagagctattggttcttatggagctagtattattcaacaacaaacagagaaacaaaagctttctgttttgactcattgcaacactggaagtctagccacagctggatatggtactgctctgggtgtcatccgtgcacttcatagtgccggagttctaaaaagggcttattgcacagaaacacgcccatttaatcaaggatctagacttactgcctttgagttggtgcatgaaaaaataccaggaactcttattgccgattctgctgcagctgcattaatgaaggcaggacatgtggatgctgttgttgttggggcagatcgggttgcatcaaatggtgacacagccaacaaaattggaacctacagcgttgccttgtccgctaagtttcataatgtacctttttatgtggctgcacccctaacttccattgatctatcactttcttctggacaagaaattgtcattgaggagaggtctcccaaggaattgctgaacacacatggaggacttggagagcagattgctgcctcaggaatttctgtgtggaacccagcttttgatgttactcctgctaatctaatatcggggatcatcactgagaagggtgtcattacgaagacatctgctggtgatgcatttgacatcaaagccttcgtacagaaaacaggttaaggtagagtgagatttttatcacacgttacaacattgtaggcttgaaaagtattggagtggtagggttctttaagagcctctttggtacgcaagttagataagacttattaactttgagacctaattgtataagatgataacatcaatatattatgcaatgtttggt

SEQ ID NO: 6144 - protein, 407 aa, Glycine max
  misc_feature (1)..(407): Ceres Seq. ID no. 14314016
IHCTQFLESSKVKLSWFWEPKPKKNAESVSESEGGMAFESNEVAATTLQAICYKRGSLQLLDQRKLPLETVYLEIRDSTDGWNAIREMVVRGAPAIAIAAALSLAVEVFNLDFNGSATDAVSLLQKKLEYLVTSRPTAVNLSDAATKLKEVISNAAATTSEGRSVFQVYIDAAEVMLEDDVASNRAIGSYGASIIQQQTEKQKLSVLTHCNTGSLATAGYGTALGVIRALHSAGVLKRAYCTETRPFNQGSRLTAFELVHEKIPGTLIADSAAAALMKAGHVDAVVVGADRVASNGDTANKIGTYSVALSAKFHNVPFYVAAPLTSIDLSLSSGQEIVIEERSPKELLNTHGGLGEQIAASGISVWNPAFDVTPANLISGIITEKGVITKTSAGDAFDIKAFVQKTG

SEQ ID NO: 6145 - protein, 372 aa, Glycine max
  misc_feature (1)..(372): Ceres Seq. ID no. 14314017
MAFESNEVAATTLQAICYKRGSLQLLDQRKLPLETVYLEIRDSTDGWNAIREMVVRGAPAIAIAAALSLAVEVFNLDFNGSATDAVSLLQKKLEYLVTSRPTAVNLSDAATKLKEVISNAAATTSEGRSVFQVYIDAAEVMLEDDVASNRAIGSYGASIIQQQTEKQKLSVLTHCNTGSLATAGYGTALGVIRALHSAGVLKRAYCTETRPFNQGSRLTAFELVHEKIPGTLIADSAAAALMKAGHVDAVVVGADRVASNGDTANKIGTYSVALSAKFHNVPFYVAAPLTSIDLSLSSGQEIVIEERSPKELLNTHGGLGEQIAASGISVWNPAFDVTPANLISGIITEKGVITKTSAGDAFDIKAFVQKTG

SEQ ID NO: 6146 - protein, 320 aa, Glycine max
  misc_feature (1)..(320): Ceres Seq. ID no. 14314018
MVVRGAPAIAIAAALSLAVEVFNLDFNGSATDAVSLLQKKLEYLVTSRPTAVNLSDAATKLKEVISNAAATTSEGRSVFQVYIDAAEVMLEDDVASNRAIGSYGASIIQQQTEKQKLSVLTHCNTGSLATAGYGTALGVIRALHSAGVLKRAYCTETRPFNQGSRLTAFELVHEKIPGTLIADSAAAALMKAGHVDAVVVGADRVASNGDTANKIGTYSVALSAKFHNVPFYVAAPLTSIDLSLSSGQEIVIEERSPKELLNTHGGLGEQIAASGISVWNPAFDVTPANLISGIITEKGVITKTSAGDAFDIKAFVQKTG

SEQ ID NO: 6147 - DNA, 1475 bp, Glycine max
  misc_feature (1)..(1475): Ceres Seq. ID no. 14314031
aggactagcatttgcaccaaatgtgagtcacgcagctcttcactttgaagactgaagacggtggcgtttagggtttcggaagagcatgcaattgaacccaaatggcgacggctgaagatgctccagtgctccctgaggacctcatagtggaaattctgtcatgggttgaagtgaagaatctcatgcgattcaggtgcgtttccaagtcctggaattccctcatcttcaatcccacattcattaaattgcaccttcaaaggtcctcccaaaacatccacatcctgttaacatttgaccaagattcatcgaacccctacccgtaccatgatgataactacatctccgtcgttgccgcaccctgctctatacagcgtttacttgagaacccatcatccactatttataatatagttcattttctcgaggctcagtcaacatcatcatcgtccactatttattttgatgtttgttaccgatttaagcacacttatttgttcttgggtgtatgcaatgggttggtttgcttgcttgattgtttgtatgaggatgaatttgaggaatactgggtccgattttggaacccggccactagggccatgtccgcagattcgccccacttgcgtgtccattcgagcaattataaacttggagacattgctgtgaagcatgcgtttgggtacgatgattcgagtgacacttacaaggtgttggcgatcctttttaacgttaaatcacaagattgggagctgagagttcactgcatgggtgatgacactggttggagaaatgttttgacttgttctgcttttcccattttgcaacaagtttatgggcagtttgtgagtggcactcttaactggctagcacttaacaattcgtcgggttctgatcattatcaatgggaaactgtcactgtcgatcagttagtcattttttcctatgatctgaagaacgagacatacagttatttgtcgatgcctgatggtctttctgaaatctctcttgacgagccttatcttggggttttgaatggctgcctttgtctttctcatgatcacaggcgaaccaatcttgttgtttggctaatgagagagtttggagctgaaaagtcttggactcagttgctgaatgtaagctatcatcatcttcaagttctagattttccaccttgtccagtggtacctttgtgcaagtctgaaaatgacgacgtcctgttgctggaagactatggaggtggtgcagaatttgttctggttgataagagagataatagtatagaccgcatggaaggtttcaacaatggattatcgtctttctctgcatttgtctctcatgattatgttcaaagtttggttttgccatatcgaaattaagctacctgcatttgcttatattatgtaagtggtttcagaaccgtggcatttaacatttggacaggagagatagcttgaataattttggtggttccttagttt

SEQ ID NO: 6148 - protein, 423 aa, Glycine max
  misc_feature (1)..(423): Ceres Seq. ID no. 14314032
MATAEDAPVLPEDLIVEILSWVEVKNLMRFRCVSKSWNSLIFNPTFIKLHLQRSSQNIHILLTFDQDSSNPYPYHDDNYISVVAAPCSIQRLLENPSSTIYNIVHFLEAQSTSSSSTIYFDVCYRFKHTYLFLGVCNGLVCLLDCLYEDEFEEYWVRFWNPATRAMSADSPHLRVHSSNYKLGDIAVKHAFGYDDSSDTYKVLAILFNVKSQDWELRVHCMGDDTGWRNVLTCSAFPILQQVYGQFVSGTLNWLALNNSSGSDHYQWETVTVDQLVIFSYDLKNETYSYLSMPDGLSEISLDEPYLGVLNGCLCLSHDHRRTNLVVWLMREFGAEKSWTQLLNVSYHHLQVLDFPPCPVVPLCKSENDDVLLLEDYGGGAEFVLVDKRDNSIDRMEGFNNGLSSFSAFVSHDYVQSLVLPYRN

SEQ ID NO: 6149 - protein, 396 aa, Glycine max
  misc_feature (1)..(396): Ceres Seq. ID no. 14314033
MRFRCVSKSWNSLIFNPTFIKLHLQRSSQNIHILLTFDQDSSNPYPYHDDNYISVVAAPCSIQRLLENPSSTIYNIVHFLEAQSTSSSSTIYFDVCYRFKHTYLFLGVCNGLVCLLDCLYEDEFEEYWVRFWNPATRAMSADSPHLRVHSSNYKLGDIAVKHAFGYDDSSDTYKVLAILFNVKSQDWELRVHCMGDDTGWRNVLTCSAFPILQQVYGQFVSGTLNWLALNNSSGSDHYQWETVTVDQLVIFSYDLKNETYSYLSMPDGLSEISLDEPYLGVLNGCLCLSHDHRRTNLVVWLMREFGAEKSWTQLLNVSYHHLQVLDFPPCPVVPLCKSENDDVLLLEDYGGGAEFVLVDKRDNSIDRMEGFNNGLSSFSAFVSHDYVQSLVLPYRN

SEQ ID NO: 6150 - protein, 258 aa, Glycine max
  misc_feature (1)..(258): Ceres Seq. ID no. 14314034
MSADSPHLRVHSSNYKLGDIAVKHAFGYDDSSDTYKVLAILFNVKSQDWELRVHCMGDDTGWRNVLTCSAFPILQQVYGQFVSGTLNWLALNNSSGSDHYQWETVTVDQLVIFSYDLKNETYSYLSMPDGLSEISLDEPYLGVLNGCLCLSHDHRRTNLVVWLMREFGAEKSWTQLLNVSYHHLQVLDFPPCPVVPLCKSENDDVLLLEDYGGGAEFVLVDKRDNSIDRMEGFNNGLSSFSAFVSHDYVQSLVLPYRN

SEQ ID NO: 6151 - DNA, 1189 bp, Glycine max
  misc_feature (1)..(1189): Ceres Seq. ID no. 14314037
atataaacttacccttgccttgtcaaccaacacaaagaaggttaatctcaccaatctgacagggatcatcaatggcaaagcaattaattcccttcataatctctcttctcctcttcattttcacagaagtggaaggggctaaaaggtcttatggggtatacaacagcaaccctgtaaaactgtttgtttttggggactcctatgttgacactgggaatttcgtgcattcagaatcatacaagcctcccagtggaatcacttttcctggtaaccctgcagggagattctgcgacggtcgcatcatcactgattacgttgcttcctttctgaaaattgaatcccccacaccatatacttttagaaattcatctaatcttcactacggtataaactttgcctatggagggaccggtattttcagtacttcgattgatggaccaaacgcgactgcccaaatcgactcatttgagaagctaatccaacaaaatatctataccaaacatgatcttgaatcctcaattgctctcgtcaatgccggtggtaatgattatacaaatgcattaaaaactgggcgcattattgatttaccaggcttcatggaatcccttgtgaagcaaatgtctgtaaatcttaaacgcattcgcagcttagggataaaaaaggtagcagttgggttattacagccaattgggtgtttgcctgtgttaaatgtgatatctttccgtacgaactgcattggccttttgaacgtgatctccaaagatcacaacaaaatgttgctcaaagctgtgcaagaactcaacaaggaagcagcagacaaatcagttttcataacactggacctctacaactccttcctctctgcaattgaaactatgcagaaaaagcgtgcagaaaagtctacactgatgaatccgttgcaaccatgctgtgagggaaacaatttggaagattcatgtggaagtctggatgacgaaggatcaaagaaatacagtttatgtgagaacccgaaactttctttcttttgggacacacttcacccttctcaaaatggttggtttgcagtctacacaatattgcaatctactcttggccaacttattacatgaaaaaaacttctaatcaatattagtgtatttggattagttccatgatgaaaaataatctattaatccttcaaagttattgc

SEQ ID NO: 6152 - protein, 345 aa, Glycine max
  misc_feature (1)..(345): Ceres Seq. ID no. 14314038
MAKQLIPFIISLLLFIFTEVEGAKRSYGVYNSNPVKLFVFGDSYVDTGNFVHSESYKPPSGITFPGNPAGRFCDGRIITDYVASFLKIESPTPYTFRNSSNLHYGINFAYGGTGIFSTSIDGPNATAQIDSFEKLIQQNIYTKHDLESSIALVNAGGNDYTNALKTGRIIDLPGFMESLVKQMSVNLKRIRSLGIKKVAVGLLQPIGCLPVLNVISFRTNCIGLLNVISKDHNKMLLKAVQELNKEAADKSVFITLDLYNSFLSAIETMQKKRAEKSTLMNPLQPCCEGNNLEDSCGSLDDEGSKKYSLCENPKLSFFWDTLHPSQNGWFAVYTILQSTLGQLIT

SEQ ID NO: 6153 - DNA, 1046 bp, Glycine max
  misc_feature (1)..(1046): Ceres Seq. ID no. 14314042
acaaacaattaaacaaattaatcttcaattctctcaattttctttttgtttttccctcttttttttttttcttttctggtcatcatcatgcccagaacaaaggtgaaaatcgccttcataaccaacgatgctgcgaggagggcagcatacaggaaaaggaagaagggaattctgaagaagatggaggaactcagcaccctttgtggaattgaagcatgtgctatagcatatagcccctatgatcccgagccagtgatttggccatccgaattgggtgtccatcatgtgctgggaaaattcaggaccatgtctgaatgggagaagaacaagaagatggcgaaccaggagagcttcctagggcatatgatcgcgaagcacaaggagcagctgaagaaactcgtgaaggaaaacaaggagaaggagatgaccgtgttcatgcatcaatgccttgatgaagggagggttctgccagataacaacttgacggcagacgatttgaacgatctttcgtcgatcatcgaacagaacctgaaggatgtttgtagaaggttggaaacgctgaatgttatggagaagacaccaccacaccaacaacccccccagatccaatcatcaccagtgttggatatgagtgctaaccatgatcaaaagcagaagaagtttatggatttgcttaatggtaatgaggatgagacaacaacagtgcctccatttgaatcagatgctaatctccaactccaaattgggttttaggctaacctgttaccttgaaaaaattaagcacgtgtgtgcttgttagtcttttgggaatcatgtttcagttcaatttgtctatgctttgatttttaattttaattactgtcctagcttgtgtgtcaatgtgaagacacaatagtaagtagtcatttaattactgtctagctagtcttcacattttattttcgtgcctggaaatacatgttgatttggtttgacatgtttatcctgctttcaggacttggttgttcatttaatcattatggtttaattaagaatgtttcgcttgc

SEQ ID NO: 6154 - protein, 221 aa, Glycine max
  misc_feature (1)..(221): Ceres Seq. ID no. 14314043
MPRTKVKIAFITNDAARRAAYRKRKKGILKKMEELSTLCGIEACAIAYSPYDPEPVIWPSELGVHHVLGKFRTMSEWEKNKKMANQESFLGHMIAKHKEQLKKLVKENKEKEMTVFMHQCLDEGRVLPDNNLTADDLNDLSSIIEQNLKDVCRRLETLNVMEKTPPHQQPPQIQSSPVLDMSANHDQKQKKFMDLLNGNEDETTTVPPFESDANLQLQIGF

SEQ ID NO: 6155 - protein, 190 aa, Glycine max
  misc_feature (1)..(190): Ceres Seq. ID no. 14314044
MEELSTLCGIEACAIAYSPYDPEPVIWPSELGVHHVLGKFRTMSEWEKNKKMANQESFLGHMIAKHKEQLKKLVKENKEKEMTVFMHQCLDEGRVLPDNNLTADDLNDLSSIIEQNLKDVCRRLETLNVMEKTPPHQQPPQIQSSPVLDMSANHDQKQKKFMDLLNGNEDETTTVPPFESDANLQLQIGF

SEQ ID NO: 6156 - protein, 148 aa, Glycine max
  misc_feature (1)..(148): Ceres Seq. ID no. 14314045
MSEWEKNKKMANQESFLGHMIAKHKEQLKKLVKENKEKEMTVFMHQCLDEGRVLPDNNLTADDLNDLSSIIEQNLKDVCRRLETLNVMEKTPPHQQPPQIQSSPVLDMSANHDQKQKKFMDLLNGNEDETTTVPPFESDANLQLQIGF

SEQ ID NO: 6157 - DNA, 1591 bp, Glycine max
  misc_feature (1)..(1591): Ceres Seq. ID no. 14314046
actactgttctgcaaaaaagctattttggccctgtgccaccaaagccatctcccccatttttgctcctctatctcttttttctaatcatcacaattgggtgagaaaaaaacacacacacaactcaacaatgggtgagaaagatgatggcttgggtttggggttgagtttgaagttaggatggggagaaaataatgataacaataataatcaacaacaacaccctttcaacgtgcacaagcctcctcaatcggttccaaaccaaagggtttccgtcaatagcttgttccattttcatgatcggagctccgagatgcggtcgttcttccgcggaatagacgtgaatttgccaccgcccccgccttcggcggctctggcggcgttcgatgacgagaacggggtgtcctcgccgaacagcacgatatcgagcatcagcgggaagcggagcgagagagagggaaacggagaggagaacgagagaacgtcgagttctcgcggcggcggcggaagcgacgacgatgaaggcggcgcgtgtggtggagacgccgacgccgatgcgtcgaggaagaagctgaggttgtctaaggaacaggccttggtgctggaagaaacattcaaggaacacaatactctgaacccgaagcaaaagcaagctttggcaaagcagttgaatttgatgcctaggcaggtggaggtgtggtttcaaaacagaagagcaaggaccaaattgaagcagactgaagtggattgtgaatatttgaagaggtgctgtgagaatctaactgaagagaataggaggcttcaaaaggaagtgcaagagctcagggcattgaagttatccccacagctttacatgcaaatgaaccctcccaccactctcacaatgtgcccttcatgtgagcgtgttgctgtctcatccgcatcctcttcctcatcggccaccatgccctctgccctgcctccagctaatctcaacccggtgggccctaccatccagcggccaatgcccgtcaacccttgggcagcaatgttgaatcagcaccgtggccggccataatcaaaccctccaggccgtaggtaatagggtaaagttcaggatggaagctaggacattttagttgtgctagacagaaatgaatcaaagaaataggaatcttatgtgttggttaactttactaggactttgagagctcatggtttgggaaattctatttgcatccttttttttttcattgcaccttccattctcttttacattgcagaaattagttttcggaatctacaatgcaattatagaaattaatttttgaaatgtaaaagaaaaggtagagattttgaagagttaaaaaaaaaggatgcaactagaatcatcctcatgcttttggttaactctttttgtctaggcttattttactttgagcatagatagaacatgtttttagtcaactttaggatgtgtaaagtttggacatgttaaagtagttagtgttttcatctgctgaacagtgtttgttatttgttaaccttggaaagttggaaaagggaattggaatctgtattttattttatattttatttgcttcttttcattgg

SEQ ID NO: 6158 - protein, 350 aa, Glycine max
  misc_feature (1)..(350): Ceres Seq. ID no. 14314047
YCSAKKLFWPCATKAISPIFAPLSLFSNHHNWVRKKHTHNSTMGEKDDGLGLGLSLKLGWGENNDNNNNQQQHPFNVHKPPQSVPNQRVSVNSLFHFHDRSSEMRSFFRGIDVNLPPPPPSAALAAFDDENGVSSPNSTISSISGKRSEREGNGEENERTSSSRGGGGSDDDEGGACGGDADADASRKKLRLSKEQALVLEETFKEHNTLNPKQKQALAKQLNLMPRQVEVWFQNRRARTKLKQTEVDCEYLKRCCENLTEENRRLQKEVQELRALKLSPQLYMQMNPPTTLTMCPSCERVAVSSASSSSSATMPSALPPANLNPVGPTIQRPMPVNPWAAMLNQHRGRP

SEQ ID NO: 6159 - protein, 308 aa, Glycine max
  misc_feature (1)..(308): Ceres Seq. ID no. 14314048
MGEKDDGLGLGLSLKLGWGENNDNNNNQQQHPFNVHKPPQSVPNQRVSVNSLFHFHDRSSEMRSFFRGIDVNLPPPPPSAALAAFDDENGVSSPNSTISSISGKRSEREGNGEENERTSSSRGGGGSDDDEGGACGGDADADASRKKLRLSKEQALVLEETFKEHNTLNPKQKQALAKQLNLMPRQVEVWFQNRRARTKLKQTEVDCEYLKRCCENLTEENRRLQKEVQELRALKLSPQLYMQMNPPTTLTMCPSCERVAVSSASSSSSATMPSALPPANLNPVGPTIQRPMPVNPWAAMLNQHRGRP

SEQ ID NO: 6160 - protein, 247 aa, Glycine max
  misc_feature (1)..(247): Ceres Seq. ID no. 14314049
MRSFFRGIDVNLPPPPPSAALAAFDDENGVSSPNSTISSISGKRSEREGNGEENERTSSSRGGGGSDDDEGGACGGDADADASRKKLRLSKEQALVLEETFKEHNTLNPKQKQALAKQLNLMPRQVEVWFQNRRARTKLKQTEVDCEYLKRCCENLTEENRRLQKEVQELRALKLSPQLYMQMNPPTTLTMCPSCERVAVSSASSSSSATMPSALPPANLNPVGPTIQRPMPVNPWAAMLNQHRGRP

SEQ ID NO: 6161 - DNA, 1574 bp, Glycine max
  misc_feature (1)..(1574): Ceres Seq. ID no. 14314054
aaagcagagagcaaatcaacaaaagaagccatggtagtgttacaagaagtcttcaacgttgtaccaacttccgaatcagaagagtttcagttaccaactcaaacatcgctttccctcaccttcttcgacatcctatggttaaggttaccacctgttcaacgcgtcttcttctatgaattccctcacccaacccatctcttctttgatacccttcttcccaaactcaaacactctctttctcttgcacttgcccactttttccctcttgcgggccacctcacttggccacttcactcccaaaaacccatcatcaattacaaatctggtgacactgttcccctcacagttgctgtatctgaagctgatttcaaccacctagcaggcacagatctttatgaagccaaagaaattccccatcttttaccccacttgaccatatcccacgaaaaagccacgcttttggccctgcaagctaccctctttccaaactctggattttccattggaataacctcacaccatgctgttctagatggcaagacttcaacatcgtttatcaaatcctgggcttatctttgtagagaatcacaatcacccacttctttaccacctgaactgattcctttttatgacagggaagtaatcaaagaccctaaccatttaggggtaaaatatgtcagtgattggttagagcagaatggacccaacaaccgaagcctcttggtttgggatctgcaagctccagaagatgcaactagaggcatatttcaattgtctcgttcggatattgaaaagctgaagcaaatagtggtgtccaagaagaaagggaacaacaccaaccttcgcttgtcaacctttgtgttgtctattgcctatgcttgtgttttcagggtgagagcagaggaaacaaagaacaagagagttatgttggctttgaatgttgattgcagggcacgtttggagccacctattccaccaacatattttggaaactgtgttggagcgagacttgcaattgctgaaacaagagagatattgggggaagatggcctaattgtggttgtggatgcactgaatgatgccttggggagtctcaaggatggagcactgagtggagcagaaaattggtcaaggtggttgcttgaaagttttagtgatgatgtgagaataattggtgttgctgggtcacctaggtttgaggcttatagtaatgactttggttggggaagaccaaagaaagtggagatggcttctatagacagaactggggcactttgtttatcagatagcaaaaatggtgatggggttgaggtaagttttgtgtccaacaaaagagcaatggagacctttgcttatctctttgccaatggccttcgatcttgagtccctcttggtacaatcttgtggtttttcatgaataaaaagttgaggaaaaataaaggtagagtagtgtaggtgttcttatgaaaattcgtttttaacaattaattgtctgaaatgttctggtggtgtgtaatgcttcaattatttgacaattttatgtatattaatcatgtattgctgttgattatccg

SEQ ID NO: 6162 - protein, 460 aa, Glycine max
  misc_feature (1)..(460): Ceres Seq. ID no. 14314055
KAESKSTKEAMVVLQEVFNVVPTSESEEFQLPTQTSLSLTFFDILWLRLPPVQRVFFYEFPHPTHLFFDTLLPKLKHSLSLALAHFFPLAGHLTWPLHSQKPIINYKSGDTVPLTVAVSEADFNHLAGTDLYEAKEIPHLLPHLTISHEKATLLALQATLFPNSGFSIGITSHHAVLDGKTSTSFIKSWAYLCRESQSPTSLPPELIPFYDREVIKDPNHLGVKYVSDWLEQNGPNNRSLLVWDLQAPEDATRGIFQLSRSDIEKLKQIVVSKKKGNNTNLRLSTFVLSIAYACVFRVRAEETKNKRVMLALNVDCRARLEPPIPPTYFGNCVGARLAIAETREILGEDGLIVVVDALNDALGSLKDGALSGAENWSRWLLESFSDDVRIIGVAGSPRFEAYSNDFGWGRPKKVEMASIDRTGALCLSDSKNGDGVEVSFVSNKRAMETFAYLFANGLRS

SEQ ID NO: 6163 - protein, 450 aa, Glycine max
  misc_feature (1)..(450): Ceres Seq. ID no. 14314056
MVVLQEVFNVVPTSESEEFQLPTQTSLSLTFFDILWLRLPPVQRVFFYEFPHPTHLFFDTLLPKLKHSLSLALAHFFPLAGHLTWPLHSQKPIINYKSGDTVPLTVAVSEADFNHLAGTDLYEAKEIPHLLPHLTISHEKATLLALQATLFPNSGFSIGITSHHAVLDGKTSTSFIKSWAYLCRESQSPTSLPPELIPFYDREVIKDPNHLGVKYVSDWLEQNGPNNRSLLVWDLQAPEDATRGIFQLSRSDIEKLKQIVVSKKKGNNTNLRLSTFVLSIAYACVFRVRAEETKNKRVMLALNVDCRARLEPPIPPTYFGNCVGARLAIAETREILGEDGLIVVVDALNDALGSLKDGALSGAENWSRWLLESFSDDVRIIGVAGSPRFEAYSNDFGWGRPKKVEMASIDRTGALCLSDSKNGDGVEVSFVSNKRAMETFAYLFANGLRS

SEQ ID NO: 6164 - DNA, 1384 bp, Glycine max
  misc_feature (1)..(1384): Ceres Seq. ID no. 14314068
atacaatcaaactgcaaaaaaaaaaaaaaaaacaaagcattttttttttgccgcaatcaatcaataactgtcggcgacatatccgaatcaccgttgcagtctcacgtttcctctaactgtttttctcgggctccgagctcgccggagctaacattcacggcggcgcaccgcccatttcttcaccctcactcaaaatgcagtgccaccgcgtctccgccgtgctttttctaagcttatgctttagaattgcgctagtatacgcgcaaggagagcctcatctcactgctctggaccaacattggttcccgggaaccgccacgtggtacggcgaccccgaaggtgacggtagcaccggaggggcatgtgggtatggtacgttggtggacgtgaagccgttgaaggcaagggtgggagcagtggggtcagtgctgtttaagaagggggaagggtgtggtgcttgctacaaggtgaagtgtttggaccatagcatatgttcgaagcgggcagtgacggttataataacggatgagtgcccgggctgcccgtctgaccggacgcacttcgacctcagtggctctgcctttggccgcatggcagttgtgggtgaaaacggtcagctcaggaacctaggtgaaatcccagtcatttaccgcagaacaccgtgcaagtatgctggcaaaaacattgccttccatgtcaatgaaggctccactcctttttggctatcccttctggtggagtttgaagatggagatggggacattggctccatgcatatacaagaagcagggtcgagtgagtggcagcagatgaatcatgtatggggtgcaaattggtgcattgttaaggggccattaagaggacctttctctgttaaactaagcacatctacagggaaaagcctcactgccaaagatgttattccaagcaattggactccaaaagccacttatacctctcgcttaaatttcctttcttagtacaaggtttccaactgaacaatcaccaacaccaaggcccttcttcccaaagggagaaagtaatttaataaatcaccatttacccagttaaagttgctcaagttccacaaggcagagagtcttcttggcctttgagtctttgtgttttttaataagaaagaaaagtagccgttgagtgtacaaggccatatccaatgatctttccttttcttagttttatcttttcgcttttgaatacctataattttgtcatttttgtggtgtgcaactgtttgtaccaagaagtcatggtattattggtagccctctccaaaaaggagggagagcgtgtagtgtagtatcgtagaatgcgtgtactgggctcagtgggcttcaaatgaatgaatatataaattttagaaccg

SEQ ID NO: 6165 - protein, 261 aa, Glycine max
  misc_feature (1)..(261): Ceres Seq. ID no. 14314069
MQCHRVSAVLFLSLCFRIALVYAQGEPHLTALDQHWFPGTATWYGDPEGDGSTGGACGYGTLVDVKPLKARVGAVGSVLFKKGEGCGACYKVKCLDHSICSKRAVTVIITDECPGCPSDRTHFDLSGSAFGRMAVVGENGQLRNLGEIPVIYRRTPCKYAGKNIAFHVNEGSTPFWLSLLVEFEDGDGDIGSMHIQEAGSSEWQQMNHVWGANWCIVKGPLRGPFSVKLSTSTGKSLTAKDVIPSNWTPKATYTSRLNFLS

SEQ ID NO: 6166 - DNA, 945 bp, Glycine max
  misc_feature (1)..(945): Ceres Seq. ID no. 14314070
aaacacaacaactcatcatcctatattctcttcttggatcatcttggttaagctgcagatcagaatagaataataataaataaagataagatggagactcatttggttttcttgcttggtttgatcttcactctagttgccggcgttggagcccaagcccaaggcccatccacctctcctgcgcctcccacaccccaagcatctccacctcccgtccagtcttctccgccacctgttccctcttcacctccaccctctcagtctccaccaccagcttccactccccctccatccccactcagctctcctcctccttcctctcctccaccctcctcccctcctccttcttctccaccccccgcctctcctcctccttcttctccaccccccgcctctcctcctccttcttcccctcccccttcctctccccctcctttttcaccacctcctgccactcctccccccgccactcctccccccgcagttccaccaccctcattgaccccaacagttacacctctttcttctccacctgtctcttctccagctccgtctccttccaaggtgtttgctcctgcactctctccttcccttgctcccggtcccagcctctccaccatctctccctccggcgatgacagtggggctcaaaacttgtggtcctttcagaagatgattgggagcttagtattcggatgtgctttgctgtccatgttgttctagacatcgatctctgtcttcggactcgcagatttttctgccaattcatgttattttgctatttaccctataccttacctttatatattattttgtggatgtgatcgtgggagtttattactgtatttgaactatataaattgcttgcattcttgggagatttgaggggaggttttgtattcgagggcagttattttgtatgacattactattagtttatcgatc

SEQ ID NO: 6167 - protein, 210 aa, Glycine max
  misc_feature (1)..(210): Ceres Seq. ID no. 14314071
METHLVFLLGLIFTLVAGVGAQAQGPSTSPAPPTPQASPPPVQSSPPPVPSSPPPSQSPPPASTPPPSPLSSPPPSSPPPSSPPPSSPPPASPPPSSPPPASPPPSSPPPSSPPPFSPPPATPPPATPPPAVPPPSLTPTVTPLSSPPVSSPAPSPSKVFAPALSPSLAPGPSLSTISPSGDDSGAQNLWSFQKMIGSLVFGCALLSMLF

SEQ ID NO: 6168 - DNA, 1194 bp, Glycine max
  misc_feature (1)..(1194): Ceres Seq. ID no. 14314132
gagtctttcaatgaagcaaaccagtcaataatggattacccaagtcatgaagttgatcttgacaaggaggatctggatattccatggagtgaacttattttgaaggagaacattgggacagggtcatttggaaccgtccttcgtgcggactggcgcggttctgatgttgctgtgaagattcttaaagtgcagggttttgatcctgggcgatttgaagaatttctaaaggaggtctcactcatgaagcgcctccggcatccaaacattgtacttttgatgggtgcagttattcaacccccgaagttatcaatagtaacagaatatttatcaagaggcagtttgtatgaacttctgcacatgcccaatgttggatcatcacttagtgaaaagcgtcgtttaagtatggcttatgatgttgcaagcggaatgaattatcttcatcaaatgagaccccctattgttcatagagatttgaagtctccaaatcttttggttgatgattcatacactgttaaggtatgtgattttggcctttcacgtacaaaggcaaacacatttctttcatctaaaaccgctgccggaactcctgaatggatggcacctgaagtcattcgaggagaactgtcaagcgaaaaatgtgatgtattcagctttggtgtaatcttgtgggaactagtgaccctgcaacagccatggagacaattaaatccttcacaggttgttgcagctgttggttttatgggcaaaaggctagagattccagggcatgtgaatcctcaagtggctgccttgattgagctctgctgggccacggaacactggagacgaccttctttctcctatgttatgaaatgtttgcagcaaataattgctgatgctaaagggtgaacaagtttaccctgataatcttcaacctgtatacagacaagaaacagcaatattgaacagaaaaataaatgggattccagtttattcaggaaactgctgaagaattacaatataccgttttatagagtaacctacgaatttttgttgtatatgctatttatataatcattactcacattgtcatatatattactatttgctttggatgtacctataataatcgtatgacactgggattctaatttatacatataagaattatttttatcttttaaaagaaataataataaagtttcctttcccccg

SEQ ID NO: 6169 - protein, 295 aa, Glycine max
  misc_feature (1)..(295): Ceres Seq. ID no. 14314133
ESFNEANQSIMDYPSHEVDLDKEDLDIPWSELILKENIGTGSFGTVLRADWRGSDVAVKILKVQGFDPGRFEEFLKEVSLMKRLRHPNIVLLMGAVIQPPKLSIVTEYLSRGSLYELLHMPNVGSSLSEKRRLSMAYDVASGMNYLHQMRPPIVHRDLKSPNLLVDDSYTVKVCDFGLSRTKANTFLSSKTAAGTPEWMAPEVIRGELSSEKCDVFSFGVILWELVTLQQPWRQLNPSQVVAAVGFMGKRLEIPGHVNPQVAALIELCWATEHWRRPSFSYVMKCLQQIIADAKG

SEQ ID NO: 6170 - protein, 285 aa, Glycine max
  misc_feature (1)..(285): Ceres Seq. ID no. 14314134
MDYPSHEVDLDKEDLDIPWSELILKENIGTGSFGTVLRADWRGSDVAVKILKVQGFDPGRFEEFLKEVSLMKRLRHPNIVLLMGAVIQPPKLSIVTEYLSRGSLYELLHMPNVGSSLSEKRRLSMAYDVASGMNYLHQMRPPIVHRDLKSPNLLVDDSYTVKVCDFGLSRTKANTFLSSKTAAGTPEWMAPEVIRGELSSEKCDVFSFGVILWELVTLQQPWRQLNPSQVVAAVGFMGKRLEIPGHVNPQVAALIELCWATEHWRRPSFSYVMKCLQQIIADAKG

SEQ ID NO: 6171 - protein, 215 aa, Glycine max
  misc_feature (1)..(215): Ceres Seq. ID no. 14314135
MKRLRHPNIVLLMGAVIQPPKLSIVTEYLSRGSLYELLHMPNVGSSLSEKRRLSMAYDVASGMNYLHQMRPPIVHRDLKSPNLLVDDSYTVKVCDFGLSRTKANTFLSSKTAAGTPEWMAPEVIRGELSSEKCDVFSFGVILWELVTLQQPWRQLNPSQVVAAVGFMGKRLEIPGHVNPQVAALIELCWATEHWRRPSFSYVMKCLQQIIADAKG

SEQ ID NO: 6172 - DNA, 1452 bp, Glycine max
  misc_feature (1)..(1452): Ceres Seq. ID no. 14314152
gaagcacagagagaggaacttgtaagggagcaaaaaataaaggaacaagctgttgccatcagattgaatacaccggcattggtgagattttactcattctattctatttgcagttagcataagcttgagtagtaaaatgtttcaaatcctatacatgggactgctacagattgtcggtaacaagtatttgaaatagtttagcgcaagattaaaaaatctatgtgggatacagttacttctaatggagcagatgattttgaaatgactgtctagaatttcataactattattttatcacttaatcagagcccaaatcatgtttatcaatttttagattcttaactagaattagttatagttttgattacataagagatccttacaaatttaatctctcattcattataattatataaagtttctgactgaaaccagcaggaaaactctcgatccttgaaacaccttgcggatgaaatgagtggtccattatctccaatgtcacttcctgcaccaaagcaactcaaattcactcctggagttgttaattggtcaggcagggagtcagctacatttttagatgaagcacgaaagatgatacccattggagagttgtcaacgaagaggctagcagctataggacaagccggaaaactttggaagtggaagagaagtcatcatcaatggctgctacagtttaaatggaagtggcagaagccctggaaactctcagaatggatcaaacacagtgatgagacaattatgaggtcaaggcctcgagcacaagctttgattaatgtgatatgatctgatgttgttgaactcatagtaaaggacatttccaattctgaatattgaccgcggtgtgtttcaacacagcttgacaagaggacagttgattgcaggtagtctttaccctgttgttccaaaagctttttttaactcctaaggaggcaaggactgccgagcatttctcaatgtgtttgtcatcttttccttacttcctaaaaaacagtattacatgaattcttcattctaatgaactaattgatttatgctatggggaaaataaattaaaatgaattaatggtgtaaaaggaatcaaatttccacacaagttaaaatgtactaatgagccttaacttatatgaaagttaggagtcaaaaactttagttgaaaagttctcatgaactagaagctgatagtagtgcacgatgtagacgcagaatagtccatgctttttagtaaattattagcttcctttaattgaaactcagattgtgcttctgcactggaattgttctcttaatttgcagtatgcatgcaggtacgatgtaaattggacaagtttcctgggatttatcagggtctttttgctgaggtacagtttggttgttggagaaacaaatgtgaataaaacgatacatgtattgttttattctcataattctgtg

SEQ ID NO: 6173 - protein, 109 aa, Glycine max
  misc_feature (1)..(109): Ceres Seq. ID no. 14314153
MSGPLSPMSLPAPKQLKFTPGVVNWSGRESATFLDEARKMIPIGELSTKRLAAIGQAGKLWKWKRSHHQWLLQFKWKWQKPWKLSEWIKHSDETIMRSRPRAQALINVI

SEQ ID NO: 6174 - protein, 102 aa, Glycine max
  misc_feature (1)..(102): Ceres Seq. ID no. 14314154
MSLPAPKQLKFTPGVVNWSGRESATFLDEARKMIPIGELSTKRLAAIGQAGKLWKWKRSHHQWLLQFKWKWQKPWKLSEWIKHSDETIMRSRPRAQALINVI

SEQ ID NO: 6175 - protein, 70 aa, Glycine max
  misc_feature (1)..(70): Ceres Seq. ID no. 14314155
MIPIGELSTKRLAAIGQAGKLWKWKRSHHQWLLQFKWKWQKPWKLSEWIKHSDETIMRSRPRAQALINVI

SEQ ID NO: 6176 - DNA, 1165 bp, Glycine max
  misc_feature (1)..(1165): Ceres Seq. ID no. 14314190
atcatcctcacactttcttccacatttaataccgtatctcactctcccctccctcaaaaaactctctctttctcttccctctccctctgtcccctcacggtcacgcattctaccaaccaaataaacttcaaattccctctatttctcttcattctttcttcccataaacttttctctctttttatttcccacttccaacccttttcatcagtcaacactttcacccgattcctcatcacctaaagaaaaagaaaaaaaaaggatcaaaacaaagaaggaataaaaagaaaccctctttatttattcccctctttaccccatattcttatatttttttttatatagtacgacgctgagaaagttttttgctttttaatcgatatgggattctccgagaaggcgcaagtagaaggagcgtttgattcagataccagcaacaataacaataatcgaaaatgggtcatcgctggaatcgcgttgcgtgcaccattgaagccgatatacactactatgatccctacggagaaggaacaaaaggaagaggttgaaattgaaacgacagaggagtgttcatcatgttcgagttcgacaacgacaccaacaagcgtggaatcgaagatcccaacaccgttgacgtgcccacctgctcctaggaagcgaaacccgcgttgaagaagtgctataattattgcggtggcggtggtggtgttgttagagagttcttcacgccaccagacttggaaactgtgttcatacgccacgttgaaaaagctatttgatcgcacggaagaaggaaaaaaagatatggctaataaaagaactattttccttatcttaagaactggtgcaattccaaaaccgggtacatgtaacactgttcataaacacgccagatatttgatatttgatatttgaagtcaaaatcaaaggtgattaagtagcccaatagttgagttgccaagcgcgaatggaggaggaatgcaaatccttttcaaagatgtaggcagaagagaggggcatggcacattcttaaattgactggagaccaaagccccacataagtactcatagccaagccaagtaccatcacctttacggtgcatgtatgtttttaagtttgaataaatttaatgaaatttatcttcaaccgttgaattaatgtcag

SEQ ID NO: 6177 - protein, 96 aa, Glycine max
  misc_feature (1)..(96): Ceres Seq. ID no. 14314191
MGFSEKAQVEGAFDSDTSNNNNNRKWVIAGIALRAPLKPIYTTMIPTEKEQKEEVEIETTEECSSCSSSTTTPTSVESKIPTPLTCPPAPRKRNPR

SEQ ID NO: 6178 - protein, 80 aa, Glycine max
  misc_feature (1)..(80): Ceres Seq. ID no. 14314192
IILTLSSTFNTVSHSPLPQKTLSFSSLSLCPLTVTHSTNQINFKFPLFLFILSSHKLFSLFISHFQPFSSVNTFTRFLIT

SEQ ID NO: 6179 - protein, 53 aa, Glycine max
  misc_feature (1)..(53): Ceres Seq. ID no. 14314193
MIPTEKEQKEEVEIETTEECSSCSSSTTTPTSVESKIPTPLTCPPAPRKRNPR

SEQ ID NO: 6180 - DNA, 1320 bp, Glycine max
  misc_feature (1)..(1320): Ceres Seq. ID no. 14314198
attcacaactccaatccctcttcgctttagcaaattccaattcccaatccaaaaccctaatttcgttcaaagaaccaattgtgatggcaccaaaggcagagaagaagccagcggagaagaagcccgcggaggagaagaagtcgacggtgggagacaaggctccggcggagaagaagccgaaggccggaaagaagcttcctaaggagggaggagccggcggagaaggggggaagaagaagaagaggaacaagaagagcgtggagacatacaagatatacatattcaaggtgctgaagcaggtccaccctgacattggtatctcaagcaaggccatgggaatcatgaacagcttcatcaacgacatcttcgagaagcttgctcaggaatcttccagacttgcccgctacaacaagaagcccaccatcacttcaagggaaatccagaccgcgcaaccctcccactcatccttcctacgaggagatgattaaagacgcaattacctcgctgaaggagaaaaccggttcgagccaacacgcgattgcgaagttcatcgaggagaagcacaagcagcttccaccgaacttcaggaagcttcttctctaccatttgaagaaacttgtagccgctggaaaactcgtcaaagtcaaaggctccttcaagctcccacctacccgaccttctgcatcttcttcttcttcgccggcgaagaagaagaagcccgcacctgctaagccccaacccaagcccaagcctaagcctaagcccaagcccgctgctaaagccaaggacactaaggcaactaagtcaaaggcaccagctaatcccaaggcagctgctaagcctaaagccaaagctccagccaagcccaagcccgcccctaaaccaaaggctgctgctgctgctgcttccaagcccaagcctgctgccgccaagcccaaagggactaagccagctgccaagcccaagcccaagcccgctgctaaaacaaaggctgctgctgccaagcccgcggcaaagcccaaagcgaagcccgccaaggcttcaaggacgtcgacacggacttcaccagggaagaaagcagctcctgctgcgaagccggcagcgaagaaagtagcgcctgctaagaaagcgccagtgaagagtgtgaaaccaaagagtgtaaagtctccagcgaaaaaggctacggctaagagagggggtaggaagtgagaatgtggtgggtagagtggttttagggttagttttgtgaagttctttgtcctcttggtggtgtagttggggttacagatgatcctataatatatgaaatctgattttatc

SEQ ID NO: 6181 - protein, 242 aa, Glycine max
  misc_feature (1)..(242): Ceres Seq. ID no. 14314199
MIKDAITSLKEKTGSSQHAIAKFIEEKHKQLPPNFRKLLLYHLKKLVAAGKLVKVKGSFKLPPTRPSASSSSSPAKKKKPAPAKPQPKPKPKPKPKPAAKAKDTKATKSKAPANPKAAAKPKAKAPAKPKPAPKPKAAAAAASKPKPAAAKPKGTKPAAKPKPKPAAKTKAAAAKPAAKPKAKPAKASRTSTRTSPGKKAAPAAKPAAKKVAPAKKAPVKSVKPKSVKSPAKKATAKRGGRK

SEQ ID NO: 6182 - protein, 161 aa, Glycine max
  misc_feature (1)..(161): Ceres Seq. ID no. 14314200
SQLQSLFALANSNSQSKTLISFKEPIVMAPKAEKKPAEKKPAEEKKSTVGDKAPAEKKPKAGKKLPKEGGAGGEGGKKKKRNKKSVETYKIYIFKVLKQVHPDIGISSKAMGIMNSFINDIFEKLAQESSRLARYNKKPTITSREIQTAQPSHSSFLRGDD

SEQ ID NO: 6183 - protein, 134 aa, Glycine max
  misc_feature (1)..(134): Ceres Seq. ID no. 14314201
MAPKAEKKPAEKKPAEEKKSTVGDKAPAEKKPKAGKKLPKEGGAGGEGGKKKKRNKKSVETYKIYIFKVLKQVHPDIGISSKAMGIMNSFINDIFEKLAQESSRLARYNKKPTITSREIQTAQPSHSSFLRGDD

SEQ ID NO: 6184 - DNA, 1395 bp, Glycine max
  misc_feature (1)..(1395): Ceres Seq. ID no. 14314212
ctaatcgaaaaaaaaatgcctcctcctcttccatctctctgcaacttcaacttggcgatactcttcctcttcctcacacccactttccaaatccccctcatagccccaatctcaaaagacgacaccacccaactctacactctctccgtgttcctgaaaaccccactccaacccacaaaactccacctccaccttggctcctccctcagctgggtcctctgcgactccacctacacctcctcctcctcccaccacatcccctgcaacacccctctctgcaactccttcccctccaacgcatgctccaacaactcctccctctgcgccctcttccccgaaaaccccgtcacaagaaacaccctcctggacaccgccctcatcgattccctcgctcttcccacctacgacgcttcctcctctctcgtcctcatctccgacttcatcttctcctgcgccacggcccatcttctccagggcctcgccgccaatgcattgggcctcgcctcattgggccggtccaactactccctcccggcccaaatcagcacttcattaacctcacctcgttctttcactctctgcctgccagcttcatcagccaacacaggggcagctatattcgcctccactgcctcctcatttcttttctcttccaaaattgaccttacttacacacaactcatcgtaaaccccgttgccgacaccgtcgtcaccgacaatccacaaccgtctgatgagtatttcataaacttaacctcaatcaaaatcaacggtaagcctctttatatcaactcctccatcctcaccgttgatcagaccggcttcggtgggaccaagataagcactgcggaaccctacactgttttagaaacttctatttacagactatttgttcagcgttttgtgaacgagtcctctgcttttaacttgacggtgacggaagcagttgagccgtttggcgtgtgctaccctgcgggggatctcacggagacacgagttggacccgcggtgcccaccgttgatctggtgatgcacagcgaggacgtgttctggagaatctttggcgggaattcgatggtgagggttgcgaagggaggagtggatgtgtggtgtttgggttttgtggacggtgggacccgcgggagaactcccattgtaatcggagggcatcagttggaggataatttaatgcagtttgatcttgactcaaatagattcggtttcacttcgactctcttgcttcaggatgccaaatgttctaatctcaaggtcaataattttgcaaatggaattaaataaattccaattcaaaaaatatgtataggtaatttgattgtttctattttttctgtaacactattacctgttttattacatgttgtaatcaaatgttcc

SEQ ID NO: 6185 - protein, 432 aa, Glycine max
  misc_feature (1)..(432): Ceres Seq. ID no. 14314213
LIEKKMPPPLPSLCNFNLAILFLFLTPTFQIPLIAPISKDDTTQLYTLSVFLKTPLQPTKLHLHLGSSLSWVLCDSTYTSSSSHHIPCNTPLCNSFPSNACSNNSSLCALFPENPVTRNTLLDTALIDSLALPTYDASSSLVLISDFIFSCATAHLLQGLAANALGLASLGRSNYSLPAQISTSLTSPRSFTLCLPASSANTGAAIFASTASSFLFSSKIDLTYTQLIVNPVADTVVTDNPQPSDEYFINLTSIKINGKPLYINSSILTVDQTGFGGTKISTAEPYTVLETSIYRLFVQRFVNESSAFNLTVTEAVEPFGVCYPAGDLTETRVGPAVPTVDLVMHSEDVFWRIFGGNSMVRVAKGGVDVWCLGFVDGGTRGRTPIVIGGHQLEDNLMQFDLDSNRFGFTSTLLLQDAKCSNLKVNNFANGIK

SEQ ID NO: 6186 - protein, 427 aa, Glycine max
  misc_feature (1)..(427): Ceres Seq. ID no. 14314214
MPPPLPSLCNFNLAILFLFLTPTFQIPLIAPISKDDTTQLYTLSVFLKTPLQPTKLHLHLGSSLSWVLCDSTYTSSSSHHIPCNTPLCNSFPSNACSNNSSLCALFPENPVTRNTLLDTALIDSLALPTYDASSSLVLISDFIFSCATAHLLQGLAANALGLASLGRSNYSLPAQISTSLTSPRSFTLCLPASSANTGAAIFASTASSFLFSSKIDLTYTQLIVNPVADTVVTDNPQPSDEYFINLTSIKINGKPLYINSSILTVDQTGFGGTKISTAEPYTVLETSIYRLFVQRFVNESSAFNLTVTEAVEPFGVCYPAGDLTETRVGPAVPTVDLVMHSEDVFWRIFGGNSMVRVAKGGVDVWCLGFVDGGTRGRTPIVIGGHQLEDNLMQFDLDSNRFGFTSTLLLQDAKCSNLKVNNFANGIK

SEQ ID NO: 6187 - protein, 219 aa, Glycine max
  misc_feature (1)..(219): Ceres Seq. ID no. 14314215
NRKKNASSSSISLQLQLGDTLPLPHTHFPNPPHSPNLKRRHHPTLHSLRVPENPTPTHKTPPPPWLLPQLGPLRLHLHLLLLPPHPLQHPSLQLLPLQRMLQQLLPLRPLPRKPRHKKHPPGHRPHRFPRSSHLRRFLLSRPHLRLHLLLRHGPSSPGPRRQCIGPRLIGPVQLLPPGPNQHFINLTSFFHSLPASFISQHRGSYIRLHCLLISFLFQN

SEQ ID NO: 6188 - DNA, 1276 bp, Glycine max
  misc_feature (1)..(1276): Ceres Seq. ID no. 14314220
atttgtatgtattcatgttcttaggacttatcttcattattgctaatttcagtttacaagggaaagagtatctgctcccaaggatagactctgttttgaaggtgctttatacctctcaaactttaaaacaataggttattccataataataacacaacacatgttctgaagggacacataatctcgagttccttgcaaggagctaattccacaagttggcctttgttaagcatctacaatctacactgattccttctgttttttcatttcaaaatggaatgtgctgtcttgggcgtgcattttatgaaaatcggtgcttaatcctatgatgcatgaatacatttttctgatttttttcttgaatgtgggttcctctcttctcaggatcattggtgcattattttttaattgaattacactggactttgagtggctgctttttctttgctcaccagtaagtgtttttatttttgttggaactaattatttctgtttttatcagaaatggcgatacatatgctggcgaatactttgcggataagatgcatggatttggggtatacagttttgctaatggccatcgttatgaaggatcctggcatgaaggcaaaaggcaaggtcttggaatgtatacatttagaaatggagaaacccagtctggtcactggcaaaatggagtccttgacattccaagcacacagagtaccacctatcctgtttcccctgttggggtcaatcattccagagtacttaatgcagtccaggaagcaagaagagcagctgagaaagcctatgatgtggccaaggtagatgagagggttaatagagcagtagctgccgctaacagagcagccaatgcagctagagtagctgctgtcaaggccgtgcaaaaccaaatgcttcataatgttaacagcacgagcatcccaattcccattgtgtgaggctgtcagctgcaaacttttgatagtagagatgcacgagattgtcagaagaggtcggtagtttaaactgctttgtttacaccgtcatcatcactgctggctgaatgaaatcaagcagatttattatccatctgccacgagtcttgtatagagggaggaagggtgatggcttccacatggtaaaatactacatatacatactatattttttccctttgcctacattttgtaaatttacttagatgtaaatgctggtgtgcgggtgaaacctcaacccagctactgttgtaagatcgcttggtaaaataaggagagaaacaaacatctagcct

SEQ ID NO: 6189 - protein, 133 aa, Glycine max
  misc_feature (1)..(133): Ceres Seq. ID no. 14314221
MHGFGVYSFANGHRYEGSWHEGKRQGLGMYTFRNGETQSGHWQNGVLDIPSTQSTTYPVSPVGVNHSRVLNAVQEARRAAEKAYDVAKVDERVNRAVAAANRAANAARVAAVKAVQNQMLHNVNSTSIPIPIV

SEQ ID NO: 6190 - protein, 105 aa, Glycine max
  misc_feature (1)..(105): Ceres Seq. ID no. 14314222
MYTFRNGETQSGHWQNGVLDIPSTQSTTYPVSPVGVNHSRVLNAVQEARRAAEKAYDVAKVDERVNRAVAAANRAANAARVAAVKAVQNQMLHNVNSTSIPIPIV

SEQ ID NO: 6191 - protein, 101 aa, Glycine max
  misc_feature (1)..(101): Ceres Seq. ID no. 14314223
MAIHMLANTLRIRCMDLGYTVLLMAIVMKDPGMKAKGKVLECIHLEMEKPSLVTGKMESLTFQAHRVPPILFPLLGSIIPEYLMQSRKQEEQLRKPMMWPR

SEQ ID NO: 6192 - DNA, 604 bp, Glycine max
  misc_feature (1)..(604): Ceres Seq. ID no. 14314224
agcaagcattgatgatctctttgaaccctttacatatatacctatacctacacagtcccacagtgacttttttcttctctcttatcacgatcttctttcctcttcttcatacacacaaaggataaggctcatagtgtggtggtatctatcacattcaaagttcctctgctgcttgtgatggatgagaagagaaaggcatcaaagaaggacacaggttccttttcttccccagggtcattattctcaaggagcacctctacttcaaactctcctctccttagaagcttatctcaaaagagttcttcatcttcttccaaatgcaataataataatcttcctaggagcttctcacagaagaacccttccattggccgcaaatgcaccaaattagctaaggaacagaaagcaaggttttacatcatgaggaggtgtgttgccatgttggtttgctggcacaagcatggggattcatgaaagaagtgcacagatcttgtgcttagtttttattggtttatgatccttttattggcccactttgaatactatagattcgattgtaattacgagttgactaaggtgagttataagatttacacattgctgg

SEQ ID NO: 6193 - protein, 98 aa, Glycine max
  misc_feature (1)..(98): Ceres Seq. ID no. 14314225
MDEKRKASKKDTGSFSSPGSLFSRSTSTSNSPLLRSLSQKSSSSSSKCNNNNLPRSFSQKNPSIGRKCTKLAKEQKARFYIMRRCVAMLVCWHKHGDS

SEQ ID NO: 6194 - protein, 69 aa, Glycine max
  misc_feature (1)..(69): Ceres Seq. ID no. 14314226
MRRERHQRRTQVPFLPQGHYSQGAPLLQTLLSLEAYLKRVLHLLPNAIIIIFLGASHRRTLPLAANAPN

SEQ ID NO: 6195 - protein, 58 aa, Glycine max
  misc_feature (1)..(58): Ceres Seq. ID no. 14314227
ASIDDLFEPFTYIPIPTQSHSDFFLLSYHDLLSSSSYTQRIRLIVWWYLSHSKFLCCL

SEQ ID NO: 6196 - DNA, 1457 bp, Glycine max
  misc_feature (1)..(1457): Ceres Seq. ID no. 14314264
gaatcactctgcactctgcactctgcacaatgctttccctctccgtccctcctctcaacctcaaacccataacacccaatgacctctttctctcatcagcctctccctcacctcaccgtcgctacttcgtgaaacccatctccgccgtcctcaactcatcttccttcaagaaacctgagcagcctctgctgccgcagcatcaagtctaccagcccttccgccctcccccgtctcccctcccctcgcaattcggcaccctcgacatcgccggccgaatcgacatcctcgccaaccgcctcggcctctggtacgagtacgcgcccttaatcaattccctaatccgcgaaggcttctcccctccgacaatcgaagaaaccaccggcatctccggcgtcgagcagaaccgcctcatcgtcggggcgcaggtccgcgactccctcgtccactccaaggccgaccccgacctcctcgctgccttcgagaccggcggcgccgagctcctctacgagatccgtctcctcagcgcctcgcagcgcgtcgccgccgcgcgcttcctcgtcgagaatcgctgcgacgggaaggccgcgcaggagctcgcacgttccatgaaggatttcccgagccggcgcggggataaaggatgggcgaggttcgactacactctccccggggactgtctttcttttatgtattacaggcagagcagggagcataggaacccgtcggagcagaggacttcggcgctggagcaggcgctgcgcgtggcggagacggaggcggccaggaatatgattttggaggagttggaggggaatggtgaagagggggataaggtggatgcaggggagggtgctgtgcgtgttccggtggtgaggctgaggattggggaggtggcggaggcgagttcggtggtggtgttgccggtctccgcggcggaggagagggagattttggaggcgccgtatgagagtaggagccagggggtgtttggtgtggtggtggcggagaagggatggggaaaatgggtggtgttgccttcgtgggacccagtggttggtttaggaaaagggggtgttgtggtatcgtttcccgatgctagggttttgccgtggaaggtgaataggtggtataaggaggagcctatattggtggtggctgacaggagtaaaaaagaggtgggtgccgatgatgggttttatcttgtgaatgctgatggtgagggtttgaaggtcgagaggggttcgggattgaaggaaaagggtttcactcagagtttaggaactgtgttattggttgttagacctcccaaagaagaaaatgatgaattgagtgacgaagactgggagtgaactcaaatcaaagggaagggaatgattgagttgctaaagaatagcgataacaccacattatatatatatatatatggttttctcaattcaagaattgctagttaaccc

SEQ ID NO: 6197 - protein, 448 aa, Glycine max
  misc_feature (1)..(448): Ceres Seq. ID no. 14314265
ITLHSALCTMLSLSVPPLNLKPITPNDLFLSSASPSPHRRYFVKPISAVLNSSSFKKPEQPLLPQHQVYQPFRPPPSPLPSQFGTLDIAGRIDILANRLGLWYEYAPLINSLIREGFSPPTIEETTGISGVEQNRLIVGAQVRDSLVHSKADPDLLAAFETGGAELLYEIRLLSASQRVAAARFLVENRCDGKAAQELARSMKDFPSRRGDKGWARFDYTLPGDCLSFMYYRQSREHRNPSEQRTSALEQALRVAETEAARNMILEELEGNGEEGDKVDAGEGAVRVPVVRLRIGEVAEASSVVVLPVSAAEEREILEAPYESRSQGVFGVVVAEKGWGKWVVLPSWDPVVGLGKGGVVVSFPDARVLPWKVNRWYKEEPILVVADRSKKEVGADDGFYLVNADGEGLKVERGSGLKEKGFTQSLGTVLLVVRPPKEENDELSDEDWE

SEQ ID NO: 6198 - protein, 439 aa, Glycine max
  misc_feature (1)..(439): Ceres Seq. ID no. 14314266
MLSLSVPPLNLKPITPNDLFLSSASPSPHRRYFVKPISAVLNSSSFKKPEQPLLPQHQVYQPFRPPPSPLPSQFGTLDIAGRIDILANRLGLWYEYAPLINSLIREGFSPPTIEETTGISGVEQNRLIVGAQVRDSLVHSKADPDLLAAFETGGAELLYEIRLLSASQRVAAARFLVENRCDGKAAQELARSMKDFPSRRGDKGWARFDYTLPGDCLSFMYYRQSREHRNPSEQRTSALEQALRVAETEAARNMILEELEGNGEEGDKVDAGEGAVRVPVVRLRIGEVAEASSVVVLPVSAAEEREILEAPYESRSQGVFGVVVAEKGWGKWVVLPSWDPVVGLGKGGVVVSFPDARVLPWKVNRWYKEEPILVVADRSKKEVGADDGFYLVNADGEGLKVERGSGLKEKGFTQSLGTVLLVVRPPKEENDELSDEDWE

SEQ ID NO: 6199 - protein, 247 aa, Glycine max
  misc_feature (1)..(247): Ceres Seq. ID no. 14314267
MKDFPSRRGDKGWARFDYTLPGDCLSFMYYRQSREHRNPSEQRTSALEQALRVAETEAARNMILEELEGNGEEGDKVDAGEGAVRVPVVRLRIGEVAEASSVVVLPVSAAEEREILEAPYESRSQGVFGVVVAEKGWGKWVVLPSWDPVVGLGKGGVVVSFPDARVLPWKVNRWYKEEPILVVADRSKKEVGADDGFYLVNADGEGLKVERGSGLKEKGFTQSLGTVLLVVRPPKEENDELSDEDWE

SEQ ID NO: 6200 - DNA, 1798 bp, Glycine max
  misc_feature (1)..(1798): Ceres Seq. ID no. 14314268
gtatagctaggcttagctatttcttacctcttggcatggccattcaaatgtcttcttttgtctttgtttctcttacaattttattttgcttctcttccttggagaagagttttgcctttcaaacaacaaaggaggacacagaaagcaacaatcttcatcaatatactcatcttgttcacctcagctcactccttccttcatcttcctgcagctcttctgccaaaggtcccaaaagaaaagcatcattagaagtggtacacaaacatgggccatgctcccaactgaataatcatgatggcaaagcaaagtctaaaacaccacacagtgagattctgaaccaagacaaagaaagggttaagtacattaactcaaggatctcaaagaacttgggccaagatagtagtgtgagtgaattggactcagttacactaccagccaagtctggtagccttattgggtctgggaattactttgtggttgttggtcttggaacacccaagagggacttgtcactcatctttgacactggcagtgatctcacttggactcagtgtgaaccatgtgctcgttcttgctacaagcaacaagatgctatctttgatccatcaaagtctacatcatattccaatattacatgcacatctacgctttgcacccagctctctactgctacagggaatgagccgggatgttcagcctccacaaaagcatgcatatacggcatccagtacggtgacagttcgttctccgttggctacttcagccgcgagcggctctccgtgaccgccaccgacatcgtcgacaacttcctcttcggttgcggccaaaacaaccagggcctctttggtggctccgccggcctcatcggcctcggccgccaccccatctccttcgtccaacaaaccgccgccgtatatcgtaaaatcttctcctactgcctccccgccacctccagctccaccggccgcctctccttcggcaccaccaccacttcctacgtcaagtacacccccttctccaccatctcccgcggctcctccttctacggcctcgacatcaccggcatctccgtgggcggcgccaaactcccagtctcctcctccaccttctccaccggcggtgcaatcatcgactccggcaccgtgatcacccgcctcccccccaccgcctacaccgccctccgctccgccttcaggcaaggcatgtccaaatacccctccgccggggaactctccatactcgacacgtgttatgatctcagcggctacgaggtcttttctattcccaagatagatttttccttcgccggcggcgtcacggtgcagcttccgccgcaagggatactctacgtggccagtgccaagcaagtttgcttggcttttgctgcaaatggtgacgatagtgatgttactatatatgggaacgtgcagcagaaaacaatagaggttgtgtatgatgttggtggtggaagaattgggtttggtgctggtggctgcaagtgattaagattaaacatatgctttgggctagttagagaaaaatcaatcttaattggctctaggctttcataattattgttgttccttttattgcaaagtgtacgtaacagtggcaatagaaaaaaaaggaaaacaaaaatgtgggaattaaatataatataatttgtagcatgaagaagaatggaggggtgaatatatgactctcaagccgtgcgattgcttgcaattgtacatatgtaaggtggaaaaaaaaatgtaaacttgtccttgttattaattaaatgtttgttgaataaagc

SEQ ID NO: 6201 - protein, 499 aa, Glycine max
  misc_feature (1)..(499): Ceres Seq. ID no. 14314269
IARLSYFLPLGMAIQMSSFVFVSLTILFCFSSLEKSFAFQTTKEDTESNNLHQYTHLVHLSSLLPSSSCSSSAKGPKRKASLEVVHKHGPCSQLNNHDGKAKSKTPHSEILNQDKERVKYINSRISKNLGQDSSVSELDSVTLPAKSGSLIGSGNYFVVVGLGTPKRDLSLIFDTGSDLTWTQCEPCARSCYKQQDAIFDPSKSTSYSNITCTSTLCTQLSTATGNEPGCSASTKACIYGIQYGDSSFSVGYFSRERLSVTATDIVDNFLFGCGQNNQGLFGGSAGLIGLGRHPISFVQQTAAVYRKIFSYCLPATSSSTGRLSFGTTTTSYVKYTPFSTISRGSSFYGLDITGISVGGAKLPVSSSTFSTGGAIIDSGTVITRLPPTAYTALRSAFRQGMSKYPSAGELSILDTCYDLSGYEVFSIPKIDFSFAGGVTVQLPPQGILYVASAKQVCLAFAANGDDSDVTIYGNVQQKTIEVVYDVGGGRIGFGAGGCK

SEQ ID NO: 6202 - protein, 488 aa, Glycine max
  misc_feature (1)..(488): Ceres Seq. ID no. 14314270
MAIQMSSFVFVSLTILFCFSSLEKSFAFQTTKEDTESNNLHQYTHLVHLSSLLPSSSCSSSAKGPKRKASLEVVHKHGPCSQLNNHDGKAKSKTPHSEILNQDKERVKYINSRISKNLGQDSSVSELDSVTLPAKSGSLIGSGNYFVVVGLGTPKRDLSLIFDTGSDLTWTQCEPCARSCYKQQDAIFDPSKSTSYSNITCTSTLCTQLSTATGNEPGCSASTKACIYGIQYGDSSFSVGYFSRERLSVTATDIVDNFLFGCGQNNQGLFGGSAGLIGLGRHPISFVQQTAAVYRKIFSYCLPATSSSTGRLSFGTTTTSYVKYTPFSTISRGSSFYGLDITGISVGGAKLPVSSSTFSTGGAIIDSGTVITRLPPTAYTALRSAFRQGMSKYPSAGELSILDTCYDLSGYEVFSIPKIDFSFAGGVTVQLPPQGILYVASAKQVCLAFAANGDDSDVTIYGNVQQKTIEVVYDVGGGRIGFGAGGCK

SEQ ID NO: 6203 - protein, 484 aa, Glycine max
  misc_feature (1)..(484): Ceres Seq. ID no. 14314271
MSSFVFVSLTILFCFSSLEKSFAFQTTKEDTESNNLHQYTHLVHLSSLLPSSSCSSSAKGPKRKASLEVVHKHGPCSQLNNHDGKAKSKTPHSEILNQDKERVKYINSRISKNLGQDSSVSELDSVTLPAKSGSLIGSGNYFVVVGLGTPKRDLSLIFDTGSDLTWTQCEPCARSCYKQQDAIFDPSKSTSYSNITCTSTLCTQLSTATGNEPGCSASTKACIYGIQYGDSSFSVGYFSRERLSVTATDIVDNFLFGCGQNNQGLFGGSAGLIGLGRHPISFVQQTAAVYRKIFSYCLPATSSSTGRLSFGTTTTSYVKYTPFSTISRGSSFYGLDITGISVGGAKLPVSSSTFSTGGAIIDSGTVITRLPPTAYTALRSAFRQGMSKYPSAGELSILDTCYDLSGYEVFSIPKIDFSFAGGVTVQLPPQGILYVASAKQVCLAFAANGDDSDVTIYGNVQQKTIEVVYDVGGGRIGFGAGGCK

SEQ ID NO: 6204 - DNA, 1551 bp, Glycine max
  misc_feature (1)..(1551): Ceres Seq. ID no. 14314331
cttgctctcactctcactccgtctccggtggcctcaaaccgctccctcacaattccaaacaccgcgtgcgctgcccacatctccgttcgcatctcctccttgaccagctcgaagtttctctccagtgttgctttgtgagaagtcgttcttgcttgaagtggcttttcattcacaagctctttgagactttcttggagaagagatgtaggagttggactaaggtttcttccaattttcaattgggcacagccacaatcttattctacttaaccttcctcaccttttcggatacctaaggcgaagtatagctaaaaaatgggagtggagagagaagagaaggtgtctttggaactcagcgaagaaattcttcagagtatggaagtgggaatgtccttcaaagactataacggtagaattagttcgttggattttcacagggcatccagttatctagtgaccgctagtgatgatgaatccattcgtctgtatgatgttactggtggaacatgtttgaagacaattaatagcaagaagtatggagttgacctggtttgcttcacatctcatcctacaactgtcatttactcttcaaaaaatggttgggatgaatctttgcggcttctatcgttgcatgataacaagtatttgagatatttcaaaggtcaccatgacagggttgtgtctctaagcttatgctctcgaaaagactgctttatatctggatctctagatcgaactgttttactgtgggatcaaagggctgagaagtgccagggacttttacatgtacaaggaagacctgctatatcatatgatgatccagggcttgtctttgcaattgcctttggaggatacataagaatgtttgatgcccgcaagtatgaaaagggtccctttgagatattttctgttgggggagatatttctgatgcaaatgttgtgaaatttagtaatgatgggagactaatgcttttaacaacggcagatgggcatattcatgtgcttgacacatttcgtggcacacttttatccacatataatgtcacacctgtctcatgcaactccacattagaagcttctttcagccctgagggaatgttcataatatctggttctggagaaggcagcatctacgcatggagtgttcgaagtggcaaagaagttgcaagttggaggagtgcaacttctgatactggacctcctgtaataaagtgggctcctggaagtcttatgtttgctacaggatcatctgagttgtcattctgggttcctgatttgtctaagttgggatcctatgttggaagaaagtagaaacaaatcaaacaatgcatgataaaactattgtttgcctattaacccactgaaaggtaattttttttattaatactacacaaatttaactgtgccgaatggcgtcgtgtgatccatgtagccgacctcacctagtgggataaaactttgttgttgttgcactacacaaagtgacagattttgccatgtttttgtaaatattcttcaccgaagagcaatggatatttcaatgatcctcct

SEQ ID NO: 6205 - protein, 331 aa, Glycine max
  misc_feature (1)..(331): Ceres Seq. ID no. 14314332
MGVEREEKVSLELSEEILQSMEVGMSFKDYNGRISSLDFHRASSYLVTASDDESIRLYDVTGGTCLKTINSKKYGVDLVCFTSHPTTVIYSSKNGWDESLRLLSLHDNKYLRYFKGHHDRVVSLSLCSRKDCFISGSLDRTVLLWDQRAEKCQGLLHVQGRPAISYDDPGLVFAIAFGGYIRMFDARKYEKGPFEIFSVGGDISDANVVKFSNDGRLMLLTTADGHIHVLDTFRGTLLSTYNVTPVSCNSTLEASFSPEGMFIISGSGEGSIYAWSVRSGKEVASWRSATSDTGPPVIKWAPGSLMFATGSSELSFWVPDLSKLGSYVGRK

SEQ ID NO: 6206 - protein, 311 aa, Glycine max
  misc_feature (1)..(311): Ceres Seq. ID no. 14314333
MEVGMSFKDYNGRISSLDFHRASSYLVTASDDESIRLYDVTGGTCLKTINSKKYGVDLVCFTSHPTTVIYSSKNGWDESLRLLSLHDNKYLRYFKGHHDRVVSLSLCSRKDCFISGSLDRTVLLWDQRAEKCQGLLHVQGRPAISYDDPGLVFAIAFGGYIRMFDARKYEKGPFEIFSVGGDISDANVVKFSNDGRLMLLTTADGHIHVLDTFRGTLLSTYNVTPVSCNSTLEASFSPEGMFIISGSGEGSIYAWSVRSGKEVASWRSATSDTGPPVIKWAPGSLMFATGSSELSFWVPDLSKLGSYVGRK

SEQ ID NO: 6207 - protein, 307 aa, Glycine max
  misc_feature (1)..(307): Ceres Seq. ID no. 14314334
MSFKDYNGRISSLDFHRASSYLVTASDDESIRLYDVTGGTCLKTINSKKYGVDLVCFTSHPTTVIYSSKNGWDESLRLLSLHDNKYLRYFKGHHDRVVSLSLCSRKDCFISGSLDRTVLLWDQRAEKCQGLLHVQGRPAISYDDPGLVFAIAFGGYIRMFDARKYEKGPFEIFSVGGDISDANVVKFSNDGRLMLLTTADGHIHVLDTFRGTLLSTYNVTPVSCNSTLEASFSPEGMFIISGSGEGSIYAWSVRSGKEVASWRSATSDTGPPVIKWAPGSLMFATGSSELSFWVPDLSKLGSYVGRK

SEQ ID NO: 6208 - DNA, 1430 bp, Glycine max
  misc_feature (1)..(1430): Ceres Seq. ID no. 14314343
agttcaactaagtacgctgtttttttattttccccacaaaaccatatagccatcggtcgtagatcccacgaaccccatcatcacaccactctctgcagttttcgcaaccaaaccttcttttttgtttttattcctctgcttattggattcaacgaagttgttgtgattaaggagaacataactttttgaatcacacagagagagagagagaagagacccagtactttctgcatccaaaccaatcactactgcggataactggtaagttcataaaggggagattcttcagtgatcatctatctgatttggtccagctaaggaatcattcagaagccaagttgattaagtactagagagatcatattttggattagtaaaagttaatcataagcatgggatctttcaagggtcatgctttgccagggactttgtttcttctagttggggtgtggcacgtatggggctctgtggtgagatatgttcgcaatccaatggcgtttcaagtcagagtttggaatcctgtgccagggtttgatgggaggctgaagcacctggagctatatgttattgcaattggtgctttcgttgacatgtgcatcgagcttttgtattcaccacacctcaagatttttgttggtggagtccttaaccccgctcacatgaatgactttgagcactctggaatgcttcttatgtttttcatctttggtgttgttgccctactttcccaaaagaccagatttcttcccttgccagaaggtgctctttgtttgcttgctgcctcagcattcactgcagagtaccttcttttctacttccattcaacaacacacaagggccttgagggctattaccacaccctccttgtcttcctggttggactgtgcattttatcttcaattgctggagcccttttgccaacaagctttccagtggatttatgcaatggcattgctatagcactgcaaggtttatggttctatcagacagcctttgttctctatggccctatgatgccaagtggttgtaagcttagggaaaacagtgtcacatgtcattctattgatagtgaggttcggggcgaattgcttgctaattttcagctctttgttgcggttcttgtggtccttgtgggaactgtggcatcatatggctttgctgcttcaagatatgggagttctgaagtcaggaacttgcatgcaattcagactgaattagatcaagactaaagttgcgttgctattttttctggtggtagttgaaatgtgttggcagcatagagtttcttatagaacatgtttgttgtatattgaagtgcaaaggatcatgcatgcatgatcactgaaaattgaaaattaacaccccctcctccctcaaaaaggaattatacatttttgacttttaggaatcggatgtcaaaggagcaacag

SEQ ID NO: 6209 - protein, 278 aa, Glycine max
  misc_feature (1)..(278): Ceres Seq. ID no. 14314344
MGSFKGHALPGTLFLLVGVWHVWGSVVRYVRNPMAFQVRVWNPVPGFDGRLKHLELYVIAIGAFVDMCIELLYSPHLKIFVGGVLNPAHMNDFEHSGMLLMFFIFGVVALLSQKTRFLPLPEGALCLLAASAFTAEYLLFYFHSTTHKGLEGYYHTLLVFLVGLCILSSIAGALLPTSFPVDLCNGIAIALQGLWFYQTAFVLYGPMMPSGCKLRENSVTCHSIDSEVRGELLANFQLFVAVLVVLVGTVASYGFAASRYGSSEVRNLHAIQTELDQD

SEQ ID NO: 6210 - protein, 245 aa, Glycine max
  misc_feature (1)..(245): Ceres Seq. ID no. 14314345
MAFQVRVWNPVPGFDGRLKHLELYVIAIGAFVDMCIELLYSPHLKIFVGGVLNPAHMNDFEHSGMLLMFFIFGVVALLSQKTRFLPLPEGALCLLAASAFTAEYLLFYFHSTTHKGLEGYYHTLLVFLVGLCILSSIAGALLPTSFPVDLCNGIAIALQGLWFYQTAFVLYGPMMPSGCKLRENSVTCHSIDSEVRGELLANFQLFVAVLVVLVGTVASYGFAASRYGSSEVRNLHAIQTELDQD

SEQ ID NO: 6211 - protein, 212 aa, Glycine max
  misc_feature (1)..(212): Ceres Seq. ID no. 14314346
MCIELLYSPHLKIFVGGVLNPAHMNDFEHSGMLLMFFIFGVVALLSQKTRFLPLPEGALCLLAASAFTAEYLLFYFHSTTHKGLEGYYHTLLVFLVGLCILSSIAGALLPTSFPVDLCNGIAIALQGLWFYQTAFVLYGPMMPSGCKLRENSVTCHSIDSEVRGELLANFQLFVAVLVVLVGTVASYGFAASRYGSSEVRNLHAIQTELDQD

SEQ ID NO: 6212 - DNA, 1313 bp, Glycine max
  misc_feature (1)..(1313): Ceres Seq. ID no. 14314350
catcaaaaactggtgtatttaagaaaaaagaaaagtcacaagtgactcagaggaggaaagcccatgtcggaaccactattggagacaactcaattgatataacccagatgtgtgttcgcatcaatactatgcagcgcattcgcatggaattaggggttttggaaaagaggatagttgccaatctcagcagttctagatccactaatgcggatatagcaaatggggtgagcttgaagttcaagctttccgcatctgctgctgtggaaggcatccatcaactctgcgagtgcatagcatacaaaatcgttttccatgaactctggcatgttatttgggatggcctttatgttggagaagttgcatctgctaggattgagccttttcttcaggagcttgagcaatacttggagattgtatcatctacagtgcatgataaagttagaacacgtgtaattgttaaagtaatgcaggcttcttttgatgggtttctgttggttttgttagccggaggtccatcacgtgctttctctctgcaagattctgttattatagaggaagatttcaagtttctgactggcttgttctggtccaatggagatggattgccagctgaattgatagaaaagcattctaccactgtcaaaggtgtacttcccttgtttcgtgctgatactgagcacataattcagcagttcagtcaacttactatggaaatgtacggttctacagccaaatcccggcttccattgcctccaacagcagatcaatggagtccaacagaaccgaacacacttttgcgagtcttgtgtaataggaatgatgaggcagctgcaaagttccttaagaagaattacaacttacctaagaagctctaacaattgacaagtaaccactactctgatatgccacgcctttccacccaatataaatttgaagtttgttcgttatgtgttgtgaaaccctggcctagtttttgaggatgtgattcaggtaaaggtggtacggtatgcattatacacttactgatcaactctaggaaatatgatgctttatcatcaataatgctcaaaagtataaattgtacaggagtgattcttttgcctttgctaatttgttggcttgttttcagctcgtgccaaaacacaatcactgacaccatggtaatacagagaagtatttacaattagttattatttgtttttataatttcaaaattaatggtctatttatttgtgctgcattgtaatttccccccacaaactacttcagcttgatcttgatcttgtaaatgaaatgaaattatttatttgtgc

SEQ ID NO: 6213 - protein, 290 aa, Glycine max
  misc_feature (1)..(290): Ceres Seq. ID no. 14314351
SKTGVFKKKEKSQVTQRRKAHVGTTIGDNSIDITQMCVRINTMQRIRMELGVLEKRIVANLSSSRSTNADIANGVSLKFKLSASAAVEGIHQLCECIAYKIVFHELWHVIWDGLYVGEVASARIEPFLQELEQYLEIVSSTVHDKVRTRVIVKVMQASFDGFLLVLLAGGPSRAFSLQDSVIIEEDFKFLTGLFWSNGDGLPAELIEKHSTTVKGVLPLFRADTEHIIQQFSQLTMEMYGSTAKSRLPLPPTADQWSPTEPNTLLRVLCNRNDEAAAKFLKKNYNLPKKL

SEQ ID NO: 6214 - protein, 255 aa, Glycine max
  misc_feature (1)..(255): Ceres Seq. ID no. 14314352
MCVRINTMQRIRMELGVLEKRIVANLSSSRSTNADIANGVSLKFKLSASAAVEGIHQLCECIAYKIVFHELWHVIWDGLYVGEVASARIEPFLQELEQYLEIVSSTVHDKVRTRVIVKVMQASFDGFLLVLLAGGPSRAFSLQDSVIIEEDFKFLTGLFWSNGDGLPAELIEKHSTTVKGVLPLFRADTEHIIQQFSQLTMEMYGSTAKSRLPLPPTADQWSPTEPNTLLRVLCNRNDEAAAKFLKKNYNLPKKL

SEQ ID NO: 6215 - protein, 248 aa, Glycine max
  misc_feature (1)..(248): Ceres Seq. ID no. 14314353
MQRIRMELGVLEKRIVANLSSSRSTNADIANGVSLKFKLSASAAVEGIHQLCECIAYKIVFHELWHVIWDGLYVGEVASARIEPFLQELEQYLEIVSSTVHDKVRTRVIVKVMQASFDGFLLVLLAGGPSRAFSLQDSVIIEEDFKFLTGLFWSNGDGLPAELIEKHSTTVKGVLPLFRADTEHIIQQFSQLTMEMYGSTAKSRLPLPPTADQWSPTEPNTLLRVLCNRNDEAAAKFLKKNYNLPKKL

SEQ ID NO: 6216 - DNA, 1526 bp, Glycine max
  misc_feature (1)..(1526): Ceres Seq. ID no. 14314382
aaaaaacgcacgaaagattccatccatttgcgacttgggagagagtaccattgctccactccctctccctcttcgccggcggccaccatgtctttgtcggagttccgaccactcgacgacaagttcctcatcgaatacataaagtccgtccccgccctctcctccaaactcgccgacaacttcgacgacttatctgtcaaagaagtcggagatggcaaccttaacttcgtcttcattgtttccaaccccgcaggttcttttgtcatcaaacaggctctgccatacgttcgttgcataggggaatcgtggcctatgacgaaggagagagcgtattttgagtcactggcactgaaagaagagggtcgtttgagccccgaacatgttcctgaagtatatcactttgaccgtaccatgtctttgattggtatgcgttacttggagcctccacatataatcctcagaaaagggttgattgctgggattgagtaccctcttttggctcaacacatggctgatttcatggcaaagacactcttcttcacgtctctgcttttccgttccacatctgaccacaaacgagacgttgccgaattttgtgggaatgtggagttatgcaggctcactgagcaggttgttttctccgacccttataaagtttctcaatataatcgttggacttccccctatctcgatcgtgatgctgaggcagttcgggaagacaatccgctgaagcttgaagttgctgagctgaaatctaagttcattgagagggcccaggcactaatacatggagatctacacactggttctgtgatggttacccgtgaatcaactcaagttattgatccagaatttgcattttatggaccaatgggttttgatattggagcattcttgggaaacttgattttggctttctttgctcaagatgggcatgctgatcaagcaaatgatcgaaaagcctataaggagtggattcttaagacaatcgaagacagttggaatcttttctatcaaaaattcacttcactttgggatgagcacaaaaatggtgctggtgaagcatatcttccaacaatctataacaatcctgaggttcaactgcttgtacagaagaaatacatgacagatttgtttcacgacagtcttggatttggtgctgctaaaattattaggagaattgttggtgtggcacatgttgaggatttcgaatccattactgatgctgctaaacgggcaagttgtgaacggcgggcacttgatttagctaagatgcttctcaaagaaagaagaaaatttgaaggcattgctgaaattatttcagcaattcggcaatactagccataacaaggttttgctatatcaatagttcaatacctccgtaatgtatcgtgttccccaacattttaactgagttgctctagtaacagttttgatcactttctaattatattatccatactgataacatttctcttgtggaccatcttaaaatttatatccaccgtgatttttgaatgattttt

SEQ ID NO: 6217 - protein, 446 aa, Glycine max
  misc_feature (1)..(446): Ceres Seq. ID no. 14314383
KKRTKDSIHLRLGREYHCSTPSPSSPAATMSLSEFRPLDDKFLIEYIKSVPALSSKLADNFDDLSVKEVGDGNLNFVFIVSNPAGSFVIKQALPYVRCIGESWPMTKERAYFESLALKEEGRLSPEHVPEVYHFDRTMSLIGMRYLEPPHIILRKGLIAGIEYPLLAQHMADFMAKTLFFTSLLFRSTSDHKRDVAEFCGNVELCRLTEQVVFSDPYKVSQYNRWTSPYLDRDAEAVREDNPLKLEVAELKSKFIERAQALIHGDLHTGSVMVTRESTQVIDPEFAFYGPMGFDIGAFLGNLILAFFAQDGHADQANDRKAYKEWILKTIEDSWNLFYQKFTSLWDEHKNGAGEAYLPTIYNNPEVQLLVQKKYMTDLFHDSLGFGAAKIIRRIVGVAHVEDFESITDAAKRASCERRALDLAKMLLKERRKFEGIAEIISAIRQY

SEQ ID NO: 6218 - protein, 417 aa, Glycine max
  misc_feature (1)..(417): Ceres Seq. ID no. 14314384
MSLSEFRPLDDKFLIEYIKSVPALSSKLADNFDDLSVKEVGDGNLNFVFIVSNPAGSFVIKQALPYVRCIGESWPMTKERAYFESLALKEEGRLSPEHVPEVYHFDRTMSLIGMRYLEPPHIILRKGLIAGIEYPLLAQHMADFMAKTLFFTSLLFRSTSDHKRDVAEFCGNVELCRLTEQVVFSDPYKVSQYNRWTSPYLDRDAEAVREDNPLKLEVAELKSKFIERAQALIHGDLHTGSVMVTRESTQVIDPEFAFYGPMGFDIGAFLGNLILAFFAQDGHADQANDRKAYKEWILKTIEDSWNLFYQKFTSLWDEHKNGAGEAYLPTIYNNPEVQLLVQKKYMTDLFHDSLGFGAAKIIRRIVGVAHVEDFESITDAAKRASCERRALDLAKMLLKERRKFEGIAEIISAIRQY

SEQ ID NO: 6219 - protein, 342 aa, Glycine max
  misc_feature (1)..(342): Ceres Seq. ID no. 14314385
MTKERAYFESLALKEEGRLSPEHVPEVYHFDRTMSLIGMRYLEPPHIILRKGLIAGIEYPLLAQHMADFMAKTLFFTSLLFRSTSDHKRDVAEFCGNVELCRLTEQVVFSDPYKVSQYNRWTSPYLDRDAEAVREDNPLKLEVAELKSKFIERAQALIHGDLHTGSVMVTRESTQVIDPEFAFYGPMGFDIGAFLGNLILAFFAQDGHADQANDRKAYKEWILKTIEDSWNLFYQKFTSLWDEHKNGAGEAYLPTIYNNPEVQLLVQKKYMTDLFHDSLGFGAAKIIRRIVGVAHVEDFESITDAAKRASCERRALDLAKMLLKERRKFEGIAEIISAIRQY

SEQ ID NO: 6220 - DNA, 1377 bp, Glycine max
  misc_feature (1)..(1377): Ceres Seq. ID no. 14314400
aggaatgtgtcactactgaactgtgcaatatgagtgcttgcaaaaccctttcatgtttctccctctcttcttcctcttccttcttcaaacccacccttctccaccctcgccaacgtctaaccctaactcggagatgttccacgtcagccctactcgaagaaccggaaccccaatctccgagcgttcagcacctcctcacgagtcccgacggcgtctccacgctgatgaagatggaccgcaagcctcttctccctcacgagccgcacgttcgctggttcccttacctcgacgcctaccgctgccgaaacggctgcgttttgagcagcgccgaggtcgtccaggccctcgcgccctgcatctccgacgaccggaggcagaggttcgggagcgtggttcggaaccggagctactcggtctgcctcgtcgtggaagggctctgcgacttcggcaacgtctccgccacgttccggtccgcggacgcgcttggcgtccagtccgtccacgtcgtgtcgtgtgacgccaacaaaaggtataaagataatcgccatgtgagcatgggtgcagagaaatggttggacattgaactgtgggactctacaaaggagtgctttaaaatgttgaaatcacgcggttatcgaattgcgacaactcatgtgggaatggatgcggtttctattcatgacttagattggtcctgcccaactgcaatcgtggttgggaatgaaaataggggtattagtgatgaggcattggagctgtcagatttgcattgcagtattcctatggcaggaatggtggactctttcaatgtttcagttgctgcgggaatcctcatgcaccactctgtttgtgatagaatatctcgtatgggccgtcatggtgatctaacagtggaagaatgccagattctacttgcagagttttctctgcgccatagcaagagttcgattagtattgttgaagattatgcaatgcgtaaagcagcgacattgacctaacagcaataacaggaagtcaaacttcttctgactgtgcttggctgcttgcctgtacttggcaaggagacaaaccagagactagattgtctctgattgattgaatgattcctacaaactagcattagcttatgcatgctgtgcaaggctcacagatgacaatggggaccttaccaacacccagcttcttggactatagaatatttccttaatgatgtgcttactagccccactttacttagcaatgggggaatgatgctgtcaaaagtgcaattgcaattttatttatgtggatttttcgggccttacagtatctaatggtttttatttggatgagaaaagaaaatagaaaagggaaattttttacctcctatttttaagc

SEQ ID NO: 6221 - protein, 331 aa, Glycine max
  misc_feature (1)..(331): Ceres Seq. ID no. 14314401
ECVTTELCNMSACKTLSCFSLSSSSSFFKPTLLHPRQRLTLTRRCSTSALLEEPEPQSPSVQHLLTSPDGVSTLMKMDRKPLLPHEPHVRWFPYLDAYRCRNGCVLSSAEVVQALAPCISDDRRQRFGSVVRNRSYSVCLVVEGLCDFGNVSATFRSADALGVQSVHVVSCDANKRYKDNRHVSMGAEKWLDIELWDSTKECFKMLKSRGYRIATTHVGMDAVSIHDLDWSCPTAIVVGNENRGISDEALELSDLHCSIPMAGMVDSFNVSVAAGILMHHSVCDRISRMGRHGDLTVEECQILLAEFSLRHSKSSISIVEDYAMRKAATLT

SEQ ID NO: 6222 - protein, 322 aa, Glycine max
  misc_feature (1)..(322): Ceres Seq. ID no. 14314402
MSACKTLSCFSLSSSSSFFKPTLLHPRQRLTLTRRCSTSALLEEPEPQSPSVQHLLTSPDGVSTLMKMDRKPLLPHEPHVRWFPYLDAYRCRNGCVLSSAEVVQALAPCISDDRRQRFGSVVRNRSYSVCLVVEGLCDFGNVSATFRSADALGVQSVHVVSCDANKRYKDNRHVSMGAEKWLDIELWDSTKECFKMLKSRGYRIATTHVGMDAVSIHDLDWSCPTAIVVGNENRGISDEALELSDLHCSIPMAGMVDSFNVSVAAGILMHHSVCDRISRMGRHGDLTVEECQILLAEFSLRHSKSSISIVEDYAMRKAATLT

SEQ ID NO: 6223 - protein, 257 aa, Glycine max
  misc_feature (1)..(257): Ceres Seq. ID no. 14314403
MKMDRKPLLPHEPHVRWFPYLDAYRCRNGCVLSSAEVVQALAPCISDDRRQRFGSVVRNRSYSVCLVVEGLCDFGNVSATFRSADALGVQSVHVVSCDANKRYKDNRHVSMGAEKWLDIELWDSTKECFKMLKSRGYRIATTHVGMDAVSIHDLDWSCPTAIVVGNENRGISDEALELSDLHCSIPMAGMVDSFNVSVAAGILMHHSVCDRISRMGRHGDLTVEECQILLAEFSLRHSKSSISIVEDYAMRKAATLT

SEQ ID NO: 6224 - DNA, 1305 bp, Glycine max
  misc_feature (1)..(1305): Ceres Seq. ID no. 14314408
attacttattagtatacctctcactctaaagttgtcttagtctctctattcttcacattcatcagcaggtcaggttggctggcaagttattgaaatgaagaataagaatggaaaacttaaattgacgtttgagaagttcacatggacgattagtaacttctctaaattggactccaagaaactgtactctgagaagttttagctcgatcaccatacatggaagattcttgcctatccaaaggggactgatgtgggctacttgtcaatttatttagatgctggtgttgttaatttgccttttggctggagcaaatttgcaaatttcaagttcgctttaattaatcaggccaatgacaaaatgactaaaataaaagaaactacaaaacagttcaatgcaacagaaattgcttggggttttccaaaattcatacacttagatgaacttaatgattctagcagtgggtttatggtgaatgatacttgtataattgaagttcagattttggtcagcaagtcagaacaggagaatcaagtagatcaacaagttaacaagattgatgataatcatgatattgataagcctattaaacacacagatatcttcttacccaaggaaacgttcccaacctcatttggtgagctagttgatttccaaggcttagggaaaatagaacaagcttttgttccattgttagaagaagtattttctcgacatccctcactcattgattgtcagcaaaaaagaagtggcaggtttgttgaatgggcattcacagctttgggtcgagttttacattttctcaagactaaaaaggtgaaagatatggatggtgatgcttgcaataatcttcaaattttttgggaggaattgaagatgtttagatttgatttgacttggctggaacctcatgttcaatctgccttggctatgaaaacttgtattgagagagctgttcgggtgaaaaggacgagggaggatgtgactgctttagagatggaaacaaagaggttgaaggcaaagatgattcaagcagaggtagatcttgaaatagcaagaagagacttcgtgaaagcaaaagaaggctttgaagagtgcgatttggatgctgaactaggctatggagaaccataatttgatattatgtcacttgttgaagaatatttcagtagagctagcctacatgttttggatgagcattcctaaacacctgagtgttcttctagacatcaaatcatcaatgaacttgaaagtactcaaactcaaagcagaaattgattattctgttaactgaaatgttgtttctg

SEQ ID NO: 6225 - protein, 257 aa, Glycine max
  misc_feature (1)..(257): Ceres Seq. ID no. 14314409
MTKIKETTKQFNATEIAWGFPKFIHLDELNDSSSGFMVNDTCIIEVQILVSKSEQENQVDQQVNKIDDNHDIDKPIKHTDIFLPKETFPTSFGELVDFQGLGKIEQAFVPLLEEVFSRHPSLIDCQQKRSGRFVEWAFTALGRVLHFLKTKKVKDMDGDACNNLQIFWEELKMFRFDLTWLEPHVQSALAMKTCIERAVRVKRTREDVTALEMETKRLKAKMIQAEVDLEIARRDFVKAKEGFEECDLDAELGYGEP

SEQ ID NO: 6226 - protein, 221 aa, Glycine max
  misc_feature (1)..(221): Ceres Seq. ID no. 14314410
MVNDTCIIEVQILVSKSEQENQVDQQVNKIDDNHDIDKPIKHTDIFLPKETFPTSFGELVDFQGLGKIEQAFVPLLEEVFSRHPSLIDCQQKRSGRFVEWAFTALGRVLHFLKTKKVKDMDGDACNNLQIFWEELKMFRFDLTWLEPHVQSALAMKTCIERAVRVKRTREDVTALEMETKRLKAKMIQAEVDLEIARRDFVKAKEGFEECDLDAELGYGEP

SEQ ID NO: 6227 - DNA, 2220 bp, Glycine max
  misc_feature (1)..(2220): Ceres Seq. ID no. 14314411
cacttatcaagaaaccctaatacagatacagtttccctctctctttctcaagcaatccaaagtcacaacccacacacactgtacgggttgtgcagatcagagggtgttggtacactctatctatcttttttctcccataagcagaaacaccctctctaatgtttctctctttgtcccatacccatacctcattctgcaagcgtccccttaaataataaatacaccgcgtgtgtgtgtgtatgtgagagagagagagtaagaaataaagcaaatctctctgctgtttctcttacgtctttctattttgggctctcatggattcgggtaacagtgggagtatgcaatcttccagcaccgccggtgatgaagagtacgattcacgcgccgacccatctttgtcgtcatcaatctctgcgttctttaatagtaactcccatccttcagctccaccacaaccaacaacgttaacaaaccacgttggtcctcctttctctactcagcaccaccacgtgttcgaccctttatcatccaattacttggatccgacacaaagatcgccgcaatcaaaccaaatcctcaacctcgacatggtgcggtccaaggttgccgccagatccggacccgattttagctccttcataccttcatcttccccacacaacaacaacaaccaagcttttctgttaactcaattgggaggaggaggagttaacaacgttggtgcttttcccagtaccactctccctccagaaagtggaggaggcggattagtaatgaatgaacaagtaaacagtagcaacaccaacaaaaacatggttcgaaacccgaagaaaaggtcaagagcttctaggcgtgcacccaccactgttctcactacggacaccacgaatttccgagccatggttcaggaattcactggcatcccagcacctcctttcacttcctcctcctcgtctttcccaagaacaaggttagatctctttgccacctctaatgcttcttcttcatccattattagagaacaaacaccttcttatcttcttcgcccctttgcacacaaagtccaagctcaagtaccttcttcaatcccaccaccctcttcctttcaacccatgttgaacaactaccaccaccaccaccaccagcataacccaattctcagcttccaatccattctccaaccgcatcaactcattggttctaaaactcaacaacaaccctccttggaaataccgcctagtgctcttgggttggaggaattaggattgaaccatgctcatcatcaaaacatcaacatgcgttcgtcttcatcggatggaacattgtcaagggtcaacaacgacaataacaacatgcgtggtccttcggcagattgggcccaggcccaggcccaaagaattgataacaatgatggaggacttttggggtctcttactggtgccaccttaaactacagaagcaatattgtttcggatcagcgagtcaaggttactaataattcggattttcatggagaaaaaggaccggaatgtgttgtggctgtacgaagcgaaggtatggtcgaatcgtggattaattgttcttctgattgagagcagaaataagcaaccatcaaatgggaaaagaatatatgaacaaagaaaaaaagggagattcataaatatattttcctcacacggtttaaagcaactgatgatggtagtatactaattcatgagagacagaatcttggtaattggtatcctcagcttaaccatgaccgtcaaattaattaaacacctttttcttcttcttttatttggttctttgtgtccattagaattatgcgtaaataactagcagctaccttgtctttctctactcctttattttattttatttgttttcttctcaaaatctcaattgtggttttgatcgatattatatacagctatatacgaattagaatcctggagggttttcgtttcgacgtacgtttgtttcatcgtaatttgtgtctctatttggtaaactagagagctacatacatacaatggcagcatcatatgatcagtttgtggttcgtgtcactgtatatggattttggttttgactacttgtgtgaaattatggttcagagaatgtacaatgtgcacagcatagaatgaacaacacagacaaaactgtatgtatcctctcttttcctgttttgtcgcaccttctattctctgattttacctc

SEQ ID NO: 6228 - protein, 425 aa, Glycine max
  misc_feature (1)..(425): Ceres Seq. ID no. 14314412
MDSGNSGSMQSSSTAGDEEYDSRADPSLSSSISAFFNSNSHPSAPPQPTTLTNHVGPPFSTQHHHVFDPLSSNYLDPTQRSPQSNQILNLDMVRSKVAARSGPDFSSFIPSSSPHNNNNQAFLLTQLGGGGVNNVGAFPSTTLPPESGGGGLVMNEQVNSSNTNKNMVRNPKKRSRASRRAPTTVLTTDTTNFRAMVQEFTGIPAPPFTSSSSSFPRTRLDLFATSNASSSSIIREQTPSYLLRPFAHKVQAQVPSSIPPPSSFQPMLNNYHHHHHQHNPILSFQSILQPHQLIGSKTQQQPSLEIPPSALGLEELGLNHAHHQNINMRSSSSDGTLSRVNNDNNNMRGPSADWAQAQAQRIDNNDGGLLGSLTGATLNYRSNIVSDQRVKVTNNSDFHGEKGPECVVAVRSEGMVESWINCSSD

SEQ ID NO: 6229 - protein, 417 aa, Glycine max
  misc_feature (1)..(417): Ceres Seq. ID no. 14314413
MQSSSTAGDEEYDSRADPSLSSSISAFFNSNSHPSAPPQPTTLTNHVGPPFSTQHHHVFDPLSSNYLDPTQRSPQSNQILNLDMVRSKVAARSGPDFSSFIPSSSPHNNNNQAFLLTQLGGGGVNNVGAFPSTTLPPESGGGGLVMNEQVNSSNTNKNMVRNPKKRSRASRRAPTTVLTTDTTNFRAMVQEFTGIPAPPFTSSSSSFPRTRLDLFATSNASSSSIIREQTPSYLLRPFAHKVQAQVPSSIPPPSSFQPMLNNYHHHHHQHNPILSFQSILQPHQLIGSKTQQQPSLEIPPSALGLEELGLNHAHHQNINMRSSSSDGTLSRVNNDNNNMRGPSADWAQAQAQRIDNNDGGLLGSLTGATLNYRSNIVSDQRVKVTNNSDFHGEKGPECVVAVRSEGMVESWINCSSD

SEQ ID NO: 6230 - protein, 334 aa, Glycine max
  misc_feature (1)..(334): Ceres Seq. ID no. 14314414
MVRSKVAARSGPDFSSFIPSSSPHNNNNQAFLLTQLGGGGVNNVGAFPSTTLPPESGGGGLVMNEQVNSSNTNKNMVRNPKKRSRASRRAPTTVLTTDTTNFRAMVQEFTGIPAPPFTSSSSSFPRTRLDLFATSNASSSSIIREQTPSYLLRPFAHKVQAQVPSSIPPPSSFQPMLNNYHHHHHQHNPILSFQSILQPHQLIGSKTQQQPSLEIPPSALGLEELGLNHAHHQNINMRSSSSDGTLSRVNNDNNNMRGPSADWAQAQAQRIDNNDGGLLGSLTGATLNYRSNIVSDQRVKVTNNSDFHGEKGPECVVAVRSEGMVESWINCSSD

SEQ ID NO: 6231 - DNA, 1313 bp, Glycine max
  misc_feature (1)..(1313): Ceres Seq. ID no. 14314423
aaaaacaaccatttttattttagttttcctaccatttaaacttgtacttgtaattgcagttgtcacaatagtaattatctatacaatgaaaatgtagcttgtctcatcacttccatcctaagaagctgtaagtttttaatctcaagtttttgggtctcctggtgaaaacccatgttgaactagacccttttctggccagaatctcaccagtattaggcaactgtatctagattaatggtgtagtgtgctgatgccactgcttaacctgtaagaattgagcatgtcatggtgcggtctctcatgacccttggatccttccttgaaaagagttgataatctatcaatcattgttcttgattggaacaaattatcatcccagtgcccgaaacattttcccattacaaaaatctcaccatccttagtcttaataattgcgggttgactggaacatttccacataagatcttcaacattggaacattgtcggttattgacatatcttggaacaacaatctccatggtttcttgactgaatttccatccaggggatctccatgggaatccgaaaagaaaagaatggttatttatgccgcataacatttgtctgaagctccattcttcttagacaataatatcctttcatctcttccatgtcttcttcctctagttatgactacgatctccatgatgatgacgagatggactttctgcgtgatcggtacaaggaggacaacataaactatgatgtgtttttgagtttcagaggggaagacacgcgtgcttctttcacttcacatctctatacagctcttcacaacttgggaatctttgttttcaaggatgatgagacacttccaaggggaaataaaatttcaccctcgctgcggttagcaattgaagagtctcgactttctgttgttattttctctagaaactatgcagagtcgcggtggtgtttgaaagagttgcagaaaataatggagtgtcacagaacaacagggcaagtggtagtgccagtgttctatgatgtagatccctctgaagtacgtcatcaaacaggccactttggaaaagcatttcgaaaccttgagaacaaacttttaaaaggggaagaggaagaggaagagctacaacgatggtggaagacgcttgctgaggccgctggcatctcagggctttctgtagtccgaaattgcaagtaataaaaacacttccagctttctcgtatttttactgaacattgtctctggaattttagtttatgaaattcataacatgtacatgtatgaagtggtcaaagtgagattttggat

SEQ ID NO: 6232 - protein, 183 aa, Glycine max
  misc_feature (1)..(183): Ceres Seq. ID no. 14314424
MSSSSSYDYDLHDDDEMDFLRDRYKEDNINYDVFLSFRGEDTRASFTSHLYTALHNLGIFVFKDDETLPRGNKISPSLRLAIEESRLSVVIFSRNYAESRWCLKELQKIMECHRTTGQVVVPVFYDVDPSEVRHQTGHFGKAFRNLENKLLKGEEEEEELQRWWKTLAEAAGISGLSVVRNCK

SEQ ID NO: 6233 - protein, 167 aa, Glycine max
  misc_feature (1)..(167): Ceres Seq. ID no. 14314425
MDFLRDRYKEDNINYDVFLSFRGEDTRASFTSHLYTALHNLGIFVFKDDETLPRGNKISPSLRLAIEESRLSVVIFSRNYAESRWCLKELQKIMECHRTTGQVVVPVFYDVDPSEVRHQTGHFGKAFRNLENKLLKGEEEEEELQRWWKTLAEAAGISGLSVVRNCK

SEQ ID NO: 6234 - DNA, 1159 bp, Glycine max
  misc_feature (1)..(1159): Ceres Seq. ID no. 14314430
gagagtcacctctcaaattgaattcctagctagtacttaacataatgcagtgagattcacactcccaacgcttcctctttctcccttaaatatcttcattcatctcaacaccaccaccacttccccacttttgttactcagtatgcttggagcccttctcctcaacgccaacttcaagattcatttctcactcatatcatgccaagcccgtgtccccttacccgtcaagcccgcaccgctcagaatgccctctccccactacccccactgggcctccttgcaggccgacattgaagcccacctcaaacaaaccattcccctcaaagaacccctcgaggtcttcgagcccatgctccacctcgccttctccgccccccggaccaccgtcccggccctatgcctcgccgcctgcgagcttgtcggcggtcaccgccaacaagccatggccgcggcatcggccttgttactcaacctcgccaatgcacacgcccatgaacacctaaccgacgggcccatgtacggccccaacatagaactcctcaccggggacgggattgttccgttcgggtttgagttgctggcgaggcccgacgggccagcaagtgcgagcccggagcgagtcctacgtgtgatgattgagatatcacgtgcggtgggttcggtggggttgcaagacgcgcagtacgtgaagaaaacgttgtgggacggtggtgaggaggtgcaaaacgtggaaagcatgcagcgctttgtattggagaaaagggacggtgggttgcatgcatgtggggctgcgtctggtgccatcttgggaggtgggagtgaggaccaaattgaaaggttgagaaattttggatttcatgtggggatgatgaggggaatgctacaaatggggttcatggaaaaacatgtgcaagaggagagacatcttgcactcaaggaactgcaatttttcatggacagagatgttcatgttatttctagttttatttattaatttctagccacttttaagttttctatatatctggaatctcaagtgggttgttgtccatcttcatatgtacggaacatgatcaactgtgcggttcatagacaataattgcacgatcatgtgtttcaaattaaatctgatggtatatatagcagaagtttttaactt

SEQ ID NO: 6235 - protein, 283 aa, Glycine max
  misc_feature (1)..(283): Ceres Seq. ID no. 14314431
MLGALLLNANFKIHFSLISCQARVPLPVKPAPLRMPSPHYPHWASLQADIEAHLKQTIPLKEPLEVFEPMLHLAFSAPRTTVPALCLAACELVGGHRQQAMAAASALLLNLANAHAHEHLTDGPMYGPNIELLTGDGIVPFGFELLARPDGPASASPERVLRVMIEISRAVGSVGLQDAQYVKKTLWDGGEEVQNVESMQRFVLEKRDGGLHACGAASGAILGGGSEDQIERLRNFGFHVGMMRGMLQMGFMEKHVQEERHLALKELQFFMDRDVHVISSFIY

SEQ ID NO: 6236 - protein, 249 aa, Glycine max
  misc_feature (1)..(249): Ceres Seq. ID no. 14314432
MPSPHYPHWASLQADIEAHLKQTIPLKEPLEVFEPMLHLAFSAPRTTVPALCLAACELVGGHRQQAMAAASALLLNLANAHAHEHLTDGPMYGPNIELLTGDGIVPFGFELLARPDGPASASPERVLRVMIEISRAVGSVGLQDAQYVKKTLWDGGEEVQNVESMQRFVLEKRDGGLHACGAASGAILGGGSEDQIERLRNFGFHVGMMRGMLQMGFMEKHVQEERHLALKELQFFMDRDVHVISSFIY

SEQ ID NO: 6237 - protein, 214 aa, Glycine max
  misc_feature (1)..(214): Ceres Seq. ID no. 14314433
MLHLAFSAPRTTVPALCLAACELVGGHRQQAMAAASALLLNLANAHAHEHLTDGPMYGPNIELLTGDGIVPFGFELLARPDGPASASPERVLRVMIEISRAVGSVGLQDAQYVKKTLWDGGEEVQNVESMQRFVLEKRDGGLHACGAASGAILGGGSEDQIERLRNFGFHVGMMRGMLQMGFMEKHVQEERHLALKELQFFMDRDVHVISSFIY

SEQ ID NO: 6238 - DNA, 1525 bp, Glycine max
  misc_feature (1)..(1525): Ceres Seq. ID no. 14314449
attccaatccaccctcgccactccttcgatccgaatcatcttttccgcccacacacaagttgggtttttttgatataattgataatgggtgatagcagtgttccatctgggtctccaaatgcaaaatcagatcttgttgacagagacttggcggtttccaacaacgcgtcgtcgttggaaaccattgtgcaaagtttccaagattcaatgtctcttggtaagagacacaagttctgggaaactcagcctgtggggcaatacaaggatgttggggactcaagtttgcctgagggcccgattgagcccccgacacctttgtccgaggttaagcaggagccttacaaccttcccagtgcttatgagtggacaacatgtgacatggactctgaggaaatctgtgatgaggtttatgcccttctcaagaataactatgttgaggatgatgagaacatgttcaggttcaactattccaaggagtttctcagttgggcgttgcgtgttccgggctattaccagagttggcacattggcgtgagagccaagacgtcaaagaagttggttgctttcatcagtggcatccccgccaggatcagggttaatgaggaggttgtgaagatggccgagatcaatttcttgtgtgttcataagaagctcaggtcaaagagacttgcacctgttatgatcaaggaggtcaccaggagggttcatttggagaatatttggcaggcggcctatacggctggagttgttcttccaacgccaatcacgacttgtcaatattggcaccgatcgttgaatccgaagaagctaattgatgttgggttttcaaggcttggtgctaggatgacgatgagccgcactataaagctttacaaattgcctgattcaacggttactcctggattcaggaaaatggagcttcgggatgtccctgctgttactcggctgcttaggaactacttgagccagtttgttgttgcacctgattttgatgaaaatgatgttgaacattggcttcttcccaatgagaatgtggtggatagtttcttggttgagagtccagagaatcatgagatcacagacttctgcagcttctatactcttccttcttccatccttggaaatcaaaattactcaattttgaaagctgcttattcttattataatgtctccaccaaaactccgctgacccagttgatgaatgatgtgctgattgtagcaaagcaaaaggattttgatgttttcaatgccttggatgtaatgcacaatgagagtttcctcaaagaactcaagtttggaccaggagatggacagcttcactactacttgtacaattataggattcgtagtgccttgaaaccatctggacttggacttgtgctcttgtagtttgatactattcagttttggtttcactatgtaattggtaaaaccattcatttgttttgttttattagcttgttgtttcaacattatttcttgttcctttcaaatattggcaattaacatattaggttttcagggc

SEQ ID NO: 6239 - protein, 434 aa, Glycine max
  misc_feature (1)..(434): Ceres Seq. ID no. 14314450
MGDSSVPSGSPNAKSDLVDRDLAVSNNASSLETIVQSFQDSMSLGKRHKFWETQPVGQYKDVGDSSLPEGPIEPPTPLSEVKQEPYNLPSAYEWTTCDMDSEEICDEVYALLKNNYVEDDENMFRFNYSKEFLSWALRVPGYYQSWHIGVRAKTSKKLVAFISGIPARIRVNEEVVKMAEINFLCVHKKLRSKRLAPVMIKEVTRRVHLENIWQAAYTAGVVLPTPITTCQYWHRSLNPKKLIDVGFSRLGARMTMSRTIKLYKLPDSTVTPGFRKMELRDVPAVTRLLRNYLSQFVVAPDFDENDVEHWLLPNENVVDSFLVESPENHEITDFCSFYTLPSSILGNQNYSILKAAYSYYNVSTKTPLTQLMNDVLIVAKQKDFDVFNALDVMHNESFLKELKFGPGDGQLHYYLYNYRIRSALKPSGLGLVLL

SEQ ID NO: 6240 - protein, 393 aa, Glycine max
  misc_feature (1)..(393): Ceres Seq. ID no. 14314451
MSLGKRHKFWETQPVGQYKDVGDSSLPEGPIEPPTPLSEVKQEPYNLPSAYEWTTCDMDSEEICDEVYALLKNNYVEDDENMFRFNYSKEFLSWALRVPGYYQSWHIGVRAKTSKKLVAFISGIPARIRVNEEVVKMAEINFLCVHKKLRSKRLAPVMIKEVTRRVHLENIWQAAYTAGVVLPTPITTCQYWHRSLNPKKLIDVGFSRLGARMTMSRTIKLYKLPDSTVTPGFRKMELRDVPAVTRLLRNYLSQFVVAPDFDENDVEHWLLPNENVVDSFLVESPENHEITDFCSFYTLPSSILGNQNYSILKAAYSYYNVSTKTPLTQLMNDVLIVAKQKDFDVFNALDVMHNESFLKELKFGPGDGQLHYYLYNYRIRSALKPSGLGLVLL

SEQ ID NO: 6241 - protein, 336 aa, Glycine max
  misc_feature (1)..(336): Ceres Seq. ID no. 14314452
MDSEEICDEVYALLKNNYVEDDENMFRFNYSKEFLSWALRVPGYYQSWHIGVRAKTSKKLVAFISGIPARIRVNEEVVKMAEINFLCVHKKLRSKRLAPVMIKEVTRRVHLENIWQAAYTAGVVLPTPITTCQYWHRSLNPKKLIDVGFSRLGARMTMSRTIKLYKLPDSTVTPGFRKMELRDVPAVTRLLRNYLSQFVVAPDFDENDVEHWLLPNENVVDSFLVESPENHEITDFCSFYTLPSSILGNQNYSILKAAYSYYNVSTKTPLTQLMNDVLIVAKQKDFDVFNALDVMHNESFLKELKFGPGDGQLHYYLYNYRIRSALKPSGLGLVLL

SEQ ID NO: 6242 - DNA, 1121 bp, Glycine max
  misc_feature (1)..(1121): Ceres Seq. ID no. 14314461
atcaacagcatattctagccatgtcaagtcctcagtgttttgagaatccaccaaaccttaactcggacatccatggagcaggaactgtccaagaacttggaggacttaattcctacgtcactggatcttccgattccaaattggcactcatcctggtttctgatgtttttgggtatgaagcaccaaaactaaggaaacttgcggacaaagtagcagcagctggattcttggttgttgttcctgatcttctgtatggtgattacattgttgaccttaataatcctcaatttgatcgagagtcatggcgaaaggctcatggaaaggataaggcatgtgaagacaccaaacctctaatttctgctctaaagagtaaaggtgttaaatccataggggctgcaggtttttgctggggaggggttgtggttgtgaaacttgcaatgtccactgatattcaggctgcagttattctgcatcctggtctaatcgcagataatgaatttaatgaggtcaggattcctattgctatactgggagctgaaatcgaccatcttttcccaccagaaaggttgaagcaaattgaagaaatgttgtctgtaaaagctgagtttgagagctttgtgaaactataccctggtgttagtcatggatggactttgcggtacaatgatgatgatgaagcaactgttaagagtgcaaaagaggcgcatcaagacatgttgaattggtttatcaagcacgtcaagtgaaaattgttttcaccaccagaagatgcctgtcattgatttgcagttaatttttttagtagcaaataaatattacttattattgaaaagggccaatttcatgtacaagatgtgtccaaagcggcccaaccaccatgatacaaaaattataatatcccaccagaatatcactagcatttctcttataataacaatactacaactgcctaagaaaaagatacagcatagacaaaagctgcactatgcggcttaactcctagccttcatgttattggtgtgacgtatccattgccaccgaatttactaatgattaattctcgttgaaaaatctgatgatgatcacttttaatgatatatatatgctattttttcttaaat

SEQ ID NO: 6243 - protein, 247 aa, Glycine max
  misc_feature (1)..(247): Ceres Seq. ID no. 14314462
QQHILAMSSPQCFENPPNLNSDIHGAGTVQELGGLNSYVTGSSDSKLALILVSDVFGYEAPKLRKLADKVAAAGFLVVVPDLLYGDYIVDLNNPQFDRESWRKAHGKDKACEDTKPLISALKSKGVKSIGAAGFCWGGVVVVKLAMSTDIQAAVILHPGLIADNEFNEVRIPIAILGAEIDHLFPPERLKQIEEMLSVKAEFESFVKLYPGVSHGWTLRYNDDDEATVKSAKEAHQDMLNWFIKHVK

SEQ ID NO: 6244 - protein, 241 aa, Glycine max
  misc_feature (1)..(241): Ceres Seq. ID no. 14314463
MSSPQCFENPPNLNSDIHGAGTVQELGGLNSYVTGSSDSKLALILVSDVFGYEAPKLRKLADKVAAAGFLVVVPDLLYGDYIVDLNNPQFDRESWRKAHGKDKACEDTKPLISALKSKGVKSIGAAGFCWGGVVVVKLAMSTDIQAAVILHPGLIADNEFNEVRIPIAILGAEIDHLFPPERLKQIEEMLSVKAEFESFVKLYPGVSHGWTLRYNDDDEATVKSAKEAHQDMLNWFIKHVK

SEQ ID NO: 6245 - DNA, 1567 bp, Glycine max
  misc_feature (1)..(1567): Ceres Seq. ID no. 14314480
aacaagcatacatatcatatctttgattcagcttccaaacgcgccattcccatttctctctctctgcttcttcttcagatacctaacctaatctcccaaacaaacaaaccaactcaaccttatcaatatcgtttaaataaattttgatcgcgcacgcgctttgagatagatcatgctgcgtttgtgctacggccctctggattgctgcttcggacgccgtggtggccgcgccgccgacggacttctctggcacaccgacttgaagccccacgcctccggcgacttctccatcgccgtcgcccaggcgaattacagtcttgaggatcagagccaagtcttcacctccccctccgccacctacgtcggcgtctacgacggccacggcggccccgaagcttccagattcgtcaacaagcgtctcttcccttatttgcacaaattcgccactgagcaagggggtttgtcagtggatgtgattaaaaaggcgttcagtgccacagaggaggaattcttgcatttggtgaagctatccatgcccattagtccccagattgcttccgtcggatcctgttgcctttttggtgcaatttctaataatgtgttgtatgttgcaaaccttggagactcgagagctgttcttggcaggagggatacagagagaaagaacagtccggtggtggcacagcgtttgtcaactgatcataatgtagctgatgaggaggtgagaaaagaagttgaagctctccatcccgatgactcacacattgtggtttatagccgtggagtttggaggattaagggcattatacaggtgtcaagatctattggtgatgtgtatttgaagaaaccagatttctaccgtgacctgggttttcagcagtttggaaatcctattcctttgaagcgttctgtaatgacagctgaaccatcaatcattattagggagcttgagtcagaggatttattcttgatatttgcatcagatggcctctgggaacaattaagtgatgaggctgcggttcagatcgttttcaaacatccaagagctggaattgccaagagactggtgagagctgctcttcatgaagctgcaaagaagagagagatgagatacgatgacataaagaaaattgacaaaggaataagacgacacttccatgatgatatcactgtggttgtaatctatcttgatcaccatgcaggctcctctaagcaaactgctgttggctatacaactgccccagttgatattttttccctaaatgcggatgggatgcttggtacagttgcctaagagtgaaattgcttcaaaggatcatacactgacattatttggggcaaaaattatttataggtgaagattaatattgttggtaaatgaagggaattcttgagaaaaatatacaaaaaattactgcatagatatagtagctgggagttgctgacagattctttctggtgcagatatgcatttgtatagttgtgaagtttattttttgggtttgatggtatcaattttgtttttctttggaaagaaagaaaataaaattatattgattggttagcc

SEQ ID NO: 6246 - protein, 373 aa, Glycine max
  misc_feature (1)..(373): Ceres Seq. ID no. 14314481
MLRLCYGPLDCCFGRRGGRAADGLLWHTDLKPHASGDFSIAVAQANYSLEDQSQVFTSPSATYVGVYDGHGGPEASRFVNKRLFPYLHKFATEQGGLSVDVIKKAFSATEEEFLHLVKLSMPISPQIASVGSCCLFGAISNNVLYVANLGDSRAVLGRRDTERKNSPVVAQRLSTDHNVADEEVRKEVEALHPDDSHIVVYSRGVWRIKGIIQVSRSIGDVYLKKPDFYRDLGFQQFGNPIPLKRSVMTAEPSIIIRELESEDLFLIFASDGLWEQLSDEAAVQIVFKHPRAGIAKRLVRAALHEAAKKREMRYDDIKKIDKGIRRHFHDDITVVVIYLDHHAGSSKQTAVGYTTAPVDIFSLNADGMLGTVA

SEQ ID NO: 6247 - protein, 253 aa, Glycine max
  misc_feature (1)..(253): Ceres Seq. ID no. 14314482
MPISPQIASVGSCCLFGAISNNVLYVANLGDSRAVLGRRDTERKNSPVVAQRLSTDHNVADEEVRKEVEALHPDDSHIVVYSRGVWRIKGIIQVSRSIGDVYLKKPDFYRDLGFQQFGNPIPLKRSVMTAEPSIIIRELESEDLFLIFASDGLWEQLSDEAAVQIVFKHPRAGIAKRLVRAALHEAAKKREMRYDDIKKIDKGIRRHFHDDITVVVIYLDHHAGSSKQTAVGYTTAPVDIFSLNADGMLGTVA

SEQ ID NO: 6248 - DNA, 1405 bp, Glycine max
  misc_feature (1)..(1405): Ceres Seq. ID no. 14314493
ctcttgatttctttcgtgacgcgtcatattggtttattgcaaggtcggtggcaacccaaccctacccttgtctcctttctcatatgctatatatcagcctcctccacctagcacttgctccaattcactaccaccaaacacaacacaacacagcataccgtgtttcattttctctcacacacaaacctccttcgttttcatttacttctcaggaggtataactactatttttcgctttttttttaaaaaaaaaattgattaaatcttttgccatgggaacccagattttgcgacctcaggactgcttggtagaacgaatcagggctcctccggctgacttttcccggcggaggagttccggtaattactgtaattattattactacaacaacaacaacaaccatgtcgccacttccaggtcgtgccggaagcctgttagccgacccgaccaaaggaaacgggctgctcccggttctgcccagccggtggtggcggaggccgcggcggcggtgttgaagagaccgagccgtgatgattcaagggtggccaggagccaaagtttggagatgactacgattctacgtaggggccagtcgcttgattcggctgtgaagagcgaggtgtacgccggatctgcgttcgcggtgtctccgtcgccggaagcgcttcctctgccgtctttttcgacgaagaagcaggactcagtggcggttgatgactccgccacgcgagatctgaggcgtctgctccgcctcgaatgaaaacgagccgggttgcagtcccgggtttctgggtcgggttggacccgacaaattatccatattcccctctctctctcaccttattattactatctagaatcttctctttctcttatcctctccgtaaccgttaccgttacgcccgtcccggtttgaagttctgacccgactgtgatttttttaaacggaagggtggatgatctgatctaaactagggggtgaaatgtttaaaggtttggagtagcgtatgggccgtgaggctatgattatgtatcatgtaacttgtaacatatttcttgggttgtttattaaaacattaaaataaaatttagggtttatatacttgtaacactaataccaatcagttcaaaggggtgggaagaaatgaggaagaagcataagaaggaggaaatgtaagttagttttgtaaaatccagcaagtgtttgaatttggtgtaggttgggctttcagctatgaacagtttgatgtgatcaagtatagttcgtgctgtgttgtgaaacacggtgatcaacaagtgaatggttctggttcgtgctctgttgtgaatttgccagcttctctttgtacgctattttttgtaaagtggagcaaattattaacttgaggagatttgatcagattt

SEQ ID NO: 6249 - protein, 162 aa, Glycine max
  misc_feature (1)..(162): Ceres Seq. ID no. 14314494
MGTQILRPQDCLVERIRAPPADFSRRRSSGNYCNYYYYNNNNNHVATSRSCRKPVSRPDQRKRAAPGSAQPVVAEAAAAVLKRPSRDDSRVARSQSLEMTTILRRGQSLDSAVKSEVYAGSAFAVSPSPEALPLPSFSTKKQDSVAVDDSATRDLRRLLRLE

SEQ ID NO: 6250 - DNA, 1257 bp, Glycine max
  misc_feature (1)..(1257): Ceres Seq. ID no. 14314511
cttctgcgtcgaccacctcgtcatttcttcctttccattttcatttctcggtgttgttgttcttcatccatggcttttcctcagcaccacttccaacagcactaccaaacccaacagcaacaacagccacaaaacaaatccttcagaaatctgcaaacaatcgatggtcagatgtcacagcaggtggcgttttacaaccctactgatttgcaagatcaatcccaacatccaccctacattcctccatttcatgttgttgggtttgctccgggtcctgttcctcctgctgatggcagtgatggtggagttgatttgcaattgcaatggaattatggtttggagccagagaggaagagactaaaagaacaggattttttggagaacaattctcagatatcttctgttgatttccttcaaccacgatcagtgtcgactgggttgggcttgtcactagacaatactcgcctgacatccactggagactcagctttgttgtcactcatcggtgatgacatcgagcgtgagttgcagcagcaggacgcagagatagatagatttctcaaagtgcagggtggacgtttgcggcaagcagtcttggagaaggttcaggcaacacagcttcagagtgtctcactaattgaagacaaaatccttcagaaactttgcgagaaagaagctatggtagaaagcatcaacaagaggaacattgaactcgaagatcaaatggagcagttgactgtggaagctggttcgtggcaacagcgagcaagatataatgaaaatatgattgctgctctcaagttcaaccttcagcaagcgtatgtccaaagcagagatagtaaagaaggatgtggtgacagtgaggtcgacgatacagcttcttgctgcaatggccgttccctcgattttcatctgctttcaagggagaacaccgacatgaaagagatgatgacatgcaaggcttgcagagtcaatgaagtgaccatggttttgttaccttgtaagcatctttgcctctgtaaagattgtgaaagtaagcttagtttctgtcctctatgtcaatcctccaaatttatcggcatggaggtctacatgtaactgcaaagtatacttctacttgtgaaatctctaatttcatgtttttattatgtgtcctttcatgtagcttgtgtctcaaggaccatgacaccttgtaactagtttttaagatgtatttgaccataatgaatttcacttgcttgagaacagtgaattttg

SEQ ID NO: 6251 - protein, 365 aa, Glycine max
  misc_feature (1)..(365): Ceres Seq. ID no. 14314512
LLRRPPRHFFLSIFISRCCCSSSMAFPQHHFQQHYQTQQQQQPQNKSFRNLQTIDGQMSQQVAFYNPTDLQDQSQHPPYIPPFHVVGFAPGPVPPADGSDGGVDLQLQWNYGLEPERKRLKEQDFLENNSQISSVDFLQPRSVSTGLGLSLDNTRLTSTGDSALLSLIGDDIERELQQQDAEIDRFLKVQGGRLRQAVLEKVQATQLQSVSLIEDKILQKLCEKEAMVESINKRNIELEDQMEQLTVEAGSWQQRARYNENMIAALKFNLQQAYVQSRDSKEGCGDSEVDDTASCCNGRSLDFHLLSRENTDMKEMMTCKACRVNEVTMVLLPCKHLCLCKDCESKLSFCPLCQSSKFIGMEVYM

SEQ ID NO: 6252 - protein, 342 aa, Glycine max
  misc_feature (1)..(342): Ceres Seq. ID no. 14314513
MAFPQHHFQQHYQTQQQQQPQNKSFRNLQTIDGQMSQQVAFYNPTDLQDQSQHPPYIPPFHVVGFAPGPVPPADGSDGGVDLQLQWNYGLEPERKRLKEQDFLENNSQISSVDFLQPRSVSTGLGLSLDNTRLTSTGDSALLSLIGDDIERELQQQDAEIDRFLKVQGGRLRQAVLEKVQATQLQSVSLIEDKILQKLCEKEAMVESINKRNIELEDQMEQLTVEAGSWQQRARYNENMIAALKFNLQQAYVQSRDSKEGCGDSEVDDTASCCNGRSLDFHLLSRENTDMKEMMTCKACRVNEVTMVLLPCKHLCLCKDCESKLSFCPLCQSSKFIGMEVYM

SEQ ID NO: 6253 - protein, 308 aa, Glycine max
  misc_feature (1)..(308): Ceres Seq. ID no. 14314514
MSQQVAFYNPTDLQDQSQHPPYIPPFHVVGFAPGPVPPADGSDGGVDLQLQWNYGLEPERKRLKEQDFLENNSQISSVDFLQPRSVSTGLGLSLDNTRLTSTGDSALLSLIGDDIERELQQQDAEIDRFLKVQGGRLRQAVLEKVQATQLQSVSLIEDKILQKLCEKEAMVESINKRNIELEDQMEQLTVEAGSWQQRARYNENMIAALKFNLQQAYVQSRDSKEGCGDSEVDDTASCCNGRSLDFHLLSRENTDMKEMMTCKACRVNEVTMVLLPCKHLCLCKDCESKLSFCPLCQSSKFIGMEVYM

SEQ ID NO: 6254 - DNA, 1320 bp, Glycine max
  misc_feature (1)..(1320): Ceres Seq. ID no. 14314526
aacccacaccacgctgttgaattgcgcaaccctgcacctgcacccgtaccgcagtgacaacatcggcgtgcataaactctaaaccctactatgtccgaagacaagtacgacgtgctcctctattacaagtacgttgaaattcccaacctcaacgacctcctcaccttctaccactccaactgctcctccctcagcctcctcggtcgtgttcgcctttcttctcacgacgtcaatgtcaccgttggcggcaacttatcctctctcaagaatcacatcgaagccctcaaagcctacagaaccttgtttcaccacactgatttcaagctcgacacttgtcatcatccattaaacaacaaagtagcctaggaatgtggattcacttccctctctattcgaatcatcgacgaacttgttactctcagttcccatccactgttaaagtcaccggatatctcaaatgtcggaaagcatctctctgccctcgacttccattcttccctccacaataccaatgacaatggaagtaggagctgttgcagccatgagatatgtaaaggatggaattaaagttgccaggttagtgatgcaacatactaaacacactttgctggtaggagagaaagcatcagaatttgctatttcaatgcgtcttccaggtcccatgaacttgagttcaccagaatctatggagaagtgggccaaatggaaagatagtcgttgtcaaccaaatttcaagaaaaatgtatcacctgcaaatagttgtggtccttatcgtccaacaaattatctggggcatcctgatgaaacatgctccagtactgtttagatgctaactagtaattccaatttacttcttgttagtcttcatagccatgatactatatcaatggctgttattggtagagtaagatataacaaaaaattgatttgtattggaacctggttagtattgaaacctgattattctattcatcggtcgaaggctgcaaggaatagacaacaatgattttttatgcttgatcaatgattcattttggagcaagttatgacattgatcaatgattttttaactcttattttttatgcttgatctatcttcccgttatagattaatcagactaatctgaaatgaagttattgttgatcatgttaataattcaaatattttttgttttgggtattgggggagagattaaggaactggttaaggattattgtagcagaaaagttttcttattatagcatttcttgagggatttgttttgttaatctataagcagacatttcttgaggaatcaattttttttttctttttgagct

SEQ ID NO: 6255 - protein, 122 aa, Glycine max
  misc_feature (1)..(122): Ceres Seq. ID no. 14314527
MSESISLPSTSILPSTIPMTMEVGAVAAMRYVKDGIKVARLVMQHTKHTLLVGEKASEFAISMRLPGPMNLSSPESMEKWAKWKDSRCQPNFKKNVSPANSCGPYRPTNYLGHPDETCSSTV

SEQ ID NO: 6256 - protein, 104 aa, Glycine max
  misc_feature (1)..(104): Ceres Seq. ID no. 14314528
MTMEVGAVAAMRYVKDGIKVARLVMQHTKHTLLVGEKASEFAISMRLPGPMNLSSPESMEKWAKWKDSRCQPNFKKNVSPANSCGPYRPTNYLGHPDETCSSTV

SEQ ID NO: 6257 - protein, 102 aa, Glycine max
  misc_feature (1)..(102): Ceres Seq. ID no. 14314529
MEVGAVAAMRYVKDGIKVARLVMQHTKHTLLVGEKASEFAISMRLPGPMNLSSPESMEKWAKWKDSRCQPNFKKNVSPANSCGPYRPTNYLGHPDETCSSTV

SEQ ID NO: 6258 - DNA, 1973 bp, Glycine max
  misc_feature (1)..(1973): Ceres Seq. ID no. 14314536
actaaactttttacttttgtgccaaccacaccttaaaaaaccagaaaagctgaaacgtgtctgcttgaagctttttatgccacttgtcttctctcctttttccaaattccctttatgcttctttcctgctccaatgatcgcagcaagatttcgaccttcttttctgcaaaatactgtcagctcaaactctttgtgggttttcggctgaaccccttcatatatggccactgaagcacatcgttttcccaagattaataatgaccaaggctcttctagtatacctcataacccaattcaaaaggatgtagagtcatccgaaataactgaggaactccctagtagacatgcacatggtagaaggaaaaaccttatcttggagataccaacaagaacactagatgaaacaagagaggaatttttcagaacaaaccaacctccaactccatctcctagaagccaaatcaatgagttccaaggtcctttgtcaaccaaaaatattaaatttcacaagataagttcagatgttgaagaggcttccatcccagcacttgacggttcccccccggagccactgcaagagcctatgatttcaagaacattatcacctaatgagatgaaaatatcatccttacctgtcaccccaattgctcagtcaaatctggagtctggacatggagggaacattgcctatccagcaacacatgttaagaaaggactgcaactaccaatgcatcgttcccgttcagttcccgtgcttactgaagatgacagcacatatgtaggtgccatgtttcgtattgttcctaccacaccacggttgacaaagagcattgccacaacatctatgaaatctccgcctgacgataccgttgaaaatgaggatggggaagatattcctgaagaagaagccgtctgcagaatttgtttgattgaattgggagaaggttctgatacacttaaaatggagtgcagctgcaaaggtgaacttgcactggcacaccaagagtgtgcagttaaatggtttagcattaaaggcaacagaacatgtgatgtgtgcaagcaggaagttcagaaccttcctgtcactcttctacgagttttaaatggccaaacactttacttgacaaggagtagaagccaacaatacagggtttggcaaaatattcccattcttgtgattatcaacatgctggcatacttttgtttccttgagcagctacttgtttcaagtatgggatctggtgctgttgccatttctctccctttttcatgtatactaggtctacttgcaagcatgacatccacaataatggtgacgtgtgaacatgtttgggtttatgcaattgcccagtttgttatggtggttctcgctggacgtcttttctattcactgcttaataagcaagccgttctatctatcctacttgctacatttactgggtttggagctgtgatgtgtggagcttatattcttattgagtttttgaaatggagaagacgatggcttggttcccaagaggtggtactgcctcattaatcacattcatcagcgaccactcaccaagctttgactgattctcaacaccatggaaataatgtgagagacactgcagtgcatgtgagtgtgagttgacatagaatatacttttatattgatggtgtttaattggctgtatataaaagtataatgtatggactatactttaagcacattacacccttttttgtctccgtggtactcgcgagaatacacaagtatcgcattccttgtattgagaccgctgactcgaagccagttgtattgtaactgtgaggccatattataatattggacttgcaagaaacttctgagcaaatcctgtaggtgaaaagataaagaaaggttgtttttgtacaattataggggaacaaaaagggattctgtactgtaaagatggttgaagagatgaatacacatgtcttattttggttcc

SEQ ID NO: 6259 - protein, 438 aa, Glycine max
  misc_feature (1)..(438): Ceres Seq. ID no. 14314537
MATEAHRFPKINNDQGSSSIPHNPIQKDVESSEITEELPSRHAHGRRKNLILEIPTRTLDETREEFFRTNQPPTPSPRSQINEFQGPLSTKNIKFHKISSDVEEASIPALDGSPPEPLQEPMISRTLSPNEMKISSLPVTPIAQSNLESGHGGNIAYPATHVKKGLQLPMHRSRSVPVLTEDDSTYVGAMFRIVPTTPRLTKSIATTSMKSPPDDTVENEDGEDIPEEEAVCRICLIELGEGSDTLKMECSCKGELALAHQECAVKWFSIKGNRTCDVCKQEVQNLPVTLLRVLNGQTLYLTRSRSQQYRVWQNIPILVIINMLAYFCFLEQLLVSSMGSGAVAISLPFSCILGLLASMTSTIMVTCEHVWVYAIAQFVMVVLAGRLFYSLLNKQAVLSILLATFTGFGAVMCGAYILIEFLKWRRRWLGSQEVVLPH

SEQ ID NO: 6260 - protein, 317 aa, Glycine max
  misc_feature (1)..(317): Ceres Seq. ID no. 14314538
MISRTLSPNEMKISSLPVTPIAQSNLESGHGGNIAYPATHVKKGLQLPMHRSRSVPVLTEDDSTYVGAMFRIVPTTPRLTKSIATTSMKSPPDDTVENEDGEDIPEEEAVCRICLIELGEGSDTLKMECSCKGELALAHQECAVKWFSIKGNRTCDVCKQEVQNLPVTLLRVLNGQTLYLTRSRSQQYRVWQNIPILVIINMLAYFCFLEQLLVSSMGSGAVAISLPFSCILGLLASMTSTIMVTCEHVWVYAIAQFVMVVLAGRLFYSLLNKQAVLSILLATFTGFGAVMCGAYILIEFLKWRRRWLGSQEVVLPH

SEQ ID NO: 6261 - protein, 307 aa, Glycine max
  misc_feature (1)..(307): Ceres Seq. ID no. 14314539
MKISSLPVTPIAQSNLESGHGGNIAYPATHVKKGLQLPMHRSRSVPVLTEDDSTYVGAMFRIVPTTPRLTKSIATTSMKSPPDDTVENEDGEDIPEEEAVCRICLIELGEGSDTLKMECSCKGELALAHQECAVKWFSIKGNRTCDVCKQEVQNLPVTLLRVLNGQTLYLTRSRSQQYRVWQNIPILVIINMLAYFCFLEQLLVSSMGSGAVAISLPFSCILGLLASMTSTIMVTCEHVWVYAIAQFVMVVLAGRLFYSLLNKQAVLSILLATFTGFGAVMCGAYILIEFLKWRRRWLGSQEVVLPH

SEQ ID NO: 6262 - DNA, 1136 bp, Glycine max
  misc_feature (1)..(1136): Ceres Seq. ID no. 14314550
atgggaccaaactaagtaaaggcacgcgcagcacaactcaaagcaatggagtgagttgcttatgagcatattgagaaaaaaaggcagaggcagaagcagaagcaaaaccccactttttcatggccaaaatcattggcaagagcagaagaagaagaacaacgacgactcaacaactatgccacagaatggttcaccatgtcaacgtccactgcaacctgttccatagggtgtcctttcttggccggttcatttgggacaggatgcttctctgctctcttggaaggccttcttacctcaggctgcccctccgtgacccgccaccgcaggccaccgtccacggtggcgcctccatgcatggataccccttcaccaccaccaccccctccccctgtgactctgactctgatttggtcaacctcaagatcagcttgcttggtgattgccatattggaaaaactagttttgtgatcaagtatgtaggggatgagcaagaaaaaaggagcttgcagatgaagggacttaatttgatggacaaaactttatttgttcaaggagctaggatttcgtttagtatatgggatgttgcaggtgacacagggtccctttatcaaattccaatggcttgtaaagattcagttgcaattttgattatgtttgatctcaccagtcggtgtacactgaatagtgttgttggatggtacagtaaagcaagaaagtggaatcagattgcaattcccattctaataggaaccaaatttgatgattttgttaaactccccccagatgtgcaatggacaattgtaacacaggcaagggcatatgcaagggcaatgaatgctactcttttcttctcaagtgcaacccacaatataaatgtcaacaaaatcttcaagtttatcatggccaagctcttcaacttgccatggaaagtggaacgaaatctgacactaggagaacccacaattgacttctgaaatgtactttacattattgatttatatgtaaatagcaggacaaagaaaagaaaaaggaaaaaagaaaaaagaagaggtccactcatattaactactcttgctttgtagagttcatcgcctaagaacctaattcatttatcttcattgggccattttaactac

SEQ ID NO: 6263 - protein, 284 aa, Glycine max
  misc_feature (1)..(284): Ceres Seq. ID no. 14314551
MAKIIGKSRRRRTTTTQQLCHRMVHHVNVHCNLFHRVSFLGRFIWDRMLLCSLGRPSYLRLPLRDPPPQATVHGGASMHGYPFTTTTPSPCDSDSDLVNLKISLLGDCHIGKTSFVIKYVGDEQEKRSLQMKGLNLMDKTLFVQGARISFSIWDVAGDTGSLYQIPMACKDSVAILIMFDLTSRCTLNSVVGWYSKARKWNQIAIPILIGTKFDDFVKLPPDVQWTIVTQARAYARAMNATLFFSSATHNINVNKIFKFIMAKLFNLPWKVERNLTLGEPTIDF

SEQ ID NO: 6264 - protein, 262 aa, Glycine max
  misc_feature (1)..(262): Ceres Seq. ID no. 14314552
MVHHVNVHCNLFHRVSFLGRFIWDRMLLCSLGRPSYLRLPLRDPPPQATVHGGASMHGYPFTTTTPSPCDSDSDLVNLKISLLGDCHIGKTSFVIKYVGDEQEKRSLQMKGLNLMDKTLFVQGARISFSIWDVAGDTGSLYQIPMACKDSVAILIMFDLTSRCTLNSVVGWYSKARKWNQIAIPILIGTKFDDFVKLPPDVQWTIVTQARAYARAMNATLFFSSATHNINVNKIFKFIMAKLFNLPWKVERNLTLGEPTIDF

SEQ ID NO: 6265 - protein, 237 aa, Glycine max
  misc_feature (1)..(237): Ceres Seq. ID no. 14314553
MLLCSLGRPSYLRLPLRDPPPQATVHGGASMHGYPFTTTTPSPCDSDSDLVNLKISLLGDCHIGKTSFVIKYVGDEQEKRSLQMKGLNLMDKTLFVQGARISFSIWDVAGDTGSLYQIPMACKDSVAILIMFDLTSRCTLNSVVGWYSKARKWNQIAIPILIGTKFDDFVKLPPDVQWTIVTQARAYARAMNATLFFSSATHNINVNKIFKFIMAKLFNLPWKVERNLTLGEPTIDF

SEQ ID NO: 6266 - protein, 207 aa, Glycine max
  misc_feature (1)..(207): Ceres Seq. ID no. 14314554
MHGYPFTTTTPSPCDSDSDLVNLKISLLGDCHIGKTSFVIKYVGDEQEKRSLQMKGLNLMDKTLFVQGARISFSIWDVAGDTGSLYQIPMACKDSVAILIMFDLTSRCTLNSVVGWYSKARKWNQIAIPILIGTKFDDFVKLPPDVQWTIVTQARAYARAMNATLFFSSATHNINVNKIFKFIMAKLFNLPWKVERNLTLGEPTIDF

SEQ ID NO: 6267 - DNA, 1540 bp, Glycine max
  misc_feature (1)..(1540): Ceres Seq. ID no. 14314567
atttttgagctttccatttttctctctttttcaactttcaattcaagcagctttggaaaaaccaaccagccaacgggttttttttttttttcacctcctgaaatttctttggaagaagcttgcacaaggtggagtcgcagagacaggtgttggtttggtaatataggccttggagtgaaaattcaatattttgcatggaagccagagaaggtattagttctggggttacagtgataggggcagaagctccatcagcttaccatgtggctccgaggagtgaagctccaaaccaggttcatgtccctgatggtggtggtggtggtgctgctacagctgcacctgttggtgtctcacctgtgagtgtggggttggatggaacagttaagaagaaacggggtagaccgaggaaatatgggcctgatgggtctgtaactatggcattgtcgccaatgccaatctcgtcttctgctccgccttcgaatgacttttcatccgggaagcgggggaaaatgcgggggatggaccataagccgtcgaaaaaagttggcttggattatataggtgacttgaatgtatgctctgatggtacaaattttatgccacatatcatcactgtcaatgctggcgaggacatcacaatgaaggtgatatccttttctcaacaaggaccacgagctatatgtatcttatctgctaatggtgtaatttcaaatgttacacttcgtcagcctgattcttctgggggtactttaacttatgagggccgttttgagatactttccttgtctggatcattcatgcctactgataaccaaggaacaagaagcaggaccggtggaatgtctgtgtcgttggctagtcctgatggccgtgttgtaggtggtggagttgctggtcttcttgtagctgccagccctgtgcaggtggtggtgggaagctttttaccaagcagccagcaagaacagaaaataaagaagccaaagtctagtgattatgcaccggtaactgttactccagcgattgcagtgtcttctgcaccgccacctccaaccaatgctgaaaaagaggatgtgaatgttatgggtggagcacatgtactgcaaaattctggaacccttaactctaacctcactcctcccaatgcctttagaagagacaactgggtcaacatgcactctatgccagactctagaaaatcagctacagatattaacatatctttgcctgatagttaggttggcgatcgaggggcgcactctctatcctcaagaactcttgctgacaacattcatgactcagctgttttattaatgtttagtgttctctctctttctctcactctcatttaaagattgtttcaatcgtgtctaatgtctatcaccataggatgtagtttcagtgttgtaagttgcagctagttagagtatctgatatatttatcggctgattaggtagatgctgcattctgcagatttatgagtaggctaatttggatgtaatgaaaacttgtttgcctatttatttatgactgaatttgtgg

SEQ ID NO: 6268 - protein, 346 aa, Glycine max
  misc_feature (1)..(346): Ceres Seq. ID no. 14314568
MEAREGISSGVTVIGAEAPSAYHVAPRSEAPNQVHVPDGGGGGAATAAPVGVSPVSVGLDGTVKKKRGRPRKYGPDGSVTMALSPMPISSSAPPSNDFSSGKRGKMRGMDHKPSKKVGLDYIGDLNVCSDGTNFMPHIITVNAGEDITMKVISFSQQGPRAICILSANGVISNVTLRQPDSSGGTLTYEGRFEILSLSGSFMPTDNQGTRSRTGGMSVSLASPDGRVVGGGVAGLLVAASPVQVVVGSFLPSSQQEQKIKKPKSSDYAPVTVTPAIAVSSAPPPPTNAEKEDVNVMGGAHVLQNSGTLNSNLTPPNAFRRDNWVNMHSMPDSRKSATDINISLPDS

SEQ ID NO: 6269 - protein, 266 aa, Glycine max
  misc_feature (1)..(266): Ceres Seq. ID no. 14314569
MALSPMPISSSAPPSNDFSSGKRGKMRGMDHKPSKKVGLDYIGDLNVCSDGTNFMPHIITVNAGEDITMKVISFSQQGPRAICILSANGVISNVTLRQPDSSGGTLTYEGRFEILSLSGSFMPTDNQGTRSRTGGMSVSLASPDGRVVGGGVAGLLVAASPVQVVVGSFLPSSQQEQKIKKPKSSDYAPVTVTPAIAVSSAPPPPTNAEKEDVNVMGGAHVLQNSGTLNSNLTPPNAFRRDNWVNMHSMPDSRKSATDINISLPDS

SEQ ID NO: 6270 - protein, 261 aa, Glycine max
  misc_feature (1)..(261): Ceres Seq. ID no. 14314570
MPISSSAPPSNDFSSGKRGKMRGMDHKPSKKVGLDYIGDLNVCSDGTNFMPHIITVNAGEDITMKVISFSQQGPRAICILSANGVISNVTLRQPDSSGGTLTYEGRFEILSLSGSFMPTDNQGTRSRTGGMSVSLASPDGRVVGGGVAGLLVAASPVQVVVGSFLPSSQQEQKIKKPKSSDYAPVTVTPAIAVSSAPPPPTNAEKEDVNVMGGAHVLQNSGTLNSNLTPPNAFRRDNWVNMHSMPDSRKSATDINISLPDS

SEQ ID NO: 6271 - DNA, 1360 bp, Glycine max
  misc_feature (1)..(1360): Ceres Seq. ID no. 14314571
agtgatatgatcatacccaaaattaaaccttgtttattgttattccttgatgctatacctctctctaattgcgtttctttttctttcttttcaagccaattaatccttaaaaaacaccgatcgatctgaagcagctagctagccccatcccatcttatatttcatatttgtcaatttggtcatggagaccaacactagtgcattcacaaatgtgaacagcacttggaatcttgaaaagatggaaacaaatgaacaacaaaatgatgaacataatattattctccaagtccaagaccctatgggttctgggatttggcccagcaacaactaccacaaccttcttcaaatgcatcaaacacccaacacaacaaccttatccatcatagcaccaccaccctcctcatcagggttccttggagacatactgggtgttcacaacctagaagaagatgaagagccagaagaagagctaggtgccatgaaggagatgatgtacaagatcgctgctatgcaacccgtggacatcgaccccgccacgattcgaaaaccaaagagaagaaatgttcgcatcagtgatgaccctcagagtgtggctgcacgccacaggagagagaggatcagcgagaaaatccgcatcctccagagactcgttcccgggggaaccaaaatggacaccgcttcaatgcttgatgaagccattcgctatgttaagttcttgaagagacaaataaggttgcttcaatctattcctcaatcttcaaatccaccacaatgcattggtgttgctactacttctcatcatgctagtaccttgttgttagccccttcctgtgattggccttttgcaccaaatgttcttcccagttccaccgccgccaccgcctcaatggacatgtcggccggactgggattcgacgtcggccatgctcatgcttgtgatggctcctccagctttaaccatcatgaggtaatcagtgaataattagtggttataggttataattaattgtattgctttgtatgtgtatgtatatggaattgaggagtgcttggttagtattagtgtatgtgtatgtgtatgttgatgactgttttgagcttggggaaaatcaaggaaaaaagaatagagtaataatttaggggaggggagaaaggtttgttaggatattgttgactaaaggcttctgtagaataatcataacggttggcttggttacgtacacagccatatagaataatgtgtatgccagtttcggtgttggccggaaagtttgtttggtcgagtctcttcctggaataacttccactgtgacgttataacctagtattgaataatgaacaatattattgatttgtggcc

SEQ ID NO: 6272 - protein, 266 aa, Glycine max
  misc_feature (1)..(266): Ceres Seq. ID no. 14314572
METNTSAFTNVNSTWNLEKMETNEQQNDEHNIILQVQDPMGSGIWPSNNYHNLLQMHQTPNTTTLSIIAPPPSSSGFLGDILGVHNLEEDEEPEEELGAMKEMMYKIAAMQPVDIDPATIRKPKRRNVRISDDPQSVAARHRRERISEKIRILQRLVPGGTKMDTASMLDEAIRYVKFLKRQIRLLQSIPQSSNPPQCIGVATTSHHASTLLLAPSCDWPFAPNVLPSSTAATASMDMSAGLGFDVGHAHACDGSSSFNHHEVISE

SEQ ID NO: 6273 - protein, 247 aa, Glycine max
  misc_feature (1)..(247): Ceres Seq. ID no. 14314573
METNEQQNDEHNIILQVQDPMGSGIWPSNNYHNLLQMHQTPNTTTLSIIAPPPSSSGFLGDILGVHNLEEDEEPEEELGAMKEMMYKIAAMQPVDIDPATIRKPKRRNVRISDDPQSVAARHRRERISEKIRILQRLVPGGTKMDTASMLDEAIRYVKFLKRQIRLLQSIPQSSNPPQCIGVATTSHHASTLLLAPSCDWPFAPNVLPSSTAATASMDMSAGLGFDVGHAHACDGSSSFNHHEVISE

SEQ ID NO: 6274 - protein, 227 aa, Glycine max
  misc_feature (1)..(227): Ceres Seq. ID no. 14314574
MGSGIWPSNNYHNLLQMHQTPNTTTLSIIAPPPSSSGFLGDILGVHNLEEDEEPEEELGAMKEMMYKIAAMQPVDIDPATIRKPKRRNVRISDDPQSVAARHRRERISEKIRILQRLVPGGTKMDTASMLDEAIRYVKFLKRQIRLLQSIPQSSNPPQCIGVATTSHHASTLLLAPSCDWPFAPNVLPSSTAATASMDMSAGLGFDVGHAHACDGSSSFNHHEVISE

SEQ ID NO: 6275 - DNA, 1439 bp, Glycine max
  misc_feature (1)..(1439): Ceres Seq. ID no. 14314589
aaaagaagaagatttcctctattgattttctttattaaattcaggttacgtactaatgacggcccagttccagaagattgttgttgctgaccacatggatcgaattagtgatttaccaagtcatttgattgattttattctacaacgcttgcccctgcaagatgttgttagaacgagtttattatcaagtaaatggagatataagtggacttctatccccaaacttgatttttcaaatgatttttttcaaaagtgtagggatttagaacttcatgaagtttcaagtactattacagaaattcttttgattcacgatgggcaattagatgagtttgttctttgcattcccgaaaatgtgccaatcaaaattgaatcccttaataagtggattctttgtttatcaagaaaagggattaaagaacttgagctttggaaccttcaaacagatccttgtgaaacaccatctcatatcttctcttgtcaaggattgacgtatcttcaacttcacaattttaaattatcaactgtgcctaatttttctagctttaaaagtttggtttaccttatgttagttgatattatatttgagtccagtgcaattgatcttatgtttggttgtccatcacttgtgatgctctccatttgttactgttctggttttgagtgtatcaatgtgtcctctcctgctctcgaagtcttacatgtacaaggtgaacaagttatcaagtcaatttgtttggagaaagctaaaagaatgactgatgtttcactcatggctgataatcctggggataactttgacatggatacaatatcaaatttgatcaaaggcttgtcagaagttgaaagcatgtgtttaacagaaggttatattcagatcttttccacagcttatacccttccaaagagtttgcaaaaaccactcaactgcttagaatctctagaattggaaggtgtgaatttcgacgatacaacagagcttctgtttgttatttccctacttaaaagttctccaaacctagagaaactttttatacagggtaattatagcactggcgtggatctgccacaaatattggagaagtcaaagtacaatggttgttgccttagtcaccttctgactgtgcacataaaagcttacaaaccctgtgagaatacaatgaacttcatacgttttttgctggctaattccacatcattggagctccttactttctgcattattcctgctcatgatcaacaacatcattccatatctagtgttggacgagaattggaacaaatggcacgagcttcaaaaagtgcagtagttgagttcattgatttatcatttgattgattggtgattgtatttgttatcattcaatccccaactcctcctcatctcttgctttgttctattgtaatttttgctagttacagacaactctttcacaccc

SEQ ID NO: 6276 - protein, 427 aa, Glycine max
  misc_feature (1)..(427): Ceres Seq. ID no. 14314590
MTAQFQKIVVADHMDRISDLPSHLIDFILQRLPLQDVVRTSLLSSKWRYKWTSIPKLDFSNDFFQKCRDLELHEVSSTITEILLIHDGQLDEFVLCIPENVPIKIESLNKWILCLSRKGIKELELWNLQTDPCETPSHIFSCQGLTYLQLHNFKLSTVPNFSSFKSLVYLMLVDIIFESSAIDLMFGCPSLVMLSICYCSGFECINVSSPALEVLHVQGEQVIKSICLEKAKRMTDVSLMADNPGDNFDMDTISNLIKGLSEVESMCLTEGYIQIFSTAYTLPKSLQKPLNCLESLELEGVNFDDTTELLFVISLLKSSPNLEKLFIQGNYSTGVDLPQILEKSKYNGCCLSHLLTVHIKAYKPCENTMNFIRFLLANSTSLELLTFCIIPAHDQQHHSISSVGRELEQMARASKSAVVEFIDLSFD

SEQ ID NO: 6277 - protein, 414 aa, Glycine max
  misc_feature (1)..(414): Ceres Seq. ID no. 14314591
MDRISDLPSHLIDFILQRLPLQDVVRTSLLSSKWRYKWTSIPKLDFSNDFFQKCRDLELHEVSSTITEILLIHDGQLDEFVLCIPENVPIKIESLNKWILCLSRKGIKELELWNLQTDPCETPSHIFSCQGLTYLQLHNFKLSTVPNFSSFKSLVYLMLVDIIFESSAIDLMFGCPSLVMLSICYCSGFECINVSSPALEVLHVQGEQVIKSICLEKAKRMTDVSLMADNPGDNFDMDTISNLIKGLSEVESMCLTEGYIQIFSTAYTLPKSLQKPLNCLESLELEGVNFDDTTELLFVISLLKSSPNLEKLFIQGNYSTGVDLPQILEKSKYNGCCLSHLLTVHIKAYKPCENTMNFIRFLLANSTSLELLTFCIIPAHDQQHHSISSVGRELEQMARASKSAVVEFIDLSFD

SEQ ID NO: 6278 - protein, 257 aa, Glycine max
  misc_feature (1)..(257): Ceres Seq. ID no. 14314592
MLVDIIFESSAIDLMFGCPSLVMLSICYCSGFECINVSSPALEVLHVQGEQVIKSICLEKAKRMTDVSLMADNPGDNFDMDTISNLIKGLSEVESMCLTEGYIQIFSTAYTLPKSLQKPLNCLESLELEGVNFDDTTELLFVISLLKSSPNLEKLFIQGNYSTGVDLPQILEKSKYNGCCLSHLLTVHIKAYKPCENTMNFIRFLLANSTSLELLTFCIIPAHDQQHHSISSVGRELEQMARASKSAVVEFIDLSFD

SEQ ID NO: 6279 - DNA, 1339 bp, Glycine max
  misc_feature (1)..(1339): Ceres Seq. ID no. 14314593
agggaaagtaaaccttgaaacaatcatgagcatcggaacaacactactttcaacaccaccacattactgtttccactccaacactcaaaccacattcctcagcaccgttactccaattcaaaacctctctatccgcaataacaatttcagagtcctctgtttctcttcggacccgtcgcagttgccgccggtggtggtggtggggtccgccaacgccgacatctacgtcgaggtagaccggctcccgggcgagggcgagaccctggcggcgaggtccgggcagacgattgccggcggcaagggcgccaaccaggccacgtgctccgccaagctcgcgtacccgacctacttcgtcgggcaggtcggggacgacgcttacgggagactcgtcacggcgggcctccgcggtggcggggttcgcctcgataatctcgccgtggtggcttcggcggcaacgggtcatgcagttgtgatgctccagtccaacggccagaactccatcgtctacattgggggtgccaacttgagctgctggcctagttccctgccacgtcagcatttggacctcgttgcccaagctggcatcgttttgctgcagagggagattcctgatgctgtcaatgctcaagtcgcacaggctgccaaaaatgctggggtgccagtagtgttggatgctggaggcatggatgggccacttccgccacaattaataaattttgttgatattttgagtcctaatgaaactgaacttgcacgccttacgggaatgccaacagaaagttttgaagagattcaacaggctgctttgaaatgccatgaaatgggagctaagcaagttcttgtgaaacttggacacaaaggatctgccctttttgtagaaggagaaaaaacaattcagcagcctgccatacttgctaaaacagttgttgatacaactggtgctggtgatacttttactgctgcttttgccgtggccttggttgagggcaagtccaaaaaggaatgcctcagatttgccgctgctgcagcttgtctctgtgttcaagtgaagggagcctctcccagcatgcctgataggaaatctgttttggatcttcttaattgtcaatgataatactcgcaaaaggtcacaattcgaactatcaggaatagaataactgtgtatggcagagggaaagacccttgaaaatggcagcaaggaaagcaaaaatccttttacagagtatatctgcaagatggattcttcaacataatagtttgttgtcattgtaataagattaggacaaacactttaccgtttggtaatggaaggaaaatgaaaagaaaaatgttttatatg

SEQ ID NO: 6280 - protein, 369 aa, Glycine max
  misc_feature (1)..(369): Ceres Seq. ID no. 14314594
GKVNLETIMSIGTTLLSTPPHYCFHSNTQTTFLSTVTPIQNLSIRNNNFRVLCFSSDPSQLPPVVVVGSANADIYVEVDRLPGEGETLAARSGQTIAGGKGANQATCSAKLAYPTYFVGQVGDDAYGRLVTAGLRGGGVRLDNLAVVASAATGHAVVMLQSNGQNSIVYIGGANLSCWPSSLPRQHLDLVAQAGIVLLQREIPDAVNAQVAQAAKNAGVPVVLDAGGMDGPLPPQLINFVDILSPNETELARLTGMPTESFEEIQQAALKCHEMGAKQVLVKLGHKGSALFVEGEKTIQQPAILAKTVVDTTGAGDTFTAAFAVALVEGKSKKECLRFAAAAACLCVQVKGASPSMPDRKSVLDLLNCQ

SEQ ID NO: 6281 - protein, 361 aa, Glycine max
  misc_feature (1)..(361): Ceres Seq. ID no. 14314595
MSIGTTLLSTPPHYCFHSNTQTTFLSTVTPIQNLSIRNNNFRVLCFSSDPSQLPPVVVVGSANADIYVEVDRLPGEGETLAARSGQTIAGGKGANQATCSAKLAYPTYFVGQVGDDAYGRLVTAGLRGGGVRLDNLAVVASAATGHAVVMLQSNGQNSIVYIGGANLSCWPSSLPRQHLDLVAQAGIVLLQREIPDAVNAQVAQAAKNAGVPVVLDAGGMDGPLPPQLINFVDILSPNETELARLTGMPTESFEEIQQAALKCHEMGAKQVLVKLGHKGSALFVEGEKTIQQPAILAKTVVDTTGAGDTFTAAFAVALVEGKSKKECLRFAAAAACLCVQVKGASPSMPDRKSVLDLLNCQ

SEQ ID NO: 6282 - protein, 212 aa, Glycine max
  misc_feature (1)..(212): Ceres Seq. ID no. 14314596
MLQSNGQNSIVYIGGANLSCWPSSLPRQHLDLVAQAGIVLLQREIPDAVNAQVAQAAKNAGVPVVLDAGGMDGPLPPQLINFVDILSPNETELARLTGMPTESFEEIQQAALKCHEMGAKQVLVKLGHKGSALFVEGEKTIQQPAILAKTVVDTTGAGDTFTAAFAVALVEGKSKKECLRFAAAAACLCVQVKGASPSMPDRKSVLDLLNCQ

SEQ ID NO: 6283 - DNA, 576 bp, Glycine max
  misc_feature (1)..(576): Ceres Seq. ID no. 14314609
attgaaatttcttctcctgggtttctctatatatttttctttccttgcaagtagattctagcaatttcttctattccttagtattgtttaaaggatgattctttcgatgaagcaagttttctcactagcaatattcattgcattttgggaactttcttctgttgtagctgatgggggagatgtgactatagttcgagtatcaaataatttaaaccaaggtttaagtttcacaattcattgcaaaaccaataacaaagacttgggaactcaagtggtgaatcaaaattactatgaacgatttgaactccatcgtgacaatgcacctggcttaacattcttgttttgcaaaataacatggagagatgcatcaattctatatgtcctttaccaagatgcaagggattttcgccgtagatgtacaactgattgtaattgggaagtcaacaacgaaaaccttcttggcactaatcaatatactctaaaaccagatattattgtcccatggcctaaaaattgatacccatttagtgaacatccaattttacttggataatttaaataaaaaagtgttgtgtt

SEQ ID NO: 6284 - protein, 140 aa, Glycine max
  misc_feature (1)..(140): Ceres Seq. ID no. 14314610
MILSMKQVFSLAIFIAFWELSSVVADGGDVTIVRVSNNLNQGLSFTIHCKTNNKDLGTQVVNQNYYERFELHRDNAPGLTFLFCKITWRDASILYVLYQDARDFRRRCTTDCNWEVNNENLLGTNQYTLKPDIIVPWPKN

SEQ ID NO: 6285 - protein, 136 aa, Glycine max
  misc_feature (1)..(136): Ceres Seq. ID no. 14314611
MKQVFSLAIFIAFWELSSVVADGGDVTIVRVSNNLNQGLSFTIHCKTNNKDLGTQVVNQNYYERFELHRDNAPGLTFLFCKITWRDASILYVLYQDARDFRRRCTTDCNWEVNNENLLGTNQYTLKPDIIVPWPKN

SEQ ID NO: 6286 - DNA, 1415 bp, Glycine max
  misc_feature (1)..(1415): Ceres Seq. ID no. 14314640
atttttacactctttgccagttgacacttgtttctctcttttcatgactccctttctcccaaaaagtgaaacaccaaaatcctcccacaacaacaacaaacaggttaggacttagagagccactcattcccatttgatggaggcgaagaaggaatatgaagtggaccatctgagcacacccacagggaccagtttctctcagttactattcggagatgacgacgacgacgttgatgaaagtgcattgggtctcgctgtggaccagtcttactcttacaattacaacaaccttacccgttcacctcttttctccattcacaaggcaccccaaatgctttgttttggcaaccatcaaaacgaagaaggtggcgttttgcttcctgaaaccaacgtaacccctcagaaatctgtcatcacttctagtgactcctcttctgctagcgcttcctcctgcaaccacaccaacaccgccttcaattccttacctaagtctaataatagtttgcagaaaaagcgacaagaaggagttgccaaggttggtgttggaagccagagacaaactaaaaagaacaaagcagagaaccccacctcaaccggacatgcaaagaggaaggagaagctcggagaacgaattgcaacgttacaacaacttgtttctccctttggaaagacagatacagcatcagtgcttcacgaggccatgggttatataagatttcttcatgaccaagttcaggtcctgtgctctccttacttgcaaagtttgccttcctcataccatcaaaatcagcacgggggcggaggtaacaatgaagaggaagtgaacaaggacttgaggagtaagggtctttgcttgatccctgtgggatgcaccgtacacgtggcaggtagcaatggtgctgatttttggtcatctgctgcaatagggaacaatgttagtttcaccatcagccaagcagtgaaacgaaaccaagatcaatgaatccttttcaaaaaaagttgtagccttttgggaaatgggtttcctatgtctgcccaaattgaagttgtacccaatctggagatggatggttgaggaggtaaactacatgaaatggcaaagagggataacaaataacaagaatggttcaaagttcacacatgggggtacaaaccagaggccatgattttgtccttaattatgtaacatctgttttggtttttggggggtccttttctcaggacacctatatcaatattctatagaaggaaggaaggaaatattttatgtaggatttagggatgtgtgctggcattgaaccctgaactaggagtctaggattccatatatttttattatagatattttgtctctgtaaatttcggtaggcaagccagttaatgaagttattataacatatatttttattatatac

SEQ ID NO: 6287 - protein, 281 aa, Glycine max
  misc_feature (1)..(281): Ceres Seq. ID no. 14314641
MEAKKEYEVDHLSTPTGTSFSQLLFGDDDDDVDESALGLAVDQSYSYNYNNLTRSPLFSIHKAPQMLCFGNHQNEEGGVLLPETNVTPQKSVITSSDSSSASASSCNHTNTAFNSLPKSNNSLQKKRQEGVAKVGVGSQRQTKKNKAENPTSTGHAKRKEKLGERIATLQQLVSPFGKTDTASVLHEAMGYIRFLHDQVQVLCSPYLQSLPSSYHQNQHGGGGNNEEEVNKDLRSKGLCLIPVGCTVHVAGSNGADFWSSAAIGNNVSFTISQAVKRNQDQ

SEQ ID NO: 6288 - protein, 216 aa, Glycine max
  misc_feature (1)..(216): Ceres Seq. ID no. 14314642
MLCFGNHQNEEGGVLLPETNVTPQKSVITSSDSSSASASSCNHTNTAFNSLPKSNNSLQKKRQEGVAKVGVGSQRQTKKNKAENPTSTGHAKRKEKLGERIATLQQLVSPFGKTDTASVLHEAMGYIRFLHDQVQVLCSPYLQSLPSSYHQNQHGGGGNNEEEVNKDLRSKGLCLIPVGCTVHVAGSNGADFWSSAAIGNNVSFTISQAVKRNQDQ

SEQ ID NO: 6289 - DNA, 1583 bp, Glycine max
  misc_feature (1)..(1583): Ceres Seq. ID no. 14314643
acaacccaccttggattgtttttctgcgaccaaagcacgaacttacacacacacagactccgacttgtgttgtgaaaacctttgtgcattacccgacgcttcttcttttcttgttttcgctccaaaacccattgcttcaatcactaatactccactttcagatcggggtgtgtctctctccaacacgcacaaaaaaaggatttgaagatttggataagttgctttcagtcttgaagtactaaaaaagttgagtgtgaggtgtgaagtgaattttaacagtgataattggtaaatggggacccaaactatggggactcatggtggtggtggagacagtaatgggaaacagtcaccactccagcctctggtgcggcaaaactcaatgtacagtctcacacttgatgaggttcagaatcaattgggcgatttggggaagccgctaactagtatgaacattgatgagcttctaaaaaatgtgtggaccgctgaggcaagtcagaccattggtatggacaatgagggcacagcacaagctagtcaagcttctctgcagcgtcaggctagtctgtcattaaccggtgcactaagcaagaagactgtagatgaggtttggagagatatccaacaaaacaaaatcgtaggggagaagaagttccaagacagacatcctactttgggagaaatgacattggaggatttcttggtgaaagcaggtgttgttgcaggtgcatcttctaatagaacaaataccagtactatagctggagttgattcaaacgtggcagtaccacagtttccttcacaagcacagtggatacaatatccacaagcacaatatcagcatccaccacaaagtttaatggggatgtatatgcctagccaaggtatggtacagccattacacatgggggctggagcttcattagatgtttcgtttgcagataatcagatggcaatgccatcgtctctgatgggaacaatgtcagatacgcagactcctggaagaaaaaagagcacttctgaggacatgatagagaagactgttgagaggagacagaaaaggatgataaaaaatcgggaatctgctgcccgttcaagagcaaggaaacaggcatacacaaatgaattggagaataaagtctcgcgcctggaagaggaaaatgaaaggctgaggaaacgaaaggagctagagcagatgttgtcatgtgcaccccctcctgaacctaaatatcaacttcgccgaatagcatcagctccattctgagatctgtacctagttgtagcggtttgtatatttgagtatcagggaattctccttgtggattactgtgtggttgaatccagtatgtcaagaatagctatgtgatgcatttgcatccaatgacttgcttttaattgttaagttctttataactcctctgtgaaggttctttagaaaaaaatgtaaaatattgtagttttacctttcacaatatagcccttttaataatgccttgaggtacttttacgatttggggatgacaaaattgtggggtcttgccatttttcaagatatgggaaaatagggccactgtttaatattc

SEQ ID NO: 6290 - protein, 323 aa, Glycine max
  misc_feature (1)..(323): Ceres Seq. ID no. 14314644
MGTQTMGTHGGGGDSNGKQSPLQPLVRQNSMYSLTLDEVQNQLGDLGKPLTSMNIDELLKNVWTAEASQTIGMDNEGTAQASQASLQRQASLSLTGALSKKTVDEVWRDIQQNKIVGEKKFQDRHPTLGEMTLEDFLVKAGVVAGASSNRTNTSTIAGVDSNVAVPQFPSQAQWIQYPQAQYQHPPQSLMGMYMPSQGMVQPLHMGAGASLDVSFADNQMAMPSSLMGTMSDTQTPGRKKSTSEDMIEKTVERRQKRMIKNRESAARSRARKQAYTNELENKVSRLEEENERLRKRKELEQMLSCAPPPEPKYQLRRIASAPF

SEQ ID NO: 6291 - protein, 318 aa, Glycine max
  misc_feature (1)..(318): Ceres Seq. ID no. 14314645
MGTHGGGGDSNGKQSPLQPLVRQNSMYSLTLDEVQNQLGDLGKPLTSMNIDELLKNVWTAEASQTIGMDNEGTAQASQASLQRQASLSLTGALSKKTVDEVWRDIQQNKIVGEKKFQDRHPTLGEMTLEDFLVKAGVVAGASSNRTNTSTIAGVDSNVAVPQFPSQAQWIQYPQAQYQHPPQSLMGMYMPSQGMVQPLHMGAGASLDVSFADNQMAMPSSLMGTMSDTQTPGRKKSTSEDMIEKTVERRQKRMIKNRESAARSRARKQAYTNELENKVSRLEEENERLRKRKELEQMLSCAPPPEPKYQLRRIASAPF

SEQ ID NO: 6292 - protein, 293 aa, Glycine max
  misc_feature (1)..(293): Ceres Seq. ID no. 14314646
MYSLTLDEVQNQLGDLGKPLTSMNIDELLKNVWTAEASQTIGMDNEGTAQASQASLQRQASLSLTGALSKKTVDEVWRDIQQNKIVGEKKFQDRHPTLGEMTLEDFLVKAGVVAGASSNRTNTSTIAGVDSNVAVPQFPSQAQWIQYPQAQYQHPPQSLMGMYMPSQGMVQPLHMGAGASLDVSFADNQMAMPSSLMGTMSDTQTPGRKKSTSEDMIEKTVERRQKRMIKNRESAARSRARKQAYTNELENKVSRLEEENERLRKRKELEQMLSCAPPPEPKYQLRRIASAPF

SEQ ID NO: 6293 - DNA, 1292 bp, Glycine max
  misc_feature (1)..(1292): Ceres Seq. ID no. 14314651
ccttttttaagactgagagagttatgttttgtccatgtcattgacacagtattaaatattacaaatattctgttcaaaaacaagttttaaaatgagctgtaaaatcaaccatataatcaaaagtgtgattaaaacaattaagtaatacaagctagtttatttctgcttccaacaagcatgcagtgcacttattaaaaaaagggttaggttagtcaattaggcaaaacatgttaaactgttagttcaacaatataaaaatgcatttaattacttgtcttgtagtttatttaacattaattggacaaaataaagctgaatcaatgcttgaaggcttctactgcggccgagacaattgttatgatgtgttgggtgttactcgggatacaagcagagctgacattgcaaaagcctacagaaaacttgcaaaaaaattccatccagatttatataggaatgaagatgagaaaatagaagcggaatctaattttaagagggtagccaatgcatatgaaatcctcaaagatgaagaatcacgaatggactatgattacatgcttgacaatccagagcaggtgtacagccattactaccgatattatcgtaggagagttgcgcctaaagtggatgttcgagtagtgatagccgtcagtattactatcatatccgctattcagtatgtcactgcttggcagagatacaactcggcaataaaatacttattgacagttccaaaatacagaaataaggcgctgcaaattgccaaagaaaaagggctgcttgaaaaagttagaaaaacacgaggaaaaagcaagtcagaagtgaaagaggaaactgaagatgtaatacgaaaagtgttagaagagaacatggatatcagaggagcatatgccaagccagtgataactgatattctgtggctgaaaataatacttttcccagttgatttagtaaaatacatgtactggtacacatgttggatttggaagcataatatcctccaacttccttatgatgatgaagaaaagctgtatcttatcaggaagtacatgaagaaaggacctaatcaatttgctgctattgaagaatctgaaaaacaagagtacttaaaacaagaactgtggatcagagagaaatttgatgtatggtttcaagaaaaagaagaagaacagaaaaagcttcttgctgaaaatgcgagatacaaagcataccgaagatacctcaagacacatggaactggaagaatgacatttgatgattcatgattttgtgatttattataattctcagttgtt

SEQ ID NO: 6294 - protein, 334 aa, Glycine max
  misc_feature (1)..(334): Ceres Seq. ID no. 14314652
MHLITCLVVYLTLIGQNKAESMLEGFYCGRDNCYDVLGVTRDTSRADIAKAYRKLAKKFHPDLYRNEDEKIEAESNFKRVANAYEILKDEESRMDYDYMLDNPEQVYSHYYRYYRRRVAPKVDVRVVIAVSITIISAIQYVTAWQRYNSAIKYLLTVPKYRNKALQIAKEKGLLEKVRKTRGKSKSEVKEETEDVIRKVLEENMDIRGAYAKPVITDILWLKIILFPVDLVKYMYWYTCWIWKHNILQLPYDDEEKLYLIRKYMKKGPNQFAAIEESEKQEYLKQELWIREKFDVWFQEKEEEQKKLLAENARYKAYRRYLKTHGTGRMTFDDS

SEQ ID NO: 6295 - protein, 313 aa, Glycine max
  misc_feature (1)..(313): Ceres Seq. ID no. 14314653
MLEGFYCGRDNCYDVLGVTRDTSRADIAKAYRKLAKKFHPDLYRNEDEKIEAESNFKRVANAYEILKDEESRMDYDYMLDNPEQVYSHYYRYYRRRVAPKVDVRVVIAVSITIISAIQYVTAWQRYNSAIKYLLTVPKYRNKALQIAKEKGLLEKVRKTRGKSKSEVKEETEDVIRKVLEENMDIRGAYAKPVITDILWLKIILFPVDLVKYMYWYTCWIWKHNILQLPYDDEEKLYLIRKYMKKGPNQFAAIEESEKQEYLKQELWIREKFDVWFQEKEEEQKKLLAENARYKAYRRYLKTHGTGRMTFDDS

SEQ ID NO: 6296 - protein, 241 aa, Glycine max
  misc_feature (1)..(241): Ceres Seq. ID no. 14314654
MDYDYMLDNPEQVYSHYYRYYRRRVAPKVDVRVVIAVSITIISAIQYVTAWQRYNSAIKYLLTVPKYRNKALQIAKEKGLLEKVRKTRGKSKSEVKEETEDVIRKVLEENMDIRGAYAKPVITDILWLKIILFPVDLVKYMYWYTCWIWKHNILQLPYDDEEKLYLIRKYMKKGPNQFAAIEESEKQEYLKQELWIREKFDVWFQEKEEEQKKLLAENARYKAYRRYLKTHGTGRMTFDDS

SEQ ID NO: 6297 - DNA, 1983 bp, Glycine max
  misc_feature (1)..(1983): Ceres Seq. ID no. 14314659
aagcgcccgccattgccaaagagaagagtgcgaaacaagaagaagaaaatttctcatttctcgttctgaaaatcggagttcaacgctattattatatttgtgatatcttctatctgattcagcatcatggttcagctaatgaggtctgatacggataatcactgtctgaaaaaggtgaagttggaggttcaagatgaaatcccccctcttcacactcacaagcgacccaaattggaatctccccctaagtgtggtgcaagcgatgaatccatttcaatcccaccagcttcatacaatcccttggatgagccaagccctttgggtttgcgtctcaggaagagtccctcccttttggatttgattcagatgaggctctcgcaacaagaggaatccaaaaagaaagatcaaaaggcttcttcttcttcttctgctgctgctgctgctgctgctgctgattctaaacttaaggcctccaattttcctggaaccattttgaaaattgggaattgggagtataagtctagatatgaaggagacttggtggcgaagtgttactttgcgaagcataagctggtatgggaagtccttgatggttgtcttaagaataagattgaaatcccatggtctgatatcatggctatcaaggctaactaccctgatgatggaccaggtacgctcgaagtagtgcttgcaagaagacccttgttttttagggagatcaatccacagccaaggaagcataccttatggcaggcaacatcggactttactggtggacaagccggcataaacaggcgacattttctgcagtgtccacaaggattgctaggcaagcattttgagaagctcattcagtgtgatccccgtctcaactatctaagccagcaggcggatttggtgttggattctccgtattttgaacctggaacaacttcaattcacgaccacattgaatctagtgatggctttgatagaaaaagcgaagagcgatctggtatttttggattgcaggatgtggagtcaggatctgcagttcaatcatcttcctcaaaaagtgaacataaccttggtaaagctgttgaaaatgtttcccaagaaattacctcacctagctcagtgatgaacatccatgcaatgaaagatttcaggagtagaggagctgaaacattgaagtttcttagtaatttggaccagatcaaattgcctggacttcacccttctatgtcaatggacgatttggttagccacattggacattgcatttcagaacagatgggatctgacaatccaaatttcgctggtgacaaccagtatagcagatctattctggaagaatttactcagtacttgttcaatgactctcaacatgcaactacctccgatgaacagcgtgtcatgtcaaaggtaaactcactctactgccttctgcagaaggatccttctacagcagaagacatgaccaaaaatggcaatagtctgggagatgcaaatgccttgtcaagggtgaactcactatactcccttctgcagaatgcagaagacgcaatggccagaaatggcaatggtctgagagatgcagatgtgatgtcaagggtgaactcgctgtactgtcttctgcagaaggatccttatacagcagaagacacaaacacaatgacaagaaatggcaatggtcttgatgcagatgagggtggaaaagttggtgtgagtaactccactgaattgtcacaaccatgcaaaactaaagtgtctgatttggaagttcaagcggatgatgcttctggctgcaagcagggggggactggtatgtccaggaaggaatcagctggcgatttgcttcttaatcttccaagggtggcatctctgcttcagtttttgtttaacatgtccgaggattctgttaataaagttagatagatagtaaccatctttcaaaacttgcaagaaacacaaaagctatattatcaacaatgtgaatattgt

SEQ ID NO: 6298 - protein, 596 aa, Glycine max
  misc_feature (1)..(596): Ceres Seq. ID no. 14314660
MVQLMRSDTDNHCLKKVKLEVQDEIPPLHTHKRPKLESPPKCGASDESISIPPASYNPLDEPSPLGLRLRKSPSLLDLIQMRLSQQEESKKKDQKASSSSSAAAAAAAADSKLKASNFPGTILKIGNWEYKSRYEGDLVAKCYFAKHKLVWEVLDGCLKNKIEIPWSDIMAIKANYPDDGPGTLEVVLARRPLFFREINPQPRKHTLWQATSDFTGGQAGINRRHFLQCPQGLLGKHFEKLIQCDPRLNYLSQQADLVLDSPYFEPGTTSIHDHIESSDGFDRKSEERSGIFGLQDVESGSAVQSSSSKSEHNLGKAVENVSQEITSPSSVMNIHAMKDFRSRGAETLKFLSNLDQIKLPGLHPSMSMDDLVSHIGHCISEQMGSDNPNFAGDNQYSRSILEEFTQYLFNDSQHATTSDEQRVMSKVNSLYCLLQKDPSTAEDMTKNGNSLGDANALSRVNSLYSLLQNAEDAMARNGNGLRDADVMSRVNSLYCLLQKDPYTAEDTNTMTRNGNGLDADEGGKVGVSNSTELSQPCKTKVSDLEVQADDASGCKQGGTGMSRKESAGDLLLNLPRVASLLQFLFNMSEDSVNKVR

SEQ ID NO: 6299 - protein, 592 aa, Glycine max
  misc_feature (1)..(592): Ceres Seq. ID no. 14314661
MRSDTDNHCLKKVKLEVQDEIPPLHTHKRPKLESPPKCGASDESISIPPASYNPLDEPSPLGLRLRKSPSLLDLIQMRLSQQEESKKKDQKASSSSSAAAAAAAADSKLKASNFPGTILKIGNWEYKSRYEGDLVAKCYFAKHKLVWEVLDGCLKNKIEIPWSDIMAIKANYPDDGPGTLEVVLARRPLFFREINPQPRKHTLWQATSDFTGGQAGINRRHFLQCPQGLLGKHFEKLIQCDPRLNYLSQQADLVLDSPYFEPGTTSIHDHIESSDGFDRKSEERSGIFGLQDVESGSAVQSSSSKSEHNLGKAVENVSQEITSPSSVMNIHAMKDFRSRGAETLKFLSNLDQIKLPGLHPSMSMDDLVSHIGHCISEQMGSDNPNFAGDNQYSRSILEEFTQYLFNDSQHATTSDEQRVMSKVNSLYCLLQKDPSTAEDMTKNGNSLGDANALSRVNSLYSLLQNAEDAMARNGNGLRDADVMSRVNSLYCLLQKDPYTAEDTNTMTRNGNGLDADEGGKVGVSNSTELSQPCKTKVSDLEVQADDASGCKQGGTGMSRKESAGDLLLNLPRVASLLQFLFNMSEDSVNKVR

SEQ ID NO: 6300 - protein, 516 aa, Glycine max
  misc_feature (1)..(516): Ceres Seq. ID no. 14314662
MRLSQQEESKKKDQKASSSSSAAAAAAAADSKLKASNFPGTILKIGNWEYKSRYEGDLVAKCYFAKHKLVWEVLDGCLKNKIEIPWSDIMAIKANYPDDGPGTLEVVLARRPLFFREINPQPRKHTLWQATSDFTGGQAGINRRHFLQCPQGLLGKHFEKLIQCDPRLNYLSQQADLVLDSPYFEPGTTSIHDHIESSDGFDRKSEERSGIFGLQDVESGSAVQSSSSKSEHNLGKAVENVSQEITSPSSVMNIHAMKDFRSRGAETLKFLSNLDQIKLPGLHPSMSMDDLVSHIGHCISEQMGSDNPNFAGDNQYSRSILEEFTQYLFNDSQHATTSDEQRVMSKVNSLYCLLQKDPSTAEDMTKNGNSLGDANALSRVNSLYSLLQNAEDAMARNGNGLRDADVMSRVNSLYCLLQKDPYTAEDTNTMTRNGNGLDADEGGKVGVSNSTELSQPCKTKVSDLEVQADDASGCKQGGTGMSRKESAGDLLLNLPRVASLLQFLFNMSEDSVNKVR

SEQ ID NO: 6301 - DNA, 1547 bp, Glycine max
  misc_feature (1)..(1547): Ceres Seq. ID no. 14314693
gaaatcttttctaatattctatgataccattgaggttcaccttgaaaagcctgttaaacttgtgcatttcagagcaacccaaataatgcacttggacaatcagtctcatttgggaggttcatgccagagtccctggcatgggagaaatggtctactttctctcacaaccgctatgttgaagaggcagagaggtttacacggcccggttcggttgcacagaagaaagctttctttgaagctcactacatgaaacttgctgctcaaaaggcagctgctttgcttgaacaagcaaacagtgcctcacagacacagcaagaacaagaagaggccatagttgataacacgcataatttgaacatgactagtccaaaatctaagctagttctccttgaagaaaatgcacaggtttttaactctgagccagatgccactacctataattcaaattcaaatacagatgctgctttacctcaaagtgacatgttaggaggagctcaaccactgatagatcaccaagcttttgtggttaagttgcaaaatcagcttggaaaagttgataactacaaggagccaagtgaagagggtacaaactttgatcagaatattttgcaatcaacgggcaagaagaaacaagctgtttcttcattcaagttgttaaaagttattggtacccccaagttcaactctacaccagtgaaatcaaaaactcctagtcattctagtaaagatggtattgctaccccaatgagcaataatcctgcactaacctcttctaaaaaagaaggatcaacttctaagttacctcacatgtcacttaatttcacactagttagagaaatcaataaattgaccgtatcattggtgaggaaatttggaagtactggagttggagctagttcttccaaggcttcaaaggatagctcgactcttataaagaccacaactaaggcttctaagaatgagtctcaaaagcattcttcatttactccgttaacagaagcgcaaagaagtaaaaggaaaacccccattatatcctccccatttaggttgagcaccgaagaaagagcttcaattagaaagaagaaacttgagaaagtgtgcaatgctagtgaatcacagaaagtgcagccacatacaaaattcaaggagaaagcagagacaaagattagaaaactaagtcagagaatttgtttcaaagcagggtcatcacctgatttttaccaggatagagaagcatcacaaaaggatcgattaacacctcctgagtcacccaaagagggaagaaaacccactttaagtgtcgtagagagtaaaagttctttacctcgtaatagacctttccagggaaagaattgtggcaccatgactctgcctcgcacttcaaattcctctatgattactactcatgaaaatacatctccaaatattcagcatagaaatccaaatgatagaaattacaaacaattttagggagtacactattaatgtgtaatgcacttctacttttgtagccaaagatcatagttaatatgtaaatatagcttcat

SEQ ID NO: 6302 - protein, 449 aa, Glycine max
  misc_feature (1)..(449): Ceres Seq. ID no. 14314694
MPESLAWEKWSTFSHNRYVEEAERFTRPGSVAQKKAFFEAHYMKLAAQKAAALLEQANSASQTQQEQEEAIVDNTHNLNMTSPKSKLVLLEENAQVFNSEPDATTYNSNSNTDAALPQSDMLGGAQPLIDHQAFVVKLQNQLGKVDNYKEPSEEGTNFDQNILQSTGKKKQAVSSFKLLKVIGTPKFNSTPVKSKTPSHSSKDGIATPMSNNPALTSSKKEGSTSKLPHMSLNFTLVREINKLTVSLVRKFGSTGVGASSSKASKDSSTLIKTTTKASKNESQKHSSFTPLTEAQRSKRKTPIISSPFRLSTEERASIRKKKLEKVCNASESQKVQPHTKFKEKAETKIRKLSQRICFKAGSSPDFYQDREASQKDRLTPPESPKEGRKPTLSVVESKSSLPRNRPFQGKNCGTMTLPRTSNSSMITTHENTSPNIQHRNPNDRNYKQF

SEQ ID NO: 6303 - protein, 407 aa, Glycine max
  misc_feature (1)..(407): Ceres Seq. ID no. 14314695
MKLAAQKAAALLEQANSASQTQQEQEEAIVDNTHNLNMTSPKSKLVLLEENAQVFNSEPDATTYNSNSNTDAALPQSDMLGGAQPLIDHQAFVVKLQNQLGKVDNYKEPSEEGTNFDQNILQSTGKKKQAVSSFKLLKVIGTPKFNSTPVKSKTPSHSSKDGIATPMSNNPALTSSKKEGSTSKLPHMSLNFTLVREINKLTVSLVRKFGSTGVGASSSKASKDSSTLIKTTTKASKNESQKHSSFTPLTEAQRSKRKTPIISSPFRLSTEERASIRKKKLEKVCNASESQKVQPHTKFKEKAETKIRKLSQRICFKAGSSPDFYQDREASQKDRLTPPESPKEGRKPTLSVVESKSSLPRNRPFQGKNCGTMTLPRTSNSSMITTHENTSPNIQHRNPNDRNYKQF

SEQ ID NO: 6304 - protein, 370 aa, Glycine max
  misc_feature (1)..(370): Ceres Seq. ID no. 14314696
MTSPKSKLVLLEENAQVFNSEPDATTYNSNSNTDAALPQSDMLGGAQPLIDHQAFVVKLQNQLGKVDNYKEPSEEGTNFDQNILQSTGKKKQAVSSFKLLKVIGTPKFNSTPVKSKTPSHSSKDGIATPMSNNPALTSSKKEGSTSKLPHMSLNFTLVREINKLTVSLVRKFGSTGVGASSSKASKDSSTLIKTTTKASKNESQKHSSFTPLTEAQRSKRKTPIISSPFRLSTEERASIRKKKLEKVCNASESQKVQPHTKFKEKAETKIRKLSQRICFKAGSSPDFYQDREASQKDRLTPPESPKEGRKPTLSVVESKSSLPRNRPFQGKNCGTMTLPRTSNSSMITTHENTSPNIQHRNPNDRNYKQF

SEQ ID NO: 6305 - DNA, 1604 bp, Glycine max
  misc_feature (1)..(1604): Ceres Seq. ID no. 14314697
tttttaaatcaactcaatttggttctttagtttaaattgcaaaacatcacatttggtaaccattcaaaatcgttacgtagtggttttaaaccaccataaaatacatattttcccaaaaaaataaaaattggaggtctaaattgaacaaaaaactagaggaccaaattgaatcgattttataaattaaaggaccttgtgcgtcaaacatggaagaaaaaaaatggttgtttagaagtggattttagcattttcacactaacggtgatttctgtcgaattggatttttgtataattgttttcagtggtgctgttccttacggaaataagtggcacgaattgcacatactgagcatgtgtacagataaaacaaaatttgacaagtcctaaacttgacattacaggaaattgccatcaggcaacagatacaccgaacatgaaaatgggccaaatttcaagggtctgtcaagtatttcaaatttcccccattttctgtgtctgtcaagtatgtaataacagttatttttgttcctattcttcagttcaaagttgatatgtaagctgactggagacaatgtcaataagtcagaggaacatatctggaagcatatgagtgggaaaaggtttctcaataaattaggtcagtgatatcttatatttgctaaattcttttggatttggaatgatagcagagcttcattgatgaagtgggctcagtttttctgtgagtatttgcagattatataataggtgattgcgtatggattttatagagctttatttactgatgcattttggcttctataaacagagcaagaggaagaagaaaagttgttgtgtcatggattggaaggtgaagagagcttacatgagtcaaaaagtgcagatggtggaaaaaaggatagaatgaagaagaagaagaagaaaaagaatagggtcaaggaaattgatgaggagaaattgcaggtgtcaaaaagtgcagatggtgcaaaaaaagatagaatgaagaaggaaaataataaggacaagggaattgaggaggttatatctgaagttaggaagtcttccaatgagaacagtgacactgaagacgaagacttctggatgcctcctgctggtgatcgttgggacaatgatgatggtggcgatagatggggttcagagtcagagcagggaactgaagagggagatgtaattgatggtgatgctgctgaggattgcaaggagtcagacgagttgtcatcaaggacgaaaagaatgtcgatagaaattggaccaagcagctttgctacaagaaaaaagaaaagtaagaagaaccaccaaacttagtatttgttagtacttttagttgagagaattgcaagacaacttttgcaggcattgcgtgatttaaattatgtcagcccaggtcattagcattatgatacaaaggggatatgggtacaaaatacattgttcaaatgaattttttcttgtattaagaagctgctttttcagtaaatttgtatgacaagcagcatgaaactggatcaaattgtaagtcttcaagtatgcagtcaaagccaagtctgtttttggtattatttatataaggtcagtacttcttt

SEQ ID NO: 6306 - protein, 140 aa, Glycine max
  misc_feature (1)..(140): Ceres Seq. ID no. 14314698
MKKKKKKKNRVKEIDEEKLQVSKSADGAKKDRMKKENNKDKGIEEVISEVRKSSNENSDTEDEDFWMPPAGDRWDNDDGGDRWGSESEQGTEEGDVIDGDAAEDCKESDELSSRTKRMSIEIGPSSFATRKKKSKKNHQT

SEQ ID NO: 6307 - protein, 108 aa, Glycine max
  misc_feature (1)..(108): Ceres Seq. ID no. 14314699
MKKENNKDKGIEEVISEVRKSSNENSDTEDEDFWMPPAGDRWDNDDGGDRWGSESEQGTEEGDVIDGDAAEDCKESDELSSRTKRMSIEIGPSSFATRKKKSKKNHQT

SEQ ID NO: 6308 - protein, 74 aa, Glycine max
  misc_feature (1)..(74): Ceres Seq. ID no. 14314700
MPPAGDRWDNDDGGDRWGSESEQGTEEGDVIDGDAAEDCKESDELSSRTKRMSIEIGPSSFATRKKKSKKNHQT

SEQ ID NO: 6309 - DNA, 1477 bp, Glycine max
  misc_feature (1)..(1477): Ceres Seq. ID no. 14314717
aatccaatgtagaggacattcactcgtattaatattgttccaaactcccaagtcccaaccttctctccctgtctttgcttctgcaattactcccactctggaaatgggttcgctacccgatttagacactctcccccctctgagctcgaggatttcaacggtggttccagcaacccctcgagaagatgaaaacggtgcgtttcaactcaactacatggacctcctcgtgaagctccattacatacgacccgttttcttcttcacttccgaagccgttcaaggcctctcaatctccgacttgaagaaacccatgttcccgcttctcgacccgtattaccacgtttcgggtcgggtcagaagatccgaatccggacgcccctttattaagtgcaacgacgccggtgttcgcatcgctgagtcgcactgcgacagaaccctcgaagaatggttccgtgaaaacggaaacggcgccgttgaagggcttgtccatgatcacgtgcttggacctgatcttgccttttctcctctcgttttcgtcaagttcacttggttcaaatgtggaggattatccgtgggattaagctgggctcacgttcttggagatgccttttctgcatttaatttcctgtccaagtggagtcaaatactagcagtttccattaaaaagacaaatattcttggagagtattggctcgctactaattaccacgatgtggctactcactcttttcacatcacttccaaacaacttcaccatttggtaacagccacatttaatcaaaccaatgacaataccaataaggccaagaccaccacctattttgaaattatttcagcattactttggaagtgtatagcaaacataaggggccaaaaaattggaccaaatgttgtgactatatgtactagtgaatctaatcgtgcagaaaacgaattccccaccaatggcttcttagtgttaagcaaaattgaagcagatttttcgactgggaaatatgaaatttcagaattggtgaagctgattgctgagaacaagatggttgagaaccatgtaatggaaaaattggtggaggcagatgaagggaaagaggattttatagtttatggggtaaacttgacgtttgtgaatttggaagaagctaatatttatgatgggatgaatctgaatggacagaaaccaattatggcaaattgtacatttcgtggggtgagtgataaaggggttgttttggttcttccagcaccagaagatgacgaagatggtggtaatggaaggattgttactgtttctttgcctcgtgaagaactatatcagctgaaagataagctaggaggagaatggggcatacactaattgttcgtgtccgtgttttttatttttggaagcaaaactggtttaagtcgtgtggattgtttttcatctatttgttattgcatttagtatgtttgccggtaataaaatactaatgatttggtc

SEQ ID NO: 6310 - protein, 450 aa, Glycine max
  misc_feature (1)..(450): Ceres Seq. ID no. 14314718
IQCRGHSLVLILFQTPKSQPSLPVFASAITPTLEMGSLPDLDTLPPLSSRISTVVPATPREDENGAFQLNYMDLLVKLHYIRPVFFFTSEAVQGLSISDLKKPMFPLLDPYYHVSGRVRRSESGRPFIKCNDAGVRIAESHCDRTLEEWFRENGNGAVEGLVHDHVLGPDLAFSPLVFVKFTWFKCGGLSVGLSWAHVLGDAFSAFNFLSKWSQILAVSIKKTNILGEYWLATNYHDVATHSFHITSKQLHHLVTATFNQTNDNTNKAKTTTYFEIISALLWKCIANIRGQKIGPNVVTICTSESNRAENEFPTNGFLVLSKIEADFSTGKYEISELVKLIAENKMVENHVMEKLVEADEGKEDFIVYGVNLTFVNLEEANIYDGMNLNGQKPIMANCTFRGVSDKGVVLVLPAPEDDEDGGNGRIVTVSLPREELYQLKDKLGGEWGIH

SEQ ID NO: 6311 - protein, 416 aa, Glycine max
  misc_feature (1)..(416): Ceres Seq. ID no. 14314719
MGSLPDLDTLPPLSSRISTVVPATPREDENGAFQLNYMDLLVKLHYIRPVFFFTSEAVQGLSISDLKKPMFPLLDPYYHVSGRVRRSESGRPFIKCNDAGVRIAESHCDRTLEEWFRENGNGAVEGLVHDHVLGPDLAFSPLVFVKFTWFKCGGLSVGLSWAHVLGDAFSAFNFLSKWSQILAVSIKKTNILGEYWLATNYHDVATHSFHITSKQLHHLVTATFNQTNDNTNKAKTTTYFEIISALLWKCIANIRGQKIGPNVVTICTSESNRAENEFPTNGFLVLSKIEADFSTGKYEISELVKLIAENKMVENHVMEKLVEADEGKEDFIVYGVNLTFVNLEEANIYDGMNLNGQKPIMANCTFRGVSDKGVVLVLPAPEDDEDGGNGRIVTVSLPREELYQLKDKLGGEWGIH

SEQ ID NO: 6312 - protein, 379 aa, Glycine max
  misc_feature (1)..(379): Ceres Seq. ID no. 14314720
MDLLVKLHYIRPVFFFTSEAVQGLSISDLKKPMFPLLDPYYHVSGRVRRSESGRPFIKCNDAGVRIAESHCDRTLEEWFRENGNGAVEGLVHDHVLGPDLAFSPLVFVKFTWFKCGGLSVGLSWAHVLGDAFSAFNFLSKWSQILAVSIKKTNILGEYWLATNYHDVATHSFHITSKQLHHLVTATFNQTNDNTNKAKTTTYFEIISALLWKCIANIRGQKIGPNVVTICTSESNRAENEFPTNGFLVLSKIEADFSTGKYEISELVKLIAENKMVENHVMEKLVEADEGKEDFIVYGVNLTFVNLEEANIYDGMNLNGQKPIMANCTFRGVSDKGVVLVLPAPEDDEDGGNGRIVTVSLPREELYQLKDKLGGEWGIH

SEQ ID NO: 6313 - DNA, 1875 bp, Glycine max
  misc_feature (1)..(1875): Ceres Seq. ID no. 14314729
aggttttccaaaggtaaacataagaggggttctgatgtgaagaagaacattgaggagaaatcagaacgtgcaaagaggttgaaagcagaaaacttgacccgtgaaccattttctccaggtatagatgtgcagacactggacaattctcggaacttgtctcctttcgaattgactgaagacactggtaagggatctaatgtacaagtgttgaacagagcagagagacaggggaattcaagtgttgggttacagaaaggatccaatcgagcatttcctggaaaatctagttcagattttccacaaataggtcaaaggtcatcagttcaaaccccttcagaaaaccctccctacccattggaaaaatcagataagcaagttgagagtgtaaggcatggtaaaaaacactcaggaaaggactttcatacacgtgaagcctcttctgtgcagaaagataaatctagtagagattccttgaatgaagatattcatgccattgagaaaaaagtccccaggaattccagggatggtagtaatggaagtaaacagtcactatccatggattcttattaccaaaaacaaggtgaaatggttggtaaattaaaggaaggccgacaaagtacacagtcacacttgggaacatcacctaaggacaacaatcgaattggttttgatgaatcccctgtaactaatgggcgaggtatctcccttcaaagagagctttcggacttggagttgggtgaattccgtgagtccactccagatgaaactcatgttgcaaagcaatttgaacaaaaaggttcatttaaactgttggaaaacaaagcaaacacttctgaggataggaattcagatattactaaagtaaagccttcattgaaagcaacttcagattcaggaaagccatcttcagcctttgtaaattctggttttcccagtaatttggacaacactaataaaaagaattcggataaccattttgaagattcaacaaaatctcgttctagagttatgcaggctcatttgcaacatttgagagcagatcatgcagaagttggatctcaaaacaaattggcagaaatgagcagtaaatatagaaatagtgaatctggggttagccaagattttgacttggaaggtcgcagtgaaagcaatagaagagtgcctgcaaatgcatctaaaccacaagacagtaaacgcggaaacgtttcctaccctgtgaaagaaattaaaagacaaacacctaattcagtggaagagatggctgatggaggaaaggattctgttgcagatagaaatcatagcgattaaaagaagagagaatcatcttcagatgaaaatagttgctcttattcaaagtatgaaaaggatgaacctgagttgaagggaccgataaggactttctcccaatataaagaatatgtgcaggagtttcaagataaatatgatagttactgctccttgaacaagattttggagggatacagggatgagtttcagaaactaggcaacgatttagaacacgctaaaggcagggatatggatagatattatgacattgtggagcagctgaaggaatcctatcgacgctgtggaccgaggcacaagagattgaagaaaatatttgttgttcttcatacggaattggagaatctcaagggaaggatcaaagacttttcaaactcgtataataaatgatgaaaatacaagagtactatatagataaaattgaagcctgtttatcaaggttaagaacttttgggtgatacatgatgcgcagttgagtagatgaaattcttttgtaggttgggtgtgcactagttttttatactgtgtcttggtagagccatatatttgtgtataaatgaaattttgtcc

SEQ ID NO: 6314 - protein, 435 aa, Glycine max
  misc_feature (1)..(435): Ceres Seq. ID no. 14314730
RFSKGKHKRGSDVKKNIEEKSERAKRLKAENLTREPFSPGIDVQTLDNSRNLSPFELTEDTGKGSNVQVLNRAERQGNSSVGLQKGSNRAFPGKSSSDFPQIGQRSSVQTPSENPPYPLEKSDKQVESVRHGKKHSGKDFHTREASSVQKDKSSRDSLNEDIHAIEKKVPRNSRDGSNGSKQSLSMDSYYQKQGEMVGKLKEGRQSTQSHLGTSPKDNNRIGFDESPVTNGRGISLQRELSDLELGEFRESTPDETHVAKQFEQKGSFKLLENKANTSEDRNSDITKVKPSLKATSDSGKPSSAFVNSGFPSNLDNTNKKNSDNHFEDSTKSRSRVMQAHLQHLRADHAEVGSQNKLAEMSSKYRNSESGVSQDFDLEGRSESNRRVPANASKPQDSKRGNVSYPVKEIKRQTPNSVEEMADGGKDSVADRNHSD

SEQ ID NO: 6315 - protein, 250 aa, Glycine max
  misc_feature (1)..(250): Ceres Seq. ID no. 14314731
MDSYYQKQGEMVGKLKEGRQSTQSHLGTSPKDNNRIGFDESPVTNGRGISLQRELSDLELGEFRESTPDETHVAKQFEQKGSFKLLENKANTSEDRNSDITKVKPSLKATSDSGKPSSAFVNSGFPSNLDNTNKKNSDNHFEDSTKSRSRVMQAHLQHLRADHAEVGSQNKLAEMSSKYRNSESGVSQDFDLEGRSESNRRVPANASKPQDSKRGNVSYPVKEIKRQTPNSVEEMADGGKDSVADRNHSD

SEQ ID NO: 6316 - protein, 240 aa, Glycine max
  misc_feature (1)..(240): Ceres Seq. ID no. 14314732
MVGKLKEGRQSTQSHLGTSPKDNNRIGFDESPVTNGRGISLQRELSDLELGEFRESTPDETHVAKQFEQKGSFKLLENKANTSEDRNSDITKVKPSLKATSDSGKPSSAFVNSGFPSNLDNTNKKNSDNHFEDSTKSRSRVMQAHLQHLRADHAEVGSQNKLAEMSSKYRNSESGVSQDFDLEGRSESNRRVPANASKPQDSKRGNVSYPVKEIKRQTPNSVEEMADGGKDSVADRNHSD

SEQ ID NO: 6317 - DNA, 1073 bp, Glycine max
  misc_feature (1)..(1073): Ceres Seq. ID no. 14314743
gaactctgtctaaaagacactttcttttctgataacatctctactaaaaagttactaaaaatggaaggaagatctatcaccacctccgccgcggagtcatcggagatccaataccatccaccgaaccccccgaaccagatcttcatcctctccggacaaagcaacatggccggacgcggcggcgtcgtcaaggaccaccaccaaaaccgttgggtatgggacaaaatcgttccgtcggaatgctcgccggactcgtcgatcctccgcctgagagcagatctccgatgggaggaagcgcgtgagccgctccacgccgacatcgacaccggcaaagtgtgcggcgtaggtccggggatggcgttcgcgaacgcggtgaggaaacgatccgactcggattccgacgtgatcgggctggttccgtgcgccgtcggtgggacggcgataaaagagtgggagcgtgggagccgtttgtacgagacgatggttaagagagcggaggagagtaggaggtacggtggagagatcaaggcgatgctttggtaccaaggagagagtgacgtgtcggacatccacgacgccgagagttacgggaggaatatgactcgtttggttaagaaccttcgtcatgatcttaaccttccttctcttcccattattcaggtggcgataacatcgggaggagggtatatagataaggtgagggaagcacagttgggtttgaaactttctaatgtggtctgtgtagatgctaaaggattgcagctaaagccggataatcttcacttgaccactgaggctcaagttcagcttggtctctcattagcacaagcttacctttccaacctctgctagactatcaagttattccttgttgagaaatgtgatcgatggtattttaaactctgcgaatgtttgtctacatttctcagaatgagatatgcagtttgagcgatggtactgttgtagagactatgtaatcttttcacctttagagcacacattattattccacgttgttacgttgcaacaatttgctgctctttgtagaatattttgaataaaatgggtttcat

SEQ ID NO: 6318 - protein, 283 aa, Glycine max
  misc_feature (1)..(283): Ceres Seq. ID no. 14314744
ELCLKDTFFSDNISTKKLLKMEGRSITTSAAESSEIQYHPPNPPNQIFILSGQSNMAGRGGVVKDHHQNRWVWDKIVPSECSPDSSILRLRADLRWEEAREPLHADIDTGKVCGVGPGMAFANAVRKRSDSDSDVIGLVPCAVGGTAIKEWERGSRLYETMVKRAEESRRYGGEIKAMLWYQGESDVSDIHDAESYGRNMTRLVKNLRHDLNLPSLPIIQVAITSGGGYIDKVREAQLGLKLSNVVCVDAKGLQLKPDNLHLTTEAQVQLGLSLAQAYLSNLC

SEQ ID NO: 6319 - protein, 263 aa, Glycine max
  misc_feature (1)..(263): Ceres Seq. ID no. 14314745
MEGRSITTSAAESSEIQYHPPNPPNQIFILSGQSNMAGRGGVVKDHHQNRWVWDKIVPSECSPDSSILRLRADLRWEEAREPLHADIDTGKVCGVGPGMAFANAVRKRSDSDSDVIGLVPCAVGGTAIKEWERGSRLYETMVKRAEESRRYGGEIKAMLWYQGESDVSDIHDAESYGRNMTRLVKNLRHDLNLPSLPIIQVAITSGGGYIDKVREAQLGLKLSNVVCVDAKGLQLKPDNLHLTTEAQVQLGLSLAQAYLSNLC

SEQ ID NO: 6320 - protein, 228 aa, Glycine max
  misc_feature (1)..(228): Ceres Seq. ID no. 14314746
MAGRGGVVKDHHQNRWVWDKIVPSECSPDSSILRLRADLRWEEAREPLHADIDTGKVCGVGPGMAFANAVRKRSDSDSDVIGLVPCAVGGTAIKEWERGSRLYETMVKRAEESRRYGGEIKAMLWYQGESDVSDIHDAESYGRNMTRLVKNLRHDLNLPSLPIIQVAITSGGGYIDKVREAQLGLKLSNVVCVDAKGLQLKPDNLHLTTEAQVQLGLSLAQAYLSNLC

SEQ ID NO: 6321 - DNA, 1387 bp, Glycine max
  misc_feature (1)..(1387): Ceres Seq. ID no. 14314747
atctaaacattgacaaccttaataatttattctgtttgtggtctcactagctagaaacaacatcactacacacaaatggcacatactttatccactaatctggctcttaaccttcccacatcgaggtatgttcgtccctcgagaccaacccaggtgaagcccatgaaggtcatgatgggtgatgcaagagaaaagctagaacatgtccatgtgcctaaacacaacaagcaccaccagcccctccccaaaaacaaagttgctcctaccccacccgtaggtaattaattaagctcaatcactctttcacataaattattatatacattaaattctaattgagctattcaacttacaagtaaaattaataaaactcaattatgtttcagctaaaaatttgttttagatcttgttcacctttggatcgaccttgaatcatataatagtcctatgtccacgtataagttgaaattgttctaaacgatatattaatttctggcactctgtggatttgtatatgctatgttattgactaagtgcaaacttaattattcttcttcttaattttctagttagcactaaatatatgactatatactgtgtattaattcagttaacatggggaattgaataaacgcagggttgtgggatcgatttcctacggcaaggacagtgcaagagatgatggagacgatggagagaatgatggaggacccttttgcatttagcacacttgagtggccttcatcaccccttccaagtgagggagtgggagggtatcgaagaaggggaagggcaccatgggaaattaaagagtgtgagagtgaatacaagatgaggtttgatatgcctgggatgaacaaggaggatgtgaaggtgtgggtggaggagaagatgcttgtggtcaaggctgagaaggcacaaaagaagaagcaagagaatgagattgtggaattacaacaagaaaagcagcaagaagaggaggaatggtctgctaagagttatggtaggtatagcagtaggattgctttgcctgataatgtgcagtttgagaatattaaggcagaggttaaggatggtatgctttacataaccatacccaaggctaccagctactccaacatccttgatatccaagttcaatgattcattttgttttgaggtcttttcttagtttttttgttttggattttccacatgtctcttcctttggagacaatcctgttagaggtatgatcagatattaaatataaacatcttttttaacagagatttaaacattaatttatcactttatgaaagactaacctcttctcttagacctaattattggtcttttattagtttgatagacaactttcctctaaataaatagaaaatatgtgtagat

SEQ ID NO: 6322 - protein, 154 aa, Glycine max
  misc_feature (1)..(154): Ceres Seq. ID no. 14314748
MMETMERMMEDPFAFSTLEWPSSPLPSEGVGGYRRRGRAPWEIKECESEYKMRFDMPGMNKEDVKVWVEEKMLVVKAEKAQKKKQENEIVELQQEKQQEEEEWSAKSYGRYSSRIALPDNVQFENIKAEVKDGMLYITIPKATSYSNILDIQVQ

SEQ ID NO: 6323 - protein, 153 aa, Glycine max
  misc_feature (1)..(153): Ceres Seq. ID no. 14314749
METMERMMEDPFAFSTLEWPSSPLPSEGVGGYRRRGRAPWEIKECESEYKMRFDMPGMNKEDVKVWVEEKMLVVKAEKAQKKKQENEIVELQQEKQQEEEEWSAKSYGRYSSRIALPDNVQFENIKAEVKDGMLYITIPKATSYSNILDIQVQ

SEQ ID NO: 6324 - protein, 150 aa, Glycine max
  misc_feature (1)..(150): Ceres Seq. ID no. 14314750
MERMMEDPFAFSTLEWPSSPLPSEGVGGYRRRGRAPWEIKECESEYKMRFDMPGMNKEDVKVWVEEKMLVVKAEKAQKKKQENEIVELQQEKQQEEEEWSAKSYGRYSSRIALPDNVQFENIKAEVKDGMLYITIPKATSYSNILDIQVQ

SEQ ID NO: 6325 - DNA, 1889 bp, Glycine max
  misc_feature (1)..(1889): Ceres Seq. ID no. 14314755
ctagtttttctaacgtttatgacttttctttcccttcttgggtagtcaggtcccgcagcatcgaaaacctggtctggttcaacatgcataggtagttgagtgcagtgattcagattgtttttttttttttttttggctctttttgctttatttgcactcttcttatcagaaaccaagacaacaagagtttaacgttacttcatcatctctgtctctttgctatttcttttgttagcagaaaccaagacaacaagagttgagtatagtgttcttgtaccacagacagcgcagggtgtagcacatcattcctcgatcgagctcgctccaatggcagagacaccaaacaaaggccacatcgtgatggtacctctcatggcacaaggtcacctcatcccatttctcgcactagcaagacaaatccaacaaaacacaagcttcaccatcaccatagccaacacaccccaaaacattcaacaccttcgatctgcactttcttcttctacttctcctaatcatcaaatccatcttgctgagttagtacccttcaactctacccaacactccaacaaagacaacaacacacaaaaggctcctctcactgacctattgaaacttggctatgcatcactcacccttgagcctccttttcgctccttgatatcacagatcacagaagaagacggtcaccctccactttgcataatatctgacatgttccttggttgggttaacaatgttgcaaagagcttaggcactaggaacctaaccttcaccacttgtggtgcttatggtatcttggcctatatctctatctggtccaacctccctcataggaaaactgattctgatgagttccatgttccgggattccctcaaaactaccgtttccacaaaacacaactgcataggtttcttcaagcggctgatggcaccgatgactggtcaagattcctcgttccacagattcaactttctatgaagtctgatgggtggatttgcaatacgattgaaaagatagagcctttggggttaaagcttctcaggaactatcttcaacttcccgtttgggccgtggggcctctccttccacctgcttcactcatgggttcaaaacatcgttcaggaaaggaaactggcatagctcttgatgcatgcatggagtggctggattcaaaggatgaaaattctgttctctatatttcatttgggtcactgcacactatcaatgcatctcaaatgatggctttggctgagggtttggaagagagtggcaaatcgtttatttgggttataaggccaccagttggttttgacatcaatggagagttcagtccagaatggttgccaaaagggtttgaagagagaatgagagacaccaaacgtggccttttggtgcacaaatggggaccccagttggagattctgtcacacacatccacaggagcttttctaagccattgtggatggaactctgtgttggagagtctcagctatggggtgcctatgattgggtggccaattgttgcagatcaaccttataatgtgaagatgttggtggaagaaatgggtgtggctgtggaacttactcgttctacggaaactgttgtttctagggagaaggttaagaagaccatagaaatagtcatggattatgaagggaagggaaaggtgatgaaggagaaggcaaatgagattgcagcttacattagagaggccaaaacagagaaaggtaaagaaaaagggtcttctgtgagagcaatggatgatcttgttacaaccattttatcacccaaggttctgtgatttgttgcatttagaatttagaatttgaatgatataataaagttgcttgtgtgagcatacttgtcataaactgctcaccaatcttt

SEQ ID NO: 6326 - protein, 491 aa, Glycine max
  misc_feature (1)..(491): Ceres Seq. ID no. 14314756
MAETPNKGHIVMVPLMAQGHLIPFLALARQIQQNTSFTITIANTPQNIQHLRSALSSSTSPNHQIHLAELVPFNSTQHSNKDNNTQKAPLTDLLKLGYASLTLEPPFRSLISQITEEDGHPPLCIISDMFLGWVNNVAKSLGTRNLTFTTCGAYGILAYISIWSNLPHRKTDSDEFHVPGFPQNYRFHKTQLHRFLQAADGTDDWSRFLVPQIQLSMKSDGWICNTIEKIEPLGLKLLRNYLQLPVWAVGPLLPPASLMGSKHRSGKETGIALDACMEWLDSKDENSVLYISFGSLHTINASQMMALAEGLEESGKSFIWVIRPPVGFDINGEFSPEWLPKGFEERMRDTKRGLLVHKWGPQLEILSHTSTGAFLSHCGWNSVLESLSYGVPMIGWPIVADQPYNVKMLVEEMGVAVELTRSTETVVSREKVKKTIEIVMDYEGKGKVMKEKANEIAAYIREAKTEKGKEKGSSVRAMDDLVTTILSPKVL

SEQ ID NO: 6327 - protein, 480 aa, Glycine max
  misc_feature (1)..(480): Ceres Seq. ID no. 14314757
MVPLMAQGHLIPFLALARQIQQNTSFTITIANTPQNIQHLRSALSSSTSPNHQIHLAELVPFNSTQHSNKDNNTQKAPLTDLLKLGYASLTLEPPFRSLISQITEEDGHPPLCIISDMFLGWVNNVAKSLGTRNLTFTTCGAYGILAYISIWSNLPHRKTDSDEFHVPGFPQNYRFHKTQLHRFLQAADGTDDWSRFLVPQIQLSMKSDGWICNTIEKIEPLGLKLLRNYLQLPVWAVGPLLPPASLMGSKHRSGKETGIALDACMEWLDSKDENSVLYISFGSLHTINASQMMALAEGLEESGKSFIWVIRPPVGFDINGEFSPEWLPKGFEERMRDTKRGLLVHKWGPQLEILSHTSTGAFLSHCGWNSVLESLSYGVPMIGWPIVADQPYNVKMLVEEMGVAVELTRSTETVVSREKVKKTIEIVMDYEGKGKVMKEKANEIAAYIREAKTEKGKEKGSSVRAMDDLVTTILSPKVL

SEQ ID NO: 6328 - protein, 476 aa, Glycine max
  misc_feature (1)..(476): Ceres Seq. ID no. 14314758
MAQGHLIPFLALARQIQQNTSFTITIANTPQNIQHLRSALSSSTSPNHQIHLAELVPFNSTQHSNKDNNTQKAPLTDLLKLGYASLTLEPPFRSLISQITEEDGHPPLCIISDMFLGWVNNVAKSLGTRNLTFTTCGAYGILAYISIWSNLPHRKTDSDEFHVPGFPQNYRFHKTQLHRFLQAADGTDDWSRFLVPQIQLSMKSDGWICNTIEKIEPLGLKLLRNYLQLPVWAVGPLLPPASLMGSKHRSGKETGIALDACMEWLDSKDENSVLYISFGSLHTINASQMMALAEGLEESGKSFIWVIRPPVGFDINGEFSPEWLPKGFEERMRDTKRGLLVHKWGPQLEILSHTSTGAFLSHCGWNSVLESLSYGVPMIGWPIVADQPYNVKMLVEEMGVAVELTRSTETVVSREKVKKTIEIVMDYEGKGKVMKEKANEIAAYIREAKTEKGKEKGSSVRAMDDLVTTILSPKVL

SEQ ID NO: 6329 - DNA, 1521 bp, Glycine max
  misc_feature (1)..(1521): Ceres Seq. ID no. 14314771
agattttggttggaggaaaatacccacccaaccatggctgcaaccattcctttctctctgcttaggaactgcgcgccattgaaactagcaacacctttcgctcgcaaagcctccatctttaatcttcttctccctcttcaaccacgcaggttggtctctagtacctgtgctgtgaacaatgaagaggctacagcaaaaacagcagctgttaattttgatagtgaagctccaacaatgtagcagccctttcacttctagcatcattttttttaatttattttatcatggttttcttcttattcatggaagtatagttattgtgtcatgattattgattaacctcaattactcaaatacaagggagtgcaaatctctttgcatgataccaattttccaaaagattccaccaatatttaacttctctgcttccatctccctctaagaatgatgttaaagatagcattgattttaaatttaaagggttcactgggatgtgaagattttaaacctcagttctgctaggtttcccactcaaatgatgactgtgacagttaatttgaatttcagggactggtaaatataattatggagaattatggcttgaacccttttggactccatgctgtgagcaagatctgtatttcttgatagttgtacacacactgactcatacatgcacgaataatacttgttttgctggggggtggttagtcttttttgatgtctagaacattggtgggggaacagatgtatgttggggtatcatggctctgttccaaattttttcctcatgtaatttgaacctgtcttgggttactggaccatttgtctttcgggttctctaacttgaggtatgtacattgagggtatcacttatacccttagaaatacaatattttcactttgctgataaaaaaaaaacaaactgactcatacatgcatagatgcatgaagacttataatggcttaatcattttattgtgtttcttttctttatttgtgtaattttgtaacttctgttttcatttcagatttgataagatcataaataaggaaatcccttcgagcattgtatatgaggatgaaaaggttcttgcatttcgtgacattaatccacaggctccggttcatgtcctagtcattccaaaattaagagatggattaacacaacttgggaaggctgatagtaggcatggggaaatattgggtcaacttctgtatgctgccaaaattgtagctgagaaagaaggtattgatgatggattccgtgtcgtcatcaacaatggtcccagtgcctgtcaatctgtgtatcatctgcacttgcatgtattaggtggcagacagatgaattggccacctggttgaaggttgactattactttttaaattttaactgcctattttctgatgaatctctcatggatatttcttcatcaagagttgtaattttgagacctacatataaataatcttgcaacaactgatcctttagtttggttatatgattattcattgggagct

SEQ ID NO: 6330 - protein, 79 aa, Glycine max
  misc_feature (1)..(79): Ceres Seq. ID no. 14314772
RFWLEENTHPTMAATIPFSLLRNCAPLKLATPFARKASIFNLLLPLQPRRLVSSTCAVNNEEATAKTAAVNFDSEAPTM

SEQ ID NO: 6331 - protein, 68 aa, Glycine max
  misc_feature (1)..(68): Ceres Seq. ID no. 14314773
MAATIPFSLLRNCAPLKLATPFARKASIFNLLLPLQPRRLVSSTCAVNNEEATAKTAAVNFDSEAPTM

SEQ ID NO: 6332 - protein, 49 aa, Glycine max
  misc_feature (1)..(49): Ceres Seq. ID no. 14314774
MKRLQQKQQLLILIVKLQQCSSPFTSSIIFFNLFYHGFLLIHGSIVIVS

SEQ ID NO: 6333 - DNA, 1539 bp, Glycine max
  misc_feature (1)..(1539): Ceres Seq. ID no. 14314782
aacaacaaaggtgtttcagcaaaataattatttatgtcataaagttgttccaactgaagatgcgaaggctttttctctctctctaaaagcagtggccatcatgttctcttcctaaaccctttcaatcatcatttagctctgaaaaaaataatagaaattaaaacgaaaaatgtcctggctcttcaagtccaaccaccctgacccagaatcttctaatctccacaaccgcaccgttatccactcgtcttcgccgccgcatcccgccgccgatcgccacggcgtcaaggacgacatatcgcatattttccgcggcgtcgccaacttcctcgctccgccgccgccgtcttcctcttcctcttcttcttcttcttcttcttcctcctccgccggcgattcctcctcctcgcaagctctgtcaggaatccggaacgatctcgtggagatcggcggaagcttcaaaaactctctctcgcgcatttcctcgaacaaagccgtcaccggaatctccaagctcgcttcgcagttgttgcagttggagcctgatcaacaacggagcaacgatgacgacgcggtgcctggaacgacggaagatgttgttcgtttcgtgaaggagatttctgcgcggcctcagtgttggactgaattccccttgccactccataacgattttagcatgtccaattctcagagagaacatgcattggctatagagcaactggtacccgaattcattgcactaagactgaatctttgcagttacatgaatgtggaaaagttttggatgatctattttttgttaatacttccaagactaaatcagcatgattttgagcgcctatcaactcccaagaaactaggagagaggaaaaatttgcaagctggagaacctgaaaacccaaggactgtggatacatatcaagagggtagggaggaccgtggaacagaaagtatctcatttgagcaaaatcagatattgactgaggttacaaacgcagtagagggtttagaagttgatgacacggttagcactgaaaaatggttggaagatacagacattgatgctagttcattggcttcctgtacaaaacttcaacaggaagaggacgtctcattcagtgacctagaggatgataggagttatagctccgataaattatctggctacagggaggcgcatgacataaggggttcatcacctgaaggtgctactagtgactgggttcggctgcgtgaaagttctgagagagatggcaggaagaaggttatccgtttgaagggtaaggattcagaagatgagtcaaatgattggctcactgttgatgatttcaattagatagtcttttcttgattcaccaagttgtaaaggttcgatatttacccccttccccgtggttctgtatttagggagtacaaaattatataaatcaaagtatttcttttcttattcacacgtacatatttcttgtttgtacaaggcattgggtagacaacattcaatttttgaaagtgtacaacgcaaataaaatcaaggatttcaag

SEQ ID NO: 6334 - protein, 387 aa, Glycine max
  misc_feature (1)..(387): Ceres Seq. ID no. 14314783
MSWLFKSNHPDPESSNLHNRTVIHSSSPPHPAADRHGVKDDISHIFRGVANFLAPPPPSSSSSSSSSSSSSSAGDSSSSQALSGIRNDLVEIGGSFKNSLSRISSNKAVTGISKLASQLLQLEPDQQRSNDDDAVPGTTEDVVRFVKEISARPQCWTEFPLPLHNDFSMSNSQREHALAIEQLVPEFIALRLNLCSYMNVEKFWMIYFLLILPRLNQHDFERLSTPKKLGERKNLQAGEPENPRTVDTYQEGREDRGTESISFEQNQILTEVTNAVEGLEVDDTVSTEKWLEDTDIDASSLASCTKLQQEEDVSFSDLEDDRSYSSDKLSGYREAHDIRGSSPEGATSDWVRLRESSERDGRKKVIRLKGKDSEDESNDWLTVDDFN

SEQ ID NO: 6335 - protein, 219 aa, Glycine max
  misc_feature (1)..(219): Ceres Seq. ID no. 14314784
MSNSQREHALAIEQLVPEFIALRLNLCSYMNVEKFWMIYFLLILPRLNQHDFERLSTPKKLGERKNLQAGEPENPRTVDTYQEGREDRGTESISFEQNQILTEVTNAVEGLEVDDTVSTEKWLEDTDIDASSLASCTKLQQEEDVSFSDLEDDRSYSSDKLSGYREAHDIRGSSPEGATSDWVRLRESSERDGRKKVIRLKGKDSEDESNDWLTVDDFN

SEQ ID NO: 6336 - DNA, 1460 bp, Glycine max
  misc_feature (1)..(1460): Ceres Seq. ID no. 14314789
gaaagtgttgtgcgtgctacgcgcggaacctgtcgtttcgagttctacttgtacgttctaccacctttgagtatcttaaacaatctaccatacgtggatcaaaacaccattgccattggctctctttctttgccgtaccatttgaattgaatgtgattgcaattgcaaatccccccttcaattcaattactactttcacgacctaatctaacccttcgctctgctctgctctcacttcaccatattcacacccagatggaaactgtttgtctccactgtggcgacagaggctttccagagacattggttttttgcaccgaatgtatggcttatgcgctgcataggtactgtttaaaggggcttgtgaattttactgatgctgttacatggttttgcgaggattgtgcaacaaagcttggggtgccacctgctcttgaccaatctacacctatcgcatctgtaacaagagaaaattgcatacagggagtgaaaaaacacaataaacagcaaaaaaagaagattacaaagaagcagattgaaggaaaagctaacgctggcttagttgctaaaacaaagggtgtgttatctgctagtcacagttcatctgagcctgagcatcctcattgtagtaacagaggcgaagaagaacatgaggtgaaaaatgactgtggaccagttccaagggatgtagctaattttgatgtaggtgaagaagaaagtgtggcaagggatttagctaattctgatgtaagtttcaaatctgttccagtttctcaaggagctaccaatagtgattcaggttgtgtagaagtagatggtcatgtttatgcacagcctactattgatccaatctggaggggaagtatgtacttttgcaatggaacaattcgtactgtcagtggacttctggctcatatctccaatttagcgtgctcccaagttgcggaggagacaggacatttcccagaagtgcttcatgcagaatttcttcccagagataaggtgtgggctgaaagtttcaagaggggggatccaactgatcaggacattgctctttttttctttcctgacagtgaaggatctgaaaaggacttcgatgtgctggttgaagatatcatgatctgtaaacatgtcataagatttgtgggtaaaaatgcagagcttttaatttttccttctactgagcttccagtccaaaattggagatatgaagccaagtattatttgtggggtgtcttcagaaagaaagcaaacttaagaagagacaaatgatgcagtgtgcagagtttgacaaggctcttaggttggcataaccatagacgtagtctccatctaaaaatttgagcaatagtggttgtgtagctatgactctagtgcatagtactcctgtgtttatagtcactgatatgttaattaaacatatatatactgtagtgcatagtaccctttttgtgaaaaat

SEQ ID NO: 6337 - protein, 338 aa, Glycine max
  misc_feature (1)..(338): Ceres Seq. ID no. 14314790
METVCLHCGDRGFPETLVFCTECMAYALHRYCLKGLVNFTDAVTWFCEDCATKLGVPPALDQSTPIASVTRENCIQGVKKHNKQQKKKITKKQIEGKANAGLVAKTKGVLSASHSSSEPEHPHCSNRGEEEHEVKNDCGPVPRDVANFDVGEEESVARDLANSDVSFKSVPVSQGATNSDSGCVEVDGHVYAQPTIDPIWRGSMYFCNGTIRTVSGLLAHISNLACSQVAEETGHFPEVLHAEFLPRDKVWAESFKRGDPTDQDIALFFFPDSEGSEKDFDVLVEDIMICKHVIRFVGKNAELLIFPSTELPVQNWRYEAKYYLWGVFRKKANLRRDK

SEQ ID NO: 6338 - protein, 315 aa, Glycine max
  misc_feature (1)..(315): Ceres Seq. ID no. 14314791
MAYALHRYCLKGLVNFTDAVTWFCEDCATKLGVPPALDQSTPIASVTRENCIQGVKKHNKQQKKKITKKQIEGKANAGLVAKTKGVLSASHSSSEPEHPHCSNRGEEEHEVKNDCGPVPRDVANFDVGEEESVARDLANSDVSFKSVPVSQGATNSDSGCVEVDGHVYAQPTIDPIWRGSMYFCNGTIRTVSGLLAHISNLACSQVAEETGHFPEVLHAEFLPRDKVWAESFKRGDPTDQDIALFFFPDSEGSEKDFDVLVEDIMICKHVIRFVGKNAELLIFPSTELPVQNWRYEAKYYLWGVFRKKANLRRDK

SEQ ID NO: 6339 - DNA, 1583 bp, Glycine max
  misc_feature (1)..(1583): Ceres Seq. ID no. 14314792
cctttattctccgtttctggtccgccccttcccttctcttcccatctcatctaaatctcaatctctgtctctgtctctgtccgcctcagctttcactccaaaccctaaccaaccgatctctttcgccgatcccggaaaccttccgaatcgtttaattgacgctacgccgtggaatctgggcggaacaaatccacgatggcggcctccaccaccagccaggtctacatccaggtaatcgacgatgtcatgaacaaggtccgcgacgagttcgtcaacaacggtggtcccggcgacgaagttctcaaggagcttcaatctatatgggaatcgaagatgatgcaagctggtgccattgttggtcccatagaaaggtccggggcgcctaagccaacgcccggtggtccaattactccggttcatgatcttaacatgccttatgaggggactgaggagtatgaaactcccacagcggaaatgcttttcccccctacgccattgcaaactcctcttcaaacccctttaccaggaactgtggataactcaatgtataacattcccactggacctagtgactacccgtctgctggaaatgagcctggtgcaaataacgagataaaaggtggaaggcctggtccatacatgcaacctcctccttcaacgtggacgaaccagaaccagaaccaaagggctccacttgacgtcaatgttgcttacgtggaagggcgggatgaggcggaaagaggagcttcaaatcaacctctgacacaggacttcttcatgtcctcggggaagcggaaacgtgatgaaattgcttctcaatataatgctggtggatatatacctcagcaagatggagctggagatgctgcttctcaaatttttgaaattgaagtgtatggagggggcatgtccattgatgcaggtcactctacttctaaaggaaaaatgccagcacaatcagacaggccagcttctcagattcctcaacttgatggaccaattccctacgatgatgatgtgctttctactccaaatatatacaattatggagtgttcaatgaagactacaacattgcaaatacaccagctccttccgaagtaccagcaagtacccctgctcccattgctcaaaatgaggttgatgaagaagatgatgatgatgagccccccctaaatgaaaatgatgatgatgatttggatgatttggatcagggagaggatcaaaatacacatcatcttgttttggcccagtttgacaaggtgacacgtaccaagagtagatggaagtgcaccctaaaggatggtatcatgcatataaataataaggacattctcttcaataaggcaactggagaatttgacttctgattttgtcagggattggtcttgccatttttgtggcagtgctttggtgaattacaggtactctgaggcatttcctgaagtttgccatttgtcaagtgggatatgtatgtctattagctctgcatacttggacagtttaaactgcagtgactctcgtggttagttttttagccgtcataaagaacaacgataatgtcaagtttgcttttcttggttcc

SEQ ID NO: 6340 - protein, 390 aa, Glycine max
  misc_feature (1)..(390): Ceres Seq. ID no. 14314793
MAASTTSQVYIQVIDDVMNKVRDEFVNNGGPGDEVLKELQSIWESKMMQAGAIVGPIERSGAPKPTPGGPITPVHDLNMPYEGTEEYETPTAEMLFPPTPLQTPLQTPLPGTVDNSMYNIPTGPSDYPSAGNEPGANNEIKGGRPGPYMQPPPSTWTNQNQNQRAPLDVNVAYVEGRDEAERGASNQPLTQDFFMSSGKRKRDEIASQYNAGGYIPQQDGAGDAASQIFEIEVYGGGMSIDAGHSTSKGKMPAQSDRPASQIPQLDGPIPYDDDVLSTPNIYNYGVFNEDYNIANTPAPSEVPASTPAPIAQNEVDEEDDDDEPPLNENDDDDLDDLDQGEDQNTHHLVLAQFDKVTRTKSRWKCTLKDGIMHINNKDILFNKATGEFDF

SEQ ID NO: 6341 - protein, 373 aa, Glycine max
  misc_feature (1)..(373): Ceres Seq. ID no. 14314794
MNKVRDEFVNNGGPGDEVLKELQSIWESKMMQAGAIVGPIERSGAPKPTPGGPITPVHDLNMPYEGTEEYETPTAEMLFPPTPLQTPLQTPLPGTVDNSMYNIPTGPSDYPSAGNEPGANNEIKGGRPGPYMQPPPSTWTNQNQNQRAPLDVNVAYVEGRDEAERGASNQPLTQDFFMSSGKRKRDEIASQYNAGGYIPQQDGAGDAASQIFEIEVYGGGMSIDAGHSTSKGKMPAQSDRPASQIPQLDGPIPYDDDVLSTPNIYNYGVFNEDYNIANTPAPSEVPASTPAPIAQNEVDEEDDDDEPPLNENDDDDLDDLDQGEDQNTHHLVLAQFDKVTRTKSRWKCTLKDGIMHINNKDILFNKATGEFDF

SEQ ID NO: 6342 - protein, 344 aa, Glycine max
  misc_feature (1)..(344): Ceres Seq. ID no. 14314795
MMQAGAIVGPIERSGAPKPTPGGPITPVHDLNMPYEGTEEYETPTAEMLFPPTPLQTPLQTPLPGTVDNSMYNIPTGPSDYPSAGNEPGANNEIKGGRPGPYMQPPPSTWTNQNQNQRAPLDVNVAYVEGRDEAERGASNQPLTQDFFMSSGKRKRDEIASQYNAGGYIPQQDGAGDAASQIFEIEVYGGGMSIDAGHSTSKGKMPAQSDRPASQIPQLDGPIPYDDDVLSTPNIYNYGVFNEDYNIANTPAPSEVPASTPAPIAQNEVDEEDDDDEPPLNENDDDDLDDLDQGEDQNTHHLVLAQFDKVTRTKSRWKCTLKDGIMHINNKDILFNKATGEFDF

SEQ ID NO: 6343 - DNA, 754 bp, Glycine max
  misc_feature (1)..(754): Ceres Seq. ID no. 14314807
atcacactaatcactcactcttcactcaaaactcttctctttcattttcataattcccacacattatggctgagcttcactaccaaccacaacaccaataccccctccgctaccctaacgatccacaccaacaaacccgttcctccacccaccaggtcgtcaaggccgccaccgccgtcacagcgggcggctccctcttgatcctcgcctcgttgatcctcgccgccaccgtcattgccctcaccatcgtcaccccgctgttcgtcattttcagtccggttctcgtccccgccgtaatcaccgttgcgctcctgagcctggggttcctcgcctcgagtgggttcggtgtggcggcgatcacggtgctggcgtggatctacaggtacgtcaccggcaagcaaccacctggcgcggatcagttagacagcgcgcgtcacaagatcatggacaaggcgcgtgagatcaaggactacggacagcaacaaatcagcggggtccaggcttcttaattctgcactcgcacgcacatgatcgtatccatctcgtggaatatttctctctttgtctagttagtttatatttaccatttatgaatgaatgaatgcatgattgagcgttaaagttgaatttgaatctctcttttctttgtattttcgtttattgtgggtgttcgctcatcatcacttgttgtaatgtcttaattttgtgtgcatgctgcgactattcaaggacgatccatttgtgtttttattct

SEQ ID NO: 6344 - protein, 147 aa, Glycine max
  misc_feature (1)..(147): Ceres Seq. ID no. 14314808
MAELHYQPQHQYPLRYPNDPHQQTRSSTHQVVKAATAVTAGGSLLILASLILAATVIALTIVTPLFVIFSPVLVPAVITVALLSLGFLASSGFGVAAITVLAWIYRYVTGKQPPGADQLDSARHKIMDKAREIKDYGQQQISGVQAS

SEQ ID NO: 6345 - DNA, 779 bp, Glycine max
  misc_feature (1)..(779): Ceres Seq. ID no. 14314812
atccaggatttaaaccaagatatccatcatttctttctctccccttcttccaattatcgatttggtgaggatttctccctcccgcttgaatgaactatcgcagagccaaaacgataaatccaaacccattgatccattatgccaataatcgatcaataccccacacccacaaacctcgaccccatgaaagaccaactccaaagttccgcaagcgcattcccttcgtcaccgaagtcaaaacagtggaagacccggaagaagcattgtccctctttcaccgttacaaagaacagggtttccggcactattacccttcctatgccgcattactctacaaactagctcgttctagaatgttcgatgccgttgaaacgattctcgctcacatgaaagacaccgaaatgcaatgcagagagagcgttttcattgccctctttcaacattacggtcccgaaaaagccgttgaactcttcaacagaatgcctcagttcaattgcacccgcacgatacagtccttcaacgcgcttctcaatgttctaattgacaatgacaggtttgacgaggccaatgatatttggggtcattagtttttgttggtcggatttgtgtttgcttttatttattggtattgctcattagtattttctacttgtttgctctgtcccttgttttagtagcttggattagctgtgtctcaccatgcatttgtacttcacttttcatgttttttgggttactactatgaaactggaacaattggttgcaattagtgcttttac

SEQ ID NO: 6346 - protein, 165 aa, Glycine max
  misc_feature (1)..(165): Ceres Seq. ID no. 14314813
MNYRRAKTINPNPLIHYANNRSIPHTHKPRPHERPTPKFRKRIPFVTEVKTVEDPEEALSLFHRYKEQGFRHYYPSYAALLYKLARSRMFDAVETILAHMKDTEMQCRESVFIALFQHYGPEKAVELFNRMPQFNCTRTIQSFNALLNVLIDNDRFDEANDIWGH

SEQ ID NO: 6347 - DNA, 1354 bp, Glycine max
  misc_feature (1)..(1354): Ceres Seq. ID no. 14314814
aaaataagagaaggggtgagggggcggcaccacctttccttccctcccgattgccctaggtaaaaaatgtatatagttcttttcttttgcatcaattcagcggcgacgaaaccgcaatagatctccgtttctcgccaaacaaacacaaaatagctgccttcagcggcgacgaaaccgcacctttctttggcttcctcggagccaccgctaccctcgttttttcctgtaactaactcatcaaggaggatccatctctgaaacatattttggaggagatagagactggtggtcctgctgctatgatgaggtactggaatgatgaggaggttttgcggaagttgggacaaaccatgggagtttccttaataaacgtgtaaagggattaggaacccagaacataaactgtcctaaagctacttgagaaagatgcttttctgtaattgtaatgcatgatgccatgctgtcaccaacaatcaaaggggaaactgaggggaagaagatgtttccgtgatgaaaatttaagagctgatagacaacttgagttcacccaactagacatggaaatgacctttactccttacgaggatatgttaacacttaatgaagaattgattagaaagaagtagtaaagttgcaggaaaaatggtgtgaggataaagagaaaacaaaggaagaatatgaaggagacaagcgatggtaactcaaaaaattataaataggatgagggttgcgagtggatcgagtaccttttcggatggcaatgggccagtctgactaagagtgatgagagacaggtgaggaagcaggatccatggttggaggactagttggagaaggatgagaatcacgaggggaggcttcaggtactgtagaattagctggccgtgtcctgtgatgatatgtaagtagaggtagagagacaacttcaattgaatttggtagagaagatgagacttcattgacattttggtcggagttacctagaggacaaggaattggcagtacttcctggagagaagaagaatgatctacagaggatgagaagaaaggtgtgtcttcaaagaaggttacatctgcagacatataatatcgtcttgtgattggagagtagcatttgtaacccttttgaagacgagaataacccaaaaagacacattttactgacttagctgaaagtttgtctaaatcaagggaaagatcatgaacaaaacaagtacaaccaaacactctaggagagacatgaaacaatgggtcatgaggaaagataattgagtgaggaatttggttttcaagagaagaagaaggcatcctattaattaagaagcacgcagtaagcactgcgtctccccagtga

SEQ ID NO: 6348 - protein, 58 aa, Glycine max
  misc_feature (1)..(58): Ceres Seq. ID no. 14314815
MMPCCHQQSKGKLRGRRCFRDENLRADRQLEFTQLDMEMTFTPYEDMLTLNEELIRKK

SEQ ID NO: 6349 - protein, 57 aa, Glycine max
  misc_feature (1)..(57): Ceres Seq. ID no. 14314816
MPCCHQQSKGKLRGRRCFRDENLRADRQLEFTQLDMEMTFTPYEDMLTLNEELIRKK

SEQ ID NO: 6350 - DNA, 1285 bp, Glycine max
  misc_feature (1)..(1285): Ceres Seq. ID no. 14314817
agtcttccatcgaagtgtattgcattggattattgacttttgacttgggtgttgtcacacggccacaccggagtatcgcgtgtccttcgtcagcctgtcctgtcagtcctttgtgcatctttgcctgacccagtcgctgttgtgagcggccgcgttttcgtctgtcaaacagagcatcgccgacaagggcagcgccaagatggccgactggaagagcgcttcgtctgtgtacgacttcagcgtcaaggacatcactggcgccgacgtcagcctagacaagtacaagggccacgttctgctgatcgtcaacatcgcctcgctgtgcgggctgacggccaccaactacaaggagctcgtcgagctggacgagaagtaccgcgagcgcgggctgcgcatcctcgccttcccctgcaaccagttcaacggccaggagcccggcacggccgacgacatcgtgtgcttcgccaagaagcagaacgccaactttgacctgttcgagaaggtgaacgtcaacggcgacgacgccagccccctctggaagtacctgaagaacaagcagggcggcaccttcggagacttcatcaagtggaacttcaccaagttcatcgtcgacaaggagggccagcccgtggagcgacacagccccactacggagccacacaaactgatctctcacattgagaagtacctgtaaagtgccctggctccggggaaactccactattgttactattgaagtttaggatgcttaatagttgttagaaatcacaagggaaagtcaccgaacacctgcaacacacaattgtgataagacaaactagaggtactttgttttaatttacccttgtcatgattttgtagctcttttaacaatgttagtctaaattaatgaatgaaatgtgtagattatttaattttaaatgttttagcttggtgaaggagataaatttacttctcatttataaatagcggaactttgaacttcaccagttccgtagcacaaggaatcaaacaaacacatattgtcacattcaatactctgcccttgtggttttttcactcacatttttcattgtgtcataatcgctgccatgaatagtgtttttacttttttaatagatgatttttgcagccgtgtattgtttctgaagtgtaattctcatgtggctcatggacaaaaatgagcccaccccgatcgctgagcacatttttgtgtgaagactgtgttgcacaaagtgcacgtcaaggctgtgtaatgttcgaataaaggtataacgagaaccct

SEQ ID NO: 6351 - protein, 164 aa, Glycine max
  misc_feature (1)..(164): Ceres Seq. ID no. 14314818
MADWKSASSVYDFSVKDITGADVSLDKYKGHVLLIVNIASLCGLTATNYKELVELDEKYRERGLRILAFPCNQFNGQEPGTADDIVCFAKKQNANFDLFEKVNVNGDDASPLWKYLKNKQGGTFGDFIKWNFTKFIVDKEGQPVERHSPTTEPHKLISHIEKYL

SEQ ID NO: 6352 - DNA, 1083 bp, Glycine max
  misc_feature (1)..(1083): Ceres Seq. ID no. 14314823
ttttttctacctctagggtttttcaatgctacctactccaccctcttctctaaattctttcactttctttctctctcaatgttttcttcttgttttatttaattaattattactcgcccaattttttatgaataaatattaattgtttatttcttagtttttgttactcgccaaattatgtatgtaaaattttgtccattgatcttttcccccttaattttcaggtaagtgttccttgcacaagcttgttcaagaccgtcactgtccgatgcggccattgcactaacctcctcccagtgaacatgcgagggttgcttatgccatctcccactcaatttcatttgggtcactctttcttctccccatctcataaccttctggaggagataccaaaccccactccaaattttcttatgaaccaaacaaatttcagtgcgtcacatgagttctctatgcctgctaggactgcagctgatgagcttccacggccaccgatcacaaacagacctcctgagaagagacagagagtcccctcagcgtacaatcgctttatcaaggacgagatccaacgcatcaagtctgtcaatcccgatataactcacagggaagccttcagtgcagctgcaaagaattgggcccacttcccacacatccactttggtctcatgcctgatcagactgtgaagaagacaaatgtgtgccagcaggatggagaagaggttctcatgaaagatgggttttatgcttcggctaatgttggtgtctcaccctactaattcaccccagtctgttttctctttcgaagaaattatgcaaagaggaaaaattttccaagttccaccaacctatgaagctcaggaactctgattccttaacttataaatgcatctatttgtggctcaagagcgattatgttgatataactaaggactactactacactaggactagctcttggggttgtgcatgcatgcatgtagttctcttcttatgagtagactttaattattaactttcatgttcttcaattcccccagtactactgcagctgattgcttatctaatcaataattaattagccat

SEQ ID NO: 6353 - protein, 157 aa, Glycine max
  misc_feature (1)..(157): Ceres Seq. ID no. 14314824
MRGLLMPSPTQFHLGHSFFSPSHNLLEEIPNPTPNFLMNQTNFSASHEFSMPARTAADELPRPPITNRPPEKRQRVPSAYNRFIKDEIQRIKSVNPDITHREAFSAAAKNWAHFPHIHFGLMPDQTVKKTNVCQQDGEEVLMKDGFYASANVGVSPY

SEQ ID NO: 6354 - protein, 152 aa, Glycine max
  misc_feature (1)..(152): Ceres Seq. ID no. 14314825
MPSPTQFHLGHSFFSPSHNLLEEIPNPTPNFLMNQTNFSASHEFSMPARTAADELPRPPITNRPPEKRQRVPSAYNRFIKDEIQRIKSVNPDITHREAFSAAAKNWAHFPHIHFGLMPDQTVKKTNVCQQDGEEVLMKDGFYASANVGVSPY

SEQ ID NO: 6355 - protein, 120 aa, Glycine max
  misc_feature (1)..(120): Ceres Seq. ID no. 14314826
MNQTNFSASHEFSMPARTAADELPRPPITNRPPEKRQRVPSAYNRFIKDEIQRIKSVNPDITHREAFSAAAKNWAHFPHIHFGLMPDQTVKKTNVCQQDGEEVLMKDGFYASANVGVSPY

SEQ ID NO: 6356 - DNA, 705 bp, Glycine max
  misc_feature (1)..(705): Ceres Seq. ID no. 14314835
atatcctcgtcagtgcttactacttaatttccacttctaattaacaaagttaagcaagcattgacttggtacctataagtagtaatggctgtggctttgacgattgtgttgagcttgctctcggttctctcttctgcatcttgtgcacgaatggtgggggggaagacggaggtccccgacgtgagaacaaacagggaagtgcaagagcttggaaggttcgcggtggaggagtacaaccgcggtttgaaacagtggaagaacaatgggagtgaacagttgaacttttcggaggtggtggaggcgcagcaacaagtggtgtcaggaatgaagtactacttgaagatctcagctactcataaaggggttcacaaaatgttcacctctgttgtggtggtcaagccatggcttcattccaagcaactccttcattttgcgcctgcagcaccatccagtaaagatttttgagatgcatgcatgctagctatttggagctaattaattatataataattaataaccatggcggtatttgtaattgcaagtgagctttttgattttcttctactaaagttttcctctactttttgtaatgggtatatctgtgggcagaacaacaaaaatcaactacgagttgaaatcttacttaccagccatatgtaccaaagaaagtgaataataactatatatatgctatagttttgttct

SEQ ID NO: 6357 - protein, 126 aa, Glycine max
  misc_feature (1)..(126): Ceres Seq. ID no. 14314836
MAVALTIVLSLLSVLSSASCARMVGGKTEVPDVRTNREVQELGRFAVEEYNRGLKQWKNNGSEQLNFSEVVEAQQQVVSGMKYYLKISATHKGVHKMFTSVVVVKPWLHSKQLLHFAPAAPSSKDF

SEQ ID NO: 6358 - protein, 104 aa, Glycine max
  misc_feature (1)..(104): Ceres Seq. ID no. 14314837
MVGGKTEVPDVRTNREVQELGRFAVEEYNRGLKQWKNNGSEQLNFSEVVEAQQQVVSGMKYYLKISATHKGVHKMFTSVVVVKPWLHSKQLLHFAPAAPSSKDF

SEQ ID NO: 6359 - DNA, 1235 bp, Glycine max
  misc_feature (1)..(1235): Ceres Seq. ID no. 14314838
cattctatacggaaatctcaattttcattttctcttgtaaattcagaaaccccaacacgctctgtcggtgtaggttcggtgaaaatgagttcaagaggaaagcagggtgccatcgtttcttaccaaaacgtcgtcgtaatgaggcacggcgagcgcttcgacaacttcgagccgtcatgggcggcgacggcggcgcggccttgggacccgccgctggccgaggccggccggaaacgggcgttcaaaacgggcctgaggctccgagagagtgtcgagtttccgatcgggcgcgtcttcgtttcgccgttcctccgctgcctccagaccgccgtggaactcgtggcatctctctccgatggtgttgccgttaagccttccgaagtcaaggtctctgtcgagtatggattgtgcgaaatgatgaacagcaaggctatccgtcccaatgttgcccccaaagatggaaacatggggtttgatgtagcagtttgtgaagccatgctcccagctgagatagtggataaaaatgttgaaaggatgtgtaaagagttgccccagtgggaagaatcagttctgcaagcaggggcaagatatcagcagttaattaaggaccttgcagataaataccctactgagaacttgctgcttgttacacatggggaaggagtcaaggtagctgtttcttcattcaaaaaggatgctgaggtaaatgaagtcgattactgtggatatgtggaacttagacgtcccatgttcataaaagatcacacatttgccgctggagagttcgatttacttacaactagtggtcaaactggcgtaagctatttcctaccacgtcctttgggaagtgacaccaaccaaactttaccatgatcaagcatatactcgtgattctcacttcaagtttgtgagctttatacttgagtggtgtctgtttcaaggtttataattaggtgaattaaaaaaaaaacatgttaattaggatttaacatgtataggaacttttcaaatgctaggagaaaatgaaagtgaaaatctacatgttcctgattcggatgtcataatttcagaatatttccatagaaaattaatatatcctctccttaacatggagaatggagattaaagtcaagtaaaatatcacaaaactttcttaaagaacaaatatatagcccgtttggttgtaagttacacaagtacttcgctttcgtcaaagtaatatataaataagtagg

SEQ ID NO: 6360 - protein, 290 aa, Glycine max
  misc_feature (1)..(290): Ceres Seq. ID no. 14314839
HSIRKSQFSFSLVNSETPTRSVGVGSVKMSSRGKQGAIVSYQNVVVMRHGERFDNFEPSWAATAARPWDPPLAEAGRKRAFKTGLRLRESVEFPIGRVFVSPFLRCLQTAVELVASLSDGVAVKPSEVKVSVEYGLCEMMNSKAIRPNVAPKDGNMGFDVAVCEAMLPAEIVDKNVERMCKELPQWEESVLQAGARYQQLIKDLADKYPTENLLLVTHGEGVKVAVSSFKKDAEVNEVDYCGYVELRRPMFIKDHTFAAGEFDLLTTSGQTGVSYFLPRPLGSDTNQTLP

SEQ ID NO: 6361 - protein, 262 aa, Glycine max
  misc_feature (1)..(262): Ceres Seq. ID no. 14314840
MSSRGKQGAIVSYQNVVVMRHGERFDNFEPSWAATAARPWDPPLAEAGRKRAFKTGLRLRESVEFPIGRVFVSPFLRCLQTAVELVASLSDGVAVKPSEVKVSVEYGLCEMMNSKAIRPNVAPKDGNMGFDVAVCEAMLPAEIVDKNVERMCKELPQWEESVLQAGARYQQLIKDLADKYPTENLLLVTHGEGVKVAVSSFKKDAEVNEVDYCGYVELRRPMFIKDHTFAAGEFDLLTTSGQTGVSYFLPRPLGSDTNQTLP

SEQ ID NO: 6362 - protein, 244 aa, Glycine max
  misc_feature (1)..(244): Ceres Seq. ID no. 14314841
MRHGERFDNFEPSWAATAARPWDPPLAEAGRKRAFKTGLRLRESVEFPIGRVFVSPFLRCLQTAVELVASLSDGVAVKPSEVKVSVEYGLCEMMNSKAIRPNVAPKDGNMGFDVAVCEAMLPAEIVDKNVERMCKELPQWEESVLQAGARYQQLIKDLADKYPTENLLLVTHGEGVKVAVSSFKKDAEVNEVDYCGYVELRRPMFIKDHTFAAGEFDLLTTSGQTGVSYFLPRPLGSDTNQTLP

SEQ ID NO: 6363 - DNA, 1235 bp, Glycine max
  misc_feature (1)..(1235): Ceres Seq. ID no. 14314849
agaaagggtttgcagtatgggttcttctgcagtttgtcagtccttcatgattcactgtcttttagtctcctcattttcttcatcatttttctccttgcagagcttcctccaagacctttactagagaaactggctaaggagcttcgatggcgattggtaactagctcattctttggttcaaggtgtcatgttattgatacaaggactataattatgcttctttgtcatattcttatttctagggtcttcgcctattcaacctggatattatccgtgagtatggaacaagagatcacttttacgtcattgacataaactacttccctggtaagacgatatattgaagatcttgtttacttaaatcccatatcacactaatagagagtatgccaggttatttggtatgcccaatgagatttcacctgtgttgacaagagtatatgtcagaagagttcgtttataaaaatttcttttgatattctactttgagttgacatataatcctctcaccttcccatcatcatctcaaaaaaaaaaaaaaaaaaaaatctttcaccttcctatctggtatttgtatgactttcttttacttgttaacacaatgttaagtcttcaatcttgtgagaatattaacagttgcctttgaaattggtattaaaaatattaagagttcatctaattttgtatgactttcgtttaaaacttctgtattggttttaaaattgttgcagggtatggcaaaatgccagaatatgaacacatatttacagacttcctgttgagcctggggcaggggaattacaagaaaaaataggctaaagtaactctttccagccctttgatttatgtgcctctcataacgtaagcccgttcgcctctcagtatgaagctcaaaactatggctgttggaaagtatcttagaaagcattagtgataataacatcaactataaagacttaatgtttcgtgaacttcgacctgtacagaaaaactgttagtattttgttgtgcgggaactttctgctgtccttccaaagtaacaaaatgttgtttcaaatcctgaagttctatagctgggtagcttgatgaccgaaggggtcaagtctgcaatttgaaggatttgtattcgccccgcaatggatgttgatatgaccatgttggataagttgaaggatttcaaatgtactgaccgttctttgctgtatatatggcataaattcttgacagtaggaatc

SEQ ID NO: 6364 - protein, 104 aa, Glycine max
  misc_feature (1)..(104): Ceres Seq. ID no. 14314850
RKGLQYGFFCSLSVLHDSLSFSLLIFFIIFLLAELPPRPLLEKLAKELRWRLVTSSFFGSRCHVIDTRTIIMLLCHILISRVFAYSTWILSVSMEQEITFTSLT

SEQ ID NO: 6365 - DNA, 1715 bp, Glycine max
  misc_feature (1)..(1715): Ceres Seq. ID no. 14314859
atcttccttccaagaatgagtttattcctagtgacttttctatacgtgctagtgacacctgtgttgatgattttgcaaattcaacatctcctagatgtataattgatgaagcattaataaaattatggtacaaaccggatagcactttcaaagttcctcgtgccaatacatattttcgaattaccatgaagggtggctatgctgacgtgaagagttgtgtattatccgaattgtttattcatcttcttaaagatgagttgaatgaaatcacatatcaggctagtattgccaagttagaaacttctgtcacttatgttggtgacatgcttgagctgaaggtctatggtttcaatgaaaagcttcctgttttgttatctaaattcttttcagtatctaaatctttcgtgccaactgatgatcggtttaaggtaataaaagaagacatgaagagagctttaaagaacaccaacatgaagcctctaagccattcaacatatttgagattgcaagttttgtgtgagagtttttatgacgctgatgagaagctgtgttatctaaatgatttgtttcttgatgatctgaaggcatttatccctgggcttctctcccagatatacgtggagggtctatgccatggaaatctgtcaaaagaagaagcaattaacatatcaaaaatatttaagatgagttttccagttaatccgctccctattgagttgagacatgctgagcgtgttatttgcctcccatccagtgccaatttagttagagatgtcaatgtgaagaataagtcagaaaaaaactcagtggttgagctttattttcaaattgatcaagattttggtctgggttcaatcaaattgaaagctttaattgatctttttgatgaaattgtggaggagccatttttcaatcaactgaggacaaaagagcagcttggttatgttgttgaatgcagcccgcgagtaacataccgtgtctttgggttttgtttctgcgtccagtcatctgagtacaacccagtttacttgcagggtagaattgaaaacttcttaaatggcctggaagaattgctggatggacttgatggtgattcctttgagaattacaaaagtgggttagtggcaaagctgctggagaaagacccttcactcacatatgaaagcaatagattgtggaaccaaattgttgaaaaaaggtacatctttgacttgtcaaagaaagaagcagaagaattgaagaacataagtaagcatgatattgttgaatggtacaagacttacttgaaaccgtcgtctccaaagtgtcggcaactacttattcggctatggggttgcaacacagacttgaaagaagctgaagcactacccaaatctgtgctggccattacagatccagcagcttttaagatgcaatccaagttttatccaagtttttgttaacttcgaagatgtagtttgttcaactgttgaaatgacaactagaaccagagatagtcttcatttctcatttattggttgtagtcttgtcagactgcaggggtaccatccatatacttataatgaaactaaagtttttgaggggaatacagaatttgttatctggagtttttaaggaggggaatacagaatttgttacctggaaccacagattttgttgatgtaaattacatttatttgggaaatattctttttatccacaagttattataggtc

SEQ ID NO: 6366 - protein, 479 aa, Glycine max
  misc_feature (1)..(479): Ceres Seq. ID no. 14314860
LPSKNEFIPSDFSIRASDTCVDDFANSTSPRCIIDEALIKLWYKPDSTFKVPRANTYFRITMKGGYADVKSCVLSELFIHLLKDELNEITYQASIAKLETSVTYVGDMLELKVYGFNEKLPVLLSKFFSVSKSFVPTDDRFKVIKEDMKRALKNTNMKPLSHSTYLRLQVLCESFYDADEKLCYLNDLFLDDLKAFIPGLLSQIYVEGLCHGNLSKEEAINISKIFKMSFPVNPLPIELRHAERVICLPSSANLVRDVNVKNKSEKNSVVELYFQIDQDFGLGSIKLKALIDLFDEIVEEPFFNQLRTKEQLGYVVECSPRVTYRVFGFCFCVQSSEYNPVYLQGRIENFLNGLEELLDGLDGDSFENYKSGLVAKLLEKDPSLTYESNRLWNQIVEKRYIFDLSKKEAEELKNISKHDIVEWYKTYLKPSSPKCRQLLIRLWGCNTDLKEAEALPKSVLAITDPAAFKMQSKFYPSFC

SEQ ID NO: 6367 - protein, 418 aa, Glycine max
  misc_feature (1)..(418): Ceres Seq. ID no. 14314861
MKGGYADVKSCVLSELFIHLLKDELNEITYQASIAKLETSVTYVGDMLELKVYGFNEKLPVLLSKFFSVSKSFVPTDDRFKVIKEDMKRALKNTNMKPLSHSTYLRLQVLCESFYDADEKLCYLNDLFLDDLKAFIPGLLSQIYVEGLCHGNLSKEEAINISKIFKMSFPVNPLPIELRHAERVICLPSSANLVRDVNVKNKSEKNSVVELYFQIDQDFGLGSIKLKALIDLFDEIVEEPFFNQLRTKEQLGYVVECSPRVTYRVFGFCFCVQSSEYNPVYLQGRIENFLNGLEELLDGLDGDSFENYKSGLVAKLLEKDPSLTYESNRLWNQIVEKRYIFDLSKKEAEELKNISKHDIVEWYKTYLKPSSPKCRQLLIRLWGCNTDLKEAEALPKSVLAITDPAAFKMQSKFYPSFC

SEQ ID NO: 6368 - protein, 372 aa, Glycine max
  misc_feature (1)..(372): Ceres Seq. ID no. 14314862
MLELKVYGFNEKLPVLLSKFFSVSKSFVPTDDRFKVIKEDMKRALKNTNMKPLSHSTYLRLQVLCESFYDADEKLCYLNDLFLDDLKAFIPGLLSQIYVEGLCHGNLSKEEAINISKIFKMSFPVNPLPIELRHAERVICLPSSANLVRDVNVKNKSEKNSVVELYFQIDQDFGLGSIKLKALIDLFDEIVEEPFFNQLRTKEQLGYVVECSPRVTYRVFGFCFCVQSSEYNPVYLQGRIENFLNGLEELLDGLDGDSFENYKSGLVAKLLEKDPSLTYESNRLWNQIVEKRYIFDLSKKEAEELKNISKHDIVEWYKTYLKPSSPKCRQLLIRLWGCNTDLKEAEALPKSVLAITDPAAFKMQSKFYPSFC

SEQ ID NO: 6369 - DNA, 1258 bp, Glycine max
  misc_feature (1)..(1258): Ceres Seq. ID no. 14314869
aaacacagttaaagacgcacaagaaaacatctcgctcaacaccaccaacacttcggatctacgtttccactctccgaacatcaaaaaaggaaagaaaaaccgatttacagcgacaacaacgaacgaacgatttctcgaagcgctctcaaaatggcgcgtgcaccctttacttcattccccttcgtcctcattacccttctctcaattctccacctttcgcactgcaagaccctcaagcgtgacgttaaggctttgaacgagatcaaggcttcgcttgggtggagagtggtgtatgcgtgggtcgatgatgatccatgtggagatggggatcttcctccttggtctggtgtcacgtgttccactgtcggtgattatcgtgttgttaccgagcttgaggtgtatgcggtgtcgattgttggaccttttcccactgctgttaccagcttgttggatcttacacggcttgatcttcacaataacaagctgacagggcctattcctcctcaaattggacggttgaagcgccttaaaatattaaatttgaggtggaacaaactacaggatgcaattcctccaaaaattggcgagcttaaaagtttaacacatctgtacctaagcttcaacaatttcaagggagaaattccgaaggagctagcaaatcttcaagaccttcgctatctttatctccatgaaaaccgtttaactggaagaataccaccagaattgggcacactgcaaaatcttcggcacttggatgctggtaacaatcatttagtaggtaccataagggaactcattcgtattgaaggttgctttcctgcactacgcaatctgtatctaaacaataattattttactggaggaatgcctgcacagcttgctaacttaaccagtcttgagatcttgtacctatcctacaacaaaatgtcaggagttataccatcttccgttgctcgtattcctaaattgacatacttgtacttggatcacaatcagttttcagggagaattcctgaacccttttacaagcatccatttttgaaagaaatgtacattgagggaaatgcattccggcccggtgtcaatcccattggcttccataaagtgcttgaagtttctgatggagacttccttgtttaatgaaagctctaaatatttataattttttctcttcaggaagtgcacttgtataattattgaaacaattgttcctctaattatctcaatgaaatagccaaataggtaatccaattttgtc

SEQ ID NO: 6370 - protein, 329 aa, Glycine max
  misc_feature (1)..(329): Ceres Seq. ID no. 14314870
MARAPFTSFPFVLITLLSILHLSHCKTLKRDVKALNEIKASLGWRVVYAWVDDDPCGDGDLPPWSGVTCSTVGDYRVVTELEVYAVSIVGPFPTAVTSLLDLTRLDLHNNKLTGPIPPQIGRLKRLKILNLRWNKLQDAIPPKIGELKSLTHLYLSFNNFKGEIPKELANLQDLRYLYLHENRLTGRIPPELGTLQNLRHLDAGNNHLVGTIRELIRIEGCFPALRNLYLNNNYFTGGMPAQLANLTSLEILYLSYNKMSGVIPSSVARIPKLTYLYLDHNQFSGRIPEPFYKHPFLKEMYIEGNAFRPGVNPIGFHKVLEVSDGDFLV

SEQ ID NO: 6371 - DNA, 1061 bp, Glycine max
  misc_feature (1)..(1061): Ceres Seq. ID no. 14314939
aattcaggcgatggcgccgcgtctctggtcctgcttccgcagcagcagtagcaagggcagcaccaccggcggcggtgtctccgacgcctccgcctcgcggcgcgtggtgactgcggacctgacatcggaggagcagaagcgcgggggcccggtggtggtggagatgttctcgtcgcaggggtgcgcgacttcaccggcggcggagctggtgctgtcgcggctggggagaggggatttcgagctggaggcgccggtggtggtgctggctttccacgttgactactgggactatatgggatggaaggatccgttcggggccagccagtggacggttcggcagaaggcctatgttgaggcccttgggcttgacaccattttcacgccacaggttgtggttcagggaaaggcccagtgtgttggaaatgacgagaacgcccttgtttctgccattactagtgctcctaggttccctgctccaaccttccaggcaactttcaccaggcctgcaccagattcattgcaagtgtccctaacaggagcattgaggaccaaggtggacagcgatggcgcgaatgtcatggttgcattatacgaaaacggtttggtcaccgattgtccaagaggggagaacaaagggcgtgtcctatccaacgactatgttgttagaaagctcgaaaagctctgcactgtcaaagacatctctgccaagaaaacagtatcaggaatggttaactttcccttatgggaaggattcaaaagcagcaaatgtggtttggctgtctttgttcagagcaaatctcaccagatttttggttcacagagttttcagctgccggatgatatatgattctgattctttagtttcatttgatctgcttgctgttatcatattcgggttacattgtgttttgttaggctatatgtacagattgtgatatgatttaggataataaatgttgttttctttcttttcttacatattttttcctatgtactttgtccttccttactattgaccctatgtttaggagatggagagagaagtctaaatttgtggcgtg

SEQ ID NO: 6372 - protein, 281 aa, Glycine max
  misc_feature (1)..(281): Ceres Seq. ID no. 14314940
IQAMAPRLWSCFRSSSSKGSTTGGGVSDASASRRVVTADLTSEEQKRGGPVVVEMFSSQGCATSPAAELVLSRLGRGDFELEAPVVVLAFHVDYWDYMGWKDPFGASQWTVRQKAYVEALGLDTIFTPQVVVQGKAQCVGNDENALVSAITSAPRFPAPTFQATFTRPAPDSLQVSLTGALRTKVDSDGANVMVALYENGLVTDCPRGENKGRVLSNDYVVRKLEKLCTVKDISAKKTVSGMVNFPLWEGFKSSKCGLAVFVQSKSHQIFGSQSFQLPDDI

SEQ ID NO: 6373 - protein, 278 aa, Glycine max
  misc_feature (1)..(278): Ceres Seq. ID no. 14314941
MAPRLWSCFRSSSSKGSTTGGGVSDASASRRVVTADLTSEEQKRGGPVVVEMFSSQGCATSPAAELVLSRLGRGDFELEAPVVVLAFHVDYWDYMGWKDPFGASQWTVRQKAYVEALGLDTIFTPQVVVQGKAQCVGNDENALVSAITSAPRFPAPTFQATFTRPAPDSLQVSLTGALRTKVDSDGANVMVALYENGLVTDCPRGENKGRVLSNDYVVRKLEKLCTVKDISAKKTVSGMVNFPLWEGFKSSKCGLAVFVQSKSHQIFGSQSFQLPDDI

SEQ ID NO: 6374 - protein, 227 aa, Glycine max
  misc_feature (1)..(227): Ceres Seq. ID no. 14314942
MFSSQGCATSPAAELVLSRLGRGDFELEAPVVVLAFHVDYWDYMGWKDPFGASQWTVRQKAYVEALGLDTIFTPQVVVQGKAQCVGNDENALVSAITSAPRFPAPTFQATFTRPAPDSLQVSLTGALRTKVDSDGANVMVALYENGLVTDCPRGENKGRVLSNDYVVRKLEKLCTVKDISAKKTVSGMVNFPLWEGFKSSKCGLAVFVQSKSHQIFGSQSFQLPDDI

SEQ ID NO: 6375 - DNA, 1614 bp, Glycine max
  misc_feature (1)..(1614): Ceres Seq. ID no. 14314945
agagaaagaagaagacattctcagttgtgttgtctgacaaaacgaacagcaattgggagcagatgcaagatccatcttcaaaccctaattccaatccaaatcccaatcctcacaatgccaatgccgcatcccagctaccgcgtccaccgccggccaccaccgccggcgccggcgcctcctcgtcctcgctgttcgcgcgctccggcgggcctcaccaccggcgagcccattcggaagtgagtttccggctgccggacgacatgatggacctctcgccgtcggatccgttcgccggcgggtcgtcgacggccagcatggaggagatcggatcggaggacgacctgttctcgacgtacattgacgtggacaagctcggcggcgcaaacgggtcgggcgcctccggaaacggagcggatccgaccggcgaaaccgagaagagtccggcgaggccgcgacaccggcacagtagctccgtcgatttcggggaaattatggatgcgaagaaagctatgcctcctgataagttagctgagctatggacaattgatcccaagcgtgctaagagaatacttgcaaatcggcaatctgctgctcgatcgaaggagagaaaagcgcgctacatacaagaacttgagcgcaaggttcagactcttcagacggaagccacaactctttctgcccaattgaccttataccagagggacacaacaggactgagtactgaaaatacagagctaaagctccgtttgcaagccatggagcaacaagcacaacttcgtgacgctcttaatgaagcattgaagaaggaagttgagaggcttaaggttgctactggtgagatgatgagccacactgattcctttaatctgggaatgcacctgatgccattttccggatcaaatttcgttccaatcccgccacaatcaggtccttctggtcaccaaaacatgcagatgccaccatttggtctcaccccatccacaatgccaagccatctactgcatcaaacaagttctcatccatattcagaaatattgcaaaatgaccagcttggtcgtttccaggggcttgacattagtagcaaaggatcaactctcgtgaagtctgaaggcccctcactctccgcaagtgagagtagcactacattttgaatttgacagaaaatgcttgacctgctgacttatccatgccattcattgttcatagggttgacatttagtcaactaatgaaggtaccttatttcatgattcaaatttgaggattaattttaactatttattctaagggggtgctcaccaaaaaggggaagcacccatggggttttgttgcaaagttcacgtaatcatgtttcagcatggcatttggtgtttctgggagctggaatattgggaatgaaaggtcattcccattgtatctttgtatttgtatcatcgtttacgtgatagcatgtaaactgtgtgatttattgttgtgtttcactacattcagagtccaagacggactctttttctttctttctataattacttagtttcaggtttattcatagtcgttgtacaatgcaagagttttgggtactccgtacgtgttgtattaagcttcttccgagatcg

SEQ ID NO: 6376 - protein, 382 aa, Glycine max
  misc_feature (1)..(382): Ceres Seq. ID no. 14314946
RKKKTFSVVLSDKTNSNWEQMQDPSSNPNSNPNPNPHNANAASQLPRPPPATTAGAGASSSSLFARSGGPHHRRAHSEVSFRLPDDMMDLSPSDPFAGGSSTASMEEIGSEDDLFSTYIDVDKLGGANGSGASGNGADPTGETEKSPARPRHRHSSSVDFGEIMDAKKAMPPDKLAELWTIDPKRAKRILANRQSAARSKERKARYIQELERKVQTLQTEATTLSAQLTLYQRDTTGLSTENTELKLRLQAMEQQAQLRDALNEALKKEVERLKVATGEMMSHTDSFNLGMHLMPFSGSNFVPIPPQSGPSGHQNMQMPPFGLTPSTMPSHLLHQTSSHPYSEILQNDQLGRFQGLDISSKGSTLVKSEGPSLSASESSTTF

SEQ ID NO: 6377 - protein, 362 aa, Glycine max
  misc_feature (1)..(362): Ceres Seq. ID no. 14314947
MQDPSSNPNSNPNPNPHNANAASQLPRPPPATTAGAGASSSSLFARSGGPHHRRAHSEVSFRLPDDMMDLSPSDPFAGGSSTASMEEIGSEDDLFSTYIDVDKLGGANGSGASGNGADPTGETEKSPARPRHRHSSSVDFGEIMDAKKAMPPDKLAELWTIDPKRAKRILANRQSAARSKERKARYIQELERKVQTLQTEATTLSAQLTLYQRDTTGLSTENTELKLRLQAMEQQAQLRDALNEALKKEVERLKVATGEMMSHTDSFNLGMHLMPFSGSNFVPIPPQSGPSGHQNMQMPPFGLTPSTMPSHLLHQTSSHPYSEILQNDQLGRFQGLDISSKGSTLVKSEGPSLSASESSTTF

SEQ ID NO: 6378 - protein, 296 aa, Glycine max
  misc_feature (1)..(296): Ceres Seq. ID no. 14314948
MMDLSPSDPFAGGSSTASMEEIGSEDDLFSTYIDVDKLGGANGSGASGNGADPTGETEKSPARPRHRHSSSVDFGEIMDAKKAMPPDKLAELWTIDPKRAKRILANRQSAARSKERKARYIQELERKVQTLQTEATTLSAQLTLYQRDTTGLSTENTELKLRLQAMEQQAQLRDALNEALKKEVERLKVATGEMMSHTDSFNLGMHLMPFSGSNFVPIPPQSGPSGHQNMQMPPFGLTPSTMPSHLLHQTSSHPYSEILQNDQLGRFQGLDISSKGSTLVKSEGPSLSASESSTTF

SEQ ID NO: 6379 - DNA, 1467 bp, Glycine max
  misc_feature (1)..(1467): Ceres Seq. ID no. 14314991
aggcaacctccttttcgtgagtctttaagaaagggaaaacttagaaagcaagaattagttcttacgaagcagaagactgctcttatacaggcagcggactccattggcaagagaatccagtatgattgtcctggtttcctacctaatggacgccagcatcgtatggcaggatttgctgctattgaaattgcacaaaaggtctccaaggcttggcgttcctttcaagcagaatggaaacattctaataaaaataactcaaactcaaagaatggcaaaagggcaaggagaagggaaagaattaatatgctcagtcagaataggggaggtgcaggttgtagcacaagtagtgcctctgaaatatctccttcatatggcattgcagttgatagatcatccagccgttccatgtcatggcaagatgtttattcaatagctgttagatggagacaaatttctgagccttgtgatcctgttgtgtgggtgaacaagttaagtgaagagtttaattctggatttggttctcacactcctatgattctgggacaagccaaagttgtccgttactttcctaactatgaaaggacattagatattgcaaagactgtcataaaagagaaatcatatgtctacagcaagacagatcagatcattcgtctttccaaagatgggaaattagaagaggtcattcatgccaattctgtctctgatctttataatgttgttggtgaggatttctggtcatctacttggtgcaacagtactgcatttgaagggaaacaacttgaggggacaaggataacacttgtaaaaatgggggagaatggttttgattttgcaattagaacaccttgtacacctgctagatgggaggattatgatgcagaaatggcaatggcatgggaagctctctgcaatgcttactgtggtgaaaattatgggtctactgatttcgacgtgcttgaaaatgtgagagatgcaattttaaggatgacatattactggtataacttcatgccactgtccagaggatctgctgtagtcggatttgtagtcatgctgggtttgttacttgctgccaatatggagttcacaggaagcatcccacaaggttttcaggttgattgggaagccgttttgaacttggatcctaattcctttgtggattctgtcaaaagttggctatacccatctctgaaggtaacaacctcatggaaagactatcatgatgttgcgtcaacttttgcaacaacagggtcggttgttgctgccttgagctcttctgatgattgaactccttggaataatgacaggttagtcaatggccaagttattttcaatttctgtttttcttaatttctggtcttgtactgttgtttttgcaattaattacccaatacaacagaacggttcaattcaatgtctctgctaaagcaaacacaaggttctatctgcttttgtacgcttctg

SEQ ID NO: 6380 - protein, 429 aa, Glycine max
  misc_feature (1)..(429): Ceres Seq. ID no. 14314992
RQPPFRESLRKGKLRKQELVLTKQKTALIQAADSIGKRIQYDCPGFLPNGRQHRMAGFAAIEIAQKVSKAWRSFQAEWKHSNKNNSNSKNGKRARRRERINMLSQNRGGAGCSTSSASEISPSYGIAVDRSSSRSMSWQDVYSIAVRWRQISEPCDPVVWVNKLSEEFNSGFGSHTPMILGQAKVVRYFPNYERTLDIAKTVIKEKSYVYSKTDQIIRLSKDGKLEEVIHANSVSDLYNVVGEDFWSSTWCNSTAFEGKQLEGTRITLVKMGENGFDFAIRTPCTPARWEDYDAEMAMAWEALCNAYCGENYGSTDFDVLENVRDAILRMTYYWYNFMPLSRGSAVVGFVVMLGLLLAANMEFTGSIPQGFQVDWEAVLNLDPNSFVDSVKSWLYPSLKVTTSWKDYHDVASTFATTGSVVAALSSSDD

SEQ ID NO: 6381 - protein, 375 aa, Glycine max
  misc_feature (1)..(375): Ceres Seq. ID no. 14314993
MAGFAAIEIAQKVSKAWRSFQAEWKHSNKNNSNSKNGKRARRRERINMLSQNRGGAGCSTSSASEISPSYGIAVDRSSSRSMSWQDVYSIAVRWRQISEPCDPVVWVNKLSEEFNSGFGSHTPMILGQAKVVRYFPNYERTLDIAKTVIKEKSYVYSKTDQIIRLSKDGKLEEVIHANSVSDLYNVVGEDFWSSTWCNSTAFEGKQLEGTRITLVKMGENGFDFAIRTPCTPARWEDYDAEMAMAWEALCNAYCGENYGSTDFDVLENVRDAILRMTYYWYNFMPLSRGSAVVGFVVMLGLLLAANMEFTGSIPQGFQVDWEAVLNLDPNSFVDSVKSWLYPSLKVTTSWKDYHDVASTFATTGSVVAALSSSDD

SEQ ID NO: 6382 - protein, 328 aa, Glycine max
  misc_feature (1)..(328): Ceres Seq. ID no. 14314994
MLSQNRGGAGCSTSSASEISPSYGIAVDRSSSRSMSWQDVYSIAVRWRQISEPCDPVVWVNKLSEEFNSGFGSHTPMILGQAKVVRYFPNYERTLDIAKTVIKEKSYVYSKTDQIIRLSKDGKLEEVIHANSVSDLYNVVGEDFWSSTWCNSTAFEGKQLEGTRITLVKMGENGFDFAIRTPCTPARWEDYDAEMAMAWEALCNAYCGENYGSTDFDVLENVRDAILRMTYYWYNFMPLSRGSAVVGFVVMLGLLLAANMEFTGSIPQGFQVDWEAVLNLDPNSFVDSVKSWLYPSLKVTTSWKDYHDVASTFATTGSVVAALSSSDD

SEQ ID NO: 6383 - DNA, 1616 bp, Glycine max
  misc_feature (1)..(1616): Ceres Seq. ID no. 14314995
agggacgatttttgttgataatctaaaacaagcagtagatcttgatgtcgtcgttaaagcaactctgaaagacagcaacaagctcagcagtggaactttcagcactgtttacaaggcaatcatgccttccggggtggtcttatctgttaggagactgaagtctgtagacaagacaataatccaccaccagaacaagatgattagagaacttgaaagactaagcaaagtttgtcatgaaaatctagtgcgtcccattggctatgtcatttatgaagatgttgctcttctcttgcatcattattttccaaatggaacattggctcagcttcttcatgaatctaccaggaaacctgaataccagcctgactggccctctagattatccattgccattggtgtggccgaagggttggctttccttcatcatgtggcaatcatccatcttgatatctcttcaggcaatgttctcttggatgcaaattccaagccagtggttgcggagattgagatttcaaaacttctagatccaaccaaaggcactgcaagtattagtgcagttgctggttcttttggttacataccaccaggtatactactttctggcatgcaattcttccatctattgattctattcttcctattaacttttgtagtaaatattctttatactatcatctaaattacaaattgccatttatggttagttaattgattaacagtgaactttttttatactgaaaatacagagaaattaaactataacttttattgcgtttagcatgcttcatgttacatttcttctttaatgcagaatatgcatatactatgcaagtcactgcaccaggaaatgtttatagctatggtgttgttctgttggaaatccttacaactagactaccagttgatgaggactttggtgaaggtgtagatttggtgaaatgggttcacagtgctccggtaagaggggaaactccagagcagatattggatgctaagcttagcacagtttcctttggttggaggaaagaaatgcttgccgctttgaaggtcgcgttgctgtgcactgacaacacaccagccaaacgaccaaaaatgaagaatgtcgtggaaatgcttcgagagataaaagaaaattgagaacagcaagccactcaagtattctattctgtgctgtaatctacaccgttgaagatttgatgtatgcaaaactctcacggatacaacagagggactgatgagttacaacttacaacaactttaaagtagtagacttgtatgaggaattattccatgtggtgaagttggtgtgtcatagtaaattcaggcattgatagaaacttcacctttgtagtttgtccaaagggttagttgtgaaatggcagcttgtctatttgagttggacactatgttaggttaggggaggacaaatactagcagaaaccttgaaatgggacatatcagttcctgttgcatataagctagtccacagttttcatattgaatttactcatttgggagatgtatgcaccaatcaatcagtctgttcccattgaaactgaaagttcaaatttatttttgttgaaatagcagacagtatgtctgaattgtgcacatgc

SEQ ID NO: 6384 - protein, 225 aa, Glycine max
  misc_feature (1)..(225): Ceres Seq. ID no. 14314996
GTIFVDNLKQAVDLDVVVKATLKDSNKLSSGTFSTVYKAIMPSGVVLSVRRLKSVDKTIIHHQNKMIRELERLSKVCHENLVRPIGYVIYEDVALLLHHYFPNGTLAQLLHESTRKPEYQPDWPSRLSIAIGVAEGLAFLHHVAIIHLDISSGNVLLDANSKPVVAEIEISKLLDPTKGTASISAVAGSFGYIPPGILLSGMQFFHLLILFFLLTFVVNILYTII

SEQ ID NO: 6385 - protein, 185 aa, Glycine max
  misc_feature (1)..(185): Ceres Seq. ID no. 14314997
MPSGVVLSVRRLKSVDKTIIHHQNKMIRELERLSKVCHENLVRPIGYVIYEDVALLLHHYFPNGTLAQLLHESTRKPEYQPDWPSRLSIAIGVAEGLAFLHHVAIIHLDISSGNVLLDANSKPVVAEIEISKLLDPTKGTASISAVAGSFGYIPPGILLSGMQFFHLLILFFLLTFVVNILYTII

SEQ ID NO: 6386 - protein, 160 aa, Glycine max
  misc_feature (1)..(160): Ceres Seq. ID no. 14314998
MIRELERLSKVCHENLVRPIGYVIYEDVALLLHHYFPNGTLAQLLHESTRKPEYQPDWPSRLSIAIGVAEGLAFLHHVAIIHLDISSGNVLLDANSKPVVAEIEISKLLDPTKGTASISAVAGSFGYIPPGILLSGMQFFHLLILFFLLTFVVNILYTII

SEQ ID NO: 6387 - DNA, 1165 bp, Glycine max
  misc_feature (1)..(1165): Ceres Seq. ID no. 14314999
agtgtatatctttacaagatggtgaatacgtaaaggaaatgtacatcttgtatcacaaattcaaattacatcgcctttgtcttgttcttggaaatcaaacatattactctaaattgccatgtgaaataattttgctcttgtttggcatttgacttaccttgtttgcttctctataaataccatactatccatatatagcatctatttcttacatatcacaattaactatcaacatccaattagggatttcgtgataatatggcttctacacttcatcgtgcattgtctcatttactcactcttgtagcttcactttcaatactccttgtgctcccttcctcttgtttcaatcccagaaagattgtcaatgcttcatacaactcaaacggtttatattggtcaccagctgtggccacttggtatggacctccccatggggatggaagtgaaggtggtgcttgtggttttggcagtgttgttggggtacctccattctcatcaatgatatctgcgggaagccctcttttgtttgaatcaggcaaaggatgtggtttttgttatgaggtgaagtgcacagggaattctggatgttcaggcaaccctgtgagggtagtgatcactgatgagtgtgctggatgctcggatgctcaattccattttgatttgagtggcactgcttttggtgccatggcagtttctggccaagatgaaaagctacgcaacgctggcaaaattgccattcaatatagaagagttgaatgcaactatcccggtgtatacatagcttttcacgtggacttaggatccaaccccgaatattttgcagtttgtgctgaatacgaggatgggaatggtgatcttgacaaagttgaactcaaggaagcattttcagcctcatggtattccatgcagcgatcatggggtgcaatttggaaactcagcaaaggttcaccacttaaagcaccattctccatcaggctaacagactctggcaaatctgttgtggctaacaatgtgatcccttcgggctggaaacctggccagacttatagatcaattgtgaattttagaatctaagttgtccattggtttggatcatcagcttgtagctctctccaacttaatgtaatatataaataagaagataaccctaatcttaatttct

SEQ ID NO: 6388 - protein, 272 aa, Glycine max
  misc_feature (1)..(272): Ceres Seq. ID no. 14315000
MASTLHRALSHLLTLVASLSILLVLPSSCFNPRKIVNASYNSNGLYWSPAVATWYGPPHGDGSEGGACGFGSVVGVPPFSSMISAGSPLLFESGKGCGFCYEVKCTGNSGCSGNPVRVVITDECAGCSDAQFHFDLSGTAFGAMAVSGQDEKLRNAGKIAIQYRRVECNYPGVYIAFHVDLGSNPEYFAVCAEYEDGNGDLDKVELKEAFSASWYSMQRSWGAIWKLSKGSPLKAPFSIRLTDSGKSVVANNVIPSGWKPGQTYRSIVNFRI

SEQ ID NO: 6389 - protein, 191 aa, Glycine max
  misc_feature (1)..(191): Ceres Seq. ID no. 14315001
MISAGSPLLFESGKGCGFCYEVKCTGNSGCSGNPVRVVITDECAGCSDAQFHFDLSGTAFGAMAVSGQDEKLRNAGKIAIQYRRVECNYPGVYIAFHVDLGSNPEYFAVCAEYEDGNGDLDKVELKEAFSASWYSMQRSWGAIWKLSKGSPLKAPFSIRLTDSGKSVVANNVIPSGWKPGQTYRSIVNFRI

SEQ ID NO: 6390 - DNA, 1296 bp, Glycine max
  misc_feature (1)..(1296): Ceres Seq. ID no. 14315017
ttttctttacgggcatatgtttcgatgttgtaccttagaaaattttctaacttctctatcatactaagggggaaacttgtggatcaatttaacattgtggacgatttaatatattcaaaagtaattccatataagcctcagctagccatggcatcaaatgaggctatagtggagacaaagacaaccattggatttataaaggaggctgcagaaattaaggttactggatttaatgtgtaccacaaaaatcgcctaatcaagcccttttggaaagtagttgctgatggttcatcaaaagggcgttgtgttgttggggttcttgaagccaattttatagaaccagcgcatgacaagcaggattttgagagatcagtgctgttcattcggttggaaaacaaactgaaacaaatgacaatggattactggagagaacactgtcacttggttggatatcagccaccaaatttgaaatcacaaaaaaatgtggtaaaagaagcccacattcgaaaatcagctgaacattcaactaatccacagaatcagttgcttgctgatcaacaggatactagcttggtagctgagcatcaaagtggtctgagtcagtcagttgtgggtcttgcagtgactggcatgcaaggtttgcgtcatgagcaccttgtatgcaacaatttggggttcatgagcatgcattttttctcacagggtacaatagtagaaactccaggatctgtatctcctgatgaaatctgtgcagaaaacataaaacttttcgagaggtgtgaggagtacaggcaaaaagagactgaactgaaacagacggttgtggacttagaggacgaattgaaacaaatccagaagaaatgtactcttcttgtttcactcgtagagacaaagaggaaggcaaagagtgttaagggacaataattacgttatacaagcatcatatcattgagaggcaagttgattacctttcaagtaatttccgagtgtaaaagcacctgttttgtatatatgttcacccgtgttagaacaactctggctggttcggaagaaaaggcatactggactttgcacacatagtagaattgattcacgtaattagaggaaactctatcagtttaaggttgctattagctgattctgtgaaaacttttctctaatttgtaaagttctgtcttttcggttaaaaatttctgctattattgtcaaagaaatcagatcagataatattgttcttgaggaaaagaggtttcgaagagcaaagcctcattttattatcgaaatactgattgacac

SEQ ID NO: 6391 - protein, 307 aa, Glycine max
  misc_feature (1)..(307): Ceres Seq. ID no. 14315018
FSLRAYVSMLYLRKFSNFSIILRGKLVDQFNIVDDLIYSKVIPYKPQLAMASNEAIVETKTTIGFIKEAAEIKVTGFNVYHKNRLIKPFWKVVADGSSKGRCVVGVLEANFIEPAHDKQDFERSVLFIRLENKLKQMTMDYWREHCHLVGYQPPNLKSQKNVVKEAHIRKSAEHSTNPQNQLLADQQDTSLVAEHQSGLSQSVVGLAVTGMQGLRHEHLVCNNLGFMSMHFFSQGTIVETPGSVSPDEICAENIKLFERCEEYRQKETELKQTVVDLEDELKQIQKKCTLLVSLVETKRKAKSVKGQ

SEQ ID NO: 6392 - protein, 299 aa, Glycine max
  misc_feature (1)..(299): Ceres Seq. ID no. 14315019
MLYLRKFSNFSIILRGKLVDQFNIVDDLIYSKVIPYKPQLAMASNEAIVETKTTIGFIKEAAEIKVTGFNVYHKNRLIKPFWKVVADGSSKGRCVVGVLEANFIEPAHDKQDFERSVLFIRLENKLKQMTMDYWREHCHLVGYQPPNLKSQKNVVKEAHIRKSAEHSTNPQNQLLADQQDTSLVAEHQSGLSQSVVGLAVTGMQGLRHEHLVCNNLGFMSMHFFSQGTIVETPGSVSPDEICAENIKLFERCEEYRQKETELKQTVVDLEDELKQIQKKCTLLVSLVETKRKAKSVKGQ

SEQ ID NO: 6393 - protein, 258 aa, Glycine max
  misc_feature (1)..(258): Ceres Seq. ID no. 14315020
MASNEAIVETKTTIGFIKEAAEIKVTGFNVYHKNRLIKPFWKVVADGSSKGRCVVGVLEANFIEPAHDKQDFERSVLFIRLENKLKQMTMDYWREHCHLVGYQPPNLKSQKNVVKEAHIRKSAEHSTNPQNQLLADQQDTSLVAEHQSGLSQSVVGLAVTGMQGLRHEHLVCNNLGFMSMHFFSQGTIVETPGSVSPDEICAENIKLFERCEEYRQKETELKQTVVDLEDELKQIQKKCTLLVSLVETKRKAKSVKGQ

SEQ ID NO: 6394 - DNA, 1310 bp, Glycine max
  misc_feature (1)..(1310): Ceres Seq. ID no. 14315042
accacccccctcattgcagcagtttttgagtttccttacattcttaaagaaaccactcgttgttctttaggatatttctcttttcattttcctcttttcttcaaatcccaaaggatatttgtctctaatatccaaccttcaagatcatggatgttgcgcatttcattttcgggatatttgggaatgcttctggtttgttcctcttcttggccccaatagtgacattctggaggatcgtttcgaacaaatccacagagaagttctcgggggttccttaccctatgacacttctcaattgtctcctttctgcttggtatggtttgccatttgtgtccccaaacaacttacttgtgacaattatcaatggcacaggagcaggaattgaaatcatatacgtctttatattcatctacttcgcaccaaagaaagagaagaccaagattattggccttttctccttcgtggtggcagtgttctctgttgttgttctggtgtcactgtttgctctgcagggcaatgcccgaaagctcttctgtggcttcgctgctgccatattttccatcgtcatgtatggttcacccctctcaattatgaggctagtgataaaaaccaagagcgtggagttcatgcccttcttcctctcactctttgtgttcctctgtggcacatcttggttcatctacgggctactaggccgtgacccatttgtggctgtacctaatggcgttggttctgcgttggggacagcacaactaatattgtattttatctaccgtgacaacaaaagtgatccaaagaagattccaagaacagaagaagaagctatggaaatgggcaccgctaataaaaatcccatatccaactcgaatggaatacaagagggacgcgtctagggacgcgtctagggacgcgtgttagcattaaaaagaacaagccgttatctttgtctctgtctctttctaagcattaagagcacatctttaatttggactatgcttacatctttgttgttgttttttttttcttttttctttttaaaaaatctgttgttgttgctatcatctttgtgactctgtttcctccacgatttgtagtttttgttttttttttcttttagttatgatagttgtactataagtttagccatattgaaacgagtttgtgttgtgtgaattttcttttcttttcttccttttcagtccatttgtcgagacacatccgagcgatatcttgtgtctggataaaatttaaaagagtaatgaatatgtgaatctttctatctttaatttacaatattcatatttttggtt

SEQ ID NO: 6395 - protein, 248 aa, Glycine max
  misc_feature (1)..(248): Ceres Seq. ID no. 14315043
MDVAHFIFGIFGNASGLFLFLAPIVTFWRIVSNKSTEKFSGVPYPMTLLNCLLSAWYGLPFVSPNNLLVTIINGTGAGIEIIYVFIFIYFAPKKEKTKIIGLFSFVVAVFSVVVLVSLFALQGNARKLFCGFAAAIFSIVMYGSPLSIMRLVIKTKSVEFMPFFLSLFVFLCGTSWFIYGLLGRDPFVAVPNGVGSALGTAQLILYFIYRDNKSDPKKIPRTEEEAMEMGTANKNPISNSNGIQEGRV

SEQ ID NO: 6396 - protein, 203 aa, Glycine max
  misc_feature (1)..(203): Ceres Seq. ID no. 14315044
MTLLNCLLSAWYGLPFVSPNNLLVTIINGTGAGIEIIYVFIFIYFAPKKEKTKIIGLFSFVVAVFSVVVLVSLFALQGNARKLFCGFAAAIFSIVMYGSPLSIMRLVIKTKSVEFMPFFLSLFVFLCGTSWFIYGLLGRDPFVAVPNGVGSALGTAQLILYFIYRDNKSDPKKIPRTEEEAMEMGTANKNPISNSNGIQEGRV

SEQ ID NO: 6397 - DNA, 1232 bp, Glycine max
  misc_feature (1)..(1232): Ceres Seq. ID no. 14315045
tgcttgtaacagtattgttattactttgttgattgaaaaccattaaatataatgatttttacctaaactaattgtcatccatttaatataacacctttcaacaaggtatttttaggtgctggttttatttatttataatgattcgtccttctggactccctattctgcattttactactatcaaagatataaaattatttactcatcattttaaaaatggttgcttatcttgcgtgtttgcgtgctgtttactctgggtaagaattggtactgggaggcattttactgttcttctgcctaccattagtattataatagtttttaattaacaggaatctttgcttacttttttctttgacaggctgtgagagtagaacactgcgaacgagttcatgtaatcgtagcagcaaagcgtatttgtattgctaattgtcgtgaatgtgttttctttttgggagtgaaccagcaacctcttattcttggtgataatcataaactgcaggtggctccctataatacattttactcccaattggaaaagcatatgaatgaagttggaattgtgcccacagttaaccgatgggatgagcctctagcattgggcatggttgatccccatgattcattatctcatccagcaggtgtctctgatgttcaagctgagtctgctacacgggtggaccctgatcagttcactgattttgtgattccaaactggtttggaggagagtccactggggctacaaaaggcaacccattcacgttaccagatgcctatatggtatctcagcataaaaatcaaaaaaatttaggggagataaggcacctcttgcgagaagcacctttagaagatagtcgcaaacgagaattgtcatctgcacttcatgtctacttcaaggactggttatatgcttcaggaaacattcgtcagctttattgtttacaaggcgattgatctttgtcagacaatggaatggcacagttaatggtataggaacgaggtttctggtttcctttttgtacttcctcttcaattcctcttgccaattctattggcggcataggtagctgagatcaaatgaggtgaattagagtaaaacctatttatgccgtgacatcagcggtgcacagaatcaaatgaaaaatacagttgctaatctgattgtaatatttttttgtttgtgaaaataattactgtaatattttgttagcctaaattaatggcttttggg

SEQ ID NO: 6398 - protein, 136 aa, Glycine max
  misc_feature (1)..(136): Ceres Seq. ID no. 14315046
MNEVGIVPTVNRWDEPLALGMVDPHDSLSHPAGVSDVQAESATRVDPDQFTDFVIPNWFGGESTGATKGNPFTLPDAYMVSQHKNQKNLGEIRHLLREAPLEDSRKRELSSALHVYFKDWLYASGNIRQLYCLQGD

SEQ ID NO: 6399 - protein, 116 aa, Glycine max
  misc_feature (1)..(116): Ceres Seq. ID no. 14315047
MVDPHDSLSHPAGVSDVQAESATRVDPDQFTDFVIPNWFGGESTGATKGNPFTLPDAYMVSQHKNQKNLGEIRHLLREAPLEDSRKRELSSALHVYFKDWLYASGNIRQLYCLQGD

SEQ ID NO: 6400 - DNA, 1024 bp, Glycine max
  misc_feature (1)..(1024): Ceres Seq. ID no. 14315060
ttttctgccattcattataccaacgtataagcatctctctctctctctctgtgttgtgccttttcactactactttgttcggtagctacttcgcttctaccctccattccattctctggaacaatgtctgagaaaatcacagctgaaaaccttttaaacacccttgtggaaacacttactgagaagcaaaaatctggatcattttttgaagaagacaagtcaagctcagtgagctaccaattcaacagactgtttggacgccagaaacctgtgcaccatattttagggggtggaaaatctgctgatgtcttgttatggaggaacaagaagatctctgctagcgttttatcggcagcaacagctatatgggtgctttttgaatggcttaattataatttcataactattttattctttgttgtggctcttggtatgcttggacagtttctttggacaaatgtttctggcttgtttagcaggaagccatctaaagttccccgttttgtcctcccagatgatatcttcgtgaatattgcaactgtagttggtgctgaggttaaccgtggtttgaggtttctccaagatgtttcttgtggaggaagcctaaaacaatttcttattgttgtagtaagcttatgggctggtgctgtgattgggagctggtgcaattttttgactgtcatgtatattggttttgttgctgcacatacactcccagttctctatgaaaggtatgaggatcaagttgacaactttgtgtacaaggtctttgatcagatgcaaaatcactatcagaagctggatactggtttgctcagcaaaatccccaagggaaagctcaaaggaaagaagtatgaatagactcttccttttgtaaatggtttgattttcaatatctctttctctcacttgtgatggaattgggaaaggctgaaggatgtgatgtaactagggaacaaatctatgttggggtctttaaaatttgttgtatctcttctgtcaaaaaaaaaaaaagttttatcac

SEQ ID NO: 6401 - protein, 245 aa, Glycine max
  misc_feature (1)..(245): Ceres Seq. ID no. 14315061
MSEKITAENLLNTLVETLTEKQKSGSFFEEDKSSSVSYQFNRLFGRQKPVHHILGGGKSADVLLWRNKKISASVLSAATAIWVLFEWLNYNFITILFFVVALGMLGQFLWTNVSGLFSRKPSKVPRFVLPDDIFVNIATVVGAEVNRGLRFLQDVSCGGSLKQFLIVVVSLWAGAVIGSWCNFLTVMYIGFVAAHTLPVLYERYEDQVDNFVYKVFDQMQNHYQKLDTGLLSKIPKGKLKGKKYE

SEQ ID NO: 6402 - protein, 142 aa, Glycine max
  misc_feature (1)..(142): Ceres Seq. ID no. 14315062
MLGQFLWTNVSGLFSRKPSKVPRFVLPDDIFVNIATVVGAEVNRGLRFLQDVSCGGSLKQFLIVVVSLWAGAVIGSWCNFLTVMYIGFVAAHTLPVLYERYEDQVDNFVYKVFDQMQNHYQKLDTGLLSKIPKGKLKGKKYE

SEQ ID NO: 6403 - DNA, 1616 bp, Glycine max
  misc_feature (1)..(1616): Ceres Seq. ID no. 14315063
atgcatataaactacaaacattatttcatccaagccctcttgtctcaacaaattaataataattaatcacacccttcgatcttcgagtcatctaataataaatcttttgtttcccatcaacactagttcatgcaaattaatgggtatccctcactttctttgtataccatttccagttcaaggacatgtgaaccctcttatgcaattttctctgcttttggttaaacatggttgcaaggtcacttttgtacacactgagttcagcctcaaacgaacaaagacttctggtgctgacaacctcgagcattcacaagtaaagttggtgactcttcctgatggtttggaggctgaagatgacagaagtgatgtgacaaaacttcttttgtctatcaaaagcaacatgcctgctttgcttccaaagctcatagaagatatcaatgccttggatgctgacaataagatcacctgtattattgttacatttaatatgggttggcctttggaagttggccacaaactgggaatcaaaggagctcttctctgtccagcatctgcaacttccttggcttctgctgcttgcatcccaaagctgattcatgatggcattattgattctcaaggacttcccaccaaaacacaagaaattcaactctctccaaacatgcctctgatagacacagaaaactttccatggcgtggctttaataagatcttctttgaccatcttgtgcaagagatgaaaactttggagttaggagagtggtggctttgcaacactacttatgatcttgagcctggagcattttccgtatcaccaaagttcctacccattggcccattgatggaaagtgacaacagcaaaagtgcattttgggaagaagatacaacttgcttagagtggttagatcaacaaccacctcaatctgtcatatatgtttcctttggcagtttggcagtaatggatccaaaccaatttaaagaattagctcttgcacttgatctccttgacaagcctttcatttgggttgtacgtccatgtaatgacaacaaggaaaatgttaatgcatacgcacatgatttccatggaagcaaaggtaaaatagttggttgggcaccccagaagaagatattgaaccaccctgcattggctagcttcattagtcactgtggttggaattctaccctagaaggtatatgtgccggtgtacctttcttgtgttggccatgcgccactgatcaatatcttgacaagtcatatatatgtgatgtgtggaagattgggcttggactagacaaggatgaaaatggaataatttctagggaagagataaggaagaaggtggatcaactgcttgttgatgaagacatcaaagctaggtcattgaaattgaaagacatgaccataaataacatactagaaggtggtcagtcatcaaagaatctcaacttctttatggattgggcgaagtaattatgcttaatttggttctatattgaaaagtcatgtgtaatttctacatgtaagaatttaatttctatgtagatcttaatgtaatctatttaaaaattaataagctttattatatgcaatgatttttagttttatgaaattaatt

SEQ ID NO: 6404 - protein, 443 aa, Glycine max
  misc_feature (1)..(443): Ceres Seq. ID no. 14315064
MGIPHFLCIPFPVQGHVNPLMQFSLLLVKHGCKVTFVHTEFSLKRTKTSGADNLEHSQVKLVTLPDGLEAEDDRSDVTKLLLSIKSNMPALLPKLIEDINALDADNKITCIIVTFNMGWPLEVGHKLGIKGALLCPASATSLASAACIPKLIHDGIIDSQGLPTKTQEIQLSPNMPLIDTENFPWRGFNKIFFDHLVQEMKTLELGEWWLCNTTYDLEPGAFSVSPKFLPIGPLMESDNSKSAFWEEDTTCLEWLDQQPPQSVIYVSFGSLAVMDPNQFKELALALDLLDKPFIWVVRPCNDNKENVNAYAHDFHGSKGKIVGWAPQKKILNHPALASFISHCGWNSTLEGICAGVPFLCWPCATDQYLDKSYICDVWKIGLGLDKDENGIISREEIRKKVDQLLVDEDIKARSLKLKDMTINNILEGGQSSKNLNFFMDWAK

SEQ ID NO: 6405 - protein, 423 aa, Glycine max
  misc_feature (1)..(423): Ceres Seq. ID no. 14315065
MQFSLLLVKHGCKVTFVHTEFSLKRTKTSGADNLEHSQVKLVTLPDGLEAEDDRSDVTKLLLSIKSNMPALLPKLIEDINALDADNKITCIIVTFNMGWPLEVGHKLGIKGALLCPASATSLASAACIPKLIHDGIIDSQGLPTKTQEIQLSPNMPLIDTENFPWRGFNKIFFDHLVQEMKTLELGEWWLCNTTYDLEPGAFSVSPKFLPIGPLMESDNSKSAFWEEDTTCLEWLDQQPPQSVIYVSFGSLAVMDPNQFKELALALDLLDKPFIWVVRPCNDNKENVNAYAHDFHGSKGKIVGWAPQKKILNHPALASFISHCGWNSTLEGICAGVPFLCWPCATDQYLDKSYICDVWKIGLGLDKDENGIISREEIRKKVDQLLVDEDIKARSLKLKDMTINNILEGGQSSKNLNFFMDWAK

SEQ ID NO: 6406 - protein, 356 aa, Glycine max
  misc_feature (1)..(356): Ceres Seq. ID no. 14315066
MPALLPKLIEDINALDADNKITCIIVTFNMGWPLEVGHKLGIKGALLCPASATSLASAACIPKLIHDGIIDSQGLPTKTQEIQLSPNMPLIDTENFPWRGFNKIFFDHLVQEMKTLELGEWWLCNTTYDLEPGAFSVSPKFLPIGPLMESDNSKSAFWEEDTTCLEWLDQQPPQSVIYVSFGSLAVMDPNQFKELALALDLLDKPFIWVVRPCNDNKENVNAYAHDFHGSKGKIVGWAPQKKILNHPALASFISHCGWNSTLEGICAGVPFLCWPCATDQYLDKSYICDVWKIGLGLDKDENGIISREEIRKKVDQLLVDEDIKARSLKLKDMTINNILEGGQSSKNLNFFMDWAK

SEQ ID NO: 6407 - DNA, 728 bp, Glycine max
  misc_feature (1)..(728): Ceres Seq. ID no. 14315067
attcaaaccctagatcagttttaattagtttcctagttttattcatagtgtgcaagaatgggaaacagcttaaggtgttgtttggcttgtgttcttccatgtggagctctagacttgattcgaatagtccatttgaatggctatgtggaagagattacacgtccaatcacagcaggagaggttctcaaagcaaaccctaaccatgttctaagcaaacctagctctcaaggcgtcgttcgccggattttgatcctttcaccggagaccgagctcaagaggggcagcatctacttcttgatcccggaatcttcgctgccggagaagaaacggctagccggaaagggaagaaatgttggtggtgataatgatataaaaaagaaaccatcaacattgaaagggaacaagggtagtagtgatgatgattattcttcactatcacaagggtgcctcaataaagccactcacaaaggttctaaagagaagaaatcgtcgtgccgggatcgccggaaaggccgcatcggaatatggaggcctcatttggagagtatattggaagattagtcggttttttgtgtcgctggccggtggccggaatccaacatggctggaaaaaagaagaggagaaaaagaagaagaaatatgttaaattattgaaatatagcaacaggactttttttttttttttgttcccttttgttttataaatgtatgtgggaatttgatgggag

SEQ ID NO: 6408 - protein, 167 aa, Glycine max
  misc_feature (1)..(167): Ceres Seq. ID no. 14315068
MGNSLRCCLACVLPCGALDLIRIVHLNGYVEEITRPITAGEVLKANPNHVLSKPSSQGVVRRILILSPETELKRGSIYFLIPESSLPEKKRLAGKGRNVGGDNDIKKKPSTLKGNKGSSDDDYSSLSQGCLNKATHKGSKEKKSSCRDRRKGRIGIWRPHLESILED

SEQ ID NO: 6409 - DNA, 1249 bp, Glycine max
  misc_feature (1)..(1249): Ceres Seq. ID no. 14315083
aaagattaccgttctcacttaaaccaataaacaaacccacccaatcactaaagcaaccttcttgattatcctaaagccgcagcgcaagcaatcactctttttctttctcataataatgcaaattcttccccactctgcagcaacaaattctcatttgcaaaccccataaaggcatatcatctttatactttaccgggatctgtgtctccttttatttttccccaagacaaagtagacattgtcttccactcacttcaaaaaagagagtgagagagagaaactttgtggtctgtgttctgtgaaactgaagtgttcttcctcaatcattgtcttttacagtcaaattcagcgtctaagatctcatttcaaaaaaatttccgcttgttaaagttggtttctcactcacaagtcacaagtcacaccctttatttacttcagcatccaacaaagtgttccttacttgttctgttcaatgactcagatcttcaaatgtgagtgttgtagcatcattgcatgagtcacccatcaaacattgttcaagtaactgtttttagtttattttgtaaatgagggtgtggagggttcacccacaagagcaaaagctttgtccaaatggtgttttgaggtgggttttggtttggatgagtgtttgttttcttgtgttcacggttggtccaccgtctcgctcgagggtgaggaagagtgtatcttctcaactttcttgtcctccatgtgattgtttctgctcttcagctgaatatctcctcgatcctctaggactggtcaacagctcaatttccaattgtggtaaacatgatccgattttgaatgaggaaatgaacaagggtctactgacaatgctatctgaggagctaaatttgcagaaaattgtggccaacgagaccatggaacacaccaaacagttaataatggatgccaggaaaaccttttcacattaccagaaggaagcagaaaagtgcaacattggggtggaaacttgtgaagaagcaagggagagggcagaggcagagctcattgaagaacacaagctgacaacattatgggaaaatcgtgcaagtgaatatgggtgggtggaatgactgaagaacacactgaaggagtttagttaaccattgctacattatgttatgttaccccttaattgtatcatagcttttatagccaatacacagatctcttgtgatgatttcaaccaggttaacaattctattgaaacaagttttgtgcc

SEQ ID NO: 6410 - protein, 177 aa, Glycine max
  misc_feature (1)..(177): Ceres Seq. ID no. 14315084
MRVWRVHPQEQKLCPNGVLRWVLVWMSVCFLVFTVGPPSRSRVRKSVSSQLSCPPCDCFCSSAEYLLDPLGLVNSSISNCGKHDPILNEEMNKGLLTMLSEELNLQKIVANETMEHTKQLIMDARKTFSHYQKEAEKCNIGVETCEEARERAEAELIEEHKLTTLWENRASEYGWVE

SEQ ID NO: 6411 - protein, 152 aa, Glycine max
  misc_feature (1)..(152): Ceres Seq. ID no. 14315085
MSVCFLVFTVGPPSRSRVRKSVSSQLSCPPCDCFCSSAEYLLDPLGLVNSSISNCGKHDPILNEEMNKGLLTMLSEELNLQKIVANETMEHTKQLIMDARKTFSHYQKEAEKCNIGVETCEEARERAEAELIEEHKLTTLWENRASEYGWVE

SEQ ID NO: 6412 - DNA, 942 bp, Glycine max
  misc_feature (1)..(942): Ceres Seq. ID no. 14315090
attcaccccactttcttttttcgttcacagcttggcttccctttaggcaaagcttgatccttcaagccttttaaggtacacaggtactcattgtgctcttttcttcttaattagaaatttttatgggcatcatttatctaacagcttgagtcaaaataggtagcatcctttggccaaaattggaagaaacatgagcgataaaaaaggaagcacttcaaaccatggcttgaatttgaacatacccccaccaagggttgccaatcagatacctgattcaccaactcgattaccaatagcgccaccaacatcaccaacaagctcatgtgtgtccagcgaactaagccaagatgacaacagcagcagcagcagcagaaaaaacaacaaccgcggctgcactcggagccctgaagacatttccatggtgctagtagggtgttctcgctgccttatgtatatgatggtcaatgagggtgaacccaagtgccccaaatgcaaaagcaccactttgattcattttcttaattacaacaacatcccataaggaggggacacaatgctatgctaccttgctgtgatttctgtattttgtgccgcaagtaggataagttagcttaaaaaaaaaaaggaatctcctttttaggacatttcttttatcttatgttttctatctttttcctaaacctttctttatgagttgtgctgcttgcgctccactttttccctttatctcctattcttaggaaggaaatcacaaaagagtttaagtgtaagtagcactacatgtcagggaggttacttttaataaatggttgtctcaccaagtttaccatcttaaatataaggttaggaaatttcctccatcagtatggctaattaacatatcatgtaaacctgattacataaaataagagaatgaatcgcaaggtatttcaattatctacc

SEQ ID NO: 6413 - protein, 116 aa, Glycine max
  misc_feature (1)..(116): Ceres Seq. ID no. 14315091
MSDKKGSTSNHGLNLNIPPPRVANQIPDSPTRLPIAPPTSPTSSCVSSELSQDDNSSSSSRKNNNRGCTRSPEDISMVLVGCSRCLMYMMVNEGEPKCPKCKSTTLIHFLNYNNIP

SEQ ID NO: 6414 - DNA, 1379 bp, Glycine max
  misc_feature (1)..(1379): Ceres Seq. ID no. 14315098
taatcgaaaaacaatcagagatcattttcatcaaattgttcaaaactcaaagcatcgatttgatgccatttgcgctcctgcttgtcgtagacattccccaatcgatcaccgtcctcccgatccaccagtctgaatggaagaaggtaagaggaagttggcgatgaagagaaagagagagagcacaggtggtggaaaagacagactgagtgagttgcctgactctgtattggtccacataatggaattgatggagacaagaaatgcagttcagacttgtgtactctctcagcgttggaagaacctttggagacgtatgactcgtctctctttcaaccaccctagaacattttccagatatcacaattttgtgtctcatgttctttctggacgagaccattctgtttccctaattgatcttctttttgtggtccttcattcaacttcggccacactcttgcatgacgtcatcagttatgctgtgtcgcacaatgtgcagcagttgacaatctatatagatacattagattgcattaacggtgccacaccctcctttcagctttccaaaactccttttgtccctctcctttttccctctccatctttgacttctcttaagctttccagtgtgttcattggatattctttggaacttccaaaatctctactactaccatctttgaaaaccttgcatctcacaaatgttcactttactgctagtgaccacaacaacaactttgttgagcccttttctacttgtcacatgttgaatactttggtcattcaatattgctttatgcacacttctgcacaagtcctctccatatccaattctaacctttcttctttgacccttgacacctttcaagaacacattgtgctttctactccgaatctcacttctcttacaatcagggatggtttccattttactcttctccaactctcctccacttgtgatctttcacttcttaaagaggcggatattgagacccgtgttgatatacattattcagtcatcattacctggctgcgacttatgactaatgttaagatgctcacaatctcttctgctacccttaaggcaatactaaatgacctatcagatcctgctgcagcgactgttcaacctccatgctttggtagattggagtcattgaaagtgaaaatgcatccacatgtaaacatatctaaggaagaagtaagtaggacattggagcacttacttgtgaactctcctccaccgaccagagtttatctcataaatgtatccctatcccatcaagaactagttaggtatgcttgaaggaaatgaaacattggggaagatgaagagaaagatggaagagttacagaggacaaggacaggatcaatgataagt

SEQ ID NO: 6415 - protein, 389 aa, Glycine max
  misc_feature (1)..(389): Ceres Seq. ID no. 14315099
MEEGKRKLAMKRKRESTGGGKDRLSELPDSVLVHIMELMETRNAVQTCVLSQRWKNLWRRMTRLSFNHPRTFSRYHNFVSHVLSGRDHSVSLIDLLFVVLHSTSATLLHDVISYAVSHNVQQLTIYIDTLDCINGATPSFQLSKTPFVPLLFPSPSLTSLKLSSVFIGYSLELPKSLLLPSLKTLHLTNVHFTASDHNNNFVEPFSTCHMLNTLVIQYCFMHTSAQVLSISNSNLSSLTLDTFQEHIVLSTPNLTSLTIRDGFHFTLLQLSSTCDLSLLKEADIETRVDIHYSVIITWLRLMTNVKMLTISSATLKAILNDLSDPAAATVQPPCFGRLESLKVKMHPHVNISKEEVSRTLEHLLVNSPPPTRVYLINVSLSHQELVRYA

SEQ ID NO: 6416 - protein, 380 aa, Glycine max
  misc_feature (1)..(380): Ceres Seq. ID no. 14315100
MKRKRESTGGGKDRLSELPDSVLVHIMELMETRNAVQTCVLSQRWKNLWRRMTRLSFNHPRTFSRYHNFVSHVLSGRDHSVSLIDLLFVVLHSTSATLLHDVISYAVSHNVQQLTIYIDTLDCINGATPSFQLSKTPFVPLLFPSPSLTSLKLSSVFIGYSLELPKSLLLPSLKTLHLTNVHFTASDHNNNFVEPFSTCHMLNTLVIQYCFMHTSAQVLSISNSNLSSLTLDTFQEHIVLSTPNLTSLTIRDGFHFTLLQLSSTCDLSLLKEADIETRVDIHYSVIITWLRLMTNVKMLTISSATLKAILNDLSDPAAATVQPPCFGRLESLKVKMHPHVNISKEEVSRTLEHLLVNSPPPTRVYLINVSLSHQELVRYA

SEQ ID NO: 6417 - protein, 354 aa, Glycine max
  misc_feature (1)..(354): Ceres Seq. ID no. 14315101
MELMETRNAVQTCVLSQRWKNLWRRMTRLSFNHPRTFSRYHNFVSHVLSGRDHSVSLIDLLFVVLHSTSATLLHDVISYAVSHNVQQLTIYIDTLDCINGATPSFQLSKTPFVPLLFPSPSLTSLKLSSVFIGYSLELPKSLLLPSLKTLHLTNVHFTASDHNNNFVEPFSTCHMLNTLVIQYCFMHTSAQVLSISNSNLSSLTLDTFQEHIVLSTPNLTSLTIRDGFHFTLLQLSSTCDLSLLKEADIETRVDIHYSVIITWLRLMTNVKMLTISSATLKAILNDLSDPAAATVQPPCFGRLESLKVKMHPHVNISKEEVSRTLEHLLVNSPPPTRVYLINVSLSHQELVRYA

SEQ ID NO: 6418 - DNA, 1538 bp, Glycine max
  misc_feature (1)..(1538): Ceres Seq. ID no. 14315106
acaactttcaacagaagaaactaacaccttccgttactggctttttctgtgtccttggcaaccctttttgctgattttcactgccacaatcacaatcaattgaagaaggaagaaataagaagtttctgggtaatggttcgcggttatatagcctgagctgtgccccattccatacgcaacttttcctccatcattctccttttttttctcaccttaataagtgatggacatcgaagaaatttcagagtcgaatttgggtggttcttcttcttctcacgaggctttggaatcagaagagaagaacatgggtacccagagaatcttggtttcagatcacataaacgcatatcagtattcggctgaggaagctgatagctttgtgattgatatggattccttctcttccggcatcaacaaagatagcaataatgctaattccagaattacattgcagcggagcctttccaggaaaggatctcagcgtgggggcgacaggaaggtgaatggcaatgtcacacttcatgatagggatactgccccaactacatgctcaccaaaagctgctctagcagggtcctgcacggctgaaaagtcagcggtggtggcagtagggtccacacatcattccacaaacacacaagttcatcatcagattactattactgccagtaacatgtgcaccaccaccacccccaccaccgaaagcaaatgtataactcgaagaaatagttttaaacgatcttcttcatggctccttgatcctaaaagagtccttcttttctttgccaccttgtcaagcatgggaacaatgttgctgatatacttcactcttactctcagcaagcaaaatgcagatgaatatgggggtgactggcagcagtgactgatgccactgatttatattggacaaatgagataatgggtcgtgtaaattataaatcctaggattggagcaaaactcaggaacaagaagttgaggacaaatttgcagaactacctgtcagactcaattacctatttgggagctacaaaaggcaaatacaatgacacaatgcactatgatagagaggaaggaatatatttcttttatctgaatggaagccagcaagttagcaacagataaaaaagatcacatgtaagagagtgctctgtagtttattgggagtgtcatttaagggcataacggagttggaggatcagaaagtcactgtttcgctctttctactcagatcttatttttatcccccgtatcttttgttttgctcttgcatgtaatggcaagtgaacctttttctaatgtgtgtaactttagttttaacagtggaaaaaggggaggggaaagtaaaaccaaaaccatgagagctacctacctctacaagctacaaaagtaggcacaaacggcatgcgtgctgaaatacatttttccttacggaagaaactgaaatccacgagtgctttttctagggacaaagaatgtttatatatggggaaacctttcgaaataaactatgtgtataaaagattaagattagtttggt

SEQ ID NO: 6419 - protein, 219 aa, Glycine max
  misc_feature (1)..(219): Ceres Seq. ID no. 14315107
MDIEEISESNLGGSSSSHEALESEEKNMGTQRILVSDHINAYQYSAEEADSFVIDMDSFSSGINKDSNNANSRITLQRSLSRKGSQRGGDRKVNGNVTLHDRDTAPTTCSPKAALAGSCTAEKSAVVAVGSTHHSTNTQVHHQITITASNMCTTTTPTTESKCITRRNSFKRSSSWLLDPKRVLLFFATLSSMGTMLLIYFTLTLSKQNADEYGGDWQQ

SEQ ID NO: 6420 - protein, 192 aa, Glycine max
  misc_feature (1)..(192): Ceres Seq. ID no. 14315108
MGTQRILVSDHINAYQYSAEEADSFVIDMDSFSSGINKDSNNANSRITLQRSLSRKGSQRGGDRKVNGNVTLHDRDTAPTTCSPKAALAGSCTAEKSAVVAVGSTHHSTNTQVHHQITITASNMCTTTTPTTESKCITRRNSFKRSSSWLLDPKRVLLFFATLSSMGTMLLIYFTLTLSKQNADEYGGDWQQ

SEQ ID NO: 6421 - protein, 164 aa, Glycine max
  misc_feature (1)..(164): Ceres Seq. ID no. 14315109
MDSFSSGINKDSNNANSRITLQRSLSRKGSQRGGDRKVNGNVTLHDRDTAPTTCSPKAALAGSCTAEKSAVVAVGSTHHSTNTQVHHQITITASNMCTTTTPTTESKCITRRNSFKRSSSWLLDPKRVLLFFATLSSMGTMLLIYFTLTLSKQNADEYGGDWQQ

SEQ ID NO: 6422 - DNA, 1550 bp, Glycine max
  misc_feature (1)..(1550): Ceres Seq. ID no. 14315134
agacaggcacagacacagagggccaatatgaagactcgtacctctaagaagatctctgcaaaatgggttccaattttctctgtatcttccttccttattggaatgctcataacaaccaggatgtgggaaccaccagaatctaacggggtgttactgtcaaatcaccgacatgagcaagaactacaagtggtgtcaggggattgtgctactaaaaagcctgtgcaggatgaggatgtaatgagtaaagtgtacaaaacccatgaagccattcaatctctagacaagcaagtttccatgcttcagatggagctggcagcagcaaggagtacacgagaacccgagatctcggatggttcgaataacaccttggcctcgggggtaaccactgaaggcccaccaaggaagaaggtgtttgtagtgattggcataaacactgccttcagtagcaggaagcggcgtgattcggttagagagacttggatgcctcaaggtgaacagcttcttcaattggaacgcgagaagggaattgtcatcagattcatgattggtcacagtgcaacttctaacagcattctagatcgagctattgattcagaagaagcccagcacaaagacttccttcgcctggaacacgctgaagggtatcatgaattgtctgcaaagacaaaaacattcttttctacagcagttgcaaaatgggatgctgagttctatgtcaaagtggatgatgatgtccatgttaatttaggtgtacttgcaacaacccttgctcgtcatcgttccaaaccaagggtctatgttggatgtatgaaatctggacctgttctttctcgaaaggatgttaaatatcatgaacctgagttttggaagtttggagaagaggggaacaaatatttccgacatgcaactgggcagatatatgcaatctctaaggatctagccacctacatttccattaaccagccaattttgcacaaatatgccaatgaagatgtgtcacttggtgcatggttcataggtctggaagttgaacatatagatgaccgcagtatgtgctgtgggactcctccagattgtgagtggaaggcacaagcaggtaacatatgtgttgcatcctttgactggagctgtagtggaatctgcaagtcggtagagaagatcaaatatgtgcactcaaagtgtggtgaaggggatggagctgtttggagtgccttagtttaggtttgatgggttcaacagaaagccaactaactaattcacgtgttggtatgcatacctcccagctttttgtttttgggtgtgggaggatatgatgatatatttttggttcaactatagtctatacttggtattatgtgacatagacctctcttgttacatgtatctctttatatttttgttcctttgacccacccttttgcacaatgcctttggaggtagttgtgcggggtcaattttcagtgtagcttactaaagagcaatgaagtgatagtgttgttgattcgttcagtgataatatgaattatgaaatcactttatttttttcgatg

SEQ ID NO: 6423 - protein, 406 aa, Glycine max
  misc_feature (1)..(406): Ceres Seq. ID no. 14315135
RQAQTQRANMKTRTSKKISAKWVPIFSVSSFLIGMLITTRMWEPPESNGVLLSNHRHEQELQVVSGDCATKKPVQDEDVMSKVYKTHEAIQSLDKQVSMLQMELAAARSTREPEISDGSNNTLASGVTTEGPPRKKVFVVIGINTAFSSRKRRDSVRETWMPQGEQLLQLEREKGIVIRFMIGHSATSNSILDRAIDSEEAQHKDFLRLEHAEGYHELSAKTKTFFSTAVAKWDAEFYVKVDDDVHVNLGVLATTLARHRSKPRVYVGCMKSGPVLSRKDVKYHEPEFWKFGEEGNKYFRHATGQIYAISKDLATYISINQPILHKYANEDVSLGAWFIGLEVEHIDDRSMCCGTPPDCEWKAQAGNICVASFDWSCSGICKSVEKIKYVHSKCGEGDGAVWSALV

SEQ ID NO: 6424 - protein, 397 aa, Glycine max
  misc_feature (1)..(397): Ceres Seq. ID no. 14315136
MKTRTSKKISAKWVPIFSVSSFLIGMLITTRMWEPPESNGVLLSNHRHEQELQVVSGDCATKKPVQDEDVMSKVYKTHEAIQSLDKQVSMLQMELAAARSTREPEISDGSNNTLASGVTTEGPPRKKVFVVIGINTAFSSRKRRDSVRETWMPQGEQLLQLEREKGIVIRFMIGHSATSNSILDRAIDSEEAQHKDFLRLEHAEGYHELSAKTKTFFSTAVAKWDAEFYVKVDDDVHVNLGVLATTLARHRSKPRVYVGCMKSGPVLSRKDVKYHEPEFWKFGEEGNKYFRHATGQIYAISKDLATYISINQPILHKYANEDVSLGAWFIGLEVEHIDDRSMCCGTPPDCEWKAQAGNICVASFDWSCSGICKSVEKIKYVHSKCGEGDGAVWSALV

SEQ ID NO: 6425 - protein, 372 aa, Glycine max
  misc_feature (1)..(372): Ceres Seq. ID no. 14315137
MLITTRMWEPPESNGVLLSNHRHEQELQVVSGDCATKKPVQDEDVMSKVYKTHEAIQSLDKQVSMLQMELAAARSTREPEISDGSNNTLASGVTTEGPPRKKVFVVIGINTAFSSRKRRDSVRETWMPQGEQLLQLEREKGIVIRFMIGHSATSNSILDRAIDSEEAQHKDFLRLEHAEGYHELSAKTKTFFSTAVAKWDAEFYVKVDDDVHVNLGVLATTLARHRSKPRVYVGCMKSGPVLSRKDVKYHEPEFWKFGEEGNKYFRHATGQIYAISKDLATYISINQPILHKYANEDVSLGAWFIGLEVEHIDDRSMCCGTPPDCEWKAQAGNICVASFDWSCSGICKSVEKIKYVHSKCGEGDGAVWSALV

SEQ ID NO: 6426 - DNA, 1866 bp, Glycine max
  misc_feature (1)..(1866): Ceres Seq. ID no. 14315146
ggtgatcggtgatcggtgatcagtggtttggtgttgttgatagaaaaatgcattccagccctttgcttcttgaggaacccattaggatggcatccattcttgagccatccaagcctactttctttccagctatgacaaaaattgttggcacacttggtctaaagtcacgatcagttgatacaatttcccgttgccttgatgcaggaatgtctgtggcaaggtttgacttctcatggggtgatccagaataccatcaagagacattggaaaatttgagagttgctatcaaaagtaccaagaaactctgtgcggttatgctagatactgtgggtcctgaattacagattgagaataagacagatcacccaatcacccttgaagcagacacattagttgtcttaactccagatcaaaccaaagaagctggttcaaatctcttaccagtaaattttaacggactatcaaaggctgtgaagaagggtgatactatttttatcggaaaatacctgtttactggaagtgaaacagcttccttatggctggaggtcagtgaggtgaaaggtgaggatgtcacctgtctggtaaaaaacactgctacactgtctggatcattgtttactgcacatgtctctcagatccacatcgatcttcctactcttgctgataaagataaggaggtaataagcacatggggtgttcgaaacaatattgacttcctttcattatatacccggcacgttgaagatattcgtcatgcgcgtgaatttctttctaaattgggtgaccttaagcagacacatatttatgcaaagattgaaaatatagagggactgaagcattttgatgaaatattgagagaagcagatggcatcatcctcgctcgtggaaatttagggatagaactcccacctgagaaggttttcttattccaaaaggctgctatttacaagtgcaacatggttggaaagccagttgttgttacacgtgttgtagactctatgactgataatctaagacctactcgtgctgaagcaacagatgttgccaatgcagtgctggatggaagtgatgcaattctccttggagcagagaccctgcggggacaataccctgtagagaccatttctatagttggaaaaatatgtgctgaggcagagaaagttcataatcaagatttgtattttaagaaggctgtcaaatatgtgggagagccaatgagccatttggaatcaattgcttcctctgcggttcgagcagctatcaaggttaaagcctctgttattatttgcttcacttcatctggaagagctgcaagattgattgctaagtacagaccaattatgcctgtcatatccgttgtcattcctcaactgaagacaaatcaactccgatggacattcaccggtgcttttgaggctaggcaatctcttattgtgaggggtctttttcctatgctggcagatccacgacacccggctgagtctaaaagtggaacaaatgaatcaattttgaaggttgctttagatcatggcaaggcttttggcatcataaagccacatgaccgagttgttgtctgccagaaagtagctgactcgtcagttgtgaagattcttgagctcgaagattgattggttcaatacaacttatgtgtcatttgatgcatcataataaaacttcttctcaaccttttcattctagcgtttgtgtttcattgaagtacaataacaaacacataacattgagatacatattgtagagtgggaaagagacttttttgtttgattgtttttttaataggcaatcacagttttgagctataaataatggtattggtatggaaataaaaaaaaatgatgttatatcagc

SEQ ID NO: 6427 - protein, 526 aa, Glycine max
  misc_feature (1)..(526): Ceres Seq. ID no. 14315147
MHSSPLLLEEPIRMASILEPSKPTFFPAMTKIVGTLGLKSRSVDTISRCLDAGMSVARFDFSWGDPEYHQETLENLRVAIKSTKKLCAVMLDTVGPELQIENKTDHPITLEADTLVVLTPDQTKEAGSNLLPVNFNGLSKAVKKGDTIFIGKYLFTGSETASLWLEVSEVKGEDVTCLVKNTATLSGSLFTAHVSQIHIDLPTLADKDKEVISTWGVRNNIDFLSLYTRHVEDIRHAREFLSKLGDLKQTHIYAKIENIEGLKHFDEILREADGIILARGNLGIELPPEKVFLFQKAAIYKCNMVGKPVVVTRVVDSMTDNLRPTRAEATDVANAVLDGSDAILLGAETLRGQYPVETISIVGKICAEAEKVHNQDLYFKKAVKYVGEPMSHLESIASSAVRAAIKVKASVIICFTSSGRAARLIAKYRPIMPVISVVIPQLKTNQLRWTFTGAFEARQSLIVRGLFPMLADPRHPAESKSGTNESILKVALDHGKAFGIIKPHDRVVVCQKVADSSVVKILELED

SEQ ID NO: 6428 - protein, 513 aa, Glycine max
  misc_feature (1)..(513): Ceres Seq. ID no. 14315148
MASILEPSKPTFFPAMTKIVGTLGLKSRSVDTISRCLDAGMSVARFDFSWGDPEYHQETLENLRVAIKSTKKLCAVMLDTVGPELQIENKTDHPITLEADTLVVLTPDQTKEAGSNLLPVNFNGLSKAVKKGDTIFIGKYLFTGSETASLWLEVSEVKGEDVTCLVKNTATLSGSLFTAHVSQIHIDLPTLADKDKEVISTWGVRNNIDFLSLYTRHVEDIRHAREFLSKLGDLKQTHIYAKIENIEGLKHFDEILREADGIILARGNLGIELPPEKVFLFQKAAIYKCNMVGKPVVVTRVVDSMTDNLRPTRAEATDVANAVLDGSDAILLGAETLRGQYPVETISIVGKICAEAEKVHNQDLYFKKAVKYVGEPMSHLESIASSAVRAAIKVKASVIICFTSSGRAARLIAKYRPIMPVISVVIPQLKTNQLRWTFTGAFEARQSLIVRGLFPMLADPRHPAESKSGTNESILKVALDHGKAFGIIKPHDRVVVCQKVADSSVVKILELED

SEQ ID NO: 6429 - protein, 498 aa, Glycine max
  misc_feature (1)..(498): Ceres Seq. ID no. 14315149
MTKIVGTLGLKSRSVDTISRCLDAGMSVARFDFSWGDPEYHQETLENLRVAIKSTKKLCAVMLDTVGPELQIENKTDHPITLEADTLVVLTPDQTKEAGSNLLPVNFNGLSKAVKKGDTIFIGKYLFTGSETASLWLEVSEVKGEDVTCLVKNTATLSGSLFTAHVSQIHIDLPTLADKDKEVISTWGVRNNIDFLSLYTRHVEDIRHAREFLSKLGDLKQTHIYAKIENIEGLKHFDEILREADGIILARGNLGIELPPEKVFLFQKAAIYKCNMVGKPVVVTRVVDSMTDNLRPTRAEATDVANAVLDGSDAILLGAETLRGQYPVETISIVGKICAEAEKVHNQDLYFKKAVKYVGEPMSHLESIASSAVRAAIKVKASVIICFTSSGRAARLIAKYRPIMPVISVVIPQLKTNQLRWTFTGAFEARQSLIVRGLFPMLADPRHPAESKSGTNESILKVALDHGKAFGIIKPHDRVVVCQKVADSSVVKILELED

SEQ ID NO: 6430 - DNA, 1341 bp, Glycine max
  misc_feature (1)..(1341): Ceres Seq. ID no. 14315170
agatttaattcctttcaaccaaacacaccaaaataagccgggcgccaaaacaaataagccggaatcaaagagtaccctttccagccttccgtaccaaacaaaattgaatctctcttccgcacaaacaacctctcacgccccaaagccacacacaaaacatttaccttttccaacccttcaattccctaaacatttttcttttccttcgaactccaattccctcaccagaacacggtcaccattgttttccctttcaacaacattcgccatcctttcgcgacgaagagaaaaaaaaaaggggtgttagggtttcgattctctgcgacgctctccgcattgcgctaccctgcaccttcctcaccatatcgcgcgcctctctcactcccctactgtttttccgctccccaccccctctctctgtgttgcgaaaattagggttcataggtttggggctaattcttcttccgatttcgaaccgagcgcaatcgtaaagagagaaaatgtacgctgatcgcgtggagggtggagcaaggaggccagtgaaggaacgccttaatgatgtgaatggtgtcagtggctctactcgcccgcagcagcagcgtcaaatcactggcaagaggtcaaggcaagatgacaagtgggaacatgatctctttgacaatgacgaaccccggatcactaatcgcaaagttagtgctcaagatcttcgcctcaagcttcaaaggaagggtcttcaacctgcatctcagagtggaaagagttctgccccaaacgtgctggatctccgtgaaaggctatcagggacaatggcaccacaacctacaaattatgatctgcctaagacaaaagttattaaaccaagcagtaaaagtgttggtgttgaggctcctgcagtgcagatcaaaaggccagctgacccagctcctaaaaagtcatggaaggctggtccttcagttgatgaatttttgcggtccttgggtctcgaaaagtatctcataacttttcaggctgaagaagttgatatgacagctctcaatcatatgactgatgaagatctcaaggctatgggcataccaatgggaccaagaaagaagatacttttagcactggagtcgaaagtctaacatttagttatggaattgattttctaagctggatggtggtgggaggagatcaggatctaaaaaccaagtgtaatagcatagttctttgattattttcgtttttaatattttcccttactttttagacattaatcaagttaattttggtgtttattttgctaaaccccgtcaatctcctgaaactctcttataatgcaattaatggatttgagagttt

SEQ ID NO: 6431 - protein, 207 aa, Glycine max
  misc_feature (1)..(207): Ceres Seq. ID no. 14315171
MYADRVEGGARRPVKERLNDVNGVSGSTRPQQQRQITGKRSRQDDKWEHDLFDNDEPRITNRKVSAQDLRLKLQRKGLQPASQSGKSSAPNVLDLRERLSGTMAPQPTNYDLPKTKVIKPSSKSVGVEAPAVQIKRPADPAPKKSWKAGPSVDEFLRSLGLEKYLITFQAEEVDMTALNHMTDEDLKAMGIPMGPRKKILLALESKV

SEQ ID NO: 6432 - protein, 144 aa, Glycine max
  misc_feature (1)..(144): Ceres Seq. ID no. 14315172
MVSVALLARSSSVKSLARGQGKMTSGNMISLTMTNPGSLIAKLVLKIFASSFKGRVFNLHLRVERVLPQTCWISVKGYQGQWHHNLQIMICLRQKLLNQAVKVLVLRLLQCRSKGQLTQLLKSHGRLVLQLMNFCGPWVSKSIS

SEQ ID NO: 6433 - protein, 122 aa, Glycine max
  misc_feature (1)..(122): Ceres Seq. ID no. 14315173
MTSGNMISLTMTNPGSLIAKLVLKIFASSFKGRVFNLHLRVERVLPQTCWISVKGYQGQWHHNLQIMICLRQKLLNQAVKVLVLRLLQCRSKGQLTQLLKSHGRLVLQLMNFCGPWVSKSIS

SEQ ID NO: 6434 - DNA, 1129 bp, Glycine max
  misc_feature (1)..(1129): Ceres Seq. ID no. 14315189
atcaaatcctcaatacttgtttatcactatcacttccccttcctatctctgaagccattctcgttcattttgtttttttatcttctctttatctccctcaacaagattcctataaagttcgtagcggctttcacacaactttaagaaaatctcgtgaatccgtgatcgcaaacaaaacaatgtctcccccttctatgttaggcaaccgcaaagacggttctgaaatggactctttgaggggctaaaagcacatagaactgaagatgggcatgtacttttatttcgaccagatgagaatgctcaacgcatgaaacgaggtgcagatagattgtgtatgccatccccatctcctggccaatttgttaatgctgtaaagcagatagttattgccaacaaacgttgggtgcctccaccagggaaagggtcactatatattaggccattgctgataggaacaggagcattgttaggggtggcacctgcccctgagtatacatttcttatttattgttctccagttggcagctaccagaagggtgcactaaatttaaaggttgaggataaactatatagagcaatatctggctgtggtggaactggagggatcaaaagtgtcaccaattatgcccctgtttatactgcaatggctgatgcaaaggccaacggattctctgatgtgctgttcttagactcagcaactggaaaacatatagaggaggcctcagcatgcaatgtatttgttttgaaggacaatgctatctccactcctgcaatagatggaaccatcctacctggtatcacccgaaaatccatcattgacattgccattgatttgggttatcaggtcatggaacgttccgtatcagtggaggagatgctaggtgctgatgaaatgttctgcactggaactgcagttgttgtcaactctgttgcatctgtaacttataaggaaacaagggtggattacaaaacaggcccagcaacattgtcctcaaaactacggaaaacacttgttggaattcaaacagggtgtcttgaggacaaaaaatcatggacagtccgagtagattcaacaatatagcaccgtttccgtcacaaataaaaagagaaaaatattgcaccgtttgtc

SEQ ID NO: 6435 - protein, 257 aa, Glycine max
  misc_feature (1)..(257): Ceres Seq. ID no. 14315190
MKRGADRLCMPSPSPGQFVNAVKQIVIANKRWVPPPGKGSLYIRPLLIGTGALLGVAPAPEYTFLIYCSPVGSYQKGALNLKVEDKLYRAISGCGGTGGIKSVTNYAPVYTAMADAKANGFSDVLFLDSATGKHIEEASACNVFVLKDNAISTPAIDGTILPGITRKSIIDIAIDLGYQVMERSVSVEEMLGADEMFCTGTAVVVNSVASVTYKETRVDYKTGPATLSSKLRKTLVGIQTGCLEDKKSWTVRVDSTI

SEQ ID NO: 6436 - protein, 248 aa, Glycine max
  misc_feature (1)..(248): Ceres Seq. ID no. 14315191
MPSPSPGQFVNAVKQIVIANKRWVPPPGKGSLYIRPLLIGTGALLGVAPAPEYTFLIYCSPVGSYQKGALNLKVEDKLYRAISGCGGTGGIKSVTNYAPVYTAMADAKANGFSDVLFLDSATGKHIEEASACNVFVLKDNAISTPAIDGTILPGITRKSIIDIAIDLGYQVMERSVSVEEMLGADEMFCTGTAVVVNSVASVTYKETRVDYKTGPATLSSKLRKTLVGIQTGCLEDKKSWTVRVDSTI

SEQ ID NO: 6437 - protein, 145 aa, Glycine max
  misc_feature (1)..(145): Ceres Seq. ID no. 14315192
MADAKANGFSDVLFLDSATGKHIEEASACNVFVLKDNAISTPAIDGTILPGITRKSIIDIAIDLGYQVMERSVSVEEMLGADEMFCTGTAVVVNSVASVTYKETRVDYKTGPATLSSKLRKTLVGIQTGCLEDKKSWTVRVDSTI

SEQ ID NO: 6438 - DNA, 1290 bp, Glycine max
  misc_feature (1)..(1290): Ceres Seq. ID no. 14315193
attctattctctcgtgtctctctctctctctctgaaaccatgcctgtcacaaacacaacaacacctacagtggcagaacacatcaaatggagaaggcccagaaaccaattcaaccaccaccatcatcaccatcaccaccccatttcagaaacagatccaaaccctcaaatcccttccataatccaatccactaggtgcaagtccaccatttcctccctgctcctctccactttctccaacaacacctccaataatgccactgcccacagcaagaaaaaaagcaacttttctgcatcaaccttcagagggttgggctgcactgctggctcgtcgcagcaggtgtcggtgccggcggtgattcgctcctccgccgattggcaagggaagaaaacaagaaaaaagaagcacaagagaagcaacagaagcagcaagaacaagactttccatggtggggttctggaaggttccaatccagggtgtgtggattttcaagatgtttggtgtggccctggaattgggttctcaacagatgctgctgcctctgttgattgtgttgtggccaggaagaatgtctcttctgcaagagggaaaattgatgtggataagatcactcacagggagataatgatgcttcaagggagtctactaatgggtggacaactaaattcacatgatcatttcagagactggagactggatgttgataacatgtcctatgagcaattgctagagcttggtgagagaattggtcatgtgaacactggactcaaggaagatgagatgggacggaacataaggaagactaggattcaattttgggatgatacatcaaagcttcaagtagataaagagtgcagcatttgtcaggaggagtatgaagcgggtgatgagttggggaggctaaattgtgagcacagttatcactttcagtgtataaaacaatgggttgcacaaaaaaatttctgcccagtatgtaagcaacaagttgcggctcgacactgagtgactcaacccttctgtttttttggacagcttccattctcatccataaatttgtgtatagtttttcatatccaatacaagcaagagttttcattctttgctgtcaattatcatttcatctttcaaaattcctgcatcctctgcgaggaatcggcaattatatgttatcgagtaaaggtttatattcgggctgagacctttgcatattatacgcaagagttgccttgcttaagagcagttattattatttttttgttttgggtttttaatgaagttgtgtctgtgacc

SEQ ID NO: 6439 - protein, 333 aa, Glycine max
  misc_feature (1)..(333): Ceres Seq. ID no. 14315194
ILFSRVSLSLSETMPVTNTTTPTVAEHIKWRRPRNQFNHHHHHHHHPISETDPNPQIPSIIQSTRCKSTISSLLLSTFSNNTSNNATAHSKKKSNFSASTFRGLGCTAGSSQQVSVPAVIRSSADWQGKKTRKKKHKRSNRSSKNKTFHGGVLEGSNPGCVDFQDVWCGPGIGFSTDAAASVDCVVARKNVSSARGKIDVDKITHREIMMLQGSLLMGGQLNSHDHFRDWRLDVDNMSYEQLLELGERIGHVNTGLKEDEMGRNIRKTRIQFWDDTSKLQVDKECSICQEEYEAGDELGRLNCEHSYHFQCIKQWVAQKNFCPVCKQQVAARH

SEQ ID NO: 6440 - protein, 320 aa, Glycine max
  misc_feature (1)..(320): Ceres Seq. ID no. 14315195
MPVTNTTTPTVAEHIKWRRPRNQFNHHHHHHHHPISETDPNPQIPSIIQSTRCKSTISSLLLSTFSNNTSNNATAHSKKKSNFSASTFRGLGCTAGSSQQVSVPAVIRSSADWQGKKTRKKKHKRSNRSSKNKTFHGGVLEGSNPGCVDFQDVWCGPGIGFSTDAAASVDCVVARKNVSSARGKIDVDKITHREIMMLQGSLLMGGQLNSHDHFRDWRLDVDNMSYEQLLELGERIGHVNTGLKEDEMGRNIRKTRIQFWDDTSKLQVDKECSICQEEYEAGDELGRLNCEHSYHFQCIKQWVAQKNFCPVCKQQVAARH

SEQ ID NO: 6441 - DNA, 1628 bp, Glycine max
  misc_feature (1)..(1628): Ceres Seq. ID no. 14315196
tccattttgtttggaacactgcgtaaggctgcgccaccacctccgcctccgtcgtccacggccagttgcttgcgttcctttcactttttttataattggctaagaataataatggcgtaccggcgctgcctcttgataagagggagcctcgtggatcggaggtgccatctgtctttcagttatgttctccacagcaacgaggggaagcgcgaacgcaccaatgaaaaatcatcttcaggaggggttggtgattttactcaaacaaggtcctttggaagctctcttaatggacagatgcggttcttctcgccttcccgagatagatttctttctccatgcaccggatatggtttctgccaatatatgtcgacggtgaatcggggttcagataagattggcagtgatgtaatgactgatgtggctgatgtcctcgctgacacgaccatggattctgtagcttctcaggctcctgttgttaatgaggttgctattgctgctgctgattcttttttgcctgtacaggccttgcagtacgtgatagatgctgtgcatttctacactggcttaaattggtgggcagccatagttctaacaaccctgttgattcgaaccgctacagttccactcttaataaatcaacttaaggccacttctaaacttacgttaatgaggcctcacttagaagagataaagcaagaaatggagggactgactatggatcctgtagctgttgctaaaggtcagcagcagatgaagaagctatttaaggaatatggtgtgagtccttttacgccattgaaaggactctttattcaaggccctatttttgttagtttttttcttgcgataacaaatatggctgaaaaagtgccgtcattcaagcatggtggagcttcttggtttattgatctctcaactcctgatgccctgtacgtttttccagttttgacagcattgtcattcttaataacagtagagtgtaatatgcaagaagggatggaaggaaatcctgtggctggtaccatgaaaaatgtctctaggggtcttgctgttcttacagttcctttcaccatgggatttccaaaggcaatattctgttactgggttacatcaaatttgttttcacttgtgtatggacttgtgcttaaagttcctggcgtaaagaaaactttgggtattcctgaaatacctgttgctccacccaccacgaccagtgctactcaatctcccttttctatatttcctgctctaaaacaagctacatctgcaacaacaaatgggtcaagctcaataccagatgaagcttcaaaacattcaaataaaaagatatcttctgcttctgttattagtcaaaggcttagaagtttagagaaacaagtgaaaggaagaaagaagaacaagaagtgaggaaaatttacaataatcctaaattataacatctatacatggagcaattgtgctcagcattttgttatattttattatcctgggatgagggagaaattagttcgaactttgtatgtttagtctacactcgattcatcggtttctcaattcttgtgtaaaacttggtccctatcagaaagggcggcctcaataattttatataacttttcatccttcatttt

SEQ ID NO: 6442 - protein, 468 aa, Glycine max
  misc_feature (1)..(468): Ceres Seq. ID no. 14315197
SILFGTLRKAAPPPPPPSSTASCLRSFHFFYNWLRIIMAYRRCLLIRGSLVDRRCHLSFSYVLHSNEGKRERTNEKSSSGGVGDFTQTRSFGSSLNGQMRFFSPSRDRFLSPCTGYGFCQYMSTVNRGSDKIGSDVMTDVADVLADTTMDSVASQAPVVNEVAIAAADSFLPVQALQYVIDAVHFYTGLNWWAAIVLTTLLIRTATVPLLINQLKATSKLTLMRPHLEEIKQEMEGLTMDPVAVAKGQQQMKKLFKEYGVSPFTPLKGLFIQGPIFVSFFLAITNMAEKVPSFKHGGASWFIDLSTPDALYVFPVLTALSFLITVECNMQEGMEGNPVAGTMKNVSRGLAVLTVPFTMGFPKAIFCYWVTSNLFSLVYGLVLKVPGVKKTLGIPEIPVAPPTTTSATQSPFSIFPALKQATSATTNGSSSIPDEASKHSNKKISSASVISQRLRSLEKQVKGRKKNKK

SEQ ID NO: 6443 - protein, 431 aa, Glycine max
  misc_feature (1)..(431): Ceres Seq. ID no. 14315198
MAYRRCLLIRGSLVDRRCHLSFSYVLHSNEGKRERTNEKSSSGGVGDFTQTRSFGSSLNGQMRFFSPSRDRFLSPCTGYGFCQYMSTVNRGSDKIGSDVMTDVADVLADTTMDSVASQAPVVNEVAIAAADSFLPVQALQYVIDAVHFYTGLNWWAAIVLTTLLIRTATVPLLINQLKATSKLTLMRPHLEEIKQEMEGLTMDPVAVAKGQQQMKKLFKEYGVSPFTPLKGLFIQGPIFVSFFLAITNMAEKVPSFKHGGASWFIDLSTPDALYVFPVLTALSFLITVECNMQEGMEGNPVAGTMKNVSRGLAVLTVPFTMGFPKAIFCYWVTSNLFSLVYGLVLKVPGVKKTLGIPEIPVAPPTTTSATQSPFSIFPALKQATSATTNGSSSIPDEASKHSNKKISSASVISQRLRSLEKQVKGRKKNKK

SEQ ID NO: 6444 - protein, 370 aa, Glycine max
  misc_feature (1)..(370): Ceres Seq. ID no. 14315199
MRFFSPSRDRFLSPCTGYGFCQYMSTVNRGSDKIGSDVMTDVADVLADTTMDSVASQAPVVNEVAIAAADSFLPVQALQYVIDAVHFYTGLNWWAAIVLTTLLIRTATVPLLINQLKATSKLTLMRPHLEEIKQEMEGLTMDPVAVAKGQQQMKKLFKEYGVSPFTPLKGLFIQGPIFVSFFLAITNMAEKVPSFKHGGASWFIDLSTPDALYVFPVLTALSFLITVECNMQEGMEGNPVAGTMKNVSRGLAVLTVPFTMGFPKAIFCYWVTSNLFSLVYGLVLKVPGVKKTLGIPEIPVAPPTTTSATQSPFSIFPALKQATSATTNGSSSIPDEASKHSNKKISSASVISQRLRSLEKQVKGRKKNKK

SEQ ID NO: 6445 - DNA, 599 bp, Glycine max
  misc_feature (1)..(599): Ceres Seq. ID no. 14315216
aaaccgcgtacggcaccatccggctaatcgccaccgctcgaagctacggaggagattgattcaacctctctctatctatatcggaaacgtctaacggcggactaatttacgtgtcgacggagctagaagcagcttatcttctccagatctctaaccgattctcaccgcttcctgtttcaccggttgggtgatcaaagcaatggttcttgatgggattgtatcttcaccattgaggagacaccagtctctaaagaaacagtgggaagatttgggtagctgctcaaccgttgttaaccggcatcgatatttattaacagcattgcttctcttgggctttctctgcacggtttatctttactttgctgtcactttagatgctaggcacaactcctcctgctacggcttggctgggaaagagaaggcaatgtgtcaagccatctctaaagggaaactcaaattgttttgataaattgttcttgtgccactacattcttttttgttttattgattctataatgccatttgtgtgtaattgtttcattacatggtgaaaaaccagagatttgtaacctaaacatcaaaaaacattttcatttctg

SEQ ID NO: 6446 - protein, 88 aa, Glycine max
  misc_feature (1)..(88): Ceres Seq. ID no. 14315217
MVLDGIVSSPLRRHQSLKKQWEDLGSCSTVVNRHRYLLTALLLLGFLCTVYLYFAVTLDARHNSSCYGLAGKEKAMCQAISKGKLKLF

SEQ ID NO: 6447 - protein, 58 aa, Glycine max
  misc_feature (1)..(58): Ceres Seq. ID no. 14315218
MLGTTPPATAWLGKRRQCVKPSLKGNSNCFDKLFLCHYILFCFIDSIMPFVCNCFITW

SEQ ID NO: 6448 - DNA, 1237 bp, Glycine max
  misc_feature (1)..(1237): Ceres Seq. ID no. 14315219
ctcttagtatttattctcttttatttgtttcttcacagcccctcaatgaagaacaagaagggtgaagctctgagtgagacttctctcccaccttcaaccatgtcttcttcctcctcttctcttgtcaccactcttgttgataataataaccctactcaaccttctcagttaagagcggcacgccgtcgtttcacctctgatcatcaccttcctgagataagcctcaaaacccctatggttaggccttatgttcgatcaaaaatgcctaggcttcgttggacaccagatctccatcgttgcttcgtgcatgcagttcaaagacttggaggagaagacagggccacaccaaagttggttttacagctcatgaatgtaaaggggcttactatatctcacgtcaaaagccaccttcagatgtacaggagcatgagacacgagcagatgagtcaaggtgcaaagaagaataatatggctccggatttcccagcttccacactcgcaactcttggcccaaggcaacagaaacctcacaaaagaagctgcacggaagagcttgttcccacccaagctcaatggaatcatgatgagcaagagtgttacaatggaaaccaagggggtgaatcgattataatttgtaacggcaatgaacagaaggtgcactcctacatcatcttcgagggtcttctgagaggccaatctgtccaagagaataaaactactactactgaaaaggtgtcactaggtgatgccggttacgaaagcgaccatcaaagattccaagacacaactctgtccctttcaatgagctcaaggccttcttcacattcgttcttgaatcggagccacagtactggtccagatgcgaatgatgtctctcttgagctcacgctctcttagaatcatgcacataataataacagcaagccttttctttgtcatcatttatgcatgtttcttccatcctacaactacactacaaactaatggtgcatgacctttcaagaaagaacaatccatactatcaagtgtttttccgacatcgattaagaaattaaaatttttaaaaaattattaaatttttgtcgatgcatttttatttattaatttcttaataaatgtctctaaaagcacttgttagcaggagaccgaggaaattgtaataccaacgctactttagttcgcatcatttagtgcccatgatcagaagtactagaaatcaagtgaactaattaagaac

SEQ ID NO: 6449 - protein, 298 aa, Glycine max
  misc_feature (1)..(298): Ceres Seq. ID no. 14315220
LLVFILFYLFLHSPSMKNKKGEALSETSLPPSTMSSSSSSLVTTLVDNNNPTQPSQLRAARRRFTSDHHLPEISLKTPMVRPYVRSKMPRLRWTPDLHRCFVHAVQRLGGEDRATPKLVLQLMNVKGLTISHVKSHLQMYRSMRHEQMSQGAKKNNMAPDFPASTLATLGPRQQKPHKRSCTEELVPTQAQWNHDEQECYNGNQGGESIIICNGNEQKVHSYIIFEGLLRGQSVQENKTTTTEKVSLGDAGYESDHQRFQDTTLSLSMSSRPSSHSFLNRSHSTGPDANDVSLELTLS

SEQ ID NO: 6450 - protein, 283 aa, Glycine max
  misc_feature (1)..(283): Ceres Seq. ID no. 14315221
MKNKKGEALSETSLPPSTMSSSSSSLVTTLVDNNNPTQPSQLRAARRRFTSDHHLPEISLKTPMVRPYVRSKMPRLRWTPDLHRCFVHAVQRLGGEDRATPKLVLQLMNVKGLTISHVKSHLQMYRSMRHEQMSQGAKKNNMAPDFPASTLATLGPRQQKPHKRSCTEELVPTQAQWNHDEQECYNGNQGGESIIICNGNEQKVHSYIIFEGLLRGQSVQENKTTTTEKVSLGDAGYESDHQRFQDTTLSLSMSSRPSSHSFLNRSHSTGPDANDVSLELTLS

SEQ ID NO: 6451 - protein, 265 aa, Glycine max
  misc_feature (1)..(265): Ceres Seq. ID no. 14315222
MSSSSSSLVTTLVDNNNPTQPSQLRAARRRFTSDHHLPEISLKTPMVRPYVRSKMPRLRWTPDLHRCFVHAVQRLGGEDRATPKLVLQLMNVKGLTISHVKSHLQMYRSMRHEQMSQGAKKNNMAPDFPASTLATLGPRQQKPHKRSCTEELVPTQAQWNHDEQECYNGNQGGESIIICNGNEQKVHSYIIFEGLLRGQSVQENKTTTTEKVSLGDAGYESDHQRFQDTTLSLSMSSRPSSHSFLNRSHSTGPDANDVSLELTLS

SEQ ID NO: 6452 - DNA, 1415 bp, Glycine max
  misc_feature (1)..(1415): Ceres Seq. ID no. 14315249
atgctttggttagagtttgatttcggtataggaaaaagtgaagctagcaagaacgaaaggttggctcagattgcaatattttaaggctcaagagaatcaaagactccttggcatatttaacttttaagacggcaaaaaatgtttccattttctgctcaagctatctcagatagatagccataaagtttgtcaagttaatgtgatgttttctgcataaaaattacttggatgttgtgttttctcttcatttaagaatggaaaagattccaaatgcaggatttacacgtgttttcggttttccaatggaaatgaagaatgaggatcagatcacacaacaggctcagagaccaaaatatgattgccttctatttgatttagatgatactttgtatcctctcaattctggtcttgcaaatgcaattgacaaaaatattaaagactacatggtcgagaagcttggcgcagaaccaagtaaaactggtgaattggtcaacctcctttacagtaactatggaactactattgctggtctaagggctattggatatgacattgactatgaagaatattacagttttgttcatgggaaattaccttatgagaacttaaagccagacccagttctgaggaatctgctgctgagtctcccctatagaaagcttattttcacaaactcagacaaagtccatacgattaaggcacttgaaagacttgggttggaagactgctttgaaggaatgatatgctttgagacccttaatcctatccaaaagagcactgttttttattatgaagctgacataaagtttgagggttcaaagagcataaatccaacacccaaaaatggtgtagaatgctctgaaatctttgacatcatagagcattttgctcaacctgaacccagtgcagtcctgccagagacaccaattatctgcaaaccatccgaacatgccattaaattggccctcaagatggccaaccttaacccacaaagaaccttgttctttgaggatagtgtccgcaacatacaatctggaaaacgattgggccttcacactgtgttggttggtagatcctacagggttaaaggtgctgattatgccatggaaagcattcacaaccttaaggaggcagtgcctgaactgtgggaagctgacataaaagcacaagttgcatgcccgggaactgagaagcttgcagtggagacatcagatatagcttgagacttcgcaagaatgccccttttagtatcgttaataaattgaaaatctatgtagaaataaagaagcagtcagccacagggttttccatcttcaaatgtttttttttaaatctataggatcattgcattcaatatcagagatttgataacattcacagatcctattcaatcaatgatttagatttcttcgttc

SEQ ID NO: 6453 - protein, 322 aa, Glycine max
  misc_feature (1)..(322): Ceres Seq. ID no. 14315250
MEKIPNAGFTRVFGFPMEMKNEDQITQQAQRPKYDCLLFDLDDTLYPLNSGLANAIDKNIKDYMVEKLGAEPSKTGELVNLLYSNYGTTIAGLRAIGYDIDYEEYYSFVHGKLPYENLKPDPVLRNLLLSLPYRKLIFTNSDKVHTIKALERLGLEDCFEGMICFETLNPIQKSTVFYYEADIKFEGSKSINPTPKNGVECSEIFDIIEHFAQPEPSAVLPETPIICKPSEHAIKLALKMANLNPQRTLFFEDSVRNIQSGKRLGLHTVLVGRSYRVKGADYAMESIHNLKEAVPELWEADIKAQVACPGTEKLAVETSDIA

SEQ ID NO: 6454 - protein, 306 aa, Glycine max
  misc_feature (1)..(306): Ceres Seq. ID no. 14315251
MEMKNEDQITQQAQRPKYDCLLFDLDDTLYPLNSGLANAIDKNIKDYMVEKLGAEPSKTGELVNLLYSNYGTTIAGLRAIGYDIDYEEYYSFVHGKLPYENLKPDPVLRNLLLSLPYRKLIFTNSDKVHTIKALERLGLEDCFEGMICFETLNPIQKSTVFYYEADIKFEGSKSINPTPKNGVECSEIFDIIEHFAQPEPSAVLPETPIICKPSEHAIKLALKMANLNPQRTLFFEDSVRNIQSGKRLGLHTVLVGRSYRVKGADYAMESIHNLKEAVPELWEADIKAQVACPGTEKLAVETSDIA

SEQ ID NO: 6455 - protein, 304 aa, Glycine max
  misc_feature (1)..(304): Ceres Seq. ID no. 14315252
MKNEDQITQQAQRPKYDCLLFDLDDTLYPLNSGLANAIDKNIKDYMVEKLGAEPSKTGELVNLLYSNYGTTIAGLRAIGYDIDYEEYYSFVHGKLPYENLKPDPVLRNLLLSLPYRKLIFTNSDKVHTIKALERLGLEDCFEGMICFETLNPIQKSTVFYYEADIKFEGSKSINPTPKNGVECSEIFDIIEHFAQPEPSAVLPETPIICKPSEHAIKLALKMANLNPQRTLFFEDSVRNIQSGKRLGLHTVLVGRSYRVKGADYAMESIHNLKEAVPELWEADIKAQVACPGTEKLAVETSDIA

SEQ ID NO: 6456 - DNA, 1504 bp, Glycine max
  misc_feature (1)..(1504): Ceres Seq. ID no. 14315253
cctgaagtgaaaaaatagttgaaataaaattcgcttactgagttggttactactattgttcttaaacattgattagatacagtaatttcaaaattagattttgtgatattatgagttgtgagactatgctaacttacattgatttaaactttcccaaacactgttgcttgcggattagaatcataatcatatatcacacaaaacctgatgaactgcttagtttgctgcaaggcattcctgtataaactagttacggttatgaactttaggcagcatcatgctaatgaaatatatgaaaccaagatattctaagcaaagactagtttcaattgagcatgaatggagaagctgtgtcatgcaattgtgacacatgaaacataattttggtggcaacatagtggtgagacaggtatagatgggaaaacaccagttggaatcattttagtgagtgaagatgaaacaagtttttgggacttgaaagataataagctgctttggagttgcacctttttttcaaaatgtcatttatttggctgcagagtagttccagtattttagccaaaatcttcctttctgcttgggtgggcatgtaccctttgacatgctatgatgttttttctttttcctttcttgtagtatcgcttgtagcaccaagaggatttctggtcctcctgttttgtatttcaacattgcaagatgattttgttgctcaaacatatgtagcactggccaaatgttatgcttgctataatccttttgttcaacaactgtgtttagagctaagctgaatatattaagctcaatattgttctcatgtttctgataccccctcctatctttttcttttacaattgaacaatgaagtgaatattttttatgttgataaaatgatattatcacctctaacttattacttcttttggtttcttgtgttgaaaaaccaaaatagtgggccgttctctgttcggtggattaagcaacagttcccctggtttatttaccacattacatgagatgacatgcaaaaatatgttttctcagcaacaacgtaccttcatacagatgaggactgttctcaaggttgtggataactcgggggctaaaaaggtgatgtgcatacaggcattgaaagggaagaaaggggcaagattaggtgacacaataatagcatctgtgaaggaagcacatcctaatggaaaagtgaagaaaggaaaggttgtatatggggtagtggtgcgtgcggcaatgcaaaaggggcgttgtgatggcagtgaagtcaagtttgatgataatgctgtggtgcttgttgacaagcaaggccaacctattggaaccagagtttttggaccagtgcctcatgagctaaggcaaaagaagcatgtcaagattcttaccttggcagggcacattgcataaatgagaaaaagggctgtccttgagttttgttatgaattcaaatgtcacatctaccatttttatatttggatattttgatgtgatgtgc

SEQ ID NO: 6457 - protein, 133 aa, Glycine max
  misc_feature (1)..(133): Ceres Seq. ID no. 14315254
MTCKNMFSQQQRTFIQMRTVLKVVDNSGAKKVMCIQALKGKKGARLGDTIIASVKEAHPNGKVKKGKVVYGVVVRAAMQKGRCDGSEVKFDDNAVVLVDKQGQPIGTRVFGPVPHELRQKKHVKILTLAGHIA

SEQ ID NO: 6458 - protein, 128 aa, Glycine max
  misc_feature (1)..(128): Ceres Seq. ID no. 14315255
MFSQQQRTFIQMRTVLKVVDNSGAKKVMCIQALKGKKGARLGDTIIASVKEAHPNGKVKKGKVVYGVVVRAAMQKGRCDGSEVKFDDNAVVLVDKQGQPIGTRVFGPVPHELRQKKHVKILTLAGHIA

SEQ ID NO: 6459 - protein, 117 aa, Glycine max
  misc_feature (1)..(117): Ceres Seq. ID no. 14315256
MRTVLKVVDNSGAKKVMCIQALKGKKGARLGDTIIASVKEAHPNGKVKKGKVVYGVVVRAAMQKGRCDGSEVKFDDNAVVLVDKQGQPIGTRVFGPVPHELRQKKHVKILTLAGHIA

SEQ ID NO: 6460 - DNA, 1499 bp, Glycine max
  misc_feature (1)..(1499): Ceres Seq. ID no. 14315257
aataattcaaagctccttggtcatcttatcatgactagatttgaagtggttttcatcgctaccccagccctcggcaaccttgttccaattgtggaattcgcggatctcctaaccaaacacaaccctcaattatctgcaaccgttctcactgtcaccacgccgcaacgacccctcataagcacctacgtccaatcccgcgcctcctcagccactaatctcaaactcctccacctccctacagtggacccacccacacccgaccagtaccaatccttcatcgccttcgtctccctccacatccaaaatcacaaacaccaggtcaagaacgagctcctcaacctcaaaaaaaacgagtcaaactcgtttgactcggttcgactcgtcgctctcttcgtcgacatgttctccaccacgctcatcgacgtcgccgccgagctcgccgtcccgtgctacctcttcttcgcgtcaccggcgagcttcctcggcttcacgctccacctcgaccgagtcgacccggtcgagtcggaatccgagttggcggttccgagttttgaaaaccccttgccacggtccgttttgcccaacctcgtgttggacgcgaacgacgcgttttcttgggtggcataccacgcgagaaggtacagggaaacaaagggcatcttcgtgaatacggttcaagagcttgaacctcacgcgcttcagtcactctacaacgattcggaattgccacgcgtttatccaattgggccggttcttgaccttgttggatcgaaccaatgggatccgaacccggcccaatacaagcgaattatggagtggcttgatcagcagcctgtgtcttcagtggtttttgtctgcttcgggagcatgggaagcttaaaggcaaaccaggtggaggagattgcaactgggcttgaaatggctaatgttagattcttatgggctttgcgggagcctccgaaggcccaattggaagacccgagagattacacaaaccccaaggacgtgctaccagatggatttcttgaacgaacggctgagatgggtttggtgtgtgggtgggtcccacaagcggtggtgttggcccacaaggccgtagggggtttcgtgtcgcattgtggttggaactcgatattagagagcttgtggcatggtgtaccgattgccacgtggccggtgtacgctgagcaacaaatgaacgcgtttcaaatggttagggaattgggattagcggtggagattagggtagattatagggtgggtggggatctggtgcgggcagaagaagtgctgaatggcgtgaggtcgctgatgaagggtgctgatgagatccaaaaaaaggtgaaagagatgagtgacatctgtagaagcgcattgatggagaacaggtcatcttacaataatctagtgttcctaattcaacacttgacaagttgaacaacccatgcaatcaactgcttttttagggattaaataataaagtttcataagtatggatt

SEQ ID NO: 6461 - protein, 478 aa, Glycine max
  misc_feature (1)..(478): Ceres Seq. ID no. 14315258
NNSKLLGHLIMTRFEVVFIATPALGNLVPIVEFADLLTKHNPQLSATVLTVTTPQRPLISTYVQSRASSATNLKLLHLPTVDPPTPDQYQSFIAFVSLHIQNHKHQVKNELLNLKKNESNSFDSVRLVALFVDMFSTTLIDVAAELAVPCYLFFASPASFLGFTLHLDRVDPVESESELAVPSFENPLPRSVLPNLVLDANDAFSWVAYHARRYRETKGIFVNTVQELEPHALQSLYNDSELPRVYPIGPVLDLVGSNQWDPNPAQYKRIMEWLDQQPVSSVVFVCFGSMGSLKANQVEEIATGLEMANVRFLWALREPPKAQLEDPRDYTNPKDVLPDGFLERTAEMGLVCGWVPQAVVLAHKAVGGFVSHCGWNSILESLWHGVPIATWPVYAEQQMNAFQMVRELGLAVEIRVDYRVGGDLVRAEEVLNGVRSLMKGADEIQKKVKEMSDICRSALMENRSSYNNLVFLIQHLTS

SEQ ID NO: 6462 - protein, 468 aa, Glycine max
  misc_feature (1)..(468): Ceres Seq. ID no. 14315259
MTRFEVVFIATPALGNLVPIVEFADLLTKHNPQLSATVLTVTTPQRPLISTYVQSRASSATNLKLLHLPTVDPPTPDQYQSFIAFVSLHIQNHKHQVKNELLNLKKNESNSFDSVRLVALFVDMFSTTLIDVAAELAVPCYLFFASPASFLGFTLHLDRVDPVESESELAVPSFENPLPRSVLPNLVLDANDAFSWVAYHARRYRETKGIFVNTVQELEPHALQSLYNDSELPRVYPIGPVLDLVGSNQWDPNPAQYKRIMEWLDQQPVSSVVFVCFGSMGSLKANQVEEIATGLEMANVRFLWALREPPKAQLEDPRDYTNPKDVLPDGFLERTAEMGLVCGWVPQAVVLAHKAVGGFVSHCGWNSILESLWHGVPIATWPVYAEQQMNAFQMVRELGLAVEIRVDYRVGGDLVRAEEVLNGVRSLMKGADEIQKKVKEMSDICRSALMENRSSYNNLVFLIQHLTS

SEQ ID NO: 6463 - protein, 345 aa, Glycine max
  misc_feature (1)..(345): Ceres Seq. ID no. 14315260
MFSTTLIDVAAELAVPCYLFFASPASFLGFTLHLDRVDPVESESELAVPSFENPLPRSVLPNLVLDANDAFSWVAYHARRYRETKGIFVNTVQELEPHALQSLYNDSELPRVYPIGPVLDLVGSNQWDPNPAQYKRIMEWLDQQPVSSVVFVCFGSMGSLKANQVEEIATGLEMANVRFLWALREPPKAQLEDPRDYTNPKDVLPDGFLERTAEMGLVCGWVPQAVVLAHKAVGGFVSHCGWNSILESLWHGVPIATWPVYAEQQMNAFQMVRELGLAVEIRVDYRVGGDLVRAEEVLNGVRSLMKGADEIQKKVKEMSDICRSALMENRSSYNNLVFLIQHLTS

SEQ ID NO: 6464 - DNA, 1538 bp, Glycine max
  misc_feature (1)..(1538): Ceres Seq. ID no. 14315261
actctcaaatttgtgtcagccaacattcccatcatcttgttaactttatccaaaccatcacaaaaaccacaacatttccagcttctgctactgtgaagcacaccctgtaccatgaccatccatctgctatatctgccaaatatcgcctacacaccctgcagcaatcacctcactgctcatcaccaccacaaagccgccttcaatctcaattctcaactaaacaacacctctcctttcacagtgagcaccacctcctcaatggatagttcccaacacctcagccccacattccacgtcttgaaccaaaatagctgcacaacattctctgagacaaattttcaccatcctcaacctttgtggcattgacattcttgccactaaactaaccttctcactggaatttaccattcttgagtggatcactctctagagttgcatgaaccactatcaatggaactttccacttctgagaaaaataagagagatgtggcaaacctttgctgctaggatggaggagaatgagagaagaacaagggaaagggtttagggcttatatttctgaaatttatagttcatgttcttggtgaggcttttgtttttaccacaaatgatcatggaggtagtataaagtgctactggaatcaccttgtttctccaaacttgtggacattgtctgagtcattcatgattgtagttgtttataactctcatgttagattttgaaaaagacatgcttttaagttttcaccttgacttcaaccttatatctcattgcctgttgttggtttttggtaatatatattttttcacagattccaacaaatcctgctggtcttattgaatatagggcacatccattctggatccagaaatattgccctactcacgaacatgatggtactacacgctgttgcagctgcgagcgaatggaggttagtatggatggagtatatttatctgataaaatattatttgtagtcttgcctagggaaaggtggatgaacttgtacagtgcaaagtgaatagaatgtaaaattttctctcatcatatgcagtcccaagaggcaggatatattgctcttaaggatggccggaagctctgcttagagtgtcttgattctgctatcatggatactaatgaatgccaaccccttcatgctgatatacaaagattttatgaaagcctaaatatgaaactggaccaacaaattccacttctattggttgaaagacaagcactgaatgaagcaagagaaggagagaagaatgtaagagaaaatgcatttccatctgtttgctataaatataataactgataatttgattgtaatgacattcagctgtctgacatactaggaactattttttggtgtttggcattgtctgcacaactaatattaaaagtaaaataatgccttttgctattgatagctttgagaatgctatctctgatgaaggtttttctattcgtgatatgttaaccacatgctatgtcaaatagttcaatatgactagcacgatatagaaaatttaagagt

SEQ ID NO: 6465 - protein, 88 aa, Glycine max
  misc_feature (1)..(88): Ceres Seq. ID no. 14315262
MQSQEAGYIALKDGRKLCLECLDSAIMDTNECQPLHADIQRFYESLNMKLDQQIPLLLVERQALNEAREGEKNVRENAFPSVCYKYNN

SEQ ID NO: 6466 - protein, 87 aa, Glycine max
  misc_feature (1)..(87): Ceres Seq. ID no. 14315263
SQICVSQHSHHLVNFIQTITKTTTFPASATVKHTLYHDHPSAISAKYRLHTLQQSPHCSSPPQSRLQSQFSTKQHLSFHSEHHLLNG

SEQ ID NO: 6467 - protein, 84 aa, Glycine max
  misc_feature (1)..(84): Ceres Seq. ID no. 14315264
MTIHLLYLPNIAYTPCSNHLTAHHHHKAAFNLNSQLNNTSPFTVSTTSSMDSSQHLSPTFHVLNQNSCTTFSETNFHHPQPLWH

SEQ ID NO: 6468 - DNA, 1665 bp, Glycine max
  misc_feature (1)..(1665): Ceres Seq. ID no. 14315279
atagaatttctgaaacaaagaatcttccctctatttctccccaattttccatcaccatttttcctcaaatttctcttcttcttcatccagaaaatgaatcccaatcccaacaccaacgatttccctctcctctcccaccttcttaaccaccttgatccccaaacacacccacccctccccgcagagctagaccaatctctattaacccaattccctcacttgaaccaccccagcgtgttatcctcactcgcccgtcacgcctccaccctcaacgtcacccccacactctccctcctccgcaccctcggcccccgcccagacccctccgctgtcgccgccgcccgcgccaggatcgccgacccccacgcgcgcgaggacggcggcgaggcccacgtggtccacgcgctggtgcgcgtggacgacacgcacgaggagtgcgtgaagcagctgagagcctccgagaaaaagctcctcgaggcctatgctgaatcggtgaaaggggtcgttgaagaagtgagcgaaggagtggttagggtattgaagaaagcggagagtgaggaagtggaaagggttgatctctctgggtcccacttgaggattctccccgaagcgttcgggaagattcgtggcctcgttgtgcttaatttgtctcagaatcagttagaggtgattcctgattcaatagcaggactacagaggcttgtggagctggatgtttcatctaatgttttagagtccctacctgactctattggattgttggttaatctgaagatctttaatgtgtcagcaaacaagctaactgctcttcctgaatccattgctctttgcaggtcactagtcgaattggatgcaagctttaacaacttaatgtgtctgccaacgaacatgggttttggacttgttaaccttgagaagctcttgatccatttgaacaagatacgatttcttcccgcctccattggagaaatgaaatctctcaggcatcttgatgttcatttcaatgagcttcatggcctacctcaatccattgggaaactcacaaatctggaatatctgaatgttagcagtaactttagtgacatgacagagctacctgaaacacttggtgatctggtcaacttaagggagcttgacctcagcaacaaccaaatccgagctcttccttactcgttcggtaggcttgaaaaattgacaaagctcaacctggaccagaatccaatcatagttcccccaattgaggttgtaaatcaaggggctgaggctgtgaaggagttcatggccaagtggtggctcgatctcattgaagaagctcaacagaaaagcatgtccgaaacacaaaatcagcaagcacagacaggatggctcgcatggggagcctcattgttgaataatgttgctgaagtttctgaaagtgttgcagaatattttggcgctaaaaaagctcctagagacccatggttggatcaacagctgtgatacaagaatatctggactctgcctacatacactgggtttataatttcgtgggatgtatagtttgtgatatagcttttggactcttgttaccactgtaatcaatacttttgtttttcatcttttttttttttttttacttgcagttatacttacacggtataatttgtttggcattactgtctgatc

SEQ ID NO: 6469 - protein, 492 aa, Glycine max
  misc_feature (1)..(492): Ceres Seq. ID no. 14315280
IEFLKQRIFPLFLPNFPSPFFLKFLFFFIQKMNPNPNTNDFPLLSHLLNHLDPQTHPPLPAELDQSLLTQFPHLNHPSVLSSLARHASTLNVTPTLSLLRTLGPRPDPSAVAAARARIADPHAREDGGEAHVVHALVRVDDTHEECVKQLRASEKKLLEAYAESVKGVVEEVSEGVVRVLKKAESEEVERVDLSGSHLRILPEAFGKIRGLVVLNLSQNQLEVIPDSIAGLQRLVELDVSSNVLESLPDSIGLLVNLKIFNVSANKLTALPESIALCRSLVELDASFNNLMCLPTNMGFGLVNLEKLLIHLNKIRFLPASIGEMKSLRHLDVHFNELHGLPQSIGKLTNLEYLNVSSNFSDMTELPETLGDLVNLRELDLSNNQIRALPYSFGRLEKLTKLNLDQNPIIVPPIEVVNQGAEAVKEFMAKWWLDLIEEAQQKSMSETQNQQAQTGWLAWGASLLNNVAEVSESVAEYFGAKKAPRDPWLDQQL

SEQ ID NO: 6470 - protein, 461 aa, Glycine max
  misc_feature (1)..(461): Ceres Seq. ID no. 14315281
MNPNPNTNDFPLLSHLLNHLDPQTHPPLPAELDQSLLTQFPHLNHPSVLSSLARHASTLNVTPTLSLLRTLGPRPDPSAVAAARARIADPHAREDGGEAHVVHALVRVDDTHEECVKQLRASEKKLLEAYAESVKGVVEEVSEGVVRVLKKAESEEVERVDLSGSHLRILPEAFGKIRGLVVLNLSQNQLEVIPDSIAGLQRLVELDVSSNVLESLPDSIGLLVNLKIFNVSANKLTALPESIALCRSLVELDASFNNLMCLPTNMGFGLVNLEKLLIHLNKIRFLPASIGEMKSLRHLDVHFNELHGLPQSIGKLTNLEYLNVSSNFSDMTELPETLGDLVNLRELDLSNNQIRALPYSFGRLEKLTKLNLDQNPIIVPPIEVVNQGAEAVKEFMAKWWLDLIEEAQQKSMSETQNQQAQTGWLAWGASLLNNVAEVSESVAEYFGAKKAPRDPWLDQQL

SEQ ID NO: 6471 - DNA, 679 bp, Glycine max
  misc_feature (1)..(679): Ceres Seq. ID no. 14315294
aaaaaaattcatccccatcaaaacacaagcaaatcctaaaaagttgattgagatatatagaaactagcttcaatttcacaaaatgaagaaagtgtttgtcacatttttagctgtgctagttgtatttgttcttacagcgaaagcttcagaggcacgactaccagttaaaacaaattcagcatcaaatgactacaattgttcacaagtctataacctgttagtttcgtgcgtagattacatgattggtggagatgatggtgccccttcaggtgtttgttgccaaagtgttaatgcagtgaaagcatcagcaccaacacaaattcaacgaatggctgcatgtaagtgctttttcgacgtagcaactcgccttccttccttgctcgaaaacaaggccaattcacttcctaaattatgtggtgttgatttgggttttatcatgagcaagcagaacaccaattgtaacaatgttcctgtaagctcaaggcaagggagagattagtacaataaaattgatgcatgtttggaagtttctttcttcttgaaaaaagaaaataaaatggtttgttgaatatacaagcgtttcatgttggaaataataatgagtggatattttctaaatgtgttcttattcatatgcatcttcatcatatagattaatatataatgtttaattaagtcg

SEQ ID NO: 6472 - protein, 138 aa, Glycine max
  misc_feature (1)..(138): Ceres Seq. ID no. 14315295
MKKVFVTFLAVLVVFVLTAKASEARLPVKTNSASNDYNCSQVYNLLVSCVDYMIGGDDGAPSGVCCQSVNAVKASAPTQIQRMAACKCFFDVATRLPSLLENKANSLPKLCGVDLGFIMSKQNTNCNNVPVSSRQGRD

SEQ ID NO: 6473 - protein, 86 aa, Glycine max
  misc_feature (1)..(86): Ceres Seq. ID no. 14315296
MIGGDDGAPSGVCCQSVNAVKASAPTQIQRMAACKCFFDVATRLPSLLENKANSLPKLCGVDLGFIMSKQNTNCNNVPVSSRQGRD

SEQ ID NO: 6474 - DNA, 874 bp, Glycine max
  misc_feature (1)..(874): Ceres Seq. ID no. 14315297
atctgttaaatgtaactgctccaatcagatgctatcatatctgtgagattatatacagataagcttccacaatgaattgaagggctagctattccgttttcataaagtagggaaagagatcgatcttcttcttcatctttcttctccttttctattcttggtttcttcttttagaaatgaacgtgaagggtatcatggatggtaaaattgaagctgggaacaccaattgtattgttaaggaggatgtgaatgatgattcgatatccattggatcagtatcagaagattcaatgaactctgtgtgttcatcttcttcatcagaattggctgaggatgcatcatcctcttcagcatcttatttgtcaacctcatcatcgcattcaaacggccctttgtttgaactatcagagctaatgagtcaactccctatcaagagaggcttgtctatgttttatcaagggaaggctcagtctttcagttctctagcaagcgtggagagcataggggatcttcctaagaagaaagagagattttacaggaagaaaatgaaatcatgcaaaagcttcgcgggaggcttggatagcagccacagaatatcgttcgctccaaaggctacaatatcaaagaaatcttcgagagcaacttttgtatccgtgctaactaaaagagggagtttccttggaggctccagaacttccttttctgtacagaagaacttttgatatccaaccttgttaattagagcttagttaatatttcatgcacaaaatagggaaaattttgagtccctcaccttcagcttttctcacacgaagaagtcatgtcatattgtttattggtaaataattaatatacatatgattcattaattagt

SEQ ID NO: 6475 - protein, 181 aa, Glycine max
  misc_feature (1)..(181): Ceres Seq. ID no. 14315298
MNVKGIMDGKIEAGNTNCIVKEDVNDDSISIGSVSEDSMNSVCSSSSSELAEDASSSSASYLSTSSSHSNGPLFELSELMSQLPIKRGLSMFYQGKAQSFSSLASVESIGDLPKKKERFYRKKMKSCKSFAGGLDSSHRISFAPKATISKKSSRATFVSVLTKRGSFLGGSRTSFSVQKNF

SEQ ID NO: 6476 - protein, 175 aa, Glycine max
  misc_feature (1)..(175): Ceres Seq. ID no. 14315299
MDGKIEAGNTNCIVKEDVNDDSISIGSVSEDSMNSVCSSSSSELAEDASSSSASYLSTSSSHSNGPLFELSELMSQLPIKRGLSMFYQGKAQSFSSLASVESIGDLPKKKERFYRKKMKSCKSFAGGLDSSHRISFAPKATISKKSSRATFVSVLTKRGSFLGGSRTSFSVQKNF

SEQ ID NO: 6477 - protein, 143 aa, Glycine max
  misc_feature (1)..(143): Ceres Seq. ID no. 14315300
MNSVCSSSSSELAEDASSSSASYLSTSSSHSNGPLFELSELMSQLPIKRGLSMFYQGKAQSFSSLASVESIGDLPKKKERFYRKKMKSCKSFAGGLDSSHRISFAPKATISKKSSRATFVSVLTKRGSFLGGSRTSFSVQKNF

SEQ ID NO: 6478 - DNA, 1585 bp, Glycine max
  misc_feature (1)..(1585): Ceres Seq. ID no. 14315301
ttttgagtgctatgttcaatttttatgaaacttatcaatattggaatctattttatttggtcatgattcttttggttattgttctgatccggaacttagtgtatgaggaatgaggatagctgcaattttttgctgttttttgtaacttttgattctgatgcaaatgctgcattctgtttccaaaagtaaacctgcgacttggctgtaaactttcaataagatgtagagaattgggtatttgtatcaatgaatgtgtatactgccccttaatattgattgtcatttgtcttggttagatactaagatgtacagaaatgttctaattgtactgtagtggagacttttccattgttaataacaacaatgaagccttatcccacaagatgagttcaactacatagatcgcacaatgacatttggcttggttaaagaccaaatcttcacagatagcaacattatattcgggtgctgatgcagtggctctaactcatttgacacagtactgtagccatatacaacactttacttctggataacaacctagcattagcaaaaatctgttgtgtgtgatccatgtcccgtatatcgacaagttttatgttaactgcctagagcctgatacaatcctcctcctttacttgggcttgggactggctatgaaactataggcggtgttactttttcattgttaatgtttcatataatttcaagctcatgaatttgaatgtttcttgaccctccaaatataatagttgatcacaagagaatactttgtctaatttgtaatttagtttatgtcattctgcactgttaaggttggttgctttagattttaatttttcattgtttactgatagccagaacatcatgttaatgaccctgaatccgatcctgttcttcttgatgcaatccctactttgaagttcaaccaagaggctttcagttcccttgaacacacacagtgtgtaatatgtttggcagattacagagaaagagaagtattgcgcatcatgcccaaatgtggccacacttttcatctttcttgcattgatatatggctgaggaaacaatccacctgtccagtatgccgtctgccattgaaaaactcttccgaaacgaaacatgtgagacctgtgacatttaccatgagccaatcccttgacgagtctcacacatcagacagaaacgatgatattgagagatatgttgaacctacacctactgcagccagtaactctttacaaccaacttcaggagaacaagaagcaaggcaatgatcttagagaactaaaggggttgttctgctcaaaaagagaagaatgtagaatttctgcttctatagaggaatgcttctaattatagattggattcaaattctttgtctgtaatatggccttcatattcacttggtggtgtaaatatgtttccttttgtagcatatgcgggccaaggttttggtggaatttcttgcataccgatttgaagttcttttgtctatggtatcgcttactctagcaagcacactgctcttgttaatgcttaacagattaaacaaatggttgattacatattttttttcttgtac

SEQ ID NO: 6479 - protein, 88 aa, Glycine max
  misc_feature (1)..(88): Ceres Seq. ID no. 14315302
MPKCGHTFHLSCIDIWLRKQSTCPVCRLPLKNSSETKHVRPVTFTMSQSLDESHTSDRNDDIERYVEPTPTAASNSLQPTSGEQEARQ

SEQ ID NO: 6480 - protein, 55 aa, Glycine max
  misc_feature (1)..(55): Ceres Seq. ID no. 14315303
MILRDMLNLHLLQPVTLYNQLQENKKQGNDLRELKGLFCSKREECRISASIEECF

SEQ ID NO: 6481 - protein, 50 aa, Glycine max
  misc_feature (1)..(50): Ceres Seq. ID no. 14315304
MLNLHLLQPVTLYNQLQENKKQGNDLRELKGLFCSKREECRISASIEECF

SEQ ID NO: 6482 - DNA, 1918 bp, Glycine max
  misc_feature (1)..(1918): Ceres Seq. ID no. 14315317
aaaatcttcattgcttcctcactcaccggcgcctactcatatcacagatcatagataaataataccaatacttcatagtattcacgaaccattctatttccattcggcagcaacaaaatcaccatccttcttctgcaccgcaatgctcttcctcttccctccgtcattagtttgttagttagattacccttttcccttccatgcttacgtcaccaccgctcaccattcactctctttttacccctaaaccattgaatcgatctaaatctctcccaaatcgcaaaccccttttgctcaattgagtcaattctctccctaagttcctctgtcggcgtctgggtgggtaaaagttgttgttttgtcttctgggttttggagcaaagacaaaagatgggtgagggagaacgtttccagcttgggactgtgggtgcgttgactctttctgtggtctcatctgtgtccattgtgatttgcaataaggcgctgatgagttcactgcatttcattttcgctacaactttgaccagctggcatctgcttgtcacgttttgttcccttcatgtggcgctcaaaatgagattctttgagcacaaaccttttgagcagaaagctgtaatgggattcgggattttaaatgggatctcaattggacttttaaatttgagcctggggttcaattccgttggcttctatcaaatgactaagctggcaatcattccttgtactgtattgttggagaccatttttcttgggaagagattcagtaagagaattcaatttgccctcagtatcctccttttgggtgtcgggattgctactgtcacagatttgcagctcaatgctctgggctctttcttatcttttcttgcagtgattacaacttgtgttgctcagattatgacaaatactatccagaagaagtacaaggtttcttccacccagcttctgtatcaatcatgtccatatcaagcagcaaccctgttaatcgctggtccatatctggataaacttttgaccaaccaaaatgtatttggtttcaagtatacgacacaagtgacggttttcataattctttcctgccttatctccatctctgtcaatttcagtacgttccttgttattggaaagacatctccagtcacctatcaggttcttggacacctgaagacatgccttgtattggcatttggttatatacttctccgagacccatttagctggagaaacatactgggtattttgatagccatgattgggatgattctatattcttactattgcactctcgagaatcagcaaaaaactgttgaagctgcatcacaatcatcccaggcaagagaagatgaatctgatcctctgatgaatgtggaaaatggaagtgcagttgtgagttctaatgtcggacaaagacaaatgtcccctgtatggagcaagagcaaagactagtatgtttaatgggctttgttttagcattgtcaagaacagttttatagtccctatagagggttaacacccgtaatccatgaggaattagaaagtggaagtgctgccaaacacatgtcctagtcatttttaatagctttagtctaatatttttatgaatcgtttgccgaccaacagtattagggaagggaacaagcacatggtcatgtcgtaattctattggccaacaaatatgtcttatagtaacatacatctcctggtgatgttttcatatcatgatacatttatgattttatatagatattcaaactttttcttggcttgaatagcatataaacacctactggtaattctttttctcccttattatctctatttgtattcctatactaatagtagtaatttattcaagtccatttttttattttagaaactgaacttattcgaagcatgaggaccacattatattgttttc

SEQ ID NO: 6483 - protein, 351 aa, Glycine max
  misc_feature (1)..(351): Ceres Seq. ID no. 14315318
MGEGERFQLGTVGALTLSVVSSVSIVICNKALMSSLHFIFATTLTSWHLLVTFCSLHVALKMRFFEHKPFEQKAVMGFGILNGISIGLLNLSLGFNSVGFYQMTKLAIIPCTVLLETIFLGKRFSKRIQFALSILLLGVGIATVTDLQLNALGSFLSFLAVITTCVAQIMTNTIQKKYKVSSTQLLYQSCPYQAATLLIAGPYLDKLLTNQNVFGFKYTTQVTVFIILSCLISISVNFSTFLVIGKTSPVTYQVLGHLKTCLVLAFGYILLRDPFSWRNILGILIAMIGMILYSYYCTLENQQKTVEAASQSSQAREDESDPLMNVENGSAVVSSNVGQRQMSPVWSKSKD

SEQ ID NO: 6484 - protein, 319 aa, Glycine max
  misc_feature (1)..(319): Ceres Seq. ID no. 14315319
MSSLHFIFATTLTSWHLLVTFCSLHVALKMRFFEHKPFEQKAVMGFGILNGISIGLLNLSLGFNSVGFYQMTKLAIIPCTVLLETIFLGKRFSKRIQFALSILLLGVGIATVTDLQLNALGSFLSFLAVITTCVAQIMTNTIQKKYKVSSTQLLYQSCPYQAATLLIAGPYLDKLLTNQNVFGFKYTTQVTVFIILSCLISISVNFSTFLVIGKTSPVTYQVLGHLKTCLVLAFGYILLRDPFSWRNILGILIAMIGMILYSYYCTLENQQKTVEAASQSSQAREDESDPLMNVENGSAVVSSNVGQRQMSPVWSKSKD

SEQ ID NO: 6485 - protein, 290 aa, Glycine max
  misc_feature (1)..(290): Ceres Seq. ID no. 14315320
MRFFEHKPFEQKAVMGFGILNGISIGLLNLSLGFNSVGFYQMTKLAIIPCTVLLETIFLGKRFSKRIQFALSILLLGVGIATVTDLQLNALGSFLSFLAVITTCVAQIMTNTIQKKYKVSSTQLLYQSCPYQAATLLIAGPYLDKLLTNQNVFGFKYTTQVTVFIILSCLISISVNFSTFLVIGKTSPVTYQVLGHLKTCLVLAFGYILLRDPFSWRNILGILIAMIGMILYSYYCTLENQQKTVEAASQSSQAREDESDPLMNVENGSAVVSSNVGQRQMSPVWSKSKD

SEQ ID NO: 6486 - protein, 249 aa, Glycine max
  misc_feature (1)..(249): Ceres Seq. ID no. 14315321
MTKLAIIPCTVLLETIFLGKRFSKRIQFALSILLLGVGIATVTDLQLNALGSFLSFLAVITTCVAQIMTNTIQKKYKVSSTQLLYQSCPYQAATLLIAGPYLDKLLTNQNVFGFKYTTQVTVFIILSCLISISVNFSTFLVIGKTSPVTYQVLGHLKTCLVLAFGYILLRDPFSWRNILGILIAMIGMILYSYYCTLENQQKTVEAASQSSQAREDESDPLMNVENGSAVVSSNVGQRQMSPVWSKSKD

SEQ ID NO: 6487 - DNA, 1292 bp, Glycine max
  misc_feature (1)..(1292): Ceres Seq. ID no. 14315330
ttcctaaaaggctgtccctgtccatgttgagcgcgtttgttcacgcgccttcaatttgttcttccaacaccctcagtcattgtgtgagtccgaagctcaacctctctcgctcttcaatggccgtatcctctattcgaatcgccgtcgtcggtgatgtgcatgattgctggaaccttgaacaagattcgaaagcacttgagctcttgcagccagatttggtgctgtttacaggtgattttggtgaagaaaatcttgaagtcattaagagtgttgtgaatcttgaatttgctaaagcagttatattgggaaaccacgatgcctggtttactaaacagttttctggaagcaaggagaaggataaagttcagcttcagctagaatgccttggtaaggagcacgtggcttatcaacgttcagacttccctcagataaaagtaagcgttgttggtggacgaccattttctattgggggtaaaccaatgtttcggaaaaagcttcttttggcaagatacggagtcaaagacatggatgagagtgctaagagaatccagaaagctgctcttggaacaccagaggaccattttcttatattacttgcacataatggacccacaggccttggttctgattcaaatgatatatgtggaaaggattgggaatttgagggtgatggtgatcatggtgacccagatctagcacaagcaatatccttgctaaaggagaacaatcagatatccattccattggttgtgttcggtcacatgcacaaagagctggcatatggcaatggctttaggaaaatgattgtggttggcgctgataacaccatatacttgaatggggcaattgttccaagggtcaaaaggttgggtggtgatgaagacaagaaaagcttagatgatgaaagtgcccttgcctcaccagaggccaaaggtacaagaagagcctttactttagttgagatttcggaaggaagagttgccaagattgcagaaagttgggtctcggttgtcgaagataggaccacattagaagaagagcacatactatttgagagcagctaggatcctcatcctccacatataggttcctgcttcagtcacatggattttaatgcgcatagataaatgcagccaggggtgaattatgtctcgatactcatgaatacatcgtatttaatgttagtaactactgtatagacttgataaatggtacatgctctgataccaattcccccttatctaggtggtgatttattgcttgtaccgctcctccattctatgtggcaattc

SEQ ID NO: 6488 - protein, 353 aa, Glycine max
  misc_feature (1)..(353): Ceres Seq. ID no. 14315331
PKRLSLSMLSAFVHAPSICSSNTLSHCVSPKLNLSRSSMAVSSIRIAVVGDVHDCWNLEQDSKALELLQPDLVLFTGDFGEENLEVIKSVVNLEFAKAVILGNHDAWFTKQFSGSKEKDKVQLQLECLGKEHVAYQRSDFPQIKVSVVGGRPFSIGGKPMFRKKLLLARYGVKDMDESAKRIQKAALGTPEDHFLILLAHNGPTGLGSDSNDICGKDWEFEGDGDHGDPDLAQAISLLKENNQISIPLVVFGHMHKELAYGNGFRKMIVVGADNTIYLNGAIVPRVKRLGGDEDKKSLDDESALASPEAKGTRRAFTLVEISEGRVAKIAESWVSVVEDRTTLEEEHILFESS

SEQ ID NO: 6489 - protein, 346 aa, Glycine max
  misc_feature (1)..(346): Ceres Seq. ID no. 14315332
MLSAFVHAPSICSSNTLSHCVSPKLNLSRSSMAVSSIRIAVVGDVHDCWNLEQDSKALELLQPDLVLFTGDFGEENLEVIKSVVNLEFAKAVILGNHDAWFTKQFSGSKEKDKVQLQLECLGKEHVAYQRSDFPQIKVSVVGGRPFSIGGKPMFRKKLLLARYGVKDMDESAKRIQKAALGTPEDHFLILLAHNGPTGLGSDSNDICGKDWEFEGDGDHGDPDLAQAISLLKENNQISIPLVVFGHMHKELAYGNGFRKMIVVGADNTIYLNGAIVPRVKRLGGDEDKKSLDDESALASPEAKGTRRAFTLVEISEGRVAKIAESWVSVVEDRTTLEEEHILFESS

SEQ ID NO: 6490 - protein, 315 aa, Glycine max
  misc_feature (1)..(315): Ceres Seq. ID no. 14315333
MAVSSIRIAVVGDVHDCWNLEQDSKALELLQPDLVLFTGDFGEENLEVIKSVVNLEFAKAVILGNHDAWFTKQFSGSKEKDKVQLQLECLGKEHVAYQRSDFPQIKVSVVGGRPFSIGGKPMFRKKLLLARYGVKDMDESAKRIQKAALGTPEDHFLILLAHNGPTGLGSDSNDICGKDWEFEGDGDHGDPDLAQAISLLKENNQISIPLVVFGHMHKELAYGNGFRKMIVVGADNTIYLNGAIVPRVKRLGGDEDKKSLDDESALASPEAKGTRRAFTLVEISEGRVAKIAESWVSVVEDRTTLEEEHILFESS

SEQ ID NO: 6491 - DNA, 1312 bp, Glycine max
  misc_feature (1)..(1312): Ceres Seq. ID no. 14315342
aaactacataatattttccataatgcatataatcatgcattggaaactgcaaaactgaaatatatagaatcccttagatattatggggcggcaaggttagaactgaatgccatcaatgaacatgatgattctgttacaagcagcttgaagaatgaggcacatacacagtttgctcatacttttctgcggtttggaatgcttttggcaagagaaaatactactgcaatttatgaaactggatcactggaaggtacatgggtaagtcacaccacgccccatgacagaaaagccaggaaagatttgagaaagcatgagatttcagctaacgaggccattagagaagcattatctgtgtatgagtcgctcggtgaactgcgcaaacaggaggctgcatatgcttacttccaattggcttgctatcagagagactgttgtttgagatttatgaattctggcaataagaaaagcattttgtctaaaggcgaaaatagtgctgtgcaacgagtaaagcagtatgcatctctggcagagaggaactggcaaaaggccctggacttctatggccccaaaactcatcctaatatgtatttgactattcttatggagagatcagctctttcattaagcctttcaagccatctacactccaatgtggtgctggaatcagctttggctcatatgcttgaaggacgccatgtatcagatacaaatgccgacactttcggtactagttatcccgaattacatgcaaaatattggagtcagttgcagatgcttttgaagaaaatgttggccacgatactttcatcgagtgcaaacaaatctccctgtcaaccatcttcaacatctagcagatttggagatggtggaaagatcagggaactctacaagatgtccctgaagggtactaatatgatccaattgtataacatgtacaacttgtggatatcatgatggaaaattcatccaactgcataccgtgtgcagtttttggatatcatgatgacagttttctcttgtttacatcatcaaatcaaagtaaagagaaaataggtaatgcaccgacattgtaaaatagttttatgtcatcatccatcataactcatcatgtataagtttgttttacactgttaggatatgaccattaaactccaaagtaaatgttttcttacttctttctaatttttgtctgatatctgttgttgggccaactgttcaagtaaaaagtacttaaatgtggttattcacctgtaatgaatttttgggccaactattcaagtaaaaagtacttataatgtggttattcacctgt

SEQ ID NO: 6492 - protein, 317 aa, Glycine max
  misc_feature (1)..(317): Ceres Seq. ID no. 14315343
KLHNIFHNAYNHALETAKLKYIESLRYYGAARLELNAINEHDDSVTSSLKNEAHTQFAHTFLRFGMLLARENTTAIYETGSLEGTWVSHTTPHDRKARKDLRKHEISANEAIREALSVYESLGELRKQEAAYAYFQLACYQRDCCLRFMNSGNKKSILSKGENSAVQRVKQYASLAERNWQKALDFYGPKTHPNMYLTILMERSALSLSLSSHLHSNVVLESALAHMLEGRHVSDTNADTFGTSYPELHAKYWSQLQMLLKKMLATILSSSANKSPCQPSSTSSRFGDGGKIRELYKMSLKGTNMIQLYNMYNLWIS

SEQ ID NO: 6493 - protein, 252 aa, Glycine max
  misc_feature (1)..(252): Ceres Seq. ID no. 14315344
MLLARENTTAIYETGSLEGTWVSHTTPHDRKARKDLRKHEISANEAIREALSVYESLGELRKQEAAYAYFQLACYQRDCCLRFMNSGNKKSILSKGENSAVQRVKQYASLAERNWQKALDFYGPKTHPNMYLTILMERSALSLSLSSHLHSNVVLESALAHMLEGRHVSDTNADTFGTSYPELHAKYWSQLQMLLKKMLATILSSSANKSPCQPSSTSSRFGDGGKIRELYKMSLKGTNMIQLYNMYNLWIS

SEQ ID NO: 6494 - protein, 169 aa, Glycine max
  misc_feature (1)..(169): Ceres Seq. ID no. 14315345
MNSGNKKSILSKGENSAVQRVKQYASLAERNWQKALDFYGPKTHPNMYLTILMERSALSLSLSSHLHSNVVLESALAHMLEGRHVSDTNADTFGTSYPELHAKYWSQLQMLLKKMLATILSSSANKSPCQPSSTSSRFGDGGKIRELYKMSLKGTNMIQLYNMYNLWIS

SEQ ID NO: 6495 - DNA, 1507 bp, Glycine max
  misc_feature (1)..(1507): Ceres Seq. ID no. 14315403
acaacgtggcctccttcttccacagcaaaatcccattttccaaaacccctctctctctctctgacacacactaccatggcggcactgaagcttctcctctcccaagctcgccgccattccctccccaaatgcgctttctctatgacctctcacagatccctctgtgcttcttcggaatcaaactcaaaccctccccgaagacccttcgaacccatccccatccaacccgtctcctaccccgtcaagcccaaacccgcaccacccgaacctcaaccttcacccgaacctcaatcacaatccctccccccttcctcgccggactcgcaacgcgcttggacgcgcgaggacatccgctacgtgaaggacgtgccgtcgatcgcgccggtggcgtacgcctcgcgcggcggcgtggcgcctctccccgatgacagagctcccgtggaggacgcggcagagagcgagaggaggatgatcgaggcggagaatgaaatgaggttgcgaatggccaaggccgtcgaagaggaaagaatgaaggtgccgtttccgctgctgattaagcccaagaagaacgagaagcctcctccgcttgatttgaacgaagccattcgccaagttaaggccaatgccaaggcaaagtttgatgaaactgttgaagcacatataagattgggtgttgattcaaagcgaacagaaatggcagttcgtggtactgtgattctgcctcatggtgctccaaaggctgtcagtgtggctgtttttgcagaaggggctgaggcagaggaagcgaaagctgcaggagctgatatagttggtggtaaagagcttattgaggagattgctagcggtaaaaataagctcaaagttgacaaatgcttctcaactcctggaatggcacctaatcttggaaagatagcacaatatcttagaaagcgaagactgatgccagataagaaactaggtactcttactagtgatattgctgggcagttgaaagagctaagacaaggccgtgtagagtttaaaatggaaagtaaatcaattttgcatgtgggacttggaaaggtaagctacaaagaagaggctttacgggagaatattagtgcatttatgaatgctgtattgcttgcaaagcctgctggcttaaaaaagacttccaaatatgctgggtatgtgttgtctgtccatataagcagcacgatgggcccaggattacctgtatctatacaatcaatatccaaagcagcagataactacaagaaaatgcatatggtttgaatcatgtggacgtggccaatgtgggcatttttctacatgaatccaagtttagatgaacatatgttgtcgtaggtttttgttcattaccattgattatgtaaactttgtttagtcatatatgtggcaataagtgaaaattttgacaattttttgtgagcttgttgaattttctggtcacctaatggtgtatcatgttcctcattgcaacacagaaaattatgccttagtttac

SEQ ID NO: 6496 - protein, 424 aa, Glycine max
  misc_feature (1)..(424): Ceres Seq. ID no. 14315404
TTWPPSSTAKSHFPKPLSLSLTHTTMAALKLLLSQARRHSLPKCAFSMTSHRSLCASSESNSNPPRRPFEPIPIQPVSYPVKPKPAPPEPQPSPEPQSQSLPPSSPDSQRAWTREDIRYVKDVPSIAPVAYASRGGVAPLPDDRAPVEDAAESERRMIEAENEMRLRMAKAVEEERMKVPFPLLIKPKKNEKPPPLDLNEAIRQVKANAKAKFDETVEAHIRLGVDSKRTEMAVRGTVILPHGAPKAVSVAVFAEGAEAEEAKAAGADIVGGKELIEEIASGKNKLKVDKCFSTPGMAPNLGKIAQYLRKRRLMPDKKLGTLTSDIAGQLKELRQGRVEFKMESKSILHVGLGKVSYKEEALRENISAFMNAVLLAKPAGLKKTSKYAGYVLSVHISSTMGPGLPVSIQSISKAADNYKKMHMV

SEQ ID NO: 6497 - protein, 399 aa, Glycine max
  misc_feature (1)..(399): Ceres Seq. ID no. 14315405
MAALKLLLSQARRHSLPKCAFSMTSHRSLCASSESNSNPPRRPFEPIPIQPVSYPVKPKPAPPEPQPSPEPQSQSLPPSSPDSQRAWTREDIRYVKDVPSIAPVAYASRGGVAPLPDDRAPVEDAAESERRMIEAENEMRLRMAKAVEEERMKVPFPLLIKPKKNEKPPPLDLNEAIRQVKANAKAKFDETVEAHIRLGVDSKRTEMAVRGTVILPHGAPKAVSVAVFAEGAEAEEAKAAGADIVGGKELIEEIASGKNKLKVDKCFSTPGMAPNLGKIAQYLRKRRLMPDKKLGTLTSDIAGQLKELRQGRVEFKMESKSILHVGLGKVSYKEEALRENISAFMNAVLLAKPAGLKKTSKYAGYVLSVHISSTMGPGLPVSIQSISKAADNYKKMHMV

SEQ ID NO: 6498 - protein, 377 aa, Glycine max
  misc_feature (1)..(377): Ceres Seq. ID no. 14315406
MTSHRSLCASSESNSNPPRRPFEPIPIQPVSYPVKPKPAPPEPQPSPEPQSQSLPPSSPDSQRAWTREDIRYVKDVPSIAPVAYASRGGVAPLPDDRAPVEDAAESERRMIEAENEMRLRMAKAVEEERMKVPFPLLIKPKKNEKPPPLDLNEAIRQVKANAKAKFDETVEAHIRLGVDSKRTEMAVRGTVILPHGAPKAVSVAVFAEGAEAEEAKAAGADIVGGKELIEEIASGKNKLKVDKCFSTPGMAPNLGKIAQYLRKRRLMPDKKLGTLTSDIAGQLKELRQGRVEFKMESKSILHVGLGKVSYKEEALRENISAFMNAVLLAKPAGLKKTSKYAGYVLSVHISSTMGPGLPVSIQSISKAADNYKKMHMV

SEQ ID NO: 6499 - DNA, 1138 bp, Glycine max
  misc_feature (1)..(1138): Ceres Seq. ID no. 14315410
actggaatatttttcacgtttgatttgaccattaaattggagataggatttttgtgcgggccaagaaagatacattcatcgttcaacaatcttcaaacaaacaaaaaataaagtgtcttagaaatgacacgatccttggcaatggcttcttcatcaatgttatgtccgaagctggggagttgtgcagtgtcacatacaaagttccaagcttttcatctctcttcaatgttctctccactgggtcgaggccttgtctcaccttggagtggtttaaagcatctgggtatctcagctaaagcaaagcctcttattcacatagatagaaagggtgggtgtaagggtaaggtggtttatgcttctctctttggggttggagctcctgaggctttggtaattggggtcgttgctttgttggtttttggccctaaaggtcttgctgaggttgctagaaatctgggaaaaacattgcgtacatttcaacccaccattaaagagcttcaggatgtttcaagggaatttaagagtactcttgaacgggagattggtcttgatgacaatttaagtccaacccagaacacatacaattccaacatacgcaataccacaccaacttcatcatccacttccactgttgaccctaatggcacgccagatcctactaaagcatacagctctgaggagtatcttaagattacagaggagcagctgaaggcatctgctgcacaacagcaggggcaaacaccttccaaggaaggtgacaatgagcctcaaatccagccttctggttagtcttttttgtggaacataggcactttttttttttttctccctctttccaccctctttgttcttcacctttctttgatatgtcaacagctgaggaaacagctactactgtacctccacctcagaagccagaaagtgagacgtaaactctgggttcataagcatagggagttaaaataatttgtccaattatcgcttcaatgcccggaagtgggcagtactattggcacaagagatgagaagggtcaggcaattttgttaccagctagtcattagaatcatgtaaaatgtaaagaacaaaaccattaacgattagtatgtttccaaattaattgtagttatatttgtcatc

SEQ ID NO: 6500 - protein, 221 aa, Glycine max
  misc_feature (1)..(221): Ceres Seq. ID no. 14315411
MTRSLAMASSSMLCPKLGSCAVSHTKFQAFHLSSMFSPLGRGLVSPWSGLKHLGISAKAKPLIHIDRKGGCKGKVVYASLFGVGAPEALVIGVVALLVFGPKGLAEVARNLGKTLRTFQPTIKELQDVSREFKSTLEREIGLDDNLSPTQNTYNSNIRNTTPTSSSTSTVDPNGTPDPTKAYSSEEYLKITEEQLKASAAQQQGQTPSKEGDNEPQIQPSG

SEQ ID NO: 6501 - protein, 215 aa, Glycine max
  misc_feature (1)..(215): Ceres Seq. ID no. 14315412
MASSSMLCPKLGSCAVSHTKFQAFHLSSMFSPLGRGLVSPWSGLKHLGISAKAKPLIHIDRKGGCKGKVVYASLFGVGAPEALVIGVVALLVFGPKGLAEVARNLGKTLRTFQPTIKELQDVSREFKSTLEREIGLDDNLSPTQNTYNSNIRNTTPTSSSTSTVDPNGTPDPTKAYSSEEYLKITEEQLKASAAQQQGQTPSKEGDNEPQIQPSG

SEQ ID NO: 6502 - protein, 210 aa, Glycine max
  misc_feature (1)..(210): Ceres Seq. ID no. 14315413
MLCPKLGSCAVSHTKFQAFHLSSMFSPLGRGLVSPWSGLKHLGISAKAKPLIHIDRKGGCKGKVVYASLFGVGAPEALVIGVVALLVFGPKGLAEVARNLGKTLRTFQPTIKELQDVSREFKSTLEREIGLDDNLSPTQNTYNSNIRNTTPTSSSTSTVDPNGTPDPTKAYSSEEYLKITEEQLKASAAQQQGQTPSKEGDNEPQIQPSG

SEQ ID NO: 6503 - DNA, 1636 bp, Glycine max
  misc_feature (1)..(1636): Ceres Seq. ID no. 14315418
agagtgtaaagtgtaaaacgttggttttctctgagaatggcaatgcaggcaggggaactctgtcagcaccaaagtccacattgccctctcattttcttcaacccgattcccgattttggttccttcagcggagggttgtttctcgagcccaaaatccccgattccttcgttcgttccatttcgctgaagatccactccactcccttttcagaatccaatcctcgccgccaccggagaagggttccggcagcgtgctttctatcggtgagcttgccgagtgcaaatctcgttaccgaacccaaactgcaaaatggcgaacacgtgtcagaccaggtgacaacctcaaacggtgtcgttctgcaaagaaaggttagggtacgaggaggcaatgccgtcaacaccaccaaacatctctgggccggtgctgtagccgctatggtctctagaacttgtgtggctccacttgaaaggcttaagttggagtacatagtccgtggtgagaagaggagcatattcgagcttattagcaaaattgcttcttctcaagggttgagaggattttggaaaggcaaccttgtgaatattctgcggacagctccattcaaagcggttaatttttgtgcttacgatacttatagaaagcagctgcttaggttttctgggaatgaggaaactaccaattttgagaggtttattgctggtgctgctgctgggattactgctaccattatctgcctccctcttgacactatccgaaccaagttggtggcacctggtggagaagctttgggcggtgtaattggtgctttcagatacatgattcgaactgaaggattcttttctctttacaagggtttagtgccatcaattataaaaggaatgaagagaatccagaatatgcataaacagggtcaggaactgagtgcctttgaccaacttgagttgggaccggtaaggacattgttgaatggggctattgctggtgcttgtgcagaagctgctacatacccatttgaagtggtgagaaggcaacttcaattgcaagtccaggctacaaaattaagttcttttgcaacatttgccaaaatagttgaacagggaggcattccagctctctatgcaggacttattcccagcttattacaggtgcttccttcagcttccataagtttctttgtctatgagttcatgaagattgttctgaaagtggagtaggcaatgaacaaattcccaggtatatactgctaagaagctgcaccatgatttacgggcaagctgctaaaatagttacagaatagtaacattcaattttaattggcaatcatatttgatgtctgcctttgagggtgaaaggataattcaggtctgctatcccgtacaactgatcacagtatcaacagaatttttggattgactctacactcaatatacccaggcttcaagtctgcaaagtgaaaataaatttattttgttactcccagatcttgaatcctattctcattaggtttacacaattttgttagttttttttttccatctggcagtaagtcttgatcattatcatggggcgtacaagcaaagtccaattactttataagttataacctgaaatgtagcttataaattattcttgtgc

SEQ ID NO: 6504 - protein, 392 aa, Glycine max
  misc_feature (1)..(392): Ceres Seq. ID no. 14315419
MAMQAGELCQHQSPHCPLIFFNPIPDFGSFSGGLFLEPKIPDSFVRSISLKIHSTPFSESNPRRHRRRVPAACFLSVSLPSANLVTEPKLQNGEHVSDQVTTSNGVVLQRKVRVRGGNAVNTTKHLWAGAVAAMVSRTCVAPLERLKLEYIVRGEKRSIFELISKIASSQGLRGFWKGNLVNILRTAPFKAVNFCAYDTYRKQLLRFSGNEETTNFERFIAGAAAGITATIICLPLDTIRTKLVAPGGEALGGVIGAFRYMIRTEGFFSLYKGLVPSIIKGMKRIQNMHKQGQELSAFDQLELGPVRTLLNGAIAGACAEAATYPFEVVRRQLQLQVQATKLSSFATFAKIVEQGGIPALYAGLIPSLLQVLPSASISFFVYEFMKIVLKVE

SEQ ID NO: 6505 - protein, 390 aa, Glycine max
  misc_feature (1)..(390): Ceres Seq. ID no. 14315420
MQAGELCQHQSPHCPLIFFNPIPDFGSFSGGLFLEPKIPDSFVRSISLKIHSTPFSESNPRRHRRRVPAACFLSVSLPSANLVTEPKLQNGEHVSDQVTTSNGVVLQRKVRVRGGNAVNTTKHLWAGAVAAMVSRTCVAPLERLKLEYIVRGEKRSIFELISKIASSQGLRGFWKGNLVNILRTAPFKAVNFCAYDTYRKQLLRFSGNEETTNFERFIAGAAAGITATIICLPLDTIRTKLVAPGGEALGGVIGAFRYMIRTEGFFSLYKGLVPSIIKGMKRIQNMHKQGQELSAFDQLELGPVRTLLNGAIAGACAEAATYPFEVVRRQLQLQVQATKLSSFATFAKIVEQGGIPALYAGLIPSLLQVLPSASISFFVYEFMKIVLKVE

SEQ ID NO: 6506 - protein, 259 aa, Glycine max
  misc_feature (1)..(259): Ceres Seq. ID no. 14315421
MVSRTCVAPLERLKLEYIVRGEKRSIFELISKIASSQGLRGFWKGNLVNILRTAPFKAVNFCAYDTYRKQLLRFSGNEETTNFERFIAGAAAGITATIICLPLDTIRTKLVAPGGEALGGVIGAFRYMIRTEGFFSLYKGLVPSIIKGMKRIQNMHKQGQELSAFDQLELGPVRTLLNGAIAGACAEAATYPFEVVRRQLQLQVQATKLSSFATFAKIVEQGGIPALYAGLIPSLLQVLPSASISFFVYEFMKIVLKVE

SEQ ID NO: 6507 - DNA, 1440 bp, Glycine max
  misc_feature (1)..(1440): Ceres Seq. ID no. 14315426
acaccaaatcctcaccttcacaacttcatttctcccctgtaattgttacctcccctgcatcaccccactctgtttttgcaccttcttcctctgtttctttggccttcccctgtttcccactaatgattacatcaaagagggtccacagattcttcaagttccgtgccttagtgctttctcttatctattccaaccattctttgtgccttgtgaatgcccaaaactgacccttccccaaactcttatctgccacaaatcccctgctaataccctgaatcaaagaggggtactttgacacgaacctgtcactttccttgttaaatagtatctgcttattctcccatccaatcacaccgtgcaccactttctctccctcccctctgaaactttcgttttcaaatagaacaagaaacgagaaaaaaaaaatcaaatggttgctaaggactataaccacttatcatgtacggttgtgagcatgggcaaaatgatgcagagcattgactactctagacttttctggctattttttggggtcttctctcacgtaaatcatgaaggaaagcctaggatttaggataatataccataaagaaattttgttctgctttcattttatccctttttttcttctctgcacaattaagttgcagtgtgaaagacatacataagaggtagttgttaagttggtatatatagataagaatcaaatatgggagaaaattgttatgtggaaatcgacccaactggtcgatatggcagggtaagttctaatccctctgttttcattccattttttgtgtgctatacttttttgccatttttgtgcacatggttagtattgtaaaatttaagccaagtactaattagtttattagactgattggtaatctcctaaaattgtattaagttgagaagaaatactgtgtttctaaaactgtatgtgtaatggatggattgtaaatgattaaggtgccctgcttgtgattgattattagtttggagatattcttggaaaaggggcaatgaagacagtgtacaaagccattgatgaggtgcttggaattgaggtagcatggaaccaggtcagactcaatgaggtgcttcgcacgccggacgatttgcagcggctttactcagaggttcatctcctcagtaccctcaagcatcaatccatcttaagattctacacttcttggattgatattgatagcagggccttcaactttatcacagaatttttcacatctgggtcactgagagagtaactaacttccattccaactataacttaggcaattactccagtcccattatgtagttccttacaaaagttaggcaacttaggtgtaagtcatcacaaagattttgtttgatacaagtgaagcgattccaaattttaacaatttatatttaatggacacatataagggatcataaaag

SEQ ID NO: 6508 - protein, 97 aa, Glycine max
  misc_feature (1)..(97): Ceres Seq. ID no. 14315427
HQILTFTTSFLPCNCYLPCITPLCFCTFFLCFFGLPLFPTNDYIKEGPQILQVPCLSAFSYLFQPFFVPCECPKLTLPQTLICHKSPANTLNQRGVL

SEQ ID NO: 6509 - protein, 80 aa, Glycine max
  misc_feature (1)..(80): Ceres Seq. ID no. 14315428
MKTVYKAIDEVLGIEVAWNQVRLNEVLRTPDDLQRLYSEVHLLSTLKHQSILRFYTSWIDIDSRAFNFITEFFTSGSLRE

SEQ ID NO: 6510 - protein, 74 aa, Glycine max
  misc_feature (1)..(74): Ceres Seq. ID no. 14315429
TKSSPSQLHFSPVIVTSPASPHSVFAPSSSVSLAFPCFPLMITSKRVHRFFKFRALVLSLIYSNHSLCLVNAQN

SEQ ID NO: 6511 - DNA, 1412 bp, Glycine max
  misc_feature (1)..(1412): Ceres Seq. ID no. 14315430
atcccttcttttcaaaaccctaattcctcttttctctcttccaatctcatttctcaagatcgctttcgctgcttcctcaggaattatgtcttttgtgcggaattatcaagcagaagatcgtagtttacatagtggttactggtccacctttgatggaaacaactatggtaacaacaataggaaaagaagcaggaacaattattataacaggaattgtaacatttacaatgataaccggacaaaatttggggaccattttaatttttacaatgctgatcatgctaattatgctagatatgatgctgttcgatcatctttgaaaaggagaaaatattcagcccctgtttggcaagaaagccagcagtactatgttccacccatggtccatgacaatatcccttcagcctataatttccaaggtcctccgacaagatctgatggtgatgcctctacatcagctagctgcaagcgtgattgctctatttttgaagatgataaacctgtcttcatgtcaagggacgaaattgatagacactctccatcaagaaaagatggtattgatgtacatcatgagacacacttgcggtactcctattgtgccttccttcagaatcttggaatgcgtcttgagctgcctcaaaacatcattgggacagctatggttctgtgccaccgtttctttgttcgacgatcacatgcttgccatgatagatttttgattgctactgctgctctttttcttactgcaaagtcagaggaagctccacgtcatttgaataacgtattgagaacatccagtgaaattttatataaacaagattttgctttgttatcctaccggtttcctgttgattggtttgaacagtatcgggagcgggtgcttgaggctgaacaactgatacttactactctaaattttgaactcaatgtgcaacatccatatgtacctcttacatctgttcttaacaagttgggtctatcaaagactgttttggtgaatctggcattaaacttggtcagtgaagggcttcggagttctctgtggcttcaatttaaaccccatcatattgctgctggagctgcatatcttgctgccaagtttctgaacatggatctcgcagcttatcagaacatctggcaagagttccagacaacaccatccatacttcaagatgtctcgcagcaattaatggagctcttttaaaagtatggaagaactggattacagcgttcttcttagtagagtaggttttgagtatataattcaaaatgttatttactttggagggagacattaggaactatgacatatttggtgagttacaggattagtggttgtgtgacctacggatttttaagttttaccaacttctctgaatcttctgctaacatgtcgagcatgccttgcgttc

SEQ ID NO: 6512 - protein, 400 aa, Glycine max
  misc_feature (1)..(400): Ceres Seq. ID no. 14315431
SLLFKTLIPLFSLPISFLKIAFAASSGIMSFVRNYQAEDRSLHSGYWSTFDGNNYGNNNRKRSRNNYYNRNCNIYNDNRTKFGDHFNFYNADHANYARYDAVRSSLKRRKYSAPVWQESQQYYVPPMVHDNIPSAYNFQGPPTRSDGDASTSASCKRDCSIFEDDKPVFMSRDEIDRHSPSRKDGIDVHHETHLRYSYCAFLQNLGMRLELPQNIIGTAMVLCHRFFVRRSHACHDRFLIATAALFLTAKSEEAPRHLNNVLRTSSEILYKQDFALLSYRFPVDWFEQYRERVLEAEQLILTTLNFELNVQHPYVPLTSVLNKLGLSKTVLVNLALNLVSEGLRSSLWLQFKPHHIAAGAAYLAAKFLNMDLAAYQNIWQEFQTTPSILQDVSQQLMELF

SEQ ID NO: 6513 - protein, 372 aa, Glycine max
  misc_feature (1)..(372): Ceres Seq. ID no. 14315432
MSFVRNYQAEDRSLHSGYWSTFDGNNYGNNNRKRSRNNYYNRNCNIYNDNRTKFGDHFNFYNADHANYARYDAVRSSLKRRKYSAPVWQESQQYYVPPMVHDNIPSAYNFQGPPTRSDGDASTSASCKRDCSIFEDDKPVFMSRDEIDRHSPSRKDGIDVHHETHLRYSYCAFLQNLGMRLELPQNIIGTAMVLCHRFFVRRSHACHDRFLIATAALFLTAKSEEAPRHLNNVLRTSSEILYKQDFALLSYRFPVDWFEQYRERVLEAEQLILTTLNFELNVQHPYVPLTSVLNKLGLSKTVLVNLALNLVSEGLRSSLWLQFKPHHIAAGAAYLAAKFLNMDLAAYQNIWQEFQTTPSILQDVSQQLMELF

SEQ ID NO: 6514 - protein, 274 aa, Glycine max
  misc_feature (1)..(274): Ceres Seq. ID no. 14315433
MVHDNIPSAYNFQGPPTRSDGDASTSASCKRDCSIFEDDKPVFMSRDEIDRHSPSRKDGIDVHHETHLRYSYCAFLQNLGMRLELPQNIIGTAMVLCHRFFVRRSHACHDRFLIATAALFLTAKSEEAPRHLNNVLRTSSEILYKQDFALLSYRFPVDWFEQYRERVLEAEQLILTTLNFELNVQHPYVPLTSVLNKLGLSKTVLVNLALNLVSEGLRSSLWLQFKPHHIAAGAAYLAAKFLNMDLAAYQNIWQEFQTTPSILQDVSQQLMELF

SEQ ID NO: 6515 - DNA, 839 bp, Glycine max
  misc_feature (1)..(839): Ceres Seq. ID no. 14315444
atcattgagaagcttggatgatgactgggatgatgaaaaggcaagtcccatgactcccatccacatgggggctgctaacagtaataacagcattgaagaggttgaatctgatgacaatgtcgaagcaatggaatctgatgacaatgttcaagcaatggagtctgatgacaaagtccaagcaatggaatccgatgacaatgtccaagcagcagaatctgatgacaatggccaagctgtggaatatgatcaaggaaactgggaaataggttttaatggtgcccccagcagatggagtagggatttggtaggaggaattagcgatgaggatgaggatgaggatgcggaagcttctgaagatgacaatgacaatggcattggcattgaaaacaatgaggaggaggattcagaggcagatgctatgagtgaggagggttcagatggtactgcaaacagaattgtaaatgaagaaagctcagactcggatgtctctgaagattcttctgattagaacattgcttttttaagggaaaggatcctcgagtaacatttattttctcaaaaacttaataatggaagaaatggagagaaaaggaaacagaggatcttttctcgttttttaaggctgcgttacattttttccccctatactgcagccagctttacaacgtacctgagctccaaagtcatggcaaggcttcatagttcatactagttttatggttgagtagattaatagtgtataataggatatataaacccgcccattgcgtggattcttaaaaaaaaaataaaaaaaattaatatcattatacaatcaataattcaagaaaacaattcac

SEQ ID NO: 6516 - protein, 168 aa, Glycine max
  misc_feature (1)..(168): Ceres Seq. ID no. 14315445
SLRSLDDDWDDEKASPMTPIHMGAANSNNSIEEVESDDNVEAMESDDNVQAMESDDKVQAMESDDNVQAAESDDNGQAVEYDQGNWEIGFNGAPSRWSRDLVGGISDEDEDEDAEASEDDNDNGIGIENNEEEDSEADAMSEEGSDGTANRIVNEESSDSDVSEDSSD

SEQ ID NO: 6517 - protein, 152 aa, Glycine max
  misc_feature (1)..(152): Ceres Seq. ID no. 14315446
MTPIHMGAANSNNSIEEVESDDNVEAMESDDNVQAMESDDKVQAMESDDNVQAAESDDNGQAVEYDQGNWEIGFNGAPSRWSRDLVGGISDEDEDEDAEASEDDNDNGIGIENNEEEDSEADAMSEEGSDGTANRIVNEESSDSDVSEDSSD

SEQ ID NO: 6518 - protein, 147 aa, Glycine max
  misc_feature (1)..(147): Ceres Seq. ID no. 14315447
MGAANSNNSIEEVESDDNVEAMESDDNVQAMESDDKVQAMESDDNVQAAESDDNGQAVEYDQGNWEIGFNGAPSRWSRDLVGGISDEDEDEDAEASEDDNDNGIGIENNEEEDSEADAMSEEGSDGTANRIVNEESSDSDVSEDSSD

SEQ ID NO: 6519 - DNA, 1225 bp, Glycine max
  misc_feature (1)..(1225): Ceres Seq. ID no. 14315477
aaaaaaacgtgtcatgtgcctctctccttttcccccaaaatctgcttcagttcacgttcacgcttcgctacctgcgcctattcattgtctcttctcttcccctgctcaacgtttttcttctcccttcccccacccacctccactcttttcatttctattctcttcccaaacagaacgaccatcggaacaaacggcattttgtcaaacagttacgagactcagcattattcataggtgatagtactggcagtgattaagattgcaattgcacaatcagaatattttttatatacaatgttttcaaggtgactgacaacaattaagattgcaattgcaccaaggggacaaaacaaaacaatgagcagcgttttgcaagggaaacgcaagcgccaggacttggcttcaaggctctcggcctcaatgaataatgaggagggtcgtgtctacaacatcattcgcgggaggaaggagatggggatatggcaaggggacatcaaacgagaagccaacatccccgatagtttgttgaagaaatccatcaagatgcttatcaccaagaaactcgtcaaggaggttgtgaacgtgcagaacaggtccaagaagttgttgatggcatcggatttcgaaccctccaatgagatcagtggtggagagtggtacaccgaaggcaaactcgacacagaatttattgacaagctgtctgaggcttgctttagtagtattcgtcgcctgaaggtcgcgacttgtgagggcatccttgagtggattaggaaggcgggtggtggagtcagtaaagggcagatggagcagattttgaagaagttggttatggagaataaggtgcaggaagtgactagtgatggctctggggattttgagtctgttcctgttggtgaagtttgttatagattggtgaagaaggctgctggtgttggtgccatggcttctattccttgtggggtttgtcctaggattaattcttgtacacccgatggtgttatctcccctacaacttgtcaatattatcagaaatggttggacttctaaatgtgtcccattcaaatccaagtccttttttagtttgggattttacataccttttagttttgaattccatcttttttatttttttatttttcatatggcactttctagagtctttattgattttctgttcaatgtgatacttaaaagaattaattgattttccttttgcatttaaggg

SEQ ID NO: 6520 - protein, 229 aa, Glycine max
  misc_feature (1)..(229): Ceres Seq. ID no. 14315478
MSSVLQGKRKRQDLASRLSASMNNEEGRVYNIIRGRKEMGIWQGDIKREANIPDSLLKKSIKMLITKKLVKEVVNVQNRSKKLLMASDFEPSNEISGGEWYTEGKLDTEFIDKLSEACFSSIRRLKVATCEGILEWIRKAGGGVSKGQMEQILKKLVMENKVQEVTSDGSGDFESVPVGEVCYRLVKKAAGVGAMASIPCGVCPRINSCTPDGVISPTTCQYYQKWLDF

SEQ ID NO: 6521 - protein, 208 aa, Glycine max
  misc_feature (1)..(208): Ceres Seq. ID no. 14315479
MNNEEGRVYNIIRGRKEMGIWQGDIKREANIPDSLLKKSIKMLITKKLVKEVVNVQNRSKKLLMASDFEPSNEISGGEWYTEGKLDTEFIDKLSEACFSSIRRLKVATCEGILEWIRKAGGGVSKGQMEQILKKLVMENKVQEVTSDGSGDFESVPVGEVCYRLVKKAAGVGAMASIPCGVCPRINSCTPDGVISPTTCQYYQKWLDF

SEQ ID NO: 6522 - protein, 191 aa, Glycine max
  misc_feature (1)..(191): Ceres Seq. ID no. 14315480
MGIWQGDIKREANIPDSLLKKSIKMLITKKLVKEVVNVQNRSKKLLMASDFEPSNEISGGEWYTEGKLDTEFIDKLSEACFSSIRRLKVATCEGILEWIRKAGGGVSKGQMEQILKKLVMENKVQEVTSDGSGDFESVPVGEVCYRLVKKAAGVGAMASIPCGVCPRINSCTPDGVISPTTCQYYQKWLDF

SEQ ID NO: 6523 - DNA, 1419 bp, Glycine max
  misc_feature (1)..(1419): Ceres Seq. ID no. 14315481
gaggtacccctactactacttagagaaagtgaaagtgaaagtgaagtgcaacactgcagatgcagttgcaggggaatcagttaaaccgtatttaattttcacaacctccaactccaccaacttacccaatattctttactttcttcctccgtcttcttccctttcaaaccctagaaacagcaaaatcccccttttgatgcaaatgggatcactccaccaactctagagccacacccttcaagatttagctcatgcccacttcaattatggctccattttccacttccccccacttcacagccttcaccttcctcatcttgttcctcaaaacacaagcttttgatccactctctttcttttccttcacggattttgagaaagatccaaattttaagtcaagtgtggggctttatggcaatgcaaaagttgtcaataatggttctgaggttcttctttctgggaatggtgggagagtcatatacaagaagcccgtcaagcttgttcatggtggagcaagggaattggtctcattttcaacttactttgggttttcaatgtccttggatagtgagaagagtggcttggcttttgttatggttcctagtggtgttgaaggtgaggtttttggtaatagttcatatgggctttcttttggattgaaggaaagggaatttaaggttgtcggtgttcagtttagtgcttatggtaggaatgggggttctggtagttgtattgtgtccattaatgttggtagttctgttcctgttaaaacaatcaatgcctcatctgtcattatgggtctaaaaagtgaggggaaattgcatgcttggattgattatgaggcgagttcaaagcgcttagaagttaggttgaatcaatatggtcaatcaaggccagttgatccattgctttggcattcaatggacttatcaaatgtttggggtactgaagagatgtttgcaggctttagcacagtgaaagagaataatacttctcaaacatgctttctctattcatggagctttattgtgaggcattttccacattggatgcattctgagcctctgaatccaaaggtccttgctaagaagactgaaactccagcagtgaaatccagaagtgattgccttttgagggttcttgctgcaatgatatttggtgctggatgtggagcattgacagcattcattgtgctttatttgtggaccatctttggtaataaacgaccggtggtgccggaggagtatgctatgcagcctgtagattttgagtacaagaaagtgagcattgttgtagataaaacaaccatcatagatgctaaggagtagatctacagttggatgcttgcattgtaaatcagtgtttcttgtattcaggttttgctttgttgtagtttgataaagaactgttttatttacc

SEQ ID NO: 6524 - protein, 358 aa, Glycine max
  misc_feature (1)..(358): Ceres Seq. ID no. 14315482
MPTSIMAPFSTSPHFTAFTFLILFLKTQAFDPLSFFSFTDFEKDPNFKSSVGLYGNAKVVNNGSEVLLSGNGGRVIYKKPVKLVHGGARELVSFSTYFGFSMSLDSEKSGLAFVMVPSGVEGEVFGNSSYGLSFGLKEREFKVVGVQFSAYGRNGGSGSCIVSINVGSSVPVKTINASSVIMGLKSEGKLHAWIDYEASSKRLEVRLNQYGQSRPVDPLLWHSMDLSNVWGTEEMFAGFSTVKENNTSQTCFLYSWSFIVRHFPHWMHSEPLNPKVLAKKTETPAVKSRSDCLLRVLAAMIFGAGCGALTAFIVLYLWTIFGNKRPVVPEEYAMQPVDFEYKKVSIVVDKTTIIDAKE

SEQ ID NO: 6525 - protein, 353 aa, Glycine max
  misc_feature (1)..(353): Ceres Seq. ID no. 14315483
MAPFSTSPHFTAFTFLILFLKTQAFDPLSFFSFTDFEKDPNFKSSVGLYGNAKVVNNGSEVLLSGNGGRVIYKKPVKLVHGGARELVSFSTYFGFSMSLDSEKSGLAFVMVPSGVEGEVFGNSSYGLSFGLKEREFKVVGVQFSAYGRNGGSGSCIVSINVGSSVPVKTINASSVIMGLKSEGKLHAWIDYEASSKRLEVRLNQYGQSRPVDPLLWHSMDLSNVWGTEEMFAGFSTVKENNTSQTCFLYSWSFIVRHFPHWMHSEPLNPKVLAKKTETPAVKSRSDCLLRVLAAMIFGAGCGALTAFIVLYLWTIFGNKRPVVPEEYAMQPVDFEYKKVSIVVDKTTIIDAKE

SEQ ID NO: 6526 - protein, 257 aa, Glycine max
  misc_feature (1)..(257): Ceres Seq. ID no. 14315484
MSLDSEKSGLAFVMVPSGVEGEVFGNSSYGLSFGLKEREFKVVGVQFSAYGRNGGSGSCIVSINVGSSVPVKTINASSVIMGLKSEGKLHAWIDYEASSKRLEVRLNQYGQSRPVDPLLWHSMDLSNVWGTEEMFAGFSTVKENNTSQTCFLYSWSFIVRHFPHWMHSEPLNPKVLAKKTETPAVKSRSDCLLRVLAAMIFGAGCGALTAFIVLYLWTIFGNKRPVVPEEYAMQPVDFEYKKVSIVVDKTTIIDAKE

SEQ ID NO: 6527 - DNA, 1485 bp, Glycine max
  misc_feature (1)..(1485): Ceres Seq. ID no. 14315491
gagagagagagagagaacttcactcactcactcatgggctgcgtctcctcaaaacacatcaagaaagacctcaagcaagaagaagaagtcactgtcaccaatggcggcggttacgtgaaccacgtggtatccctgacttcctccacctatggagcactaatgctggacaaggagaaggagcaacttcaacttcaacccaccgtcgaagaagaatccaaaacatcccctcctcggattcgcgaagaacccgaagtcatcaacgcttgggaactcatggagggtctcgaagagggagtgcccatttcaaataaccccatgaaaagccccaagtccacacctttccttcgcggattcatctccaccgacccaaaacccaaaattacccccttcaaattccttaaccaattcgggtcccccaagagtctcaggaagttcacagggaaagagaacaaagttcaagttcaaccacccaatgctggtgttagacgcttggactacaatttcagcccaaagggtattctcaaaccctccaatttttgttctcctctaaaagggtctccgattcgtgctcgaaggaacagtttcgggaccgacattaagcgaaggagtcctagtcctctgttcgatccagagcttctcgcctcttacgaaaaggaactctccgaagaggaagaacagatcaagagaatggtgtgggccacccccaagacccgaagagtcagaaaacctttggattcacaaactttcattaagacgtttgaggaaaaattgccccctggaggagaaaactgcgttgtcatttacaccaccacgttacgggggatcagaaaaacgtttgaggagtgcaacaaggtaaggtccattgtcgagtcctattgcgtgcacgtggtggagcgtgacgtgtcaatggattcggggtttaaggaggagttgcggaagctgatggggaccaaacaagttaaggttccggttgtgttcgtgaaaggaaggttggttgggggtgctgaggaaattgtgaagttggaagaagagggaaaattgggtgttctctttgaagggattccccacaaggctttgggggagtgtgaagggtgtggtggtgtgaggtttgtaatgtgcgtggagtgtaatggaagttgtaaggttttggatcatgagaatcacaagaagactctgaggtgtggccagtgtaatgagaatggattgattcagtgtcctatgtgtcgttgaggttgctgaaaatggagtgttggtttgggttttgggatggtttgtttctgttattgatttgtaggaagagagggacagaacaggcatgatgtgcatgtggtccgttgttaatttgtcatgttccttagtgtagggttctaaagcgtgttttagttccctttttgttgtttgattctgtagtttgtcatgtattttgggacactggttgttccttctctagtctaatttaatttgcactatcactagcttcttttt

SEQ ID NO: 6528 - protein, 409 aa, Glycine max
  misc_feature (1)..(409): Ceres Seq. ID no. 14315492
ERERENFTHSLMGCVSSKHIKKDLKQEEEVTVTNGGGYVNHVVSLTSSTYGALMLDKEKEQLQLQPTVEEESKTSPPRIREEPEVINAWELMEGLEEGVPISNNPMKSPKSTPFLRGFISTDPKPKITPFKFLNQFGSPKSLRKFTGKENKVQVQPPNAGVRRLDYNFSPKGILKPSNFCSPLKGSPIRARRNSFGTDIKRRSPSPLFDPELLASYEKELSEEEEQIKRMVWATPKTRRVRKPLDSQTFIKTFEEKLPPGGENCVVIYTTTLRGIRKTFEECNKVRSIVESYCVHVVERDVSMDSGFKEELRKLMGTKQVKVPVVFVKGRLVGGAEEIVKLEEEGKLGVLFEGIPHKALGECEGCGGVRFVMCVECNGSCKVLDHENHKKTLRCGQCNENGLIQCPMCR

SEQ ID NO: 6529 - protein, 398 aa, Glycine max
  misc_feature (1)..(398): Ceres Seq. ID no. 14315493
MGCVSSKHIKKDLKQEEEVTVTNGGGYVNHVVSLTSSTYGALMLDKEKEQLQLQPTVEEESKTSPPRIREEPEVINAWELMEGLEEGVPISNNPMKSPKSTPFLRGFISTDPKPKITPFKFLNQFGSPKSLRKFTGKENKVQVQPPNAGVRRLDYNFSPKGILKPSNFCSPLKGSPIRARRNSFGTDIKRRSPSPLFDPELLASYEKELSEEEEQIKRMVWATPKTRRVRKPLDSQTFIKTFEEKLPPGGENCVVIYTTTLRGIRKTFEECNKVRSIVESYCVHVVERDVSMDSGFKEELRKLMGTKQVKVPVVFVKGRLVGGAEEIVKLEEEGKLGVLFEGIPHKALGECEGCGGVRFVMCVECNGSCKVLDHENHKKTLRCGQCNENGLIQCPMCR

SEQ ID NO: 6530 - protein, 356 aa, Glycine max
  misc_feature (1)..(356): Ceres Seq. ID no. 14315494
MLDKEKEQLQLQPTVEEESKTSPPRIREEPEVINAWELMEGLEEGVPISNNPMKSPKSTPFLRGFISTDPKPKITPFKFLNQFGSPKSLRKFTGKENKVQVQPPNAGVRRLDYNFSPKGILKPSNFCSPLKGSPIRARRNSFGTDIKRRSPSPLFDPELLASYEKELSEEEEQIKRMVWATPKTRRVRKPLDSQTFIKTFEEKLPPGGENCVVIYTTTLRGIRKTFEECNKVRSIVESYCVHVVERDVSMDSGFKEELRKLMGTKQVKVPVVFVKGRLVGGAEEIVKLEEEGKLGVLFEGIPHKALGECEGCGGVRFVMCVECNGSCKVLDHENHKKTLRCGQCNENGLIQCPMCR

SEQ ID NO: 6531 - DNA, 2103 bp, Glycine max
  misc_feature (1)..(2103): Ceres Seq. ID no. 14315507
atgatagaactttctctgatgagctaccatctataaacaagattgaaccagatactcctaggaaaaaggtactttattctcatgttgaagataaagaacgttatgatcctgtatttatattgcgattttcaattcatagtctctcaaaggcttatgtagcgcctgtggagtttgctggttcagggttgcttgcgattgcatttgttagcttgtcttccccagaccaagggataagaagattagcgtatggcactcttgataaatttaagaatgcagtagagaagtgccaaaagaggaaggatgtaatgggacttcggcttctattaaattctgttcaaaacagcatagaagagccatggcaaagaatcccatcagttattgctttatttgctgcagaggcatcttgtgtattgttagatccggcacatgatcattatgcagctataagtacattttttatacattcatctaagttgaatatgagggttatgtttgataactttttttggagtacctctgtcaatttcaaagcagagaggtcttggatgcttcgcctagtatatgcagggatgaactcagatgatgatgctgcgatatatatcaggaactctatccttgagaagctaatgagtttttacgtctcttctctttcagattttgagtctaagaacctgattattgaggtgataaataaatctgttaaattgcacaagattacccgtcatctagtgaagcattgttctttattttcatggttttcgtctctcatctccgttgccagacagaggcttaatggaaatgaaaataaacttttcttgaagcatgtgttggtagcattgaaggttgtcaatgatgttatttcatcaggaggcatctccaagtggttgcaaaatcatggccttgagcagcttatggagctttcatcaaatctatttaatttcttattccaggatgcaacattgacaaatgaaactgtagtactagttaatccttttctacgaatgatagcatcagtgttgaaattatctcaaaaaaggaaaatatatcagccacattttaccctatcaattgagggcttgtatcagatgtaccaggctggcagtgtgtgtaatcaagccataaaaagcattaaaccagagcttgcacttgaagccatacttatgaatgcacctcctgtttccattttcatgatgaatcaggaaaggctacaaagctttcttatctgggcaactacaactgctttacagtccgagtctttacaaaggctggggtccaatgagtctcagttctcaagaaataattcaagggaagattttcgagagaactcagtagtttcaacatttctacgttggttaacagcatcagtaatcaatgggaagctccataaaaaatcttataattgggattcagaatttgctgaaacgcacaaccttgaatccctgcattctttgctggtgcatgttgaaaatacctctggacaaagaaatgatattgatattggtgctgaggaggtactagcttcaacaatcttccatctccaactgcgtcttggtgtcaatcatgaagtgctaccatcagttgtatgtgctctctgtctcctgatgtttggtgcctctaaatttgcagtcagcagaactgatttattgaaagactacaacacattaatatcatcatacagttcaagggtacggtgtcctcctgaagctaatccaacttggagatggtcgttttatcagccatggaaggatgattctctggagctcactgactcgcagaagatggaggaatatcatgcttgcctaactttgttagttattatctctaatgttcttggtgcaaagaaattagagtcggctagtttatcccctgtagatttagagagatctggcttattccaatgggaaataagtttactaagaaactaagtttatacaagagtcgttagctttttatttttattttttgtacgttagtaagtgtacagctagtgtcaaagtatcgatatatttgaaaatgcaaattttgccaatgaaaacaggccatcttttatgtatttgatggcattatataagttaaattaaaattatggtccttatatatact

SEQ ID NO: 6532 - protein, 640 aa, Glycine max
  misc_feature (1)..(640): Ceres Seq. ID no. 14315508
DRTFSDELPSINKIEPDTPRKKVLYSHVEDKERYDPVFILRFSIHSLSKAYVAPVEFAGSGLLAIAFVSLSSPDQGIRRLAYGTLDKFKNAVEKCQKRKDVMGLRLLLNSVQNSIEEPWQRIPSVIALFAAEASCVLLDPAHDHYAAISTFFIHSSKLNMRVMFDNFFWSTSVNFKAERSWMLRLVYAGMNSDDDAAIYIRNSILEKLMSFYVSSLSDFESKNLIIEVINKSVKLHKITRHLVKHCSLFSWFSSLISVARQRLNGNENKLFLKHVLVALKVVNDVISSGGISKWLQNHGLEQLMELSSNLFNFLFQDATLTNETVVLVNPFLRMIASVLKLSQKRKIYQPHFTLSIEGLYQMYQAGSVCNQAIKSIKPELALEAILMNAPPVSIFMMNQERLQSFLIWATTTALQSESLQRLGSNESQFSRNNSREDFRENSVVSTFLRWLTASVINGKLHKKSYNWDSEFAETHNLESLHSLLVHVENTSGQRNDIDIGAEEVLASTIFHLQLRLGVNHEVLPSVVCALCLLMFGASKFAVSRTDLLKDYNTLISSYSSRVRCPPEANPTWRWSFYQPWKDDSLELTDSQKMEEYHACLTLLVIISNVLGAKKLESASLSPVDLERSGLFQWEISLLRN

SEQ ID NO: 6533 - protein, 539 aa, Glycine max
  misc_feature (1)..(539): Ceres Seq. ID no. 14315509
MGLRLLLNSVQNSIEEPWQRIPSVIALFAAEASCVLLDPAHDHYAAISTFFIHSSKLNMRVMFDNFFWSTSVNFKAERSWMLRLVYAGMNSDDDAAIYIRNSILEKLMSFYVSSLSDFESKNLIIEVINKSVKLHKITRHLVKHCSLFSWFSSLISVARQRLNGNENKLFLKHVLVALKVVNDVISSGGISKWLQNHGLEQLMELSSNLFNFLFQDATLTNETVVLVNPFLRMIASVLKLSQKRKIYQPHFTLSIEGLYQMYQAGSVCNQAIKSIKPELALEAILMNAPPVSIFMMNQERLQSFLIWATTTALQSESLQRLGSNESQFSRNNSREDFRENSVVSTFLRWLTASVINGKLHKKSYNWDSEFAETHNLESLHSLLVHVENTSGQRNDIDIGAEEVLASTIFHLQLRLGVNHEVLPSVVCALCLLMFGASKFAVSRTDLLKDYNTLISSYSSRVRCPPEANPTWRWSFYQPWKDDSLELTDSQKMEEYHACLTLLVIISNVLGAKKLESASLSPVDLERSGLFQWEISLLRN

SEQ ID NO: 6534 - protein, 481 aa, Glycine max
  misc_feature (1)..(481): Ceres Seq. ID no. 14315510
MRVMFDNFFWSTSVNFKAERSWMLRLVYAGMNSDDDAAIYIRNSILEKLMSFYVSSLSDFESKNLIIEVINKSVKLHKITRHLVKHCSLFSWFSSLISVARQRLNGNENKLFLKHVLVALKVVNDVISSGGISKWLQNHGLEQLMELSSNLFNFLFQDATLTNETVVLVNPFLRMIASVLKLSQKRKIYQPHFTLSIEGLYQMYQAGSVCNQAIKSIKPELALEAILMNAPPVSIFMMNQERLQSFLIWATTTALQSESLQRLGSNESQFSRNNSREDFRENSVVSTFLRWLTASVINGKLHKKSYNWDSEFAETHNLESLHSLLVHVENTSGQRNDIDIGAEEVLASTIFHLQLRLGVNHEVLPSVVCALCLLMFGASKFAVSRTDLLKDYNTLISSYSSRVRCPPEANPTWRWSFYQPWKDDSLELTDSQKMEEYHACLTLLVIISNVLGAKKLESASLSPVDLERSGLFQWEISLLRN

SEQ ID NO: 6535 - DNA, 1308 bp, Glycine max
  misc_feature (1)..(1308): Ceres Seq. ID no. 14315515
acttctcatacaatacaagaggtcacatatacagaccttctctccctctctctctttctctctcaacattctaccttcttttcttttcctcttttcacaaccatttgtgagattcctccaatgttcttctctcttccattggattgtacagattcccagctacactacacacatcaatcccttcaattctagttgctgtgggattgtttgtttatgtgaaaaaattttaaggactgtaaaagacaaaacttttctgggtttattggtttctgctttatatttattttttcttctgcaaactatcattctgggtttgctcataaaacaaagcctttcaagataactgttgtatttttcagaaaaaaaatccatttttcttagcttatttgtcaaaagaataattttttttctttttcttcctcatttttctgcaaattttcttcatattcctttttattaatttgcggaaaagattgagacatgggcaagcaaggaccttgctatcactgtggagttacaagcacgccactctggcgcaatggaccacccgagaagccagtactatgcaatgcatgtgggtctcgatggagaacaaagggaactcttgcaaattatacccctttacatgctcgagcagaaactgatgattatgatgatcaaagggtttccaggataaagagcatatcgataaataagaagaaagaagtggcattgctcaaacgaaaacagaaccatgataatgtaatgtctggagggtttgcacctgattacaaccagggataccaaaaggttgtagatgaagatattagcaaccggtcgagttcaggatcagctatctctaactcagagagctgtgcacaatttggttatgatggcatggatgctagtgatctgacaggttgaattaagatctttcttcacaactgattacagcagcatttatcattttgaaacaagtattgattttattgcctgtccaggtttatattagcacaatccagaagaggataatggaacgaaggaaaatgaaaaagaaatatattagtttcgtagtcattggttttcctaaaagaaaaacaaatgaactttgttttaactatgtacggttgtgctcttcattgacaaaaagaattgaagaagtggttttaatattttaccaccatgaagctctaattatacttgccaacatttgtaatggcaagtccaataattagacatggtggattatttgttttttgtttagtgtgtaacaatatgtagtacttttccctcccaataatagaatgtcaagtcttgcatatatttttc

SEQ ID NO: 6536 - protein, 140 aa, Glycine max
  misc_feature (1)..(140): Ceres Seq. ID no. 14315516
MGKQGPCYHCGVTSTPLWRNGPPEKPVLCNACGSRWRTKGTLANYTPLHARAETDDYDDQRVSRIKSISINKKKEVALLKRKQNHDNVMSGGFAPDYNQGYQKVVDEDISNRSSSGSAISNSESCAQFGYDGMDASDLTG

SEQ ID NO: 6537 - protein, 113 aa, Glycine max
  misc_feature (1)..(113): Ceres Seq. ID no. 14315517
LLIQYKRSHIQTFSPSLSFSLNILPSFLFLFSQPFVRFLQCSSLFHWIVQIPSYTTHINPFNSSCCGIVCLCEKILRTVKDKTFLGLLVSALYLFFLLQTIILGLLIKQSLSR

SEQ ID NO: 6538 - DNA, 1462 bp, Glycine max
  misc_feature (1)..(1462): Ceres Seq. ID no. 14315518
aagttaatcaatcatcgctgtcgttgatcattcagcgcaagtctgcaaatcccatcatcatggcggccataacccgcctcgcgaagcgcgcgttcgtcgtctcttccctggcgaggaggtgcctgagctcctccgtagtcaactgccacgcgccgccgcacgacgccacgtcgttccgcccgtttccgctgcgtgaagattcgagcaagcggtgcgtgcagtgggtgttcctcggctgccccggcgtcggaaaaggaacgtacgctagtcgcctctcgaacctcctcggcgtttctcacatcgccaccggcgatctcgttcgcgacgaactcacctcctctggccccctttcttcccagctatcagaaattgtaaaacaaggtcaattggtgtcagatgaaattattattagtttattgtcaaagagacttgttgccggggaagctaaaggcgatttgggatttattcttgatggttttcctcgaacaattaagcaagcagaaatattggaaggggtaactgacattgacttggtaatcaatctgaagcttcgagaagatgttctgcttgagaaatgccttggtaggagaatttgcaatcagtgtgggggaaattttaatgttgcttccatcaacatcaaggctgagaatgggagccctggaattattatggctccacttcttcctcctgagaattgtatatcaaagctcattactcgatcagatgatactgaagcagtggtcaaagaaaggcttcgaatatacaatgaaatgactcagcctgtggaggaattttaccgttcaagaggaaaattattggagtttaacctgcctggaggaatcccggagtcttggcctaagttgctacatgctcttaatcttgatgattatgaggacaaacgatctgctgcagcataacgatataataatgtatcataacagtaagtatttcattctttgcgtgcatatattgcatgcttggcaattttgcaggacagagagccaaagaaagggaacttccctgctagtattattttggaccaataatgatatttgtaagtgttgtaatctgataagaggataagactggtagtgttgcgttttcttttcatataatttggttatatgggaagggtttcccagcatataatgttattgtgaagagtgaataatatatcacagcattgctagatggatagttggtcaggaatcagcttcgataggactggtgcatcatcactgtactgttgtaaattaaatgtgaatgaacttattctatttaatcatcagattctcgtgatttagggaaggcttttactgaagtaacttccaggaaaaattatttaatatgatgtttcatgttatttgaataagtcttatgatttcacagtactcatgaataactccttttctatgaatgttcttgttgctttaacattcaatgaatagaacaagaattctct

SEQ ID NO: 6539 - protein, 304 aa, Glycine max
  misc_feature (1)..(304): Ceres Seq. ID no. 14315519
VNQSSLSLIIQRKSANPIIMAAITRLAKRAFVVSSLARRCLSSSVVNCHAPPHDATSFRPFPLREDSSKRCVQWVFLGCPGVGKGTYASRLSNLLGVSHIATGDLVRDELTSSGPLSSQLSEIVKQGQLVSDEIIISLLSKRLVAGEAKGDLGFILDGFPRTIKQAEILEGVTDIDLVINLKLREDVLLEKCLGRRICNQCGGNFNVASINIKAENGSPGIIMAPLLPPENCISKLITRSDDTEAVVKERLRIYNEMTQPVEEFYRSRGKLLEFNLPGGIPESWPKLLHALNLDDYEDKRSAAA

SEQ ID NO: 6540 - protein, 285 aa, Glycine max
  misc_feature (1)..(285): Ceres Seq. ID no. 14315520
MAAITRLAKRAFVVSSLARRCLSSSVVNCHAPPHDATSFRPFPLREDSSKRCVQWVFLGCPGVGKGTYASRLSNLLGVSHIATGDLVRDELTSSGPLSSQLSEIVKQGQLVSDEIIISLLSKRLVAGEAKGDLGFILDGFPRTIKQAEILEGVTDIDLVINLKLREDVLLEKCLGRRICNQCGGNFNVASINIKAENGSPGIIMAPLLPPENCISKLITRSDDTEAVVKERLRIYNEMTQPVEEFYRSRGKLLEFNLPGGIPESWPKLLHALNLDDYEDKRSAAA

SEQ ID NO: 6541 - DNA, 1146 bp, Glycine max
  misc_feature (1)..(1146): Ceres Seq. ID no. 14315533
taaaggacatggacgtacgggattcagagatagttgaactagtgaatcaagttgaggaacttgagaaaaaattggtcgctcatcctatgcataagcatcaagatatggatcaaattaaatgctttgagaggaaagcagaagtgaatcatgaagttcagcaactgaagacaaaaatgcgggattcccagctacaaaaatttcgtgaagaacttaagaatcgctcacgagtcttaaagaagcttggtcatattgatgctgatggtgtagttcagttgaagggacgagcagcctgcttgattgacacaggcgatgaactccttgtcactgaattaatgtttaatggtacttttaatgaccttgaccatcatcaagttgctgcccttgcgagttgtttcataccaggagataagtcaactgagcagatacaactgagaacagagcttgcaaggcctctgcaacagcttcaagatagtgcaagaaggatagctgagatacaacatgaatgcaaattggatataaatgtgaatgagtatgtggaatcaaccgtaagaccattcttgatggatgtgatatactcatggtcaaagggagcaaattttgctgatgttatacaaatgactgacatctttgaggggagtattattcggagtgctagaaggcttgacgagtttttgaatcagttgcgtgctgctgctaatgcagttggagaggctgacttggagaagaaatttgcagctgcaagtgaaagccttcgacgaggtattatgtttgcaaattctttgtatctgtgacttgtttttctccagaccttacgttatatctcacggtcattccggctggctgaaagtttactttcccatccaaccttttggcatgcacccacttccttctcttaaaagctttctggtgtaaatatttgtatgctgtcactaatggtaaagggtgtgaatatagagtgatagaaaaatctggtcaatagatagaaaattccggtcaataaaggttcatcttgagagtcgcagatcattcatttatttaccttcagaacctctagtctgtctggggcttgaggagtgagggtgccgaagatatttgtttgtaatttgctgaaaaattttcaatacaaattttgattgatagttcatt

SEQ ID NO: 6542 - protein, 262 aa, Glycine max
  misc_feature (1)..(262): Ceres Seq. ID no. 14315534
KDMDVRDSEIVELVNQVEELEKKLVAHPMHKHQDMDQIKCFERKAEVNHEVQQLKTKMRDSQLQKFREELKNRSRVLKKLGHIDADGVVQLKGRAACLIDTGDELLVTELMFNGTFNDLDHHQVAALASCFIPGDKSTEQIQLRTELARPLQQLQDSARRIAEIQHECKLDINVNEYVESTVRPFLMDVIYSWSKGANFADVIQMTDIFEGSIIRSARRLDEFLNQLRAAANAVGEADLEKKFAAASESLRRGIMFANSLYL

SEQ ID NO: 6543 - protein, 260 aa, Glycine max
  misc_feature (1)..(260): Ceres Seq. ID no. 14315535
MDVRDSEIVELVNQVEELEKKLVAHPMHKHQDMDQIKCFERKAEVNHEVQQLKTKMRDSQLQKFREELKNRSRVLKKLGHIDADGVVQLKGRAACLIDTGDELLVTELMFNGTFNDLDHHQVAALASCFIPGDKSTEQIQLRTELARPLQQLQDSARRIAEIQHECKLDINVNEYVESTVRPFLMDVIYSWSKGANFADVIQMTDIFEGSIIRSARRLDEFLNQLRAAANAVGEADLEKKFAAASESLRRGIMFANSLYL

SEQ ID NO: 6544 - protein, 234 aa, Glycine max
  misc_feature (1)..(234): Ceres Seq. ID no. 14315536
MHKHQDMDQIKCFERKAEVNHEVQQLKTKMRDSQLQKFREELKNRSRVLKKLGHIDADGVVQLKGRAACLIDTGDELLVTELMFNGTFNDLDHHQVAALASCFIPGDKSTEQIQLRTELARPLQQLQDSARRIAEIQHECKLDINVNEYVESTVRPFLMDVIYSWSKGANFADVIQMTDIFEGSIIRSARRLDEFLNQLRAAANAVGEADLEKKFAAASESLRRGIMFANSLYL

SEQ ID NO: 6545 - DNA, 1224 bp, Glycine max
  misc_feature (1)..(1224): Ceres Seq. ID no. 14315549
atttaactgatacttcaatgttgcccgagtggaaaaatggtaatggcattgatactctatcatgccctcctacagagcttggtggttgtggtaaaagccaccttgagttgagatctgttttcccctcgagttggatcaaagagatggaagtaaaggcagaagaaattgtttgcagctatgactttcctgaaacttcagataaaagttcgagctgctcgttgtgttttgacactgatcacagtactaacagatacaagcagttgcaagaagcagctctaagagaagattccaatgataattacttgttttgtcccacagtgatggacatcagtggtgataactttgagcactttcagaaacactgtggaaaaggccatcctatagttgtccaagatgcactccgaagtacatcaaacctcagttgggatccactgaccatgttctgtacttatcttgagcagagcattacaagatatgagaaaaataaagacttgcttgaatcttgtttggattggtgggaggtggaaattaacattaggcagtactttactgggtctgtcaaacgtcgtcctcagagaaacacttgggatgagatgctgaaactaaaagggtggctttcttcccaaatattcaaagagcagtttccagctcattttgctgaggtaattgatgctctaccagttaaagaatacatgcatcccctgtccggtcttctgaatttagctgcaaatttgccacatgggagtgcaaaacatgacattgggccatatgtctacatttcttatggctctgctgacaaagaaactgattcagtgacaaagctctgctatgactcatatgatgtgatgcccccctctctatagaacaacttaccaaaataagaaaactgctgaaaaagcacaaaactctgtgtcaaatggagactattgctactgaggggccacaggaacagaaattgaatggaataccattattgcatggtccagaaacagagcgaaaaggctcacggagtatggttgaaggaatgaactttttccggagagtcaatagaacatcttgcatctcaactgaagctaaaaaagtttctagtcagagcatggacagcaatggggaatgtgatttcatttctgattctgattctggatctgctttacttctccttgggactgttcaaactgctgaattgtcagaacacgataatcctagaaatccctttaaaagctc

SEQ ID NO: 6546 - protein, 286 aa, Glycine max
  misc_feature (1)..(286): Ceres Seq. ID no. 14315550
LTDTSMLPEWKNGNGIDTLSCPPTELGGCGKSHLELRSVFPSSWIKEMEVKAEEIVCSYDFPETSDKSSSCSLCFDTDHSTNRYKQLQEAALREDSNDNYLFCPTVMDISGDNFEHFQKHCGKGHPIVVQDALRSTSNLSWDPLTMFCTYLEQSITRYEKNKDLLESCLDWWEVEINIRQYFTGSVKRRPQRNTWDEMLKLKGWLSSQIFKEQFPAHFAEVIDALPVKEYMHPLSGLLNLAANLPHGSAKHDIGPYVYISYGSADKETDSVTKLCYDSYDVMPPSL

SEQ ID NO: 6547 - protein, 281 aa, Glycine max
  misc_feature (1)..(281): Ceres Seq. ID no. 14315551
MLPEWKNGNGIDTLSCPPTELGGCGKSHLELRSVFPSSWIKEMEVKAEEIVCSYDFPETSDKSSSCSLCFDTDHSTNRYKQLQEAALREDSNDNYLFCPTVMDISGDNFEHFQKHCGKGHPIVVQDALRSTSNLSWDPLTMFCTYLEQSITRYEKNKDLLESCLDWWEVEINIRQYFTGSVKRRPQRNTWDEMLKLKGWLSSQIFKEQFPAHFAEVIDALPVKEYMHPLSGLLNLAANLPHGSAKHDIGPYVYISYGSADKETDSVTKLCYDSYDVMPPSL

SEQ ID NO: 6548 - protein, 239 aa, Glycine max
  misc_feature (1)..(239): Ceres Seq. ID no. 14315552
MEVKAEEIVCSYDFPETSDKSSSCSLCFDTDHSTNRYKQLQEAALREDSNDNYLFCPTVMDISGDNFEHFQKHCGKGHPIVVQDALRSTSNLSWDPLTMFCTYLEQSITRYEKNKDLLESCLDWWEVEINIRQYFTGSVKRRPQRNTWDEMLKLKGWLSSQIFKEQFPAHFAEVIDALPVKEYMHPLSGLLNLAANLPHGSAKHDIGPYVYISYGSADKETDSVTKLCYDSYDVMPPSL

SEQ ID NO: 6549 - DNA, 1228 bp, Glycine max
  misc_feature (1)..(1228): Ceres Seq. ID no. 14315569
aatatagcttgcactcacttgctctctctcataatgaaacaaaatattactacttcccttacctttctctctctctcaaaacctcatttgtcgtcctcttcatcaacctctttcttctgcctcaccaaccaatttgttttctttttgcaatgctggtgcttggaagcatctctccattgaatgtgatagcttcaattctccaacatttgtataaatactttaacatcgacaagtgtgaagctctgatattaatttggtcatggcgatggtccagacagttatgtacgaaatcatttaataaagcattgagaatcccaacttagatgatgtatatacatcaaagtttgatttgatcagtgtttgacatacacactactcttcttcaattcccttgtgtgtgaaggagagacaaattaagattatatatttagcttagtttctagctagtggctactgaaattgaaactgataacatgtgtttgtttttgtattccgaaacgggtttttgcaggttagtgttccatgcagcagtttgctcaccatagttacggttagatgtggacactgtgccaatttgctgacagttaacatgggagcatcacttcaaacttttccttctcaagacactactcagttacagagacagcatctaagtgttcaagaagcatgcagcaaggaactaggatcatcatcaaagtgcaaatcatttgagactgtagaccatgagcagcaacctaggattcctcccattcgtcctcctgagaagagacaacgtgttccttctgcttataaccggttcattaagtaagtgatcttttcaaatttacattttaaataaacttcctgccatttccccagctactttgtacataatgtatatcctcgtattctaattagtatatatggttgaatagagtttggatcccatgattaatatgttccaattaaaaaaataaaattagttaaatagaaggattaatgagaatgactattcatgattcaaataatataattggttaagtgatggacaagcatgagatcataaatgcatacatttgaaataaatcatactaatataaacaattatatacaaatgaaaattcttatgtatataaaattattaacaaaataaaattttaatatgacagtggcaaagggaatgactacatattaaaactttagagtatgtttctcaaaaaagaaaaaaaaaactttagagaatgtttac

SEQ ID NO: 6550 - protein, 106 aa, Glycine max
  misc_feature (1)..(106): Ceres Seq. ID no. 14315570
YSLHSLALSHNETKYYYFPYLSLSLKTSFVVLFINLFLLPHQPICFLFAMLVLGSISPLNVIASILQHLYKYFNIDKCEALILIWSWRWSRQLCTKSFNKALRIPT

SEQ ID NO: 6551 - protein, 72 aa, Glycine max
  misc_feature (1)..(72): Ceres Seq. ID no. 14315571
MGASLQTFPSQDTTQLQRQHLSVQEACSKELGSSSKCKSFETVDHEQQPRIPPIRPPEKRQRVPSAYNRFIK

SEQ ID NO: 6552 - protein, 59 aa, Glycine max
  misc_feature (1)..(59): Ceres Seq. ID no. 14315572
NIACTHLLSLIMKQNITTSLTFLSLSKPHLSSSSSTSFFCLTNQFVFFLQCWCLEASLH

SEQ ID NO: 6553 - DNA, 1383 bp, Glycine max
  misc_feature (1)..(1383): Ceres Seq. ID no. 14315580
ttttcacgctttggaactgtatcaatggctgaaatcatccgtgatcaaaagaccggtgacagtttatgctatgctttcatagagtttgaggacaaacggtcatgtgagcaggcatattttaagatggataatgctttgattgatgatcgaaggatacacgtggattttagtcaaagtgtggcaaaactgtggtcacaatacaggcagaaagatcaaaagggtaaaggtggtggttgcttcaaatgtggttctacagatcatattgctaaggattgtacgggagaggctacaatgaaacaaccacaagcaaaatacatcttaaaggatgataatgtccaacgtggtggagatagtgcgagatatgaaatggtgtttgatgaagataattcacaacatccaaggcaagatgtaaaacaccaaaggcatgacagggatgacccagtcgaaagaaaagatcatagaagccgcagagatcaggatatgatagactcaaacaacagagataggtatggtgatagaagcagagggcatgggggaaatggtgagaacaaagcacggtctgaaagaggtgtaatagatttggattccaatgctgataagaaagacagagataggcacatgggaagacatggagatgatgattacaagcggaaggatgagcatgattccagaaaaagagacgaagattatgtctacaagtggaaagacaagcgagactcaagaaaaagagatgaagatgatgagtatagagaaatacaaactagtcgatatgataggagaaacacagattctagccatttggagagaaggaatagcagagattataggaagaaacctgaagacagtggaacgcaagatatgaagattgactctggacaaagaaaaggaagtccaggtgatgaggattacaaaaatggaagggatcatgaggattacgaacgtaaaatgaaggatgaggattacagaaatagaaaggaagaacgtgtgcataaaagccaagatattgaagcggatgatggctacaaacgtagaagggaggatgcagattacaaacgcagaagggatgatggagattacagacatagaagggaagagcgtggacacgacaggagatgattattggtgtcactatatcctaatgctaagcacagaacctttgaacggctatcttgtatgtcccttttgcttcaatttttctggtggagcaagatattgatatgttttagaacaaggtttttgaagtattctacatttactacttagaacatatttaattatttttacatagcttcagaaaacttgttttcatattccgtgcacaacagcacagttaagttttcatgttcagctaattgttaaaatggtgtttgacttaactaacgc

SEQ ID NO: 6554 - protein, 371 aa, Glycine max
  misc_feature (1)..(371): Ceres Seq. ID no. 14315581
FSRFGTVSMAEIIRDQKTGDSLCYAFIEFEDKRSCEQAYFKMDNALIDDRRIHVDFSQSVAKLWSQYRQKDQKGKGGGCFKCGSTDHIAKDCTGEATMKQPQAKYILKDDNVQRGGDSARYEMVFDEDNSQHPRQDVKHQRHDRDDPVERKDHRSRRDQDMIDSNNRDRYGDRSRGHGGNGENKARSERGVIDLDSNADKKDRDRHMGRHGDDDYKRKDEHDSRKRDEDYVYKWKDKRDSRKRDEDDEYREIQTSRYDRRNTDSSHLERRNSRDYRKKPEDSGTQDMKIDSGQRKGSPGDEDYKNGRDHEDYERKMKDEDYRNRKEERVHKSQDIEADDGYKRRREDADYKRRRDDGDYRHRREERGHDRR

SEQ ID NO: 6555 - protein, 363 aa, Glycine max
  misc_feature (1)..(363): Ceres Seq. ID no. 14315582
MAEIIRDQKTGDSLCYAFIEFEDKRSCEQAYFKMDNALIDDRRIHVDFSQSVAKLWSQYRQKDQKGKGGGCFKCGSTDHIAKDCTGEATMKQPQAKYILKDDNVQRGGDSARYEMVFDEDNSQHPRQDVKHQRHDRDDPVERKDHRSRRDQDMIDSNNRDRYGDRSRGHGGNGENKARSERGVIDLDSNADKKDRDRHMGRHGDDDYKRKDEHDSRKRDEDYVYKWKDKRDSRKRDEDDEYREIQTSRYDRRNTDSSHLERRNSRDYRKKPEDSGTQDMKIDSGQRKGSPGDEDYKNGRDHEDYERKMKDEDYRNRKEERVHKSQDIEADDGYKRRREDADYKRRRDDGDYRHRREERGHDRR

SEQ ID NO: 6556 - protein, 330 aa, Glycine max
  misc_feature (1)..(330): Ceres Seq. ID no. 14315583
MDNALIDDRRIHVDFSQSVAKLWSQYRQKDQKGKGGGCFKCGSTDHIAKDCTGEATMKQPQAKYILKDDNVQRGGDSARYEMVFDEDNSQHPRQDVKHQRHDRDDPVERKDHRSRRDQDMIDSNNRDRYGDRSRGHGGNGENKARSERGVIDLDSNADKKDRDRHMGRHGDDDYKRKDEHDSRKRDEDYVYKWKDKRDSRKRDEDDEYREIQTSRYDRRNTDSSHLERRNSRDYRKKPEDSGTQDMKIDSGQRKGSPGDEDYKNGRDHEDYERKMKDEDYRNRKEERVHKSQDIEADDGYKRRREDADYKRRRDDGDYRHRREERGHDRR

SEQ ID NO: 6557 - DNA, 1659 bp, Glycine max
  misc_feature (1)..(1659): Ceres Seq. ID no. 14315590
aaaaagcctctatagtttatatagcaagatgaaacgaaaggatataagcattgataaagtatatgatgcacgtgcattaagagtagttgtgggagacaagaatggaactttacatggtcctgcagttcagtgttgttatagtcttcttgacattgtacacaggctttggactccaatagatggtgaatttgatgactacatcattaatccgaagcctagtggctatcagtccttgcacactgcagtccaaggtcctgacaactcacctttagaagtacaaataaggacacagaggatgcatgagtgtgctgaacaaggacttgctgcacattggctttacaaggaaactggcaatccttttttatccatagacagcatggatgaacctgaaactgaagcatcctcctatttctccaaagatctagaggaaggaaattcttcagatattttattaagtaaatataagtcattgaaggctggacatccagtcctcagagtagaaggaagtcacttacttgctgcaattatcatcagtgtagaaaatgatgaaagagaattgctagttgctgtgagctttgggctagcagcttctgaagcagtagctgacagaagatctttccagattaagcgatgggaagcttatgcacgactgtacaaaaaggtgtctgatgaatggtggtttgaaccggggcatggggattggtttacgtgtctagagaagtacacactgtgtcgagatggtatgtatcataagcaagaccaatttgggcgcctactcccaacatttatccaggttatcaattttactgagcaagaagaatctgaatattgggctgttgtatctgctgtgtttgagggcaggcaagtggattggataacatctcggtcaaaatttgacttggttgcatcaacttctgtagaagctggcatcaataacaaggtgaaccttttgagaacaatgctctcttgggaagagcaattgcgctctgaagtaagtttcatgcaagcaaagcatgatgcaaagctttatgatcttcatggttctcttggggaagtggtaattatatgttggcctcatggtgaaattttgaggttaaaggcgggtagcactgctactgatgctgctcaaagagttggtttggagggaaagctggttttgattaacggacagttagtactgcccaacacaaaactcagagatggcgatgtagttgaagtaagaatttaaatcattctttagaaaaatgtaaataattctttatgggtcgtatgtggttaaagtagatggtatagaaatagtttttattttatttagggacgtggattcttggtagaataacgtactttcaaaaattttaaatgtgctggctttaaacttgattccaagaataagttggataaccacatgtgctatcatattttttattgttgtgttggctgtatgtgtggttattactaatttttggtactatggttattcactgtatttggaattaagcattaaaccactgcactttaaaatcatttgaagctgcaataattttatcaagaatccttggaaagagcggccaagccagggaaaatgctgtgtatctgattattagaaatatttgtatgatacagattaaatttatagcaaaacataggcttaggattccc

SEQ ID NO: 6558 - protein, 408 aa, Glycine max
  misc_feature (1)..(408): Ceres Seq. ID no. 14315591
KSLYSLYSKMKRKDISIDKVYDARALRVVVGDKNGTLHGPAVQCCYSLLDIVHRLWTPIDGEFDDYIINPKPSGYQSLHTAVQGPDNSPLEVQIRTQRMHECAEQGLAAHWLYKETGNPFLSIDSMDEPETEASSYFSKDLEEGNSSDILLSKYKSLKAGHPVLRVEGSHLLAAIIISVENDERELLVAVSFGLAASEAVADRRSFQIKRWEAYARLYKKVSDEWWFEPGHGDWFTCLEKYTLCRDGMYHKQDQFGRLLPTFIQVINFTEQEESEYWAVVSAVFEGRQVDWITSRSKFDLVASTSVEAGINNKVNLLRTMLSWEEQLRSEVSFMQAKHDAKLYDLHGSLGEVVIICWPHGEILRLKAGSTATDAAQRVGLEGKLVLINGQLVLPNTKLRDGDVVEVRI

SEQ ID NO: 6559 - protein, 399 aa, Glycine max
  misc_feature (1)..(399): Ceres Seq. ID no. 14315592
MKRKDISIDKVYDARALRVVVGDKNGTLHGPAVQCCYSLLDIVHRLWTPIDGEFDDYIINPKPSGYQSLHTAVQGPDNSPLEVQIRTQRMHECAEQGLAAHWLYKETGNPFLSIDSMDEPETEASSYFSKDLEEGNSSDILLSKYKSLKAGHPVLRVEGSHLLAAIIISVENDERELLVAVSFGLAASEAVADRRSFQIKRWEAYARLYKKVSDEWWFEPGHGDWFTCLEKYTLCRDGMYHKQDQFGRLLPTFIQVINFTEQEESEYWAVVSAVFEGRQVDWITSRSKFDLVASTSVEAGINNKVNLLRTMLSWEEQLRSEVSFMQAKHDAKLYDLHGSLGEVVIICWPHGEILRLKAGSTATDAAQRVGLEGKLVLINGQLVLPNTKLRDGDVVEVRI

SEQ ID NO: 6560 - protein, 310 aa, Glycine max
  misc_feature (1)..(310): Ceres Seq. ID no. 14315593
MHECAEQGLAAHWLYKETGNPFLSIDSMDEPETEASSYFSKDLEEGNSSDILLSKYKSLKAGHPVLRVEGSHLLAAIIISVENDERELLVAVSFGLAASEAVADRRSFQIKRWEAYARLYKKVSDEWWFEPGHGDWFTCLEKYTLCRDGMYHKQDQFGRLLPTFIQVINFTEQEESEYWAVVSAVFEGRQVDWITSRSKFDLVASTSVEAGINNKVNLLRTMLSWEEQLRSEVSFMQAKHDAKLYDLHGSLGEVVIICWPHGEILRLKAGSTATDAAQRVGLEGKLVLINGQLVLPNTKLRDGDVVEVRI

SEQ ID NO: 6561 - DNA, 1642 bp, Glycine max
  misc_feature (1)..(1642): Ceres Seq. ID no. 14315606
tcctgcctcccaggtgaaaaagaaaacacactgacgaagacagttccttctagaattgatagtatgcctctacacattgcaatgctcccgtggctcgcagtgggtcatgtgaacccttatttggagctgtcaaagattcttgctcaaaagggacactttgttacctttataagcactccaaaaaacattgatggcatgcccaaaatcccggaaaccttacagccatccatcaaattggtgaggctacccttgccacacacagatcatcatcatcatctcccagaagatgctgagagcacaatggacattccctcaaacaaaagctattacctcaagctggcttacgaggctctccaaggccctgtatcggagttgctcaaaacttcaaagcccgattgggttttttacgatttcgcaaccgagtggttaccaccaatagccaagagcctcaacattccctgtgcacactacaacttaaccgcagcgtggaacaaagtgttcattgatccacccaaggattatcaactgaacaactcaattacgcttcaagacatgtgtctccctcccacgtggcttcctttcaccacaaccgttcatctcaggcctcacgaaatcagaagagcaacaagttctatcaaagattcggacacaggacgcatggcaaattttgatctcagaaaggcatattccagctgcgacatgtttcttctcagaacatgcagagaactcgaaggagaatggttggattatcttgctcacaagtacaaggttcctgtggttccggtagggttggttccaccatccattcagataagggatgttgaagaggaagacaataaccctgactgggtcaaaattaaggattggttggacaaacaagagtcatcatccgtggtttatatagggtttgggagcgagttgaggctgagtcagcaggacgtcaccgagttggctcatggtattgagctttctgggttgcgtttcttttgggctttgaggaacctgcagaaagaggatttgccacatgggtttgaggagagaaccaaggaacgtggcattgtttggaagagttgggcaccccagattaagatcttaggccatgcagctattggaggatgcatcactcactgtggtaccaattctctcgttgagatgcttaattttgggcatgtgcttgtgactcttccctatttgctagaccaagctttgttttcgagggtgctagaggaaaagaaagtgggtattgaggtgccaaggagcgagaaagatgggtcctttactcgagacgatgtggccaagacattaaagttggcaatagtagatgaggaagggagtgattataggaagaatgccaaagaaatgggcaaggttttcagttccacggatcttcatagtcgatacattgacgactgcattgttgctcttcaaaagtacaagactcctaattccaactgttaagcacggctattcatgccagcaaggattccactccagtttcttctctgtttttgttttgcaattaagtttttcttttatttctgcaaatgcttgaacttttatccttaaatatttccaatcttcaatcatcatcatgtgtacgtttagttttgtaataaagaaggttatgagtaattacctaccc

SEQ ID NO: 6562 - protein, 485 aa, Glycine max
  misc_feature (1)..(485): Ceres Seq. ID no. 14315607
SCLPGEKENTLTKTVPSRIDSMPLHIAMLPWLAVGHVNPYLELSKILAQKGHFVTFISTPKNIDGMPKIPETLQPSIKLVRLPLPHTDHHHHLPEDAESTMDIPSNKSYYLKLAYEALQGPVSELLKTSKPDWVFYDFATEWLPPIAKSLNIPCAHYNLTAAWNKVFIDPPKDYQLNNSITLQDMCLPPTWLPFTTTVHLRPHEIRRATSSIKDSDTGRMANFDLRKAYSSCDMFLLRTCRELEGEWLDYLAHKYKVPVVPVGLVPPSIQIRDVEEEDNNPDWVKIKDWLDKQESSSVVYIGFGSELRLSQQDVTELAHGIELSGLRFFWALRNLQKEDLPHGFEERTKERGIVWKSWAPQIKILGHAAIGGCITHCGTNSLVEMLNFGHVLVTLPYLLDQALFSRVLEEKKVGIEVPRSEKDGSFTRDDVAKTLKLAIVDEEGSDYRKNAKEMGKVFSSTDLHSRYIDDCIVALQKYKTPNSNC

SEQ ID NO: 6563 - protein, 464 aa, Glycine max
  misc_feature (1)..(464): Ceres Seq. ID no. 14315608
MPLHIAMLPWLAVGHVNPYLELSKILAQKGHFVTFISTPKNIDGMPKIPETLQPSIKLVRLPLPHTDHHHHLPEDAESTMDIPSNKSYYLKLAYEALQGPVSELLKTSKPDWVFYDFATEWLPPIAKSLNIPCAHYNLTAAWNKVFIDPPKDYQLNNSITLQDMCLPPTWLPFTTTVHLRPHEIRRATSSIKDSDTGRMANFDLRKAYSSCDMFLLRTCRELEGEWLDYLAHKYKVPVVPVGLVPPSIQIRDVEEEDNNPDWVKIKDWLDKQESSSVVYIGFGSELRLSQQDVTELAHGIELSGLRFFWALRNLQKEDLPHGFEERTKERGIVWKSWAPQIKILGHAAIGGCITHCGTNSLVEMLNFGHVLVTLPYLLDQALFSRVLEEKKVGIEVPRSEKDGSFTRDDVAKTLKLAIVDEEGSDYRKNAKEMGKVFSSTDLHSRYIDDCIVALQKYKTPNSNC

SEQ ID NO: 6564 - protein, 458 aa, Glycine max
  misc_feature (1)..(458): Ceres Seq. ID no. 14315609
MLPWLAVGHVNPYLELSKILAQKGHFVTFISTPKNIDGMPKIPETLQPSIKLVRLPLPHTDHHHHLPEDAESTMDIPSNKSYYLKLAYEALQGPVSELLKTSKPDWVFYDFATEWLPPIAKSLNIPCAHYNLTAAWNKVFIDPPKDYQLNNSITLQDMCLPPTWLPFTTTVHLRPHEIRRATSSIKDSDTGRMANFDLRKAYSSCDMFLLRTCRELEGEWLDYLAHKYKVPVVPVGLVPPSIQIRDVEEEDNNPDWVKIKDWLDKQESSSVVYIGFGSELRLSQQDVTELAHGIELSGLRFFWALRNLQKEDLPHGFEERTKERGIVWKSWAPQIKILGHAAIGGCITHCGTNSLVEMLNFGHVLVTLPYLLDQALFSRVLEEKKVGIEVPRSEKDGSFTRDDVAKTLKLAIVDEEGSDYRKNAKEMGKVFSSTDLHSRYIDDCIVALQKYKTPNSNC

SEQ ID NO: 6565 - DNA, 1490 bp, Glycine max
  misc_feature (1)..(1490): Ceres Seq. ID no. 14315642
gttaacaaagattccagcaccaaatcagaatatagcccaaagcaatgtggcattctatgagccaataacgatcgttccttcatttccacaaaagaatatcaatcaatatgcacaagtggaaccacaagtttatacagagaataatatgaatgggaactatggaggaggaatggtacctcagaacaagaataatatgagcggaatgactcaattcaaccctctcatgaacttgaatgcgatgaatcatatgccaacagcaaatgaaataaatcattataacaatgtgcctggctacaataatatgaataatctcagcaataacataccaaaattaaccagcatgcacagcaataatacctatactagcaatagtactctagataccacaattacaaacctcacaaatatgagcaatatgagcagtatgaatgatataagcaatctcagtaacctcagcaatgtcagtaatgtcagcagcatgagcaatattactcaaacgagtaataataataacccatataatcttcaaatgagcaattttatgaatcaacagaattggtttaataattatttgcaatattatttaccaataatgcatcccttccaataccagaaaatggaacaagatttcaatgcaaatcccgcttttaatccatatatgggcaatatatttgttcccgctgctgctgctgccgtgaacaatcagccagaagaagtaccaaaagttgcaaaggctacaaaagcaaagacgacaaacaaaagatcatcaaaacaagcaaatgtcaataaaactactatcaatagcaataaacctctcaatgagaacctggatgataagaaggtgcttgatacattgaatgaattggattatgacttcttggaatgttataaagtttctgaagagaatctaaattgcaagagagtcggaggtccaggaatccaggatctggatgaactggtcaagaaaagacaagtaccaaacccgtttgtgggagtagaatgaatgaatacgatatattgcagaagaaatgacgctgaattttgagacagagttctcgccaacaaaatcttttacttactttaaaaaccccaaaaaaattgtaatattatttgagattttctcctgacctgtggagagctttcaaaaaagagattttctcttgctgcatcatcatcaaattttatcttttatcgttggacttcataaaggagatgttttgttttttctgggtgaaaaaaattgtacagaagagtgaagcaaattacttgggaaaaatcaaacagcaacttgaagagtccagattatgttttattattcagtcctattttgtgtctatcttccgctttttattattaatatttttttaataccgtgtgttgccatctattcttttaaaaccaacccgaaaagactgagaggaaaaaaagagcccacagtgaaaaattgaggggaatccttaccaaaaaagaatttaatcaagaagaaccgc

SEQ ID NO: 6566 - protein, 333 aa, Glycine max
  misc_feature (1)..(333): Ceres Seq. ID no. 14315643
LTKIPAPNQNIAQSNVAFYEPITIVPSFPQKNINQYAQVEPQVYTENNMNGNYGGGMVPQNKNNMSGMTQFNPLMNLNAMNHMPTANEINHYNNVPGYNNMNNLSNNIPKLTSMHSNNTYTSNSTLDTTITNLTNMSNMSSMNDISNLSNLSNVSNVSSMSNITQTSNNNNPYNLQMSNFMNQQNWFNNYLQYYLPIMHPFQYQKMEQDFNANPAFNPYMGNIFVPAAAAAVNNQPEEVPKVAKATKAKTTNKRSSKQANVNKTTINSNKPLNENLDDKKVLDTLNELDYDFLECYKVSEENLNCKRVGGPGIQDLDELVKKRQVPNPFVGVE

SEQ ID NO: 6567 - protein, 285 aa, Glycine max
  misc_feature (1)..(285): Ceres Seq. ID no. 14315644
MNGNYGGGMVPQNKNNMSGMTQFNPLMNLNAMNHMPTANEINHYNNVPGYNNMNNLSNNIPKLTSMHSNNTYTSNSTLDTTITNLTNMSNMSSMNDISNLSNLSNVSNVSSMSNITQTSNNNNPYNLQMSNFMNQQNWFNNYLQYYLPIMHPFQYQKMEQDFNANPAFNPYMGNIFVPAAAAAVNNQPEEVPKVAKATKAKTTNKRSSKQANVNKTTINSNKPLNENLDDKKVLDTLNELDYDFLECYKVSEENLNCKRVGGPGIQDLDELVKKRQVPNPFVGVE

SEQ ID NO: 6568 - protein, 277 aa, Glycine max
  misc_feature (1)..(277): Ceres Seq. ID no. 14315645
MVPQNKNNMSGMTQFNPLMNLNAMNHMPTANEINHYNNVPGYNNMNNLSNNIPKLTSMHSNNTYTSNSTLDTTITNLTNMSNMSSMNDISNLSNLSNVSNVSSMSNITQTSNNNNPYNLQMSNFMNQQNWFNNYLQYYLPIMHPFQYQKMEQDFNANPAFNPYMGNIFVPAAAAAVNNQPEEVPKVAKATKAKTTNKRSSKQANVNKTTINSNKPLNENLDDKKVLDTLNELDYDFLECYKVSEENLNCKRVGGPGIQDLDELVKKRQVPNPFVGVE

SEQ ID NO: 6569 - DNA, 1219 bp, Glycine max
  misc_feature (1)..(1219): Ceres Seq. ID no. 14315662
tttcaaactcactacttcgcggccttcccaattctcagctcctcctcgttactcatgctctgtaaaaaagataaaagcttccggaagtcagcaaacaggatccatacgacatggagacaaccttgatgcaacgaagagcaggagtttgctggagaagtttcagaggaaaatgccaatggaattccttagcacccttttcaacaaacaatctatgttgagtgactttacaaccaaagatattgtagatggggaaagatcatccaaatgggtttcagcattcctctttggacaaactatatcagtgatttctcctgatgtttcatatgcaagcagctcagcaagaataaatgagatatatgaggttggagagttgtttgatttaagcatccaactaatatacttggtattgctattaggtttgctagggactggaactttctttgtgattcgtcaagttcttgtccgcagagaacttgacctatctgccaaagagttgcaggagcaagtaagaagtggtgatgctggtgcaactgagctttttgaacttggtgcagtgatgctgcgcaggaaattttaccctgctgctaccaagttcttgcttcaagcaattgagaaatgggatggggataatccggatcttgcccaggtttacaacgctcttggtgtgagctatgtccgcgatgggaaagttgacaaaggaattgctcagtttgagacagctgtcaagcttcaaccaggccatgtcacagcttggaacaatctcggtgatgcctttgagagtaaaaaggactacaagtctgctctaaaggcatttgaagaagtcctactatttgatcctaacaacaaggttgcccggcctaggagagattctttgaagggacttgttgatgcaaccaaaggagttactgtcatcaagtcaacagagaagaagtgagtgtcattgtatcaactcactatgaatatggcattgttaaatacatagttttcaataacttggttgtgttggaaggaattttggctctattggtgtagttactgcttactagctgaggcatactagtgctgcgaaatgtagttgaaattgaaacttgaaagtgctcgattctccaatgggttaccaaagctttgctctggtgctgatggtgtattcacttgtgaaaattcctttatttttttaaatggtcattttcgtgccttgttaaaaaaaaaaaaaaaaaat

SEQ ID NO: 6570 - protein, 310 aa, Glycine max
  misc_feature (1)..(310): Ceres Seq. ID no. 14315663
FKLTTSRPSQFSAPPRYSCSVKKIKASGSQQTGSIRHGDNLDATKSRSLLEKFQRKMPMEFLSTLFNKQSMLSDFTTKDIVDGERSSKWVSAFLFGQTISVISPDVSYASSSARINEIYEVGELFDLSIQLIYLVLLLGLLGTGTFFVIRQVLVRRELDLSAKELQEQVRSGDAGATELFELGAVMLRRKFYPAATKFLLQAIEKWDGDNPDLAQVYNALGVSYVRDGKVDKGIAQFETAVKLQPGHVTAWNNLGDAFESKKDYKSALKAFEEVLLFDPNNKVARPRRDSLKGLVDATKGVTVIKSTEKK

SEQ ID NO: 6571 - protein, 254 aa, Glycine max
  misc_feature (1)..(254): Ceres Seq. ID no. 14315664
MPMEFLSTLFNKQSMLSDFTTKDIVDGERSSKWVSAFLFGQTISVISPDVSYASSSARINEIYEVGELFDLSIQLIYLVLLLGLLGTGTFFVIRQVLVRRELDLSAKELQEQVRSGDAGATELFELGAVMLRRKFYPAATKFLLQAIEKWDGDNPDLAQVYNALGVSYVRDGKVDKGIAQFETAVKLQPGHVTAWNNLGDAFESKKDYKSALKAFEEVLLFDPNNKVARPRRDSLKGLVDATKGVTVIKSTEKK

SEQ ID NO: 6572 - protein, 252 aa, Glycine max
  misc_feature (1)..(252): Ceres Seq. ID no. 14315665
MEFLSTLFNKQSMLSDFTTKDIVDGERSSKWVSAFLFGQTISVISPDVSYASSSARINEIYEVGELFDLSIQLIYLVLLLGLLGTGTFFVIRQVLVRRELDLSAKELQEQVRSGDAGATELFELGAVMLRRKFYPAATKFLLQAIEKWDGDNPDLAQVYNALGVSYVRDGKVDKGIAQFETAVKLQPGHVTAWNNLGDAFESKKDYKSALKAFEEVLLFDPNNKVARPRRDSLKGLVDATKGVTVIKSTEKK

SEQ ID NO: 6573 - DNA, 1297 bp, Glycine max
  misc_feature (1)..(1297): Ceres Seq. ID no. 14315684
aattgctatccaagctttaccttatttcttctgcatgtgaacatatatttattttttcattttctttcttctgccccctattcttttttagttggttgttatggttaaatagtatcatgttcatgacgtctcaaatgcaagtaacatcatggattttgtagagactgtgagagtgagtgaacgtgcccctaggtgtttatgcttaagcaggaaaaaaaatctcaggattagtgaggtggagatcaaagatcactaacttatttgaatttctgcatatgtcaactagtatagtatttgagaaagatgtttgttgtttgatttcttcgacctcattaagtcaaacaacttagaattaattatttaactaagctacttgtattgtcatcatccagttatttgtggataccatatctcgtctgtttatgtttaccttgctatttctctctttctctttattgcaattttgaagtcatttgcctactgatgttcacttttaccaatcgaatacaatttatgagcagtctgcattggatgatgatatatggtttatattacattcaattcactgtgtatgttattgttatgttatgccaattgccaccgaagaaggtcagaaacacaatgagttcgtcgaacctgagagatctccaacgcgaattggagaacaaagccaacgatctcagcaagcttcaaaaggaaattgcaaagaatcaccaaatgagaaagaagtacacactccagcttggcgagaacgagctcgtccttaaggaactggatttattgaaagatgacacaaatgtttataagttgattgggccagtacttgttaagcaagatttggccgaggccaatgcaaatgtccgcaagaggatcgaatacatctcagctgaattgaagcgtcttgatgccactgttcaagatttggaagagaagcaaaatagcaagaaagatgcaatactaaaattgcaacaaaggattcaatcacttcaggctgggaaaggcaaggcatagttttccctcacatattgttccagcattgtaatttgaccgtgctaaggttggatgtgcatttgtattttgtgcctctttgttttggactgaagttgactcttaggaatgtgtttcgggaaacaatttggaaattagattgatattattatagttggtattggctcattttcaagaaaatgacctgtacaaggttctgtggaaggcttagagaagtcatttgttgcaagggctactttttgtggaaaagccattggcttttttctaatgcatggactatttttttttt

SEQ ID NO: 6574 - protein, 175 aa, Glycine max
  misc_feature (1)..(175): Ceres Seq. ID no. 14315685
MFTFTNRIQFMSSLHWMMIYGLYYIQFTVYVIVMLCQLPPKKVRNTMSSSNLRDLQRELENKANDLSKLQKEIAKNHQMRKKYTLQLGENELVLKELDLLKDDTNVYKLIGPVLVKQDLAEANANVRKRIEYISAELKRLDATVQDLEEKQNSKKDAILKLQQRIQSLQAGKGKA

SEQ ID NO: 6575 - protein, 165 aa, Glycine max
  misc_feature (1)..(165): Ceres Seq. ID no. 14315686
MSSLHWMMIYGLYYIQFTVYVIVMLCQLPPKKVRNTMSSSNLRDLQRELENKANDLSKLQKEIAKNHQMRKKYTLQLGENELVLKELDLLKDDTNVYKLIGPVLVKQDLAEANANVRKRIEYISAELKRLDATVQDLEEKQNSKKDAILKLQQRIQSLQAGKGKA

SEQ ID NO: 6576 - protein, 159 aa, Glycine max
  misc_feature (1)..(159): Ceres Seq. ID no. 14315687
MMIYGLYYIQFTVYVIVMLCQLPPKKVRNTMSSSNLRDLQRELENKANDLSKLQKEIAKNHQMRKKYTLQLGENELVLKELDLLKDDTNVYKLIGPVLVKQDLAEANANVRKRIEYISAELKRLDATVQDLEEKQNSKKDAILKLQQRIQSLQAGKGKA

SEQ ID NO: 6577 - protein, 129 aa, Glycine max
  misc_feature (1)..(129): Ceres Seq. ID no. 14315688
MSSSNLRDLQRELENKANDLSKLQKEIAKNHQMRKKYTLQLGENELVLKELDLLKDDTNVYKLIGPVLVKQDLAEANANVRKRIEYISAELKRLDATVQDLEEKQNSKKDAILKLQQRIQSLQAGKGKA

SEQ ID NO: 6578 - DNA, 1298 bp, Glycine max
  misc_feature (1)..(1298): Ceres Seq. ID no. 14315846
aaaacccacgtccgtgcccttgaagctaagcaacagtacaaccaaagactcctccaagctgtctgttttcctgtgtagttcttttgtctgctttcctttgtccttgagagggtttcatttttttgcgtatcacaaaaggtaacagagtcaaaaccctgcaaaaagtacaaaatgatgccaggcaatggacagttaactgttcctccgggcttcaggttccaccctactgatgaggagcttctctactattatctgaggaagaaagtttcttatgaagtcattgatcttgatgtcataagagaagtagatctcaacaaacttgagccttgggacctcaaagataagtgtaggattggatcagggcctcagaatgagtggtatttcttcagccataaggacaagaaatacccaacaggaaccagaacaaatcgagcaactacagctggtttttggaaagcaactggaagagacaagtccatataccacactaattccaagaggattggcatgaggaaaaccctagttttctacactggtcgtgctcctcatggccagaagactgattggatcatgcatgagtatcgccttgatgaagatgatgctgatgttcaagaagatgggtgggtggtatgcagggtcttcaaaaagaaaaaccaaagccgaggtttccaacaagaacttgaagaagaagagcacttaaccacccacatgagagcaagtggtccatgccaggttctagagcagaagcatcttcacatgcaaggaggaccatatgatcattacaactttgatgggacaatgcacctcccacagttgttcagtccagaatcagctattgcaccacctacaaattcttccttggccttatccatgaatgccatggacatccttgagtgctctcaaaacctgttgaggctcacaaccactggctgtggacttaatcttatgcagcaacaacaagaagagaggttcagtggtgactggtctttcttggacaagctactagcatcacaccatggcatggatcaaagcaaatgtaaccctcctactaatcatcatgctgcaactgttgtgggcacttctgctcaaaaattcccatttcattaccttggctgtgacaccacccatgatatcatgaaattttccaagtaggaagggatattgcattttaatgtgttattatacttaaggtgatcatgaggtgagaaatatttggtttctaagtatgtgtaatatgtagcaccttgttagatactcattgagattccactcattaatttagttatttcttgagtgtc

SEQ ID NO: 6579 - protein, 326 aa, Glycine max
  misc_feature (1)..(326): Ceres Seq. ID no. 14315847
MMPGNGQLTVPPGFRFHPTDEELLYYYLRKKVSYEVIDLDVIREVDLNKLEPWDLKDKCRIGSGPQNEWYFFSHKDKKYPTGTRTNRATTAGFWKATGRDKSIYHTNSKRIGMRKTLVFYTGRAPHGQKTDWIMHEYRLDEDDADVQEDGWVVCRVFKKKNQSRGFQQELEEEEHLTTHMRASGPCQVLEQKHLHMQGGPYDHYNFDGTMHLPQLFSPESAIAPPTNSSLALSMNAMDILECSQNLLRLTTTGCGLNLMQQQQEERFSGDWSFLDKLLASHHGMDQSKCNPPTNHHAATVVGTSAQKFPFHYLGCDTTHDIMKFSK

SEQ ID NO: 6580 - protein, 325 aa, Glycine max
  misc_feature (1)..(325): Ceres Seq. ID no. 14315848
MPGNGQLTVPPGFRFHPTDEELLYYYLRKKVSYEVIDLDVIREVDLNKLEPWDLKDKCRIGSGPQNEWYFFSHKDKKYPTGTRTNRATTAGFWKATGRDKSIYHTNSKRIGMRKTLVFYTGRAPHGQKTDWIMHEYRLDEDDADVQEDGWVVCRVFKKKNQSRGFQQELEEEEHLTTHMRASGPCQVLEQKHLHMQGGPYDHYNFDGTMHLPQLFSPESAIAPPTNSSLALSMNAMDILECSQNLLRLTTTGCGLNLMQQQQEERFSGDWSFLDKLLASHHGMDQSKCNPPTNHHAATVVGTSAQKFPFHYLGCDTTHDIMKFSK

SEQ ID NO: 6581 - protein, 214 aa, Glycine max
  misc_feature (1)..(214): Ceres Seq. ID no. 14315849
MRKTLVFYTGRAPHGQKTDWIMHEYRLDEDDADVQEDGWVVCRVFKKKNQSRGFQQELEEEEHLTTHMRASGPCQVLEQKHLHMQGGPYDHYNFDGTMHLPQLFSPESAIAPPTNSSLALSMNAMDILECSQNLLRLTTTGCGLNLMQQQQEERFSGDWSFLDKLLASHHGMDQSKCNPPTNHHAATVVGTSAQKFPFHYLGCDTTHDIMKFSK

SEQ ID NO: 6582 - DNA, 1531 bp, Glycine max
  misc_feature (1)..(1531): Ceres Seq. ID no. 14315874
atcatatcatatattcatattcatctccccacgagattctggttctgtttaggccacccacacacctccatttccccaactcgctccgagtttactcactcctttccctttcgagatcaaccgccaccgctacgcctccgcgctccgccgccactgcaatccccgcctcccttctccgtcaatgcaaaattcggcgtcgattctcgccggaaccttctcccgctcttccttcccctccgggctttgacttttgctttcttgcgattgcgatgagtccctttcgccctttgttgctcttcgccgccgtattcttcctcctccgtcccctcgccgccaccgacggcgacgccgatccgctttacataggttgtgtggagcagtgtaagaaaactggatgtgtaggggatagatactttcaacattgtaaattttcatcagatggaaaaccaattgatggtccatggtatatgcatgaacccctctatctgaggtggaaacaatgggactgttgcactgactgtaggtattactgtatgctagctagagaggaagaacgaacaaaacttggcgacaagcctgtcaagtatcatggaaaatggccattccgtcgcgtttatggaattcaggaacctgtggctgttgctctgtctgccgtcaatcttgctatgcagtttcatggttgggtatcctttttcattcttgtgtactataagttgactttgaggccagataagaagacttactatgagtacactggattgtggcatatttatgggattttatccatgaacgcatggctgtggagtgctgttttccatagtagagccgtggaattaacagagaagctggatttttcttctgctgtggcattacttggattcagcctcattctagcaatattgcgagcttttaacgtgagggatgaggctacgcgagtcatgatttctgctcccttgattgcttttgtgacaactcatatcatgtatctgaatttctatgaacttgcttatggtttgaacagaatagtttgcacgggaatggttgttgtccagcttcttatttgggccatttgggctggtgcttcgaaccacccggcgcgatggaaattatgggcagtagtggttggaggaggcttagctatggtgttggagacatatgactttccaccttacatgggatatgtggatgctcatgctctatggcatgcaacaagcattcctctcacatttttttggtggggttttataagggatgatgctgagtttagaaccacagctatgctcaagaaggtaaaatagtgctgcagacacaatttggcagaggttggatctgatgaagaacatgtcatatatgttgctgcttactttgtttttgtacatcagaactttttttttttttttaatttgttttcctcgtgtaggcgtttatttgaaatgcttaacacgatggtttctgtgcttttgattttgtaactttttgttttcctcatgtatgaagcatactttcttagtggaattaattgcaatgcttt

SEQ ID NO: 6583 - protein, 431 aa, Glycine max
  misc_feature (1)..(431): Ceres Seq. ID no. 14315875
HIIYSYSSPHEILVLFRPPTHLHFPNSLRVYSLLSLSRSTATATPPRSAATAIPASLLRQCKIRRRFSPEPSPALPSPPGFDFCFLAIAMSPFRPLLLFAAVFFLLRPLAATDGDADPLYIGCVEQCKKTGCVGDRYFQHCKFSSDGKPIDGPWYMHEPLYLRWKQWDCCTDCRYYCMLAREEERTKLGDKPVKYHGKWPFRRVYGIQEPVAVALSAVNLAMQFHGWVSFFILVYYKLTLRPDKKTYYEYTGLWHIYGILSMNAWLWSAVFHSRAVELTEKLDFSSAVALLGFSLILAILRAFNVRDEATRVMISAPLIAFVTTHIMYLNFYELAYGLNRIVCTGMVVVQLLIWAIWAGASNHPARWKLWAVVVGGGLAMVLETYDFPPYMGYVDAHALWHATSIPLTFFWWGFIRDDAEFRTTAMLKKVK

SEQ ID NO: 6584 - protein, 342 aa, Glycine max
  misc_feature (1)..(342): Ceres Seq. ID no. 14315876
MSPFRPLLLFAAVFFLLRPLAATDGDADPLYIGCVEQCKKTGCVGDRYFQHCKFSSDGKPIDGPWYMHEPLYLRWKQWDCCTDCRYYCMLAREEERTKLGDKPVKYHGKWPFRRVYGIQEPVAVALSAVNLAMQFHGWVSFFILVYYKLTLRPDKKTYYEYTGLWHIYGILSMNAWLWSAVFHSRAVELTEKLDFSSAVALLGFSLILAILRAFNVRDEATRVMISAPLIAFVTTHIMYLNFYELAYGLNRIVCTGMVVVQLLIWAIWAGASNHPARWKLWAVVVGGGLAMVLETYDFPPYMGYVDAHALWHATSIPLTFFWWGFIRDDAEFRTTAMLKKVK

SEQ ID NO: 6585 - protein, 276 aa, Glycine max
  misc_feature (1)..(276): Ceres Seq. ID no. 14315877
MHEPLYLRWKQWDCCTDCRYYCMLAREEERTKLGDKPVKYHGKWPFRRVYGIQEPVAVALSAVNLAMQFHGWVSFFILVYYKLTLRPDKKTYYEYTGLWHIYGILSMNAWLWSAVFHSRAVELTEKLDFSSAVALLGFSLILAILRAFNVRDEATRVMISAPLIAFVTTHIMYLNFYELAYGLNRIVCTGMVVVQLLIWAIWAGASNHPARWKLWAVVVGGGLAMVLETYDFPPYMGYVDAHALWHATSIPLTFFWWGFIRDDAEFRTTAMLKKVK

SEQ ID NO: 6586 - DNA, 1240 bp, Glycine max
  misc_feature (1)..(1240): Ceres Seq. ID no. 14315881
aaaaaacacacaattcacaaaggcattcgacggagaatagaaaagaagcggaagaggaagcagcaggtgaagcgcgacggagagccaaagcccaaatcggttcgtgcgggttcaacccgaaccgacaatgtgaaagatccatttccatctcatgctcgacccaccccacatgaatgcgaagccgtgcgtgacactctcttagccctacacggcattcccccggaactcgccaagtaccgcaaactcccaccgtccgatgacccggtccaactgcagccacccgaaccggttctcgacggtcttgtccgaaccgtcctctcgcagaacaccaccgaggccaattcccaaaaggctttcgcttccctcaaatcctcctttcccagttgggaactagttctctgtgccgagtccaaggacgtggagaatgccattcggtgcggaggtctagctccgactaaggcttcctgcattaagaacgtgttgcgttgtttgcgcgagagaagaggtgaattgtgtttggagtatttgcgggacttgtcagttgatgaagttaaggctgagctttctcttttcaaaggaattggtcccaaaacggtggcttgtgtgttgatgttcaatcttcagcaagatgattttcctgtggacactcacgtaagcatgatttcatcttttactgcatttgactccattgagctatttatagcacttgaatgtttatgcagatatttgagattgcaaaaaccatgggttgggtaccagctgttgcaaacagaaataagtcatatcttcatctaaaccaaagggtaccaaatgaacttaagtttgacctgaattgtcttctgtatacgcacgggaagctttgccaccaatgctccggtaaaaagggtaacaagcaaggaaagaaatgtgacgataactcctgtcctttattgaattatgataaagactcagttgaactttgagctggggaagcaaattatttttcaattatttgtttctctaactaaatgaagtcaataggggcactctaatcttgtaagttgtaagtgtatagaatactactagtatagagttaggctgttaggcaggagaaccaattttgagattagatgaaagaaaggtcaacaattgtgagctagtgcatcaagcacttgtagggtttgggttgcctaaaaattgcccatctttaattaattctgtaaagggatcttgctggaaatggaacattatgtttatttct

SEQ ID NO: 6587 - protein, 264 aa, Glycine max
  misc_feature (1)..(264): Ceres Seq. ID no. 14315882
KKHTIHKGIRRRIEKKRKRKQQVKRDGEPKPKSVRAGSTRTDNVKDPFPSHARPTPHECEAVRDTLLALHGIPPELAKYRKLPPSDDPVQLQPPEPVLDGLVRTVLSQNTTEANSQKAFASLKSSFPSWELVLCAESKDVENAIRCGGLAPTKASCIKNVLRCLRERRGELCLEYLRDLSVDEVKAELSLFKGIGPKTVACVLMFNLQQDDFPVDTHVSMISSFTAFDSIELFIALECLCRYLRLQKPWVGYQLLQTEISHIFI

SEQ ID NO: 6588 - DNA, 1406 bp, Glycine max
  misc_feature (1)..(1406): Ceres Seq. ID no. 14315889
ctctctctcaattgcattcccccttcccatttctgagaaggtgggagagaaaccccagagaaattcaatccacccctttctctgggtctgatcccatatctctctccagatttgctcgcccttttacttcaatttctcaaaaccggcacgcattcttttgtcttctaatttctggtggctgaatatcaaaaaccctagagagcactgttttggggctacgtttctgtttcggacggagaacgagaaaaggcgagggttttgcgcccgacccatttcgactggaaggccctagattcaaagggatcgtttgatttcattggataatcccccgacacgaaagggggtagttgcggagaaaccccctctgaaaactggaagccctaattgagagattcaaatcgttcttctaaatcgatggattcagcgttttcgcccttgagtttggttattttcggtatttcaattagcttttacgcatttattgtccaatcgcagacgcaaaatgggaacaatggcgctgaattagcaccaccggcgtattgggtgtcaagtccaccgctgcctccgcctcctccgccacctcctccgccgttgtcactgtctcctccgccgccaccctcaaaatctatgacactcagtttcgttcccccgccgggagcgccgccgccctatcctaacaatatgcccaacgtgagaagacctcctcaccgccgccgccgccaccgcagaccgcctccgccgccgccaccaccaccaccgcacaagatgaatgccggtaaaaaggttggacttttgtttgtgggcattgcggcaatcatgcaagttggcgtggttgggttcttggtaatcaagagaagacaacttttgaagagcgatgacagatacgagagttgttcttgaacgagattttccacggttttcttatcaaattctttttttattttaatttaatgggttgaaattctttgctgaacgaggtttggttcgaggaaggggaatattggttggattttgcagaatctggtgggaggaacatgaaaaaggcaagcatggaaagacatggagaatttgaggaatcattggaacatgaattgtgcaattgatgccatcatttcggcccctttggcgttactgtgtatattggtactgctagttcacgtttccttcacgtttcaagttgtgttgcccctttttcccttagttccattacattggctggcttataatggaaaagaaaaagtagccctcatgtacctttttatttattatttttttttttaatttgatttttctctaacatgttccgtgtacaatgatgttaggaatccttaaaggattaacaatgacacaatcttatattctttggcttttcacctcgaattgatgatgtcaggttcaatgttctc

SEQ ID NO: 6589 - protein, 161 aa, Glycine max
  misc_feature (1)..(161): Ceres Seq. ID no. 14315890
MDSAFSPLSLVIFGISISFYAFIVQSQTQNGNNGAELAPPAYWVSSPPLPPPPPPPPPPLSLSPPPPPSKSMTLSFVPPPGAPPPYPNNMPNVRRPPHRRRRHRRPPPPPPPPPPHKMNAGKKVGLLFVGIAAIMQVGVVGFLVIKRRQLLKSDDRYESCS

SEQ ID NO: 6590 - protein, 90 aa, Glycine max
  misc_feature (1)..(90): Ceres Seq. ID no. 14315891
MTLSFVPPPGAPPPYPNNMPNVRRPPHRRRRHRRPPPPPPPPPPHKMNAGKKVGLLFVGIAAIMQVGVVGFLVIKRRQLLKSDDRYESCS

SEQ ID NO: 6591 - DNA, 1138 bp, Glycine max
  misc_feature (1)..(1138): Ceres Seq. ID no. 14315896
ctgtccaacaaaaatctcgaccaatagctatattctctcatggctggagattaggtagagacaaaattgggcaagagatatggggtagtttttatgatgctttggggaatgaatttaatatccatctatcgagaatgagtttgatgtcagcactggaatggtggctggtataccatcccagcatccagaagttctcatggaagcctcctcacacccctttctcctcccctctcttccttagtctctccatcctcagctacctctccctcaccctcctcctcaccctcctccctctcccacccttcccacaccgcctcctgaagcccatcaccgccctccacaacctcctcctcctcctcctctccctcctcatgctcctgggctgctccctcaccctcctcatccacacccctcacctccgctgggccgtctgcttcccaccccacaccaatcccaccgggcccctcttcttctgggcctacatcttctacctctccaaaatcctcgaattcctcgacacgctcttcatcgtcctctcccgctccttccgacgcctctccttcctccacgtctaccaccacgccaccgtcctcctcatgtgctacctctggctccaaacctcccaatccctcttccccgtcgcgctcctcaccaatgcctccgtccacgtcatcatgtacggttactacttcctcagcgccctcggcatccgcccctcctggaagcgcgccgtcaccgactgccagatcatccagttcgtcttcagcttcgcaatttcgggtctcatgctccactaccacttctccggatccggatgctccgggatttggggctggtgcttcaatgcggtttttaatgcctctctcttggccctctttgttgattttcatctcaagagttatgctaagaaacgcactcttaataaggactcatgaattcctcgtccatttcattggtagcatactttatcttctgtaagacaagagaaaaaaaatattcattggaattcaatgacaatgttttttttttcctcctccttgttaaaggattattacaagataataatgccttacattacctgtcatctttattttctttcctttttccttaccattcaagggatgcaacttttaatccg

SEQ ID NO: 6592 - protein, 310 aa, Glycine max
  misc_feature (1)..(310): Ceres Seq. ID no. 14315897
VQQKSRPIAIFSHGWRLGRDKIGQEIWGSFYDALGNEFNIHLSRMSLMSALEWWLVYHPSIQKFSWKPPHTPFSSPLFLSLSILSYLSLTLLLTLLPLPPFPHRLLKPITALHNLLLLLLSLLMLLGCSLTLLIHTPHLRWAVCFPPHTNPTGPLFFWAYIFYLSKILEFLDTLFIVLSRSFRRLSFLHVYHHATVLLMCYLWLQTSQSLFPVALLTNASVHVIMYGYYFLSALGIRPSWKRAVTDCQIIQFVFSFAISGLMLHYHFSGSGCSGIWGWCFNAVFNASLLALFVDFHLKSYAKKRTLNKDS

SEQ ID NO: 6593 - protein, 266 aa, Glycine max
  misc_feature (1)..(266): Ceres Seq. ID no. 14315898
MSLMSALEWWLVYHPSIQKFSWKPPHTPFSSPLFLSLSILSYLSLTLLLTLLPLPPFPHRLLKPITALHNLLLLLLSLLMLLGCSLTLLIHTPHLRWAVCFPPHTNPTGPLFFWAYIFYLSKILEFLDTLFIVLSRSFRRLSFLHVYHHATVLLMCYLWLQTSQSLFPVALLTNASVHVIMYGYYFLSALGIRPSWKRAVTDCQIIQFVFSFAISGLMLHYHFSGSGCSGIWGWCFNAVFNASLLALFVDFHLKSYAKKRTLNKDS

SEQ ID NO: 6594 - protein, 263 aa, Glycine max
  misc_feature (1)..(263): Ceres Seq. ID no. 14315899
MSALEWWLVYHPSIQKFSWKPPHTPFSSPLFLSLSILSYLSLTLLLTLLPLPPFPHRLLKPITALHNLLLLLLSLLMLLGCSLTLLIHTPHLRWAVCFPPHTNPTGPLFFWAYIFYLSKILEFLDTLFIVLSRSFRRLSFLHVYHHATVLLMCYLWLQTSQSLFPVALLTNASVHVIMYGYYFLSALGIRPSWKRAVTDCQIIQFVFSFAISGLMLHYHFSGSGCSGIWGWCFNAVFNASLLALFVDFHLKSYAKKRTLNKDS

SEQ ID NO: 6595 - DNA, 1717 bp, Glycine max
  misc_feature (1)..(1717): Ceres Seq. ID no. 14315919
agaaaaatcttttggattcccttctcattcactttcactttcactccttagcctggttataggagctagggtttatcgagggtttcgttccttcctctctgcaacaacaatggcgaaacctgggcgaggtcgtcgctctccctccggttccgtttccggctcctcctctcgctcctcttccccctccgactctcgttcctcctctcgctcgcgctccctttctcggtcccgttctccctcgcgctccagatcctcttccccctcctcctcctcttcctcccgaagctcccgcagccgcagccctcccccgcagaggcgccgaagtcctgctgacgcaactaggcgaggtcggtctcctccacctcagtctaagagagcttcacctcccccaaggaaaccttctcctgtacgcgagtcacttgttcttcatgtagaaaagctcagcagaaatgtcaatgaagggcacttgaaagaaattttcagtaactttggtgaggttataagtgtcgagttggcaatggatcgaactgtcaatcttccaaaagggtatggatatgtgcagttcaagacaagaggggatgctgaaaaggcattattgtacatggatggtgcccaaatagatggcaatgtcatcaaggcaagatttactctacctccaaggcagaaagtttcaccacccccaaaggcttctgctgttgctccaaagagagacacccccagggctgataatgctagtgcagatgttgacaaggatggaccaaagcggcaaagagaatcttctcctcgtagaaaacctcctccctcaccacggaggagatctcctgtacctagaagagctggatctccgagacgaccagattctccacgtcgccgtgcagattctcctgttcgtcgccgattagactctccttatcgtcgtggaggagacacacctcctaggaggcggcctgtgtctcctggaagaggtcgttctccatctccacctagacgccttagatcccctgcaaggctgtcacctagaaggatacgtggaagtccaggtcgaagacgttcacctccacctcctcccaggcgccgatcaccacctagacgaccacgtagtcctcctagaaggtctccaattggtcgtagacgtactcgctctccaatacgtaggtctgcacgctcacgctcaaggtcattctcacctcgcagaggtagaccaccagttagacgtggaaggtcatcatcctactctgattcacctagtccacgcaaggtatcccggagatcaaagagtcggagcccaagaaggcctttgagaggaagaggcagtagcaacagcagcagcagcagttcaccaccaccaccaccaccaccaccaactcgcaagccatagataattcttgtacatctactgtctatttctgttgatgtatttattgagattctgtaccggctgagttctagcttgatgtgcttggggatatatgttgcttttcattgtggtctattaacacattttttcttattagcacttaaaagttgtttggaaactaggcattccgtttttgtttggatcctactttagttgttactttgctcaaaaatgcaaaacatgaaagacgatagtgctctgctttattgtatttctagaaattcagtggaattccatgtaactggtagtttctttagaaatttgattatgcgaagaaagtagtagtaaatgttcaatgtg

SEQ ID NO: 6596 - protein, 458 aa, Glycine max
  misc_feature (1)..(458): Ceres Seq. ID no. 14315920
EKSFGFPSHSLSLSLLSLVIGARVYRGFRSFLSATTMAKPGRGRRSPSGSVSGSSSRSSSPSDSRSSSRSRSLSRSRSPSRSRSSSPSSSSSSRSSRSRSPPPQRRRSPADATRRGRSPPPQSKRASPPPRKPSPVRESLVLHVEKLSRNVNEGHLKEIFSNFGEVISVELAMDRTVNLPKGYGYVQFKTRGDAEKALLYMDGAQIDGNVIKARFTLPPRQKVSPPPKASAVAPKRDTPRADNASADVDKDGPKRQRESSPRRKPPPSPRRRSPVPRRAGSPRRPDSPRRRADSPVRRRLDSPYRRGGDTPPRRRPVSPGRGRSPSPPRRLRSPARLSPRRIRGSPGRRRSPPPPPRRRSPPRRPRSPPRRSPIGRRRTRSPIRRSARSRSRSFSPRRGRPPVRRGRSSSYSDSPSPRKVSRRSKSRSPRRPLRGRGSSNSSSSSSPPPPPPPPTRKP

SEQ ID NO: 6597 - protein, 422 aa, Glycine max
  misc_feature (1)..(422): Ceres Seq. ID no. 14315921
MAKPGRGRRSPSGSVSGSSSRSSSPSDSRSSSRSRSLSRSRSPSRSRSSSPSSSSSSRSSRSRSPPPQRRRSPADATRRGRSPPPQSKRASPPPRKPSPVRESLVLHVEKLSRNVNEGHLKEIFSNFGEVISVELAMDRTVNLPKGYGYVQFKTRGDAEKALLYMDGAQIDGNVIKARFTLPPRQKVSPPPKASAVAPKRDTPRADNASADVDKDGPKRQRESSPRRKPPPSPRRRSPVPRRAGSPRRPDSPRRRADSPVRRRLDSPYRRGGDTPPRRRPVSPGRGRSPSPPRRLRSPARLSPRRIRGSPGRRRSPPPPPRRRSPPRRPRSPPRRSPIGRRRTRSPIRRSARSRSRSFSPRRGRPPVRRGRSSSYSDSPSPRKVSRRSKSRSPRRPLRGRGSSNSSSSSSPPPPPPPPTRKP

SEQ ID NO: 6598 - protein, 286 aa, Glycine max
  misc_feature (1)..(286): Ceres Seq. ID no. 14315922
MDRTVNLPKGYGYVQFKTRGDAEKALLYMDGAQIDGNVIKARFTLPPRQKVSPPPKASAVAPKRDTPRADNASADVDKDGPKRQRESSPRRKPPPSPRRRSPVPRRAGSPRRPDSPRRRADSPVRRRLDSPYRRGGDTPPRRRPVSPGRGRSPSPPRRLRSPARLSPRRIRGSPGRRRSPPPPPRRRSPPRRPRSPPRRSPIGRRRTRSPIRRSARSRSRSFSPRRGRPPVRRGRSSSYSDSPSPRKVSRRSKSRSPRRPLRGRGSSNSSSSSSPPPPPPPPTRKP

SEQ ID NO: 6599 - DNA, 1319 bp, Glycine max
  misc_feature (1)..(1319): Ceres Seq. ID no. 14315931
tcgatgctattacagaatgtgccccctgccattctcctaaggttcctgagggagcatagatcagaatgggcagacaacaatatggatgcttacacagctgctgctattaaagtcggcccttgcagcctatcaggatctcgtgttggaaactatggaggtcaagttatactccccctagcacacacaattgagcatgaggagtttttggaagtcattaaattggaaggaatagctcattctcctgaagacacaataatgcctagagaaatgtttcttttgcaactctgcagtggaatggatgagaatgctgttggcacctgtgctgaacttatatctgctccaattgatgcttcctttgctgatgatgcccccctcctaccttctggatttcgcatcattcctcttgaatctggaaaggaagcttccagccccaatcgcacacttgaccttgcatctgcccttgacgttggtcccagtggaaaccgagcttcaaatggatgtgctaattccagctgtatgagatctgtgatgacaatagcatttgaatttgcatttgaaagccatatgcaagagcatgtagcatctatggcacgccaatatgttcggagcattatatcatcagtccaaagggtagcattagcactttctccttctcatttgagttcacatgcagggcttaggtcaccattgggtactcctgaagcgcaaacccttgctcattggatctgcaacagttataggtgctacttgggtgtggagctacttaaatctaacaacgaggggaatgaatctttgctcaagtccttgtggcatcactcagatgcaatattgtgctgcactctaaaggcattgccagtgttcactttctcgaaccaggctgggcttgacatgcttgagaccaccctagttgcattacaagatataactttagagaaaatatttgatgatcatggacgaaaaattctcttttcagagtttccacagattatccaacagggttttgcatgtcttcaaggtggcatttgtctttcaagcatggggcgacctgtctcatatgaaagagttgttgcttggaaggtgctgaatgaagaagagaatgctcattgtatttgctttatgtttgtgaactggtcttttgtttgacatcttgttctgagtacacttgggcttattgtatccaagtgttagataaagttttactctaagactcttgtgtgctttgttggttggtgttttactgtatttgcactaaatacttggattgcactttaaatgactatttgtgttattattagcttatgtaacttgtttccttattc

SEQ ID NO: 6600 - protein, 380 aa, Glycine max
  misc_feature (1)..(380): Ceres Seq. ID no. 14315932
SMLLQNVPPAILLRFLREHRSEWADNNMDAYTAAAIKVGPCSLSGSRVGNYGGQVILPLAHTIEHEEFLEVIKLEGIAHSPEDTIMPREMFLLQLCSGMDENAVGTCAELISAPIDASFADDAPLLPSGFRIIPLESGKEASSPNRTLDLASALDVGPSGNRASNGCANSSCMRSVMTIAFEFAFESHMQEHVASMARQYVRSIISSVQRVALALSPSHLSSHAGLRSPLGTPEAQTLAHWICNSYRCYLGVELLKSNNEGNESLLKSLWHHSDAILCCTLKALPVFTFSNQAGLDMLETTLVALQDITLEKIFDDHGRKILFSEFPQIIQQGFACLQGGICLSSMGRPVSYERVVAWKVLNEEENAHCICFMFVNWSFV

SEQ ID NO: 6601 - protein, 379 aa, Glycine max
  misc_feature (1)..(379): Ceres Seq. ID no. 14315933
MLLQNVPPAILLRFLREHRSEWADNNMDAYTAAAIKVGPCSLSGSRVGNYGGQVILPLAHTIEHEEFLEVIKLEGIAHSPEDTIMPREMFLLQLCSGMDENAVGTCAELISAPIDASFADDAPLLPSGFRIIPLESGKEASSPNRTLDLASALDVGPSGNRASNGCANSSCMRSVMTIAFEFAFESHMQEHVASMARQYVRSIISSVQRVALALSPSHLSSHAGLRSPLGTPEAQTLAHWICNSYRCYLGVELLKSNNEGNESLLKSLWHHSDAILCCTLKALPVFTFSNQAGLDMLETTLVALQDITLEKIFDDHGRKILFSEFPQIIQQGFACLQGGICLSSMGRPVSYERVVAWKVLNEEENAHCICFMFVNWSFV

SEQ ID NO: 6602 - protein, 353 aa, Glycine max
  misc_feature (1)..(353): Ceres Seq. ID no. 14315934
MDAYTAAAIKVGPCSLSGSRVGNYGGQVILPLAHTIEHEEFLEVIKLEGIAHSPEDTIMPREMFLLQLCSGMDENAVGTCAELISAPIDASFADDAPLLPSGFRIIPLESGKEASSPNRTLDLASALDVGPSGNRASNGCANSSCMRSVMTIAFEFAFESHMQEHVASMARQYVRSIISSVQRVALALSPSHLSSHAGLRSPLGTPEAQTLAHWICNSYRCYLGVELLKSNNEGNESLLKSLWHHSDAILCCTLKALPVFTFSNQAGLDMLETTLVALQDITLEKIFDDHGRKILFSEFPQIIQQGFACLQGGICLSSMGRPVSYERVVAWKVLNEEENAHCICFMFVNWSFV

SEQ ID NO: 6603 - DNA, 781 bp, Glycine max
  misc_feature (1)..(781): Ceres Seq. ID no. 14315938
acattaacaaggcattcgagaggtttggttcaaaccccaacattgaggttctaggaaacttaaaggccaagagacaagccatattgtcctttctgatatactctaccaccaccaactcttcctcagctggtgagtggagtgatggtaacaaagaaaatgaaggggagcttgatttgtgggcagaaacggggaaccaaagaggtaaaccacttcatggcccttttgttgcagcattgctcaatgacctctttggcattcaagctcgaggagggtgtgcttgtgctggaccttatggccacgaattgctccacatcaacaagtctcaatcccttgccattagatcagcagttcaagagggctatattggagtaaagccagggtggactcgagtcagttttccatactacatgagtgaagaagatgttgagtacattctaagagctatagagtttttagctgtgtatggccaacgattcattcctctgtatagtttcaatttgataaatggcagctggagattgaagacagagaaatttgaggcactaaccaaggaaggcatgcgaagggacgaatcatactttgaggtggctaaatgtgttgctagtggcctcccaaaattcccttctcagggtatactccaggaggatgtggatcccaatatcttctgctttagagtttaaattttgtcaatatagtaccaaacatcatttgttcgatgtacaaatatttcatgagactttccattgctttcacaccatgattgagatctacatttcctggc

SEQ ID NO: 6604 - protein, 225 aa, Glycine max
  misc_feature (1)..(225): Ceres Seq. ID no. 14315939
INKAFERFGSNPNIEVLGNLKAKRQAILSFLIYSTTTNSSSAGEWSDGNKENEGELDLWAETGNQRGKPLHGPFVAALLNDLFGIQARGGCACAGPYGHELLHINKSQSLAIRSAVQEGYIGVKPGWTRVSFPYYMSEEDVEYILRAIEFLAVYGQRFIPLYSFNLINGSWRLKTEKFEALTKEGMRRDESYFEVAKCVASGLPKFPSQGILQEDVDPNIFCFRV

SEQ ID NO: 6605 - DNA, 1479 bp, Glycine max
  misc_feature (1)..(1479): Ceres Seq. ID no. 14315958
attgccttcactttcaacccgtactttctctgtttctaaacaccccccacaaaattttctcactcgagaattttcccggaaaatctcacctttttcgatttctcagtcaagacaaacaacaacaaaaactctaaattctttcttaattcttgccaaattcgaaggagagagaaagagaaaaagaaaaggaaaaaaggttaatggcatcactgggatctccgtcttctttctggtgctaccgctgcaaccgcatagttagggttccacaaaaccacgccgttctcctctgccccgattgcaactccggcttcctcgaagagctccaaacccctccccactcgcgccgatccacgcgcggcggcggtgggtcccccttcaacccggtaatcgtcctgcgcaacgcaaacgacgtcgtctcgcccgaaacgcggaacttcgaactctactacaacgacgccgtttcaggttcctccggcccaagcagtctccgtcctttaccacagggagtatccgagttcctcatgggctccggcttcgacaatgtactcgaccatctcgacgccgccgcggggggcgccggagcactgccccccacggcagcgtcgaaagcggcgatcgagtcgatgccggtggttaagatcctcgcgagccacacctacgcggaatcgcactgcgcggtctgcatggagaatttcgagatcaactgcgacgcacgtgagatgccgtgcggtcacgtgtaccattccgagtgcatcgtgccgtggctctcggtgagaaactcgtgccccgtgtgccgccacgaggttccttcggatgaagttgaagaaagtaataacaatactgtggggttgactatttggagacttcctgggggaggattcgctgtgggcaggttcatcggagggagggagctcccactggtgtatacggagatggacggcgggtttaacggcgctaacggcgttccaaggagagtcgcttgggatagctccgttgggaggtctagggagaatagaggcttcggtgctgctttcaggaatgttttttcgtatatcgggagggttaggagctcgttttctcgccgaacgagaaattcgcgtgccaacggaagatctcgttcttaaacaacggtctgcaattgcaatttcgatcgtaacgtcaaggttattagagctcactgactgtgacgcggtcgcaattgatgctgcgctgtcctcaacatttttctgcaattttctacgatatcaaaggctgcggtgatgagaccgcaatcgcagattcgcagtaaggttttaagaaaaaacgtgattgcaattgacgtcacatcagctgcatttgtctgcaatttttctgttgtattcggaaacaatgacgagactgcaacttttttttaccacagtgggatttttcgatttttgtgatgtttttagtttgctaagtattcgtttgaatttttagaggaaatgcatttttttttat

SEQ ID NO: 6606 - protein, 307 aa, Glycine max
  misc_feature (1)..(307): Ceres Seq. ID no. 14315959
MASLGSPSSFWCYRCNRIVRVPQNHAVLLCPDCNSGFLEELQTPPHSRRSTRGGGGSPFNPVIVLRNANDVVSPETRNFELYYNDAVSGSSGPSSLRPLPQGVSEFLMGSGFDNVLDHLDAAAGGAGALPPTAASKAAIESMPVVKILASHTYAESHCAVCMENFEINCDAREMPCGHVYHSECIVPWLSVRNSCPVCRHEVPSDEVEESNNNTVGLTIWRLPGGGFAVGRFIGGRELPLVYTEMDGGFNGANGVPRRVAWDSSVGRSRENRGFGAAFRNVFSYIGRVRSSFSRRTRNSRANGRSRS

SEQ ID NO: 6607 - protein, 200 aa, Glycine max
  misc_feature (1)..(200): Ceres Seq. ID no. 14315960
MGSGFDNVLDHLDAAAGGAGALPPTAASKAAIESMPVVKILASHTYAESHCAVCMENFEINCDAREMPCGHVYHSECIVPWLSVRNSCPVCRHEVPSDEVEESNNNTVGLTIWRLPGGGFAVGRFIGGRELPLVYTEMDGGFNGANGVPRRVAWDSSVGRSRENRGFGAAFRNVFSYIGRVRSSFSRRTRNSRANGRSRS

SEQ ID NO: 6608 - protein, 166 aa, Glycine max
  misc_feature (1)..(166): Ceres Seq. ID no. 14315961
MPVVKILASHTYAESHCAVCMENFEINCDAREMPCGHVYHSECIVPWLSVRNSCPVCRHEVPSDEVEESNNNTVGLTIWRLPGGGFAVGRFIGGRELPLVYTEMDGGFNGANGVPRRVAWDSSVGRSRENRGFGAAFRNVFSYIGRVRSSFSRRTRNSRANGRSRS

SEQ ID NO: 6609 - DNA, 1749 bp, Glycine max
  misc_feature (1)..(1749): Ceres Seq. ID no. 14315985
actctggagaatttatgaaccggagtttgtatttttctctgttaattctataatttttttctcaaaattttgtgttaatttcgaagctttctgtgttctctgcaatggtgcagatttgagctcacagcactgcgattttctcggtggccaagctcaaactgctccaatttcatttctgggtttcatcttttcaccattttagacaaaaaaaattgtgtttttaaagtttcctgtaagattataaattttttctgcacccaaatctgtttcctcttaaataaagttagtatttaccccctttaaaaaaattcaatttttttgtgatttttttgggtgattgggtgtggaagagcccgaatcttcaatggatagggtttaagtgaagttttgaggttttggggtatcttagttttttttctttgatttgcataaaaatggagggaagagagaattttggtgttgtggtgggtgatgaggccccagagagcttccatgtggctcctagaattgagaacaacttggacttttcaagggccaccgtgccggcgccggcgccggccacggaggggaagaagaagagagggaggccgaggaagtatgggccggatgggaagccggcgttgggggcggtgacagcgctttcgccgatgccgatttcttcgtcgattccgttgaccggcgagttctctgcttggaagagtggtagagggaggcctgttgaatctatcaagaagtcatcgtttaagtttgaggttgaaagccctggaccagttgagggaatagcatactcagttggtgccaatttcacaccacatgtgctcacagtaaatgctggcgaggatgtcactatgaaaattatgaccttctctcaacaaggatcacgtgctatatgcattctctcagcaactgggacaatttcaaatgttactcttcgtcaaccgtcttcttgtgggggtactttaacgtatgagggactgtttgagattctttccttgtctggttcctttatgccaactgagaatggagttacaagaagtagatctggtgggatgagtgtctctttggctggtccagatggtcgagtaatggggggcggacttgctggtttgttggtagctgctggtccagtgcaggttgtggtggccagttttcttcctggtcaccagttggagcataaaaccaaaaagcaaagggtggagcatgtatcaactattagcccttcacctgttaatcttatcactagtgaggaaataaaagtaagttttggtggagtaaagcctattatgacccctgctgcttttcaagaagagaatattgcttcttttaacaatgttcaagactctaggaactcatctgctgatgacaaagatcctttgcctgaaaaggagtctaacctaagccaatcaaatgctgaggctgcatgctaaacatattccctgtgaattatttgatgttatgcagagtcaacctcatttaggctctcactcatgcttgactgacagctgacaattaacttacaaagacaactctgatggtcagatgagtgtcacacgatggttttgactcaacagttgcactctttggttggtactaggtgttagttggcaaatctgtttgttaggttttccacgtgtcatttctccagatgtatctgtagtattgtttactcattgttgtatcaattagatataggatatatgttgtgccattttctcccttatttatattctatatggatatgtatgttat

SEQ ID NO: 6610 - protein, 330 aa, Glycine max
  misc_feature (1)..(330): Ceres Seq. ID no. 14315986
MEGRENFGVVVGDEAPESFHVAPRIENNLDFSRATVPAPAPATEGKKKRGRPRKYGPDGKPALGAVTALSPMPISSSIPLTGEFSAWKSGRGRPVESIKKSSFKFEVESPGPVEGIAYSVGANFTPHVLTVNAGEDVTMKIMTFSQQGSRAICILSATGTISNVTLRQPSSCGGTLTYEGLFEILSLSGSFMPTENGVTRSRSGGMSVSLAGPDGRVMGGGLAGLLVAAGPVQVVVASFLPGHQLEHKTKKQRVEHVSTISPSPVNLITSEEIKVSFGGVKPIMTPAAFQEENIASFNNVQDSRNSSADDKDPLPEKESNLSQSNAEAAC

SEQ ID NO: 6611 - protein, 259 aa, Glycine max
  misc_feature (1)..(259): Ceres Seq. ID no. 14315987
MPISSSIPLTGEFSAWKSGRGRPVESIKKSSFKFEVESPGPVEGIAYSVGANFTPHVLTVNAGEDVTMKIMTFSQQGSRAICILSATGTISNVTLRQPSSCGGTLTYEGLFEILSLSGSFMPTENGVTRSRSGGMSVSLAGPDGRVMGGGLAGLLVAAGPVQVVVASFLPGHQLEHKTKKQRVEHVSTISPSPVNLITSEEIKVSFGGVKPIMTPAAFQEENIASFNNVQDSRNSSADDKDPLPEKESNLSQSNAEAAC

SEQ ID NO: 6612 - protein, 192 aa, Glycine max
  misc_feature (1)..(192): Ceres Seq. ID no. 14315988
MKIMTFSQQGSRAICILSATGTISNVTLRQPSSCGGTLTYEGLFEILSLSGSFMPTENGVTRSRSGGMSVSLAGPDGRVMGGGLAGLLVAAGPVQVVVASFLPGHQLEHKTKKQRVEHVSTISPSPVNLITSEEIKVSFGGVKPIMTPAAFQEENIASFNNVQDSRNSSADDKDPLPEKESNLSQSNAEAAC

SEQ ID NO: 6613 - DNA, 1296 bp, Glycine max
  misc_feature (1)..(1296): Ceres Seq. ID no. 14315989
acaattccacgcatcaaccaaatctaactctctttctctgtcccccacacccctccctcctatgtcctatcccattctgaagaaacacaattacaggttagaaccccccatatcaaagctaaagtcttttggagccaaacttgaagttttattcatcatcttcacctcgaatcagatgagggagaagttcctattattcaacttttgttagcagtaaaagctctcttctttatttttttatttatttattttgtttctaataaggagttaaagacaatttgttgttggtgttgccatgagggagtttccttcttgttttggagaaaatggggttcagattgctgactcatcctcatcaagcaccacaagagcagctcaaaatgtggttacgtgtgtctatcagtgcaaattaagaggccgttcatgcctgattacagtctggtggacaaaaactctgatgggtcaaggcttgagtgtgggaatagatgacttgggaaaccattgcctctgcaaggtggagataaagccatggctcttctcgaagagaaaagggtcaaagaatttggaggtccaatctggtaaagttgacatcttttgggatttgagttgtgccaagtttggttcagggcctgagccattggaggggttctacttagcggttgtgttcaacaaggagatggtgttgctcctaggggatctgaaaaaggaggcatgcaagaagattgagagtgattgtgccttttctcactgtggtgctgtttgcattgcaaagagagagcacattattgggaagaagttttatggtgcaaaggctcagttttgtgacaaggggcaggtgcatgatgtcacaattgagtgtgacactttggggcccagcgatccctctcttgtgattcgaattgatagcaagacagtgatgcaggtgaagcgtctcaagtggaagttccgagggaatcacaccattttggtggatggtgttccggttgaagtgttttgggatgtgcacagttggctctttgggaatgctatgggcaatgcagtgttcatgttccaaacatgcatttcaaatgataagatgtgggaaggccaatcagtttctgatccctctgcattaacatgggcttcttctcagcagtttagggattctcaattgcaaggctttgggttctctctcattttttatgtttggaaacatgagtaatcaatagaggtgttaagtcttattcctcaatgttacatttatattgacagccacatttttcaacaatgaaactgatcaacttgcccctttttccc

SEQ ID NO: 6614 - protein, 301 aa, Glycine max
  misc_feature (1)..(301): Ceres Seq. ID no. 14315990
MREFPSCFGENGVQIADSSSSSTTRAAQNVVTCVYQCKLRGRSCLITVWWTKTLMGQGLSVGIDDLGNHCLCKVEIKPWLFSKRKGSKNLEVQSGKVDIFWDLSCAKFGSGPEPLEGFYLAVVFNKEMVLLLGDLKKEACKKIESDCAFSHCGAVCIAKREHIIGKKFYGAKAQFCDKGQVHDVTIECDTLGPSDPSLVIRIDSKTVMQVKRLKWKFRGNHTILVDGVPVEVFWDVHSWLFGNAMGNAVFMFQTCISNDKMWEGQSVSDPSALTWASSQQFRDSQLQGFGFSLIFYVWKHE

SEQ ID NO: 6615 - protein, 247 aa, Glycine max
  misc_feature (1)..(247): Ceres Seq. ID no. 14315991
MGQGLSVGIDDLGNHCLCKVEIKPWLFSKRKGSKNLEVQSGKVDIFWDLSCAKFGSGPEPLEGFYLAVVFNKEMVLLLGDLKKEACKKIESDCAFSHCGAVCIAKREHIIGKKFYGAKAQFCDKGQVHDVTIECDTLGPSDPSLVIRIDSKTVMQVKRLKWKFRGNHTILVDGVPVEVFWDVHSWLFGNAMGNAVFMFQTCISNDKMWEGQSVSDPSALTWASSQQFRDSQLQGFGFSLIFYVWKHE

SEQ ID NO: 6616 - protein, 174 aa, Glycine max
  misc_feature (1)..(174): Ceres Seq. ID no. 14315992
MVLLLGDLKKEACKKIESDCAFSHCGAVCIAKREHIIGKKFYGAKAQFCDKGQVHDVTIECDTLGPSDPSLVIRIDSKTVMQVKRLKWKFRGNHTILVDGVPVEVFWDVHSWLFGNAMGNAVFMFQTCISNDKMWEGQSVSDPSALTWASSQQFRDSQLQGFGFSLIFYVWKHE

SEQ ID NO: 6617 - DNA, 1820 bp, Glycine max
  misc_feature (1)..(1820): Ceres Seq. ID no. 14315993
agtattttggttcgtttcttgttaaaaacgcccccatccccttcgtttcccatttccgaggttgttgccggccacccaaacccaattcacatcattatcttttttctttctttcttgtgtttgtgtgtttcctcaaaattcacaattacaatcctcacaatcctcctcccttcatttctcaaattcccaatatttcaccaattcaaaacccttcatcattgatcttttcactcttttcttctttgctcgcaacattcattcacaatttgggtgctccttctgtttcttctcctcaccattggattggataatctgcaatttcttcaattgacaaaagcaacgggagttgggttccaacggaattatggttttcctcattgcgatgtttagggaagccagctatgtcatttgtcttttgctttgagaaacctaatttgtgatttttaaatggaaaagaaaagattggatgactatgaacctggtcctgttccttcaccaagagcattagatagatttgggtttgtaaaacaggatgttaatacttctgaaggcttagtcaagaatagatcagcctacgagtatgagagatatagggaggagagaagggttagaaaatggaggaagatgattggggttggtggcagtgactggaagcattatctaaggagaaaacctcatgttgtgaaaaggcgtataaggaaaggaattcccgattgtttaaggggccttgtttggcaattgatatctggaagtcgagacctattgctgatgaaccctggagtttatgagcaactagtcatatatgagacatctgcctctgaactggatataattcgagatatttctcgaaccttcccttcacatgtattctttcaacagagacatggacctgggcagcggtccctctacaatgttctaaaagcttactctgtctttgacagagatgtaggctatgttcagggcatgggatttttagcggggcttttgcttctttatatgagtgaggaggatgcattttggttgttggtggcattgctaaaaggagccgttcatgctccaatggagggcttgtatctggcaggattgcctctggtacagcaatacctctttcaatttgaatgctcggtgagggagcatctaccaaagttgggagaacatttttcctatgaaatgataaatcctagcatgtatgctagccagtggttcataactgtattttcatattcctttccatttcatttggctcttcgaatttgggatgtcttcctctacgagggtgttaaaattgtctttaaagttggcttggccctattaaagtactgccatgatgacttgattaaactacctttcgaaaaactcatacatgccttgaaaaactttcccgagggtgcaatgaatccggatacattgttaccactggcttattctatcaagatatccaagcgtttagaagaattgaaacaagagtatgagaagaagaatggaaagataagacgatctggagaactttctgaaaaaccaatacttcctagtgtccagggcaattgaagcaggacatatgcaagacaacatttgctggacatgtaaaactattggtaaagctgagcggaggacctcccagtgaaggtctatctttcctgctgggaactaatccattgtgaaaaccataccctcaaattctatgttgagaccatatgttgcatactatgtacagttgtattagttgctcactcttgtcaaaattcagtgttttataaagatgaagttgtctttataaattgtggttattgttattatgcttaattactattttagttccc

SEQ ID NO: 6618 - protein, 366 aa, Glycine max
  misc_feature (1)..(366): Ceres Seq. ID no. 14315994
MEKKRLDDYEPGPVPSPRALDRFGFVKQDVNTSEGLVKNRSAYEYERYREERRVRKWRKMIGVGGSDWKHYLRRKPHVVKRRIRKGIPDCLRGLVWQLISGSRDLLLMNPGVYEQLVIYETSASELDIIRDISRTFPSHVFFQQRHGPGQRSLYNVLKAYSVFDRDVGYVQGMGFLAGLLLLYMSEEDAFWLLVALLKGAVHAPMEGLYLAGLPLVQQYLFQFECSVREHLPKLGEHFSYEMINPSMYASQWFITVFSYSFPFHLALRIWDVFLYEGVKIVFKVGLALLKYCHDDLIKLPFEKLIHALKNFPEGAMNPDTLLPLAYSIKISKRLEELKQEYEKKNGKIRRSGELSEKPILPSVQGN

SEQ ID NO: 6619 - protein, 307 aa, Glycine max
  misc_feature (1)..(307): Ceres Seq. ID no. 14315995
MIGVGGSDWKHYLRRKPHVVKRRIRKGIPDCLRGLVWQLISGSRDLLLMNPGVYEQLVIYETSASELDIIRDISRTFPSHVFFQQRHGPGQRSLYNVLKAYSVFDRDVGYVQGMGFLAGLLLLYMSEEDAFWLLVALLKGAVHAPMEGLYLAGLPLVQQYLFQFECSVREHLPKLGEHFSYEMINPSMYASQWFITVFSYSFPFHLALRIWDVFLYEGVKIVFKVGLALLKYCHDDLIKLPFEKLIHALKNFPEGAMNPDTLLPLAYSIKISKRLEELKQEYEKKNGKIRRSGELSEKPILPSVQGN

SEQ ID NO: 6620 - protein, 259 aa, Glycine max
  misc_feature (1)..(259): Ceres Seq. ID no. 14315996
MNPGVYEQLVIYETSASELDIIRDISRTFPSHVFFQQRHGPGQRSLYNVLKAYSVFDRDVGYVQGMGFLAGLLLLYMSEEDAFWLLVALLKGAVHAPMEGLYLAGLPLVQQYLFQFECSVREHLPKLGEHFSYEMINPSMYASQWFITVFSYSFPFHLALRIWDVFLYEGVKIVFKVGLALLKYCHDDLIKLPFEKLIHALKNFPEGAMNPDTLLPLAYSIKISKRLEELKQEYEKKNGKIRRSGELSEKPILPSVQGN

SEQ ID NO: 6621 - DNA, 895 bp, Glycine max
  misc_feature (1)..(895): Ceres Seq. ID no. 14316060
aacccaccacatagccgattcactactcgcacggcacatgcaccctcctctatctctctctgcagcataagcacagcatcatagaccctttctcaaaaaatagggttcctccgttagggttagaggtcacaccatcttacactatactaacccctagccagccagcgagtttgagtgcttgggggtgcaatggcgggagtgagggaacaggaccagtacatgccgatagcgaacgtgataaggatcatgcgtcggattctgccagcgcacgcgaagatctcagacgacgcgaaggagacgatccaggagtgcgtgtctgagtacatcagtttcatcacggcggaggcgaacgagcggtgccagcgggagcagcggaagacggtgaccgcagaggatgtgttgtgggcgatggagaagcttggctttgacaactacgctcaccctctctctctttaccttcaccgctaccgcgagagtgaaggagaacctgcttctgtcagacgcgcttcttctgcaatggggatcaataataatatggtgcacccaccttatattaattctcatggctttggaatgtttgattttgacccatcatcgcaagggttttacagggacgatcataacgctgcttctggatctggtggttttgttgcgccttttgatccttatgctaacatcaaacgtgatgccctgtgatcatgtaagaacaacaactagtgcatgctgctttttcacttggttagttatattcaagcacaagcacatgcaggtgcagctgcaactatttagcttcatctacaaatcttttttcctctcttcttctcatgctttaattatttagagacaatacttgttattcattgttatgctcaattgctagcttctattcatcgcc

SEQ ID NO: 6622 - protein, 168 aa, Glycine max
  misc_feature (1)..(168): Ceres Seq. ID no. 14316061
MAGVREQDQYMPIANVIRIMRRILPAHAKISDDAKETIQECVSEYISFITAEANERCQREQRKTVTAEDVLWAMEKLGFDNYAHPLSLYLHRYRESEGEPASVRRASSAMGINNNMVHPPYINSHGFGMFDFDPSSQGFYRDDHNAASGSGGFVAPFDPYANIKRDAL

SEQ ID NO: 6623 - protein, 158 aa, Glycine max
  misc_feature (1)..(158): Ceres Seq. ID no. 14316062
MPIANVIRIMRRILPAHAKISDDAKETIQECVSEYISFITAEANERCQREQRKTVTAEDVLWAMEKLGFDNYAHPLSLYLHRYRESEGEPASVRRASSAMGINNNMVHPPYINSHGFGMFDFDPSSQGFYRDDHNAASGSGGFVAPFDPYANIKRDAL

SEQ ID NO: 6624 - protein, 149 aa, Glycine max
  misc_feature (1)..(149): Ceres Seq. ID no. 14316063
MRRILPAHAKISDDAKETIQECVSEYISFITAEANERCQREQRKTVTAEDVLWAMEKLGFDNYAHPLSLYLHRYRESEGEPASVRRASSAMGINNNMVHPPYINSHGFGMFDFDPSSQGFYRDDHNAASGSGGFVAPFDPYANIKRDAL

SEQ ID NO: 6625 - DNA, 1336 bp, Glycine max
  misc_feature (1)..(1336): Ceres Seq. ID no. 14316064
attttcaatttcattcattcatcactctaaaaatttcgcttccaattattttctcccaccctcccaatttcccctccccctttttcgctgaacccgctccaattctcaaatctcaattcaaaagaatcaaaacccaaacttcaaattcgtttcccttacaacactttcccttctcagtcaattcctccttccaccactttccctcccttcttccttcctttcaatgttccaacctaacaaccccaaaatggattcctccaccacattcctcaacgaccttcctcccctcaagagactaagactcttgcaacaacaacagcaacaaaaagaagaacatcagtattatgactcttcttcacctttacccgctaaaaaacgcaaggagtctcgaaccctatctccaccctctcccaccaccaccaaaaccgtttataactattccctccccgccaagaaaagagtgtgggccctacaaccccagagcccaccctcaaatgacgtcgtccccgccttcgacctcaatgtggaatacacacccagccccaacaaccacggagacttcgaagaagaccactccgaggacgaggacggggttctatgctgtgtgtgccagagcacggacggcgaccctgcggatccaatagtcttctgcgacgggtgcgacctcatggtgcacgcctcctgctacggcactcccctgtccaagtccatcccggatggagactggttctgcgaacgctgctgtttccgtttcgagaagaatgatgttggcaacatcaattgcaatgcttgcgtgctgtgcccttccaccgagggggcgatgaagcggaccaccgtcgaggaggaaggtggcgcgacgtgggcacacgtggtgtgcgccctgttcgtgccggaagtgttctttcttgaccccgaagggagggaggggatcgacttctccaaggttccaaagaagaggtgggaggagaggtgctatctttgcggatcctgcgaagggtgtgctttggtgtgttctgagcccaagtgcgggttggggtttcatgtcacttgtgcgctgaaggaggaactttggattgagtacagggaagggaagaagggtggtaccatagttgccggcttctgcaaaaaccacacccaagtttgggaaaagcaatccgggaagtacaaaattgttgctgttgaagataaaaagtagcaaaagtcttggttttttttttttttgaaactgttagttaattaaccatcctagggaaattcaaagttagttacttttgaagatcatttgaatcagttgtaattttactcttcatagctgatagcttttatgctttgtttt

SEQ ID NO: 6626 - protein, 323 aa, Glycine max
  misc_feature (1)..(323): Ceres Seq. ID no. 14316065
MFQPNNPKMDSSTTFLNDLPPLKRLRLLQQQQQQKEEHQYYDSSSPLPAKKRKESRTLSPPSPTTTKTVYNYSLPAKKRVWALQPQSPPSNDVVPAFDLNVEYTPSPNNHGDFEEDHSEDEDGVLCCVCQSTDGDPADPIVFCDGCDLMVHASCYGTPLSKSIPDGDWFCERCCFRFEKNDVGNINCNACVLCPSTEGAMKRTTVEEEGGATWAHVVCALFVPEVFFLDPEGREGIDFSKVPKKRWEERCYLCGSCEGCALVCSEPKCGLGFHVTCALKEELWIEYREGKKGGTIVAGFCKNHTQVWEKQSGKYKIVAVEDKK

SEQ ID NO: 6627 - protein, 315 aa, Glycine max
  misc_feature (1)..(315): Ceres Seq. ID no. 14316066
MDSSTTFLNDLPPLKRLRLLQQQQQQKEEHQYYDSSSPLPAKKRKESRTLSPPSPTTTKTVYNYSLPAKKRVWALQPQSPPSNDVVPAFDLNVEYTPSPNNHGDFEEDHSEDEDGVLCCVCQSTDGDPADPIVFCDGCDLMVHASCYGTPLSKSIPDGDWFCERCCFRFEKNDVGNINCNACVLCPSTEGAMKRTTVEEEGGATWAHVVCALFVPEVFFLDPEGREGIDFSKVPKKRWEERCYLCGSCEGCALVCSEPKCGLGFHVTCALKEELWIEYREGKKGGTIVAGFCKNHTQVWEKQSGKYKIVAVEDKK

SEQ ID NO: 6628 - protein, 175 aa, Glycine max
  misc_feature (1)..(175): Ceres Seq. ID no. 14316067
MVHASCYGTPLSKSIPDGDWFCERCCFRFEKNDVGNINCNACVLCPSTEGAMKRTTVEEEGGATWAHVVCALFVPEVFFLDPEGREGIDFSKVPKKRWEERCYLCGSCEGCALVCSEPKCGLGFHVTCALKEELWIEYREGKKGGTIVAGFCKNHTQVWEKQSGKYKIVAVEDKK

SEQ ID NO: 6629 - DNA, 1292 bp, Glycine max
  misc_feature (1)..(1292): Ceres Seq. ID no. 14316091
aaaaaaaacacaacacaacgagtagatccagaaagagcgttgaaacattgaaccttttgaatgagttggacggtttcgcagaaattgacgtttgaattgtagtcgcacgcacgtttcatcatcctctcgcaatcgccaatactccgatccccaaccagagaaaacctaagcgaacaacaacatgagtgctgacgccccaccccaaacccaagccaccaacaccaaaccggaagaatctcaatctcaatctcagtctcagcctcagcgtcactccggcgattatgctccataccctaaactggaccccaccgatgttgcgccaccacaacaaccactgaacactgaatctcgcgctcccatttccgaagatgctgccactactatgcccaaagactccaatccctatgtcactcctgctcccgtcactgcttcttctactaagactactttagattcggtgaaagacgttctcgggaaatgggggaagaaagccgccgaggccaccaagaaggccgaggatctcgccggcaacatgtggcagcacttgaaaacgggaccgagttttgctgatgctgccgtggggaggattgctcagggaactaaggttcttgcagaaggagggtatgaaaagatctttaggcaaacatttgagacagttccggaggagcagcttctcaaaacttatgcatgctacttgtctacctcggctggacctgtgatgggagtcttatatttgtcaacggctaagctggcattttgtagtgataacccactttcttaccaagtgggtgaccagactcaatggagctattataaggtggtcattccattgcaccagctgagagctgtaaacgcatccacaagcaaaaccaaccaatctgaaaaatatatacagattatctctgttgacaaccatgaattttggtttatgggctttgtgcactatgacagcgctgttaaaaatattcaaggagcattgcagcctcattgacaaacaagggattgaaaagcaccatgtattgtttataccagagatgaggtttgtgttgataaattatccatccatcaaagaaacatttatatgtttatctttacgtggttagttcgctagtctagtttgtggagctgttattattgtattaaaattgaaactcattcagtgttcacatgatatatttgctttaccttgttgctttctgaaagcgagagtcaattgatttgttgtaagttgaattgatatatagacggtggatttacatttaaatctattaaaatatcttttttttttgtat

SEQ ID NO: 6630 - protein, 269 aa, Glycine max
  misc_feature (1)..(269): Ceres Seq. ID no. 14316092
MSADAPPQTQATNTKPEESQSQSQSQPQRHSGDYAPYPKLDPTDVAPPQQPLNTESRAPISEDAATTMPKDSNPYVTPAPVTASSTKTTLDSVKDVLGKWGKKAAEATKKAEDLAGNMWQHLKTGPSFADAAVGRIAQGTKVLAEGGYEKIFRQTFETVPEEQLLKTYACYLSTSAGPVMGVLYLSTAKLAFCSDNPLSYQVGDQTQWSYYKVVIPLHQLRAVNASTSKTNQSEKYIQIISVDNHEFWFMGFVHYDSAVKNIQGALQPH

SEQ ID NO: 6631 - protein, 202 aa, Glycine max
  misc_feature (1)..(202): Ceres Seq. ID no. 14316093
MPKDSNPYVTPAPVTASSTKTTLDSVKDVLGKWGKKAAEATKKAEDLAGNMWQHLKTGPSFADAAVGRIAQGTKVLAEGGYEKIFRQTFETVPEEQLLKTYACYLSTSAGPVMGVLYLSTAKLAFCSDNPLSYQVGDQTQWSYYKVVIPLHQLRAVNASTSKTNQSEKYIQIISVDNHEFWFMGFVHYDSAVKNIQGALQPH

SEQ ID NO: 6632 - protein, 152 aa, Glycine max
  misc_feature (1)..(152): Ceres Seq. ID no. 14316094
MWQHLKTGPSFADAAVGRIAQGTKVLAEGGYEKIFRQTFETVPEEQLLKTYACYLSTSAGPVMGVLYLSTAKLAFCSDNPLSYQVGDQTQWSYYKVVIPLHQLRAVNASTSKTNQSEKYIQIISVDNHEFWFMGFVHYDSAVKNIQGALQPH

SEQ ID NO: 6633 - DNA, 1218 bp, Glycine max
  misc_feature (1)..(1218): Ceres Seq. ID no. 14316095
aagaagtggcaaccaaaatctgccacttcaaggcttcaagctaagcacactatggcttgcatcgataacacggccaccacctctactgacgaagcaggcggagccaccaccatcaccgccgtgcatcccgacataattcaaacccacatcctcacgtgcctggacggcccgtcgctcgcctccgtcgccagcacgtgctcccaactccacgctctctcagcgcgcgagcctctctgggagaacatttgccactccacgtggccctccacgagctcgccacgcgtccgccacgtcatgtccacgttcccacgcgcgtctctgtcctttttctccgactcgttcccttcgttcgccgcggcgcgcgaaggttcttcttcgcgcgcaccggagctgatttccgctgtggacatcttccaccggcggcgggcggtgctgtcgagagtggtggagacggagacggagtccgactggttccggtgctcgccgtttcgaatcgatgttcttgatcagaaggaggcagtggcgacggcgatggagtatccacggagcgaggaagcgtgtgagattctgggcgaggatttgaggttgagttggatagtggtggatccgaatggaaagcgtgcggtgaatgtgtcgagtgggagagtggtgtcggtggagcggcactggctgagcggggaggtgaaggcgcggttcgcgacggtggtgggcggaggggagagggggacggcggtggaggtggcgctgtgcagcgtgactgtgactttcgggggtgagatgcaggtgagggaagcgtgtctgcagatggaggacatggatggaatgttcctgaatggtagggacagtttggggattttgcagcgggcattggagggtataaggggaacattactgaaggacggaaaggaggaagaagggaggaatagatacttggaattcataaagagaaagatggagagaaaagataaaaaagaaagagatgagaggaggttggatatgctctgcgtgcctctcgcgcttttgtcctttgcggctttttctacactctttctcttctgaatcaatatacactatcacttcaaattcaataaacacaacacggaaaaattgtacaaaattaatttaacaaactaagtgtcagtcgatgctgtaatgtcgcatactagtttatttatttaaaacagtaatgaatagtgaatgggttcttctagcagctgc

SEQ ID NO: 6634 - protein, 352 aa, Glycine max
  misc_feature (1)..(352): Ceres Seq. ID no. 14316096
KKWQPKSATSRLQAKHTMACIDNTATTSTDEAGGATTITAVHPDIIQTHILTCLDGPSLASVASTCSQLHALSAREPLWENICHSTWPSTSSPRVRHVMSTFPRASLSFFSDSFPSFAAAREGSSSRAPELISAVDIFHRRRAVLSRVVETETESDWFRCSPFRIDVLDQKEAVATAMEYPRSEEACEILGEDLRLSWIVVDPNGKRAVNVSSGRVVSVERHWLSGEVKARFATVVGGGERGTAVEVALCSVTVTFGGEMQVREACLQMEDMDGMFLNGRDSLGILQRALEGIRGTLLKDGKEEEGRNRYLEFIKRKMERKDKKERDERRLDMLCVPLALLSFAAFSTLFLF

SEQ ID NO: 6635 - protein, 335 aa, Glycine max
  misc_feature (1)..(335): Ceres Seq. ID no. 14316097
MACIDNTATTSTDEAGGATTITAVHPDIIQTHILTCLDGPSLASVASTCSQLHALSAREPLWENICHSTWPSTSSPRVRHVMSTFPRASLSFFSDSFPSFAAAREGSSSRAPELISAVDIFHRRRAVLSRVVETETESDWFRCSPFRIDVLDQKEAVATAMEYPRSEEACEILGEDLRLSWIVVDPNGKRAVNVSSGRVVSVERHWLSGEVKARFATVVGGGERGTAVEVALCSVTVTFGGEMQVREACLQMEDMDGMFLNGRDSLGILQRALEGIRGTLLKDGKEEEGRNRYLEFIKRKMERKDKKERDERRLDMLCVPLALLSFAAFSTLFLF

SEQ ID NO: 6636 - protein, 254 aa, Glycine max
  misc_feature (1)..(254): Ceres Seq. ID no. 14316098
MSTFPRASLSFFSDSFPSFAAAREGSSSRAPELISAVDIFHRRRAVLSRVVETETESDWFRCSPFRIDVLDQKEAVATAMEYPRSEEACEILGEDLRLSWIVVDPNGKRAVNVSSGRVVSVERHWLSGEVKARFATVVGGGERGTAVEVALCSVTVTFGGEMQVREACLQMEDMDGMFLNGRDSLGILQRALEGIRGTLLKDGKEEEGRNRYLEFIKRKMERKDKKERDERRLDMLCVPLALLSFAAFSTLFLF

SEQ ID NO: 6637 - DNA, 1145 bp, Glycine max
  misc_feature (1)..(1145): Ceres Seq. ID no. 14316099
acaaggatggggcagatgtcaaagagctcaaagaacagatagcctgcctcaaggcagcattggcaagaaaggaaggtgaatcagaacattctttatcaggcagctctgaaaaatataggacaatggctagtgagctatcaccttatcatgcaaaccaacagggtgctgatattgtgagcccagggtgccggcaaccaatgcttgatgtaggcaatatagagcttcacagtagtaccacattgagacaaaaaactcagagctatgattttgatgagatgtcaacgaattcaccgccctggcccccggtgaataatcctagacaactctatggggatgatgacagagaaactggctcaggagagtgggtagataaagtcatggtaaacaagcaagatgctaataaaactgagaacatcttagggtgttgggaagcagacagtgggaacttatccgatgtcttttatcaaaaatatctccaaggttcttccaaaatgttctcagaacgatcctacaacatgttcatgggaggcaacaaccagtttaacgttgctggttcagatgacatggatgatcttgatgatacaaccactgattcctcggaacctgacttgctttggcaatttaatcattccaaacttaccagcatagccaatggcaacggatcaaaggctaggagacctgtctcaaagcccacaaatagcccagtattgagcaagaataatgttcattcttctcttggtccttcaccttcaaggaaacaatcaaacagtgtctcacatcgaacagcaagacatccagctccagttgacatgaaacgtaaaactgggagtagaaagtaaacttgttttgaaacgttaaaagggtgatttctatttttattttttatttctttccccctttttctttttttcaattttttagatggagggcttttgcaataatatttctttttattttttattttttattttttgggtttatgcttgtaagttttgtaacttgtatttacgcagataatggagcaataatgcccgttgcttgtaccatgggtccatgacattcttttcattttacactgtagcttttaggtgatgtaaaaatttcaaaaccactgaaacgatcaaaattgcaacaatggtttgatt

SEQ ID NO: 6638 - protein, 278 aa, Glycine max
  misc_feature (1)..(278): Ceres Seq. ID no. 14316100
KDGADVKELKEQIACLKAALARKEGESEHSLSGSSEKYRTMASELSPYHANQQGADIVSPGCRQPMLDVGNIELHSSTTLRQKTQSYDFDEMSTNSPPWPPVNNPRQLYGDDDRETGSGEWVDKVMVNKQDANKTENILGCWEADSGNLSDVFYQKYLQGSSKMFSERSYNMFMGGNNQFNVAGSDDMDDLDDTTTDSSEPDLLWQFNHSKLTSIANGNGSKARRPVSKPTNSPVLSKNNVHSSLGPSPSRKQSNSVSHRTARHPAPVDMKRKTGSRK

SEQ ID NO: 6639 - protein, 238 aa, Glycine max
  misc_feature (1)..(238): Ceres Seq. ID no. 14316101
MASELSPYHANQQGADIVSPGCRQPMLDVGNIELHSSTTLRQKTQSYDFDEMSTNSPPWPPVNNPRQLYGDDDRETGSGEWVDKVMVNKQDANKTENILGCWEADSGNLSDVFYQKYLQGSSKMFSERSYNMFMGGNNQFNVAGSDDMDDLDDTTTDSSEPDLLWQFNHSKLTSIANGNGSKARRPVSKPTNSPVLSKNNVHSSLGPSPSRKQSNSVSHRTARHPAPVDMKRKTGSRK

SEQ ID NO: 6640 - protein, 213 aa, Glycine max
  misc_feature (1)..(213): Ceres Seq. ID no. 14316102
MLDVGNIELHSSTTLRQKTQSYDFDEMSTNSPPWPPVNNPRQLYGDDDRETGSGEWVDKVMVNKQDANKTENILGCWEADSGNLSDVFYQKYLQGSSKMFSERSYNMFMGGNNQFNVAGSDDMDDLDDTTTDSSEPDLLWQFNHSKLTSIANGNGSKARRPVSKPTNSPVLSKNNVHSSLGPSPSRKQSNSVSHRTARHPAPVDMKRKTGSRK

SEQ ID NO: 6641 - DNA, 1656 bp, Glycine max
  misc_feature (1)..(1656): Ceres Seq. ID no. 14316111
aaaagactatccctggttttcaatctggctccttcctctctgtccatgacgacgtcgtccggttccctaaagaacacgattcccccaggcctccaagaagtgcttctcaacagaaaacgcccccaacaagaacccaacaacaatgccggaccctcttcctccaccgaggacgctgccatcgccgacgattgctccagctccaactccaagctcatcgtgctggtcaccaacagtgacagcattgagtcaccgggccttacattcctcgtcgaagccctcgtgcgtcagggcctctacgacgtccatgtctgcgttcctcaatcggacaaatcggcttcgggccactctgtcactcgcggagaaaccgtcgaagcttgttcggtacaaattaatggcgccaccgcctttgaagtttcaggaactcctgtggattgcgtttcactagcgttatctggggccttgttttcatggtcaaagcctgtgctggttattagcggaattaaccagggatcaagctgtggtcatcacatgttttactcaggtgctgttgctggagctagagaggcgttattatgtggtgtaccttcattgtcaatatcattaaatcggaagaaggatgaaagtcaagagactgatttcaaggatgcagtagtactctgtttacctttaataaatgctgctatcagggatgttgtaaacggaactttcctcaaaaactgctttctgaatatagaaattcctaaatcacctttaaccagcaagggcttcaaattgaccaagcaaagtatgtggagatccactccaaactggcaggcagtttcaactagccggtatcctcctggtcatttcttggccagtaaacaaggctttggtcttcagtttgcacagattggccgagatgcctctgctgctggtgcagctcggagattaactacacagaaaaagaatttggagattgttgaatcaattggagctgccggaaaagctgattccaacagggtgaagaagtacttcaggctagagtttttggataaacagcaggaagatatagatgatgatctagattacatggcacttgaaaatggatttgttgcagttactccactctctctttctcttcatactgagaccgatattcaaatggcagcttctgattggatttcatctgtgctttctggtgaacaatagcctcaagcagagttcagcttcagcgtaattatgtacatttgagatttctgatgattctttcttttctatgttcttgaaagcaaaggtcgagcagaagcggcagtcacacctattctatagttgatatcatcaatctgcactctttttttttttgtatgcgtgtaagatattttgtattcctctcttcattgtttcatttcttttggtcgctagttatttctgatgtgtgcttcctgtaatctcctaggcatattttaaaaatgccatttcgtctgtttgtaacttaaaaaactactagcaaaacgctggtgcacgtgtcattgtaatttttcgctaaattgttgtttgaaagatagttttaagcttggtttgatggtttgtagcctctggtcagatatctagcagccttgtatggattttgacctttcaaaatatttttttttcaatgttaaaatgtttaacgaaaac

SEQ ID NO: 6642 - protein, 395 aa, Glycine max
  misc_feature (1)..(395): Ceres Seq. ID no. 14316112
KRLSLVFNLAPSSLSMTTSSGSLKNTIPPGLQEVLLNRKRPQQEPNNNAGPSSSTEDAAIADDCSSSNSKLIVLVTNSDSIESPGLTFLVEALVRQGLYDVHVCVPQSDKSASGHSVTRGETVEACSVQINGATAFEVSGTPVDCVSLALSGALFSWSKPVLVISGINQGSSCGHHMFYSGAVAGAREALLCGVPSLSISLNRKKDESQETDFKDAVVLCLPLINAAIRDVVNGTFLKNCFLNIEIPKSPLTSKGFKLTKQSMWRSTPNWQAVSTSRYPPGHFLASKQGFGLQFAQIGRDASAAGAARRLTTQKKNLEIVESIGAAGKADSNRVKKYFRLEFLDKQQEDIDDDLDYMALENGFVAVTPLSLSLHTETDIQMAASDWISSVLSGEQ

SEQ ID NO: 6643 - protein, 380 aa, Glycine max
  misc_feature (1)..(380): Ceres Seq. ID no. 14316113
MTTSSGSLKNTIPPGLQEVLLNRKRPQQEPNNNAGPSSSTEDAAIADDCSSSNSKLIVLVTNSDSIESPGLTFLVEALVRQGLYDVHVCVPQSDKSASGHSVTRGETVEACSVQINGATAFEVSGTPVDCVSLALSGALFSWSKPVLVISGINQGSSCGHHMFYSGAVAGAREALLCGVPSLSISLNRKKDESQETDFKDAVVLCLPLINAAIRDVVNGTFLKNCFLNIEIPKSPLTSKGFKLTKQSMWRSTPNWQAVSTSRYPPGHFLASKQGFGLQFAQIGRDASAAGAARRLTTQKKNLEIVESIGAAGKADSNRVKKYFRLEFLDKQQEDIDDDLDYMALENGFVAVTPLSLSLHTETDIQMAASDWISSVLSGEQ

SEQ ID NO: 6644 - protein, 219 aa, Glycine max
  misc_feature (1)..(219): Ceres Seq. ID no. 14316114
MFYSGAVAGAREALLCGVPSLSISLNRKKDESQETDFKDAVVLCLPLINAAIRDVVNGTFLKNCFLNIEIPKSPLTSKGFKLTKQSMWRSTPNWQAVSTSRYPPGHFLASKQGFGLQFAQIGRDASAAGAARRLTTQKKNLEIVESIGAAGKADSNRVKKYFRLEFLDKQQEDIDDDLDYMALENGFVAVTPLSLSLHTETDIQMAASDWISSVLSGEQ

SEQ ID NO: 6645 - DNA, 996 bp, Glycine max
  misc_feature (1)..(996): Ceres Seq. ID no. 14316118
aatcaccctttgctttcttccaatattccacatcaaagcacctttccacttttccattctatatcccccatcttttcctcccttattaaaagccgcatgcagcacctaagctaagcataacttgtacacacttacacttgcacacatagggagagagggtgaaggtgagaatctcaattgtttagcttattccgtgagtgactctattctattccattaacatgacagggaagagaaaccaaattacaacaagtcctgtgggaagtccaacatctggtaacatctcagacagctcctcctcaaaagaacaagacaggttcctccctatagccaatgttagccgaatcatgaaaagggcactcccagccaatgccaaaatctcaaaggaagccaaggaaacagttcaagagtgtgtgtctgagttcataagcttcatcactggtgaggcctcagacaagtgccagagggaaaagaggaagacaatcaatggtgatgatcttctttgggccatgacaacactaggatttgagaactatgttggacccttgaagctctacctgaacaactacagggaaactgagggagaaaagagttctatggcaaaacaagaagaacactctccaactcatcaaaccaatattgatggggtggtggttgaaatcaacaagttgcatcattctgtggcagcaaccaacaaagctgcagacttcaacactttcagtggtggtggcttctattctgtggggcctcaagtggctgctccaaagagcttcactgagattggagggatcaatggctatagagaaagttccattgctcaaagtgcggtcagtggtgatcatgatgcaagtggcaatagaatgatgccacccaacctacgttatagggttgaatggtagatgtgatatgcataccaacaagttcatgtcccttccccattatatattatatcatatcatatagtataatatatataaataatatttttattatgat

SEQ ID NO: 6646 - protein, 225 aa, Glycine max
  misc_feature (1)..(225): Ceres Seq. ID no. 14316119
MTGKRNQITTSPVGSPTSGNISDSSSSKEQDRFLPIANVSRIMKRALPANAKISKEAKETVQECVSEFISFITGEASDKCQREKRKTINGDDLLWAMTTLGFENYVGPLKLYLNNYRETEGEKSSMAKQEEHSPTHQTNIDGVVVEINKLHHSVAATNKAADFNTFSGGGFYSVGPQVAAPKSFTEIGGINGYRESSIAQSAVSGDHDASGNRMMPPNLRYRVEW

SEQ ID NO: 6647 - protein, 183 aa, Glycine max
  misc_feature (1)..(183): Ceres Seq. ID no. 14316120
MKRALPANAKISKEAKETVQECVSEFISFITGEASDKCQREKRKTINGDDLLWAMTTLGFENYVGPLKLYLNNYRETEGEKSSMAKQEEHSPTHQTNIDGVVVEINKLHHSVAATNKAADFNTFSGGGFYSVGPQVAAPKSFTEIGGINGYRESSIAQSAVSGDHDASGNRMMPPNLRYRVEW

SEQ ID NO: 6648 - protein, 129 aa, Glycine max
  misc_feature (1)..(129): Ceres Seq. ID no. 14316121
MTTLGFENYVGPLKLYLNNYRETEGEKSSMAKQEEHSPTHQTNIDGVVVEINKLHHSVAATNKAADFNTFSGGGFYSVGPQVAAPKSFTEIGGINGYRESSIAQSAVSGDHDASGNRMMPPNLRYRVEW

SEQ ID NO: 6649 - DNA, 1402 bp, Glycine max
  misc_feature (1)..(1402): Ceres Seq. ID no. 14316144
attctgaattgtgattgctctcacttataaaaccctcttttctgcttcttcgtccattggcattggctttcaatggcgaagtgcatgaccagttcttcttcttcttcctatgcactgcttctctttttcttctgctttctccaactggaggctattttggaccctgctgatttcctcgctctgcaaaacattcgtaaagctctgcaagacatgcctgcttccgatttcttctcttcctgggatttcaccgcagacccatgcaacttcgccggcgtttactgcgactccgacaaggtcatcgcgctcaacctcggcgaccccagggctggctctcccggcctcaccggccgcctccacccctccgtcggcaagctctccgcgctcgccgagttcaccgtcgtccctggccgtatttacggtcccctccccgaaacactctccgatttgaagaacctcaggtttctcggcgtcaaccgcaacttcatctccggcgaaattccgaccaagctgggagaactccgcaacctccgaaccgtcgatctcagctacaaccagctcactggacgcattcctccaacggtaggaaccctaccggagctaacaaacctaatcctctgccacaaccgcctctccggttcggttccccggttcgagtcgcacacactaacccggctcgatctgaagcacaactctctctccggttcgctccctcccaactctctccctccctctctccagtacctctctctttcctggaaccagctcacgggcccaatggaccgcctcctagcccgcctcgaccaggtcaagtatttggacctaagcctaaacaagttcacgggcccaatcccgggccatatcttttcctttccgctgacaaatctgcagctagaaaggaaccagttctcgggcccggtccagcccgtggatcaggtttccatcccgaccgttgatctcagttacaaccggttgtatggtcagatatcaccgatgctggcgacagtgcagaatctttacctgaacaacaaccggttcacgggtcgggttccggctagcttcgtggagcggttgctggacgcgagcattcagatactttacttgcagcataactatctgacggggattgatataagcccaacggcggtgattccagaaagaagctcgctgtgtctgcagtataactgcatggtccctcccgtagagacgccctgccccttgagggctggcaaggagaaaaccaggcctactacgcagtgcaaccagctgaaggatttgaaggactgatcctgatcccgatcaaaatcatatatatacctttccttctctttcttgccctttttgattcattattatttaattttgtgataactatgggggaatgaataagatgatgattgtgaat

SEQ ID NO: 6650 - protein, 403 aa, Glycine max
  misc_feature (1)..(403): Ceres Seq. ID no. 14316145
MAKCMTSSSSSSYALLLFFFCFLQLEAILDPADFLALQNIRKALQDMPASDFFSSWDFTADPCNFAGVYCDSDKVIALNLGDPRAGSPGLTGRLHPSVGKLSALAEFTVVPGRIYGPLPETLSDLKNLRFLGVNRNFISGEIPTKLGELRNLRTVDLSYNQLTGRIPPTVGTLPELTNLILCHNRLSGSVPRFESHTLTRLDLKHNSLSGSLPPNSLPPSLQYLSLSWNQLTGPMDRLLARLDQVKYLDLSLNKFTGPIPGHIFSFPLTNLQLERNQFSGPVQPVDQVSIPTVDLSYNRLYGQISPMLATVQNLYLNNNRFTGRVPASFVERLLDASIQILYLQHNYLTGIDISPTAVIPERSSLCLQYNCMVPPVETPCPLRAGKEKTRPTTQCNQLKDLKD

SEQ ID NO: 6651 - protein, 399 aa, Glycine max
  misc_feature (1)..(399): Ceres Seq. ID no. 14316146
MTSSSSSSYALLLFFFCFLQLEAILDPADFLALQNIRKALQDMPASDFFSSWDFTADPCNFAGVYCDSDKVIALNLGDPRAGSPGLTGRLHPSVGKLSALAEFTVVPGRIYGPLPETLSDLKNLRFLGVNRNFISGEIPTKLGELRNLRTVDLSYNQLTGRIPPTVGTLPELTNLILCHNRLSGSVPRFESHTLTRLDLKHNSLSGSLPPNSLPPSLQYLSLSWNQLTGPMDRLLARLDQVKYLDLSLNKFTGPIPGHIFSFPLTNLQLERNQFSGPVQPVDQVSIPTVDLSYNRLYGQISPMLATVQNLYLNNNRFTGRVPASFVERLLDASIQILYLQHNYLTGIDISPTAVIPERSSLCLQYNCMVPPVETPCPLRAGKEKTRPTTQCNQLKDLKD

SEQ ID NO: 6652 - protein, 357 aa, Glycine max
  misc_feature (1)..(357): Ceres Seq. ID no. 14316147
MPASDFFSSWDFTADPCNFAGVYCDSDKVIALNLGDPRAGSPGLTGRLHPSVGKLSALAEFTVVPGRIYGPLPETLSDLKNLRFLGVNRNFISGEIPTKLGELRNLRTVDLSYNQLTGRIPPTVGTLPELTNLILCHNRLSGSVPRFESHTLTRLDLKHNSLSGSLPPNSLPPSLQYLSLSWNQLTGPMDRLLARLDQVKYLDLSLNKFTGPIPGHIFSFPLTNLQLERNQFSGPVQPVDQVSIPTVDLSYNRLYGQISPMLATVQNLYLNNNRFTGRVPASFVERLLDASIQILYLQHNYLTGIDISPTAVIPERSSLCLQYNCMVPPVETPCPLRAGKEKTRPTTQCNQLKDLKD

SEQ ID NO: 6653 - DNA, 1503 bp, Glycine max
  misc_feature (1)..(1503): Ceres Seq. ID no. 14316158
aaacccaaacacaacaacacaaagaaaaaaagagcacaaacagaccaattccaacggttgaattttttggctgaagacaccccaccgacgttagtcaaataaaacatgtcttgctccgtcgcggtttccaattcgccggtgttctctccttcttcttccctcttctgctcgaagccctccatcatctcttcttcgccggaatccctctcgctctctctctcgcatctcaaaccttccaactcttctacgacgtcgtcttgttcttcaccctctgctgctgcttcttcatcttcttctccttcttctccgtttcggcttcgccttcccaagcctcccaccgtgttctctgcttcttcttctgcttcgtctacctctccgaacggcaccgttttgaagaggaagcgacccgctaggttggacatacccgtttcctctctcacctttgcggttccgcccacgccctccgcggcggcgcgtgacttggtcgaggctgaggaagatgggtttggggtgtactgcaagagaggcaggagggagtacatggaggatcgttacaccgctgggaataatcttcgcggagaacacaaactggctttttttggcatatttgatgggcacggtggtgcaaaagctgctgaatttgctgcaaataacttgcaaaagaatgtgttagatgaagttattgtgagagatgaagatgatgttgaggaggcagtgaagcgtgggtacctgaacaccgattcggatttcctaaaggaggatctccatggtggctcttgctgtgtgacagcattgattaggaatggtaacctcgttgtgtccaacgcgggtgattgccgtgctgtcattagcagagggggtgttgctgaggccctaacatctgatcacaggccttcaagggaagatgaaagggacagaattgagagcctgggtggctatgtcgatttatgccgcggtgtttggaggatccagggatctctggctgtgtcaaggggaattggagatagacacctgaaacaatgggtgacagcagaacctgagaccaaagttctccgaattgaacctgaacatgacttgttaattttagcttcagatggattatgggataaggttggtaatcaggaagcagtagatattgctcgttcttttctcgtaggcaacaacaaatcacaaccattgctgcaggcttgtaaaaagcttgtagatttgtctgtttcacgaggctctttggatgatacaagtgtcatgctaatcaaattggagcactatatttaaagttaccttagtacaactaaggtttcaagattattgcagttgagatcgcattgaggtcaagattgcgttgcagtttgtgatttttgaacaaccttggtggtgcctgatgatggatagagagtagctgattcttttctgtatatataaatctgactaccttattggaattttttgtacccgcgtaggggagggatattaacaataacatttagtaattatttttttcat

SEQ ID NO: 6654 - protein, 389 aa, Glycine max
  misc_feature (1)..(389): Ceres Seq. ID no. 14316159
MSCSVAVSNSPVFSPSSSLFCSKPSIISSSPESLSLSLSHLKPSNSSTTSSCSSPSAAASSSSSPSSPFRLRLPKPPTVFSASSSASSTSPNGTVLKRKRPARLDIPVSSLTFAVPPTPSAAARDLVEAEEDGFGVYCKRGRREYMEDRYTAGNNLRGEHKLAFFGIFDGHGGAKAAEFAANNLQKNVLDEVIVRDEDDVEEAVKRGYLNTDSDFLKEDLHGGSCCVTALIRNGNLVVSNAGDCRAVISRGGVAEALTSDHRPSREDERDRIESLGGYVDLCRGVWRIQGSLAVSRGIGDRHLKQWVTAEPETKVLRIEPEHDLLILASDGLWDKVGNQEAVDIARSFLVGNNKSQPLLQACKKLVDLSVSRGSLDDTSVMLIKLEHYI

SEQ ID NO: 6655 - protein, 244 aa, Glycine max
  misc_feature (1)..(244): Ceres Seq. ID no. 14316160
MEDRYTAGNNLRGEHKLAFFGIFDGHGGAKAAEFAANNLQKNVLDEVIVRDEDDVEEAVKRGYLNTDSDFLKEDLHGGSCCVTALIRNGNLVVSNAGDCRAVISRGGVAEALTSDHRPSREDERDRIESLGGYVDLCRGVWRIQGSLAVSRGIGDRHLKQWVTAEPETKVLRIEPEHDLLILASDGLWDKVGNQEAVDIARSFLVGNNKSQPLLQACKKLVDLSVSRGSLDDTSVMLIKLEHYI

SEQ ID NO: 6656 - DNA, 1336 bp, Glycine max
  misc_feature (1)..(1336): Ceres Seq. ID no. 14316165
aaaacaagttttctagtgttttacactttgcacatgtgatgagagactagactagtcccttgagagaagctcctaacaaataaaacgaaaccatacttcactgtcgcagtcaaaatctccgtatttgaatccaatgacgcatatatcaattcaactctgaatctgaagcttcccgtatgtcaacggaagcgcccaagcgcgaccaatggcagtgggagaacgccaccgccggcgccgccgctggattcgccaccgtcgccgtcatgcatcccctcgatgttgtccgaactaggttccaagttaacgatggtcgagtctctaattttcccagttacaagaacaccgctcacgccgttttcactatcgctcgttccgagggattaagagggttatatgcaggcttccttcctggggttcttgggtcaactatttcatggagtttatatttcttcttctatgacagagccaaacagagatatgcaaggaacagggaggggaagttgagcccaggtctgcatcttgcctcagcagctgaagcaggagctatagtttccttcttcacaaatccagtatggctggtaaagacaagattgcagcttcaaactcctcttcatcagacacgaccatactctggggtttatgatgcatttaggaccataatgagggaagaaggatttagtgcactttacagaggaattgttcctggtctatttctgttctctcatggtgctattcagtttacagcatatgaggagctacgcaaagttattgttgattttaagagtaagggaagtacagtagataatcaaaaccctgataaattgctggtacaactgtttgtcccctctctttggaaggaggattctagcttctacagtccttaagtatgatatatcaatcattgaagaagttgctttctcatgagacatactttatcccccctttttcaggttatacgggctcgattgcagcaaagacccagtggtgatggggttccaagatatatggacactttgcatgttgtgaaagaaactgcacgatttgaaagtgtccgaggtttttacaaaggaattaccgcaaacctcttgaagaatgctcccgcttcttcgataacatttattgtttatgaaaatgtcctaaaattgcttaaaccggctagaaggaatgactgagtatttcatgattctttcctttctccttattgctgtttaatctcctttcttatctgatatttgttgcattgaaaaattgctcatttttcctatcactttttaatgatgggattctacacaatacacaattgctcattgaagttagacaaccccaaaaacaaagt

SEQ ID NO: 6657 - protein, 235 aa, Glycine max
  misc_feature (1)..(235): Ceres Seq. ID no. 14316166
MSTEAPKRDQWQWENATAGAAAGFATVAVMHPLDVVRTRFQVNDGRVSNFPSYKNTAHAVFTIARSEGLRGLYAGFLPGVLGSTISWSLYFFFYDRAKQRYARNREGKLSPGLHLASAAEAGAIVSFFTNPVWLVKTRLQLQTPLHQTRPYSGVYDAFRTIMREEGFSALYRGIVPGLFLFSHGAIQFTAYEELRKVIVDFKSKGSTVDNQNPDKLLVQLFVPSLWKEDSSFYSP

SEQ ID NO: 6658 - protein, 206 aa, Glycine max
  misc_feature (1)..(206): Ceres Seq. ID no. 14316167
MHPLDVVRTRFQVNDGRVSNFPSYKNTAHAVFTIARSEGLRGLYAGFLPGVLGSTISWSLYFFFYDRAKQRYARNREGKLSPGLHLASAAEAGAIVSFFTNPVWLVKTRLQLQTPLHQTRPYSGVYDAFRTIMREEGFSALYRGIVPGLFLFSHGAIQFTAYEELRKVIVDFKSKGSTVDNQNPDKLLVQLFVPSLWKEDSSFYSP

SEQ ID NO: 6659 - DNA, 1108 bp, Glycine max
  misc_feature (1)..(1108): Ceres Seq. ID no. 14316188
gttgacattacttgaaaaggtttgctcagattttcctacttttggcgattatgtgaaaaatacatggctgattcctcacaaggaaaaatttgttatggcatgggtagatcgagtgatgcatttgggtaacactacaatcgacaggtttgaaacagcacattggaggctggagaacttgcttcaagatagtgggggggatatgtgtagttgttgggatgctgtgaacaacatgattaaattgcaacacacacagattaaggtgtcgtttgagaaaagtataaacattgtggaatacaatgatccattctatagcaagctgcggggatttgtatcaaggaatgcattgagttatatagctgaccattatgaccgagttaagaccgttggtattgatattgatggttctttatgtggatgcacaattagaactacacatggtctaccttgtgcgtgtgaacttgctaagtatagtaggacgtggcacccaattcccttgcaagcaattcatgttcattggaggacattaaacttcagtgaccaagaaatgaacaatgaggggctcgagttagcgttgcaacgtgaagtggatgctttgcacaatcaatttcaggaacttgattatgctggaaaaattactttgaaggccaaattgcgtgaactagcatttcctgatgcaattttaatgtgtccgtctcctgaaaattactttgatgctccaaaggctctgggtttccgcgagagacaaatcaattgaatgtgatcctttatgtccggagcatgctgatgcataacattctgaccatgatagcatgttagctcacccttcatcttagaaatcagcccatgagagttttgcccaaattccggttgagattcatccttttattgaagacattgtagatgtgaaacagacgagaaatgtggttaattgtcttagatatattgtggtcttagtttctttatcttcacatggaagcattacgtttttccttcttggaggttaaccaacgttatgtcagtcaagtcacctacttaggtttgtgcataaatgtcactctgtacaactatgatatgtagtttgtttaaaatcaggtctttaatttaatct

SEQ ID NO: 6660 - protein, 250 aa, Glycine max
  misc_feature (1)..(250): Ceres Seq. ID no. 14316189
LTLLEKVCSDFPTFGDYVKNTWLIPHKEKFVMAWVDRVMHLGNTTIDRFETAHWRLENLLQDSGGDMCSCWDAVNNMIKLQHTQIKVSFEKSINIVEYNDPFYSKLRGFVSRNALSYIADHYDRVKTVGIDIDGSLCGCTIRTTHGLPCACELAKYSRTWHPIPLQAIHVHWRTLNFSDQEMNNEGLELALQREVDALHNQFQELDYAGKITLKAKLRELAFPDAILMCPSPENYFDAPKALGFRERQIN

SEQ ID NO: 6661 - protein, 219 aa, Glycine max
  misc_feature (1)..(219): Ceres Seq. ID no. 14316190
MAWVDRVMHLGNTTIDRFETAHWRLENLLQDSGGDMCSCWDAVNNMIKLQHTQIKVSFEKSINIVEYNDPFYSKLRGFVSRNALSYIADHYDRVKTVGIDIDGSLCGCTIRTTHGLPCACELAKYSRTWHPIPLQAIHVHWRTLNFSDQEMNNEGLELALQREVDALHNQFQELDYAGKITLKAKLRELAFPDAILMCPSPENYFDAPKALGFRERQIN

SEQ ID NO: 6662 - protein, 212 aa, Glycine max
  misc_feature (1)..(212): Ceres Seq. ID no. 14316191
MHLGNTTIDRFETAHWRLENLLQDSGGDMCSCWDAVNNMIKLQHTQIKVSFEKSINIVEYNDPFYSKLRGFVSRNALSYIADHYDRVKTVGIDIDGSLCGCTIRTTHGLPCACELAKYSRTWHPIPLQAIHVHWRTLNFSDQEMNNEGLELALQREVDALHNQFQELDYAGKITLKAKLRELAFPDAILMCPSPENYFDAPKALGFRERQIN

SEQ ID NO: 6663 - DNA, 1800 bp, Glycine max
  misc_feature (1)..(1800): Ceres Seq. ID no. 14316208
actcatataaataactcagggcggtggctatgtcaaactgagaactaagatcccgctggcggttggcgcaacctttcgatcttcatccaacggggcaacgttggatctgctgaactgaacttctttttatatgcactctgtgatttcactctgcttcgccatcctatgggggacaacaacagcaacaacgatgccttcatgcgcaaccaaaacgccgccgttcaggcccgcaccaaagcgcagaaccgctccaacgtccttcagctcaaactgattggacagagtcacccaaccggtctcacagcgaacctgttgaagctcttcgagcctaggcctccgttggagtacaagccacctccggagaaacgaaaatgcccaccgttatcagggatggcacaatttgtgagcaagtttgccgagcctggcgagccagaatacgctccacctgtcccagaaactgagactcctgcacaaaaaagagccagaatacacaagctaaggcttgagaagggagctgcaaaggctgctgaggagcttgagaaatatgatccacataatgacccaaatgtgtcgggagatccatacaagacattgtttgtggctaaactcagttacgagaccactgagagcagaatcaaaagggagtttgagtcatatggtccaatcaaacgggttcgattagttgctgacaaagatataaataagcccaggggttatgctttcattgagtatctgcatacaagagacatgaaagctgcttataaacaagctgatggtaggaaaattgatggtagaagggtgcttgtggatgttgagcgtgggaggactgttccaaattggagaccccgtcgcttaggtggtggacttggtaccactagagttggaggtgaagaagttaatcagcgacattctgggagggagcaacaacagtctcgttctgaagaaccgagagtgcgagaggaccgacacgctgatagagacagggaaatatcacgtgaaagaggtagggacaaagacagagaacgggagcgatcacgtgaacattctcatgaaagggtcagggatcgtgatcatagggaggataggcaccacagagaccgggataggaacagggacagagaccgagacagggaaagagatagagatcgtgggcgtgatcgagatagaacacgggaccgtgatcgtgagcgagggagggaccgtgatcgggatcgagaatatgatcgacatcgtgagagggatagagattatgaagttggtgaccctgatcgaggacgctcacgtgatagggagtctgattatgatcgtgttgaatctaaacatggggaaaggaatcatgactatgaacctgaggatgatcgtggtaggcataaccagtatgaacatggacgtaggcatgcagaccctgatcatgaccctgagcggtatgaccactacaatcatggagatgaccatggtgaccattacaatcagtatcgtgaccatgatgggatggaagatgactaccatgctggacgtgcaacatctgaatcgcatgaaaaggagagaagtcatgatgtggaccgtgaatatcaacgctcagagagatcacattcccgggagtatgattattaggacttgggcatagttcttctcaactttgttggtaagattttataatttggtatgtttacttttgaatcttgctcacctgccggtattggtagttgttgaatggattaaggcacagtgtgatcattaaaaagaaaactgtagctgctgctatccatatggcccatatttgaaagctgccttttgtcg

SEQ ID NO: 6664 - protein, 482 aa, Glycine max
  misc_feature (1)..(482): Ceres Seq. ID no. 14316209
MGDNNSNNDAFMRNQNAAVQARTKAQNRSNVLQLKLIGQSHPTGLTANLLKLFEPRPPLEYKPPPEKRKCPPLSGMAQFVSKFAEPGEPEYAPPVPETETPAQKRARIHKLRLEKGAAKAAEELEKYDPHNDPNVSGDPYKTLFVAKLSYETTESRIKREFESYGPIKRVRLVADKDINKPRGYAFIEYLHTRDMKAAYKQADGRKIDGRRVLVDVERGRTVPNWRPRRLGGGLGTTRVGGEEVNQRHSGREQQQSRSEEPRVREDRHADRDREISRERGRDKDRERERSREHSHERVRDRDHREDRHHRDRDRNRDRDRDRERDRDRGRDRDRTRDRDRERGRDRDRDREYDRHRERDRDYEVGDPDRGRSRDRESDYDRVESKHGERNHDYEPEDDRGRHNQYEHGRRHADPDHDPERYDHYNHGDDHGDHYNQYRDHDGMEDDYHAGRATSESHEKERSHDVDREYQRSERSHSREYDY

SEQ ID NO: 6665 - protein, 471 aa, Glycine max
  misc_feature (1)..(471): Ceres Seq. ID no. 14316210
MRNQNAAVQARTKAQNRSNVLQLKLIGQSHPTGLTANLLKLFEPRPPLEYKPPPEKRKCPPLSGMAQFVSKFAEPGEPEYAPPVPETETPAQKRARIHKLRLEKGAAKAAEELEKYDPHNDPNVSGDPYKTLFVAKLSYETTESRIKREFESYGPIKRVRLVADKDINKPRGYAFIEYLHTRDMKAAYKQADGRKIDGRRVLVDVERGRTVPNWRPRRLGGGLGTTRVGGEEVNQRHSGREQQQSRSEEPRVREDRHADRDREISRERGRDKDRERERSREHSHERVRDRDHREDRHHRDRDRNRDRDRDRERDRDRGRDRDRTRDRDRERGRDRDRDREYDRHRERDRDYEVGDPDRGRSRDRESDYDRVESKHGERNHDYEPEDDRGRHNQYEHGRRHADPDHDPERYDHYNHGDDHGDHYNQYRDHDGMEDDYHAGRATSESHEKERSHDVDREYQRSERSHSREYDY

SEQ ID NO: 6666 - protein, 407 aa, Glycine max
  misc_feature (1)..(407): Ceres Seq. ID no. 14316211
MAQFVSKFAEPGEPEYAPPVPETETPAQKRARIHKLRLEKGAAKAAEELEKYDPHNDPNVSGDPYKTLFVAKLSYETTESRIKREFESYGPIKRVRLVADKDINKPRGYAFIEYLHTRDMKAAYKQADGRKIDGRRVLVDVERGRTVPNWRPRRLGGGLGTTRVGGEEVNQRHSGREQQQSRSEEPRVREDRHADRDREISRERGRDKDRERERSREHSHERVRDRDHREDRHHRDRDRNRDRDRDRERDRDRGRDRDRTRDRDRERGRDRDRDREYDRHRERDRDYEVGDPDRGRSRDRESDYDRVESKHGERNHDYEPEDDRGRHNQYEHGRRHADPDHDPERYDHYNHGDDHGDHYNQYRDHDGMEDDYHAGRATSESHEKERSHDVDREYQRSERSHSREYDY

SEQ ID NO: 6667 - DNA, 1216 bp, Glycine max
  misc_feature (1)..(1216): Ceres Seq. ID no. 14316212
gaattgaaatatgcccacaatcaagtgagttctgggaaatattcaagtaatcaacgagaaacaagtgcagagctggacccagtaggactgtctgcatggaaccactatggggatgaagatatacagtcacagggcagaagttctgtacctttagccccaacccttcctattccacagcctaaacttaaagctttcacaaaaaaggagaagaatgatccagttctgccagcctctaaatgggctcgggaggatgatgagagtgatgatgaacaaagaagtggaaaaaatctcggcttaagctactcatcttctggtagtgagaacgtggatgatggtcttgttaaagctgatgaatcagagtctgcagctgatagaagtttttcagctcacgctgacagtggaatgaatgaagagcagaggcaaaagctgagacgcttggaggttgctttaattgaatacggtgagtctcttgaagagaggggaattaaaaatttggaggaaattgagaagaaagttcagttgcataggaaacggctgcaagtggagtatgggttatcagattctggtgaagatggtcaaggcaatagaagaacttcagagaggagggataggcatgatgtttcaaggaaacggcaccgaagccgtagtccaagtagtagtccacagccaacattatctggcaaagacagagatagagaacacgatttagaaagggatcgagacagacaaagagatagaagtcatgatttcgatagtgaaagaggaagggaccggcacagggagaagagtggaagcagagagagagatgatcatgataaggacagaagcagggatagggacaggagaagacgagccaaataagaacatttcagatgtttcagctcagatttgataccttgatgatttccaaatttgcttctaagagtctagaggacagttgacttttcgtcatcacggggatattggcaatgtgatacctgttgggagataggaatgaaacatctgccaggaaagtgtcactgtagacaatccttggaagtgctgagtagtaactggctcttgatacccccacaatttcaacttaatgtaatattaagattttaaatcgttaattttgcctgtgaattagtgcatgctgctgcacactgcatatttgatcaagagggttctgtcaataccaattattgagatagtttacagggagattcggctgact

SEQ ID NO: 6668 - protein, 286 aa, Glycine max
  misc_feature (1)..(286): Ceres Seq. ID no. 14316213
ELKYAHNQVSSGKYSSNQRETSAELDPVGLSAWNHYGDEDIQSQGRSSVPLAPTLPIPQPKLKAFTKKEKNDPVLPASKWAREDDESDDEQRSGKNLGLSYSSSGSENVDDGLVKADESESAADRSFSAHADSGMNEEQRQKLRRLEVALIEYGESLEERGIKNLEEIEKKVQLHRKRLQVEYGLSDSGEDGQGNRRTSERRDRHDVSRKRHRSRSPSSSPQPTLSGKDRDREHDLERDRDRQRDRSHDFDSERGRDRHREKSGSRERDDHDKDRSRDRDRRRRAK

SEQ ID NO: 6669 - protein, 152 aa, Glycine max
  misc_feature (1)..(152): Ceres Seq. ID no. 14316214
MNEEQRQKLRRLEVALIEYGESLEERGIKNLEEIEKKVQLHRKRLQVEYGLSDSGEDGQGNRRTSERRDRHDVSRKRHRSRSPSSSPQPTLSGKDRDREHDLERDRDRQRDRSHDFDSERGRDRHREKSGSRERDDHDKDRSRDRDRRRRAK

SEQ ID NO: 6670 - DNA, 1770 bp, Glycine max
  misc_feature (1)..(1770): Ceres Seq. ID no. 14316223
aaattacaaagtccaaaagtcacctaacagaggtaagaaccaagtaaaagcatcgtgtaatgtggacagttgcacaacagaaatggatagtcagccgtccggttcttctgcagatgctgtagatgttaatgagtctggaagtagcaagttaggtggatctgagcctgagggtgctgttctctgcttgcaggatcgattaaagtggcttgatcagcctgtcatcagaaaggaagaggatatatcttcgctacaaaagaaacaaaccatcaaagaccaagttaacatagaaagaactgtggataatgaaagcctatcaaaagagaagaaatcagcggtgccatcctcatctagtagtcctccaagaaacttacctgttcaaatgaagtcagaaaaccaaactagagttactggagatcctgttcatgtcaggaaaacatcttttggtgtctcacaatcaactgataaagaggcgtcttcatcttcaacttctgtatcacaagtaacaattggtccaaaaacagaaatccagaaagcttcacccccaagactaaccgaaagatccatggcacaagtggctatgttgtcaaggccatctagtgctccactagttcctggtggtcccaggcccactgctgctgttgtctccatggttcaaactgctccactacttgcacgctctgtgagtgcaactggtcggttaggtcctgatccctcacctgctactcatagttatgttccccagtcctatagaaatgcaataatggggaatcctgtggtgtcaactgctgccagtcttcctcattccagctccagttcaggagtaaacccatctcctggctattcacatccacccatggtatcatccccactatttatctcccggagctccgacaaaatggattcaaatacttcccagtctggtgttccctttggtatgatttcacgggatgttttacagaacggacctaattggattgatagttctcaaagggaagccagcagaagcatgcactatgaacctccttcccgactaaatgatgttcaaaacctagacttgttcaggccaatagattgtagatctttgggcaacataccaagtgagttcccagtttacacatccaggcgtccgaaccaaggggcgttggtggatgagttcccacacctcgatatcattaatgacctgcttgatgaaccaagggaccatggtattgggaaggcatccagggcaagttcagtcttccactccctcaatgatggaccacagttgctaaatcgtcaattcacttttcctagagacttgggtaccgatgatgatttgggatcttccaccagttcttgtaggcttgagagatcacgtagttaccatgatgccgggtttcaacaagggtatagcacatctggttggcattatgattcactgcaggattatgttcctcaggccagtacattatcatatggaaatggcaaggtagatgggatgattccaaaccaatggcaggttgctgatctatcttatctaggcatgagaaacactgagaatagttactcgtactatcaagattactcaaatatggcatgtggtgtcaatggttatactgtattcaggccttcaaatggtccgtagagggaaaagatgacaaaggttgcccacaaattagtggtcatcaacaaatgtaataatgtatttgaggaaattgttgggtctctttagattggagtgaggttgtatccccttgataggaaaacattttgtaaagagtgtttccgatt

SEQ ID NO: 6671 - protein, 540 aa, Glycine max
  misc_feature (1)..(540): Ceres Seq. ID no. 14316224
NYKVQKSPNRGKNQVKASCNVDSCTTEMDSQPSGSSADAVDVNESGSSKLGGSEPEGAVLCLQDRLKWLDQPVIRKEEDISSLQKKQTIKDQVNIERTVDNESLSKEKKSAVPSSSSSPPRNLPVQMKSENQTRVTGDPVHVRKTSFGVSQSTDKEASSSSTSVSQVTIGPKTEIQKASPPRLTERSMAQVAMLSRPSSAPLVPGGPRPTAAVVSMVQTAPLLARSVSATGRLGPDPSPATHSYVPQSYRNAIMGNPVVSTAASLPHSSSSSGVNPSPGYSHPPMVSSPLFISRSSDKMDSNTSQSGVPFGMISRDVLQNGPNWIDSSQREASRSMHYEPPSRLNDVQNLDLFRPIDCRSLGNIPSEFPVYTSRRPNQGALVDEFPHLDIINDLLDEPRDHGIGKASRASSVFHSLNDGPQLLNRQFTFPRDLGTDDDLGSSTSSCRLERSRSYHDAGFQQGYSTSGWHYDSLQDYVPQASTLSYGNGKVDGMIPNQWQVADLSYLGMRNTENSYSYYQDYSNMACGVNGYTVFRPSNGP

SEQ ID NO: 6672 - protein, 513 aa, Glycine max
  misc_feature (1)..(513): Ceres Seq. ID no. 14316225
MDSQPSGSSADAVDVNESGSSKLGGSEPEGAVLCLQDRLKWLDQPVIRKEEDISSLQKKQTIKDQVNIERTVDNESLSKEKKSAVPSSSSSPPRNLPVQMKSENQTRVTGDPVHVRKTSFGVSQSTDKEASSSSTSVSQVTIGPKTEIQKASPPRLTERSMAQVAMLSRPSSAPLVPGGPRPTAAVVSMVQTAPLLARSVSATGRLGPDPSPATHSYVPQSYRNAIMGNPVVSTAASLPHSSSSSGVNPSPGYSHPPMVSSPLFISRSSDKMDSNTSQSGVPFGMISRDVLQNGPNWIDSSQREASRSMHYEPPSRLNDVQNLDLFRPIDCRSLGNIPSEFPVYTSRRPNQGALVDEFPHLDIINDLLDEPRDHGIGKASRASSVFHSLNDGPQLLNRQFTFPRDLGTDDDLGSSTSSCRLERSRSYHDAGFQQGYSTSGWHYDSLQDYVPQASTLSYGNGKVDGMIPNQWQVADLSYLGMRNTENSYSYYQDYSNMACGVNGYTVFRPSNGP

SEQ ID NO: 6673 - protein, 414 aa, Glycine max
  misc_feature (1)..(414): Ceres Seq. ID no. 14316226
MKSENQTRVTGDPVHVRKTSFGVSQSTDKEASSSSTSVSQVTIGPKTEIQKASPPRLTERSMAQVAMLSRPSSAPLVPGGPRPTAAVVSMVQTAPLLARSVSATGRLGPDPSPATHSYVPQSYRNAIMGNPVVSTAASLPHSSSSSGVNPSPGYSHPPMVSSPLFISRSSDKMDSNTSQSGVPFGMISRDVLQNGPNWIDSSQREASRSMHYEPPSRLNDVQNLDLFRPIDCRSLGNIPSEFPVYTSRRPNQGALVDEFPHLDIINDLLDEPRDHGIGKASRASSVFHSLNDGPQLLNRQFTFPRDLGTDDDLGSSTSSCRLERSRSYHDAGFQQGYSTSGWHYDSLQDYVPQASTLSYGNGKVDGMIPNQWQVADLSYLGMRNTENSYSYYQDYSNMACGVNGYTVFRPSNGP

SEQ ID NO: 6674 - DNA, 524 bp, Glycine max
  misc_feature (1)..(524): Ceres Seq. ID no. 14316259
aaattatcgcgtgctcggtttttgatcgagtttttctccgtttgcagcacaacgaatttcgaaatcccgtggagaacgtaacgtgctctggtttctggactcgaagatgaaggccacaaaggaattgagcgagcaagtggaggaaaacgaggtcaaggttttggttgaggaggacgacgaagaatacgagtccgtggatgaagtagtagacgacgcagaagatgatgaagacgaagaagaggacgatgacgacgacgaaggagacgacaatgacgacgaggaagatgatgctcctgacggcggtgacgacgacgacgacgaagaggaaggaagtgacatagttttgatgcaaaatcataggataaaaggaagtaaggttgaggaccaggagacactgtgttgtattccttgtttcattcagatgtaatgttaatatgttgttgattctttttgtaagaggcatgcatatgccatcaactatttcgctataaggttataatgtggttatgcagatcatgcttgct

SEQ ID NO: 6675 - protein, 106 aa, Glycine max
  misc_feature (1)..(106): Ceres Seq. ID no. 14316260
MKATKELSEQVEENEVKVLVEEDDEEYESVDEVVDDAEDDEDEEEDDDDDEGDDNDDEEDDAPDGGDDDDDEEEGSDIVLMQNHRIKGSKVEDQETLCCIPCFIQM

SEQ ID NO: 6676 - DNA, 1277 bp, Glycine max
  misc_feature (1)..(1277): Ceres Seq. ID no. 14316261
agcctcatcactcactctaatctaacgatgaatctgaataccaagctttctcactcataagttcccactccctctcttatcatttatcaaacaaatttttcatctttccccacttgttggattaatggctgcctcagctttgtcactaacatccccattccatttcagaaaaccccacaacagggtttcacctctcaatgctcatcctctcattctcatccaaaagggtaaacaatctcttaaatcaaacttctcattctcaaccctgaatgcttccccccacttcagaccccctattgccattgctccttccacactgaccctaacaagagcttcttcctctgatgaatgctttgaccctgctggtgaagcccaaaggttgctgctttctgaggaaaaaccagttaattttgctttctgggtcatattttgggcctctttgtccctggcttggtttgctgtttcaagggatgctaatgctgctgttgaatcctccatcaaagcctctggctttggcttcaacattgccaattcgttgaggaaattgggttggcctgattgggttgtggtgttcacccttgccactcttcctgtgcttgagcttcgtggggctatacctgttggttactggatgcaacttaaccctgtaactttaacagtgttatctattctggggaacatggtccctgtgccattcatcgtgctctaccttaaaaaaattgcgtctttcgttgctgcgaggagcccttctgcgtctcgattccttgacatgctgttcgagaatgccaaagagaaggctggtccagtggaggagtttcagtggcttggtctgatgctctttgtggctgttccttttcctggaacaggagcatggaccggagcctttatagcatccattcttgatatgccattttgggctgctgtgtctgctaatttctttggtgttgtatttgctgggttgctagtaaatttgttagtgaaccttggtctgaagtatgccatcattactggtgtcatccttttctttgtttccacattcatgtggagtgtccttagaaatcttaaaaaaggtttgagctcgtcaaattgacgtgaaatgtctgattttcctttaccaacatgatgacaattgttagttttgttgttcattctcttggttttcattttcttatattttcataattgagcatcctagttcagtgatatgtaaaaatgaaaaggcttatgtcttgtatataccctttttctgatgttttaaaaatcatgggctgactgac

SEQ ID NO: 6677 - protein, 321 aa, Glycine max
  misc_feature (1)..(321): Ceres Seq. ID no. 14316262
MAASALSLTSPFHFRKPHNRVSPLNAHPLILIQKGKQSLKSNFSFSTLNASPHFRPPIAIAPSTLTLTRASSSDECFDPAGEAQRLLLSEEKPVNFAFWVIFWASLSLAWFAVSRDANAAVESSIKASGFGFNIANSLRKLGWPDWVVVFTLATLPVLELRGAIPVGYWMQLNPVTLTVLSILGNMVPVPFIVLYLKKIASFVAARSPSASRFLDMLFENAKEKAGPVEEFQWLGLMLFVAVPFPGTGAWTGAFIASILDMPFWAAVSANFFGVVFAGLLVNLLVNLGLKYAIITGVILFFVSTFMWSVLRNLKKGLSSSN

SEQ ID NO: 6678 - DNA, 1301 bp, Glycine max
  misc_feature (1)..(1301): Ceres Seq. ID no. 14316263
aggatcacagtaggagataaggagagcattcaccattttcttgtggtttggtttcctagagacactaagtactcccatggaacaaaacaacaaaagccttgtttcttctaaattcttatgtttatgtttgttgatcaccttgatcagcattattgttgctccacaagcggaagcagcacgagcatttttcgtgtttggcgattcgcttgtagacaacgggaacaacaatttcttggccaccacggcgcgtgccgattcatatccttatggcattgattctgcatctcatagagcctctggtcgtttctccaatggcctcaacatgcctgaccttatcagtgagaaaattggctcagaacccacattaccatatttgagtccacagctcaatggtgaaaggctgcttgttggtgcaaactttgcttctgctgggataggaattctcaacgacactggaattcagtttataaacataatccgaattacagaacaattggcatacttcaaacagtatcagcagagggtgagtgcactaattggagaagagcagactcgaaatttagtgaacaaagcattggtgctcataaccttaggtggcaatgattttgtcaacaactattatttggttcctttctctgccagatcccgcgaatatgctcttccagactacgttgtcttcctcatttcggagtatcgtaaaattcttgcgaatctgtatgaattgggggcacgaagggttctagtgacaggcacgggaccactgggttgcgtgccagcagaattggctatgcacagccaaaacggagaatgtgcgactgagctgcaacgagccgttaacctgttcaatcctcaactcgtccaactactgcacgaacttaacactcaaattggctccgatgtcttcatttccgcaaacgccttcaccatgcatttggatttcgttagtaacccacaagcctatgggtttgtcacgtcaaaagtagcatgctgtggtcaaggagcatacaatggaatcggactctgcactccagcttcaaacttgtgcccaaacagggatttatatgcattttgggaccccttccatccatcagagagagcaaatagattgatcgtggataaattcatgactggatccaccgaatacatgcaccctatgaaccttagtacaattattgctttagattctacaacctaatgcaccattactgtatgagttgtcttcttttcttgtctatgcacacctagttcctacaagatattgtatttttcttgaatgtttaaaactatgacgttaattactc

SEQ ID NO: 6679 - protein, 372 aa, Glycine max
  misc_feature (1)..(372): Ceres Seq. ID no. 14316264
MEQNNKSLVSSKFLCLCLLITLISIIVAPQAEAARAFFVFGDSLVDNGNNNFLATTARADSYPYGIDSASHRASGRFSNGLNMPDLISEKIGSEPTLPYLSPQLNGERLLVGANFASAGIGILNDTGIQFINIIRITEQLAYFKQYQQRVSALIGEEQTRNLVNKALVLITLGGNDFVNNYYLVPFSARSREYALPDYVVFLISEYRKILANLYELGARRVLVTGTGPLGCVPAELAMHSQNGECATELQRAVNLFNPQLVQLLHELNTQIGSDVFISANAFTMHLDFVSNPQAYGFVTSKVACCGQGAYNGIGLCTPASNLCPNRDLYAFWDPFHPSERANRLIVDKFMTGSTEYMHPMNLSTIIALDSTT

SEQ ID NO: 6680 - protein, 290 aa, Glycine max
  misc_feature (1)..(290): Ceres Seq. ID no. 14316265
MPDLISEKIGSEPTLPYLSPQLNGERLLVGANFASAGIGILNDTGIQFINIIRITEQLAYFKQYQQRVSALIGEEQTRNLVNKALVLITLGGNDFVNNYYLVPFSARSREYALPDYVVFLISEYRKILANLYELGARRVLVTGTGPLGCVPAELAMHSQNGECATELQRAVNLFNPQLVQLLHELNTQIGSDVFISANAFTMHLDFVSNPQAYGFVTSKVACCGQGAYNGIGLCTPASNLCPNRDLYAFWDPFHPSERANRLIVDKFMTGSTEYMHPMNLSTIIALDSTT

SEQ ID NO: 6681 - DNA, 1381 bp, Glycine max
  misc_feature (1)..(1381): Ceres Seq. ID no. 14316288
atgtggtgttaccagaaagcagataagacttgaacacgtgtgctactacttaccacttctccatgaattactgaactgcgagctccctccaattcgcttctccttcttcttcattccttggcagtacacaaatctgtcatatcttgctgctcgatcgttacgatgatggcgctcaattcattgtcaccactttcaattaattctcttcacgtatcttcaagctcaacttcaaagatttcgcattctcattccaagtcctttcccgtcgttgtgtgccaaattaactcaaacagagatcatcgtcaagaatccacaaaatggggaaaagtggtttcggccacgttggcggctgctgttattgccttcagctctgacatgtctgcccttgctgatctcaacaaatttgaggctgaaatgaggggtgaatttggaataggatcggctgcgcagtttggctctgctgacctcaggaaagcggtgcatgtcaatgaaaatttcagaagagccaatttcacagctgctgatatgagagaatctgattttagtggttcaactttcaatggtgcataccttgagaaagctgttgcatacaaggcaaacttttcaggtgctgatttaagtgatacattgatggatcgcatggtatctacatcaagttgattaactttatctatacgttcaatactaattttttttctctcttttaattgggtatatgtgtgattttcttgtttgaggtctaaaggttctaaatgaagccaatctcactaatgccattctccttagaacagtcctcacacggagtgaccttgggggagccatcatcgaaggtgctgactttagtgatgctgtgttggatcttcctcaaaagcaggcgctatgcaagtatgctagtggcacaaatcctgtgacaggagtaagcacaagagtaagcttaggttgtgggaacaaacgacgaaatgcatatggctccccgtcatctccccttttaagtgctccaccacagaaactgcttgaccgagacggtttttgtgatgatgcaacaggactttgcgatgcaaagtagtaactagttgtaatatttgctacaaggccatattcgtgtaaatatatcagagactacaattgaggcctctatttgcctttgcatttctgagagcatatccgcattcaacaaatgatgccctctcttgaatctatgttggatattgctggtctctgtttagcaagccagaacctattttgtccagccactttctcctatgtaagatctacgggatataaaatgatgcttcgtgttcataatttctcacccatttgccacaaaactttaatgaaccatgtaagtccaatttcttgtttaaatttatattacacaaac

SEQ ID NO: 6682 - protein, 165 aa, Glycine max
  misc_feature (1)..(165): Ceres Seq. ID no. 14316289
MMALNSLSPLSINSLHVSSSSTSKISHSHSKSFPVVVCQINSNRDHRQESTKWGKVVSATLAAAVIAFSSDMSALADLNKFEAEMRGEFGIGSAAQFGSADLRKAVHVNENFRRANFTAADMRESDFSGSTFNGAYLEKAVAYKANFSGADLSDTLMDRMVSTSS

SEQ ID NO: 6683 - protein, 164 aa, Glycine max
  misc_feature (1)..(164): Ceres Seq. ID no. 14316290
MALNSLSPLSINSLHVSSSSTSKISHSHSKSFPVVVCQINSNRDHRQESTKWGKVVSATLAAAVIAFSSDMSALADLNKFEAEMRGEFGIGSAAQFGSADLRKAVHVNENFRRANFTAADMRESDFSGSTFNGAYLEKAVAYKANFSGADLSDTLMDRMVSTSS

SEQ ID NO: 6684 - protein, 94 aa, Glycine max
  misc_feature (1)..(94): Ceres Seq. ID no. 14316291
MSALADLNKFEAEMRGEFGIGSAAQFGSADLRKAVHVNENFRRANFTAADMRESDFSGSTFNGAYLEKAVAYKANFSGADLSDTLMDRMVSTSS

SEQ ID NO: 6685 - DNA, 989 bp, Glycine max
  misc_feature (1)..(989): Ceres Seq. ID no. 14316297
attattggtgttgaagatagaaaagaaagagaaagagcgatgccaggatcattgaggcctcggtttgttatctttggttcttccatcgttcaatttggtttttatgatgaaggttgggtggctattctttctcatttgtatgcccgcaaggttgatattgatttgcgaggatatgctggttggaattcaaggcgtgctgtgcaggttctggataaagtttttcccaaggatgcccctatacaaccttcattggttattgtctactttggtggtaatgattcttctgctcccctctcatctggcctaggtcctcatgtgcctctccaagaatacattgaaaatttgaggaagatcgttgaccatctcaagagcctctcagagaacactcgcattctacttctcagtactcctcccctcaatgatgcagcaattacgccaaacagtgatgggaagccaacaaagacaaatgaagcttgtcaaatatattcagaagcatgtttggatgtgtgccgcaagatgaatatcaaggccattgatttgtggtctgctattcagaaaagagataactggcaagatgtttgcttcattgatggaattcacctctcatctgagggaagcaagatagtgttgaaagagatactgaatgtcctcaaaggtgcagaatgggaacctagtctatattggaaatcaatgccaagtgagtttgatgaagattcaccatatgatccagttacaactgatggaaagtcaactattaatctttccagctgggtcttccctgacaatgacaaatgggactagactttatatgtgcattaacggcgagtcactgaatcgcatcgaacgaaaatgcctatttttatcttttttttttgtgttgcatgtttgggttcctttctttatcgtgtttatttctgtattacttgcaaaaaatgacgtctattactatgattaactttgaggttcacgagtcattttcaatcttctcc

SEQ ID NO: 6686 - protein, 266 aa, Glycine max
  misc_feature (1)..(266): Ceres Seq. ID no. 14316298
IIGVEDRKERERAMPGSLRPRFVIFGSSIVQFGFYDEGWVAILSHLYARKVDIDLRGYAGWNSRRAVQVLDKVFPKDAPIQPSLVIVYFGGNDSSAPLSSGLGPHVPLQEYIENLRKIVDHLKSLSENTRILLLSTPPLNDAAITPNSDGKPTKTNEACQIYSEACLDVCRKMNIKAIDLWSAIQKRDNWQDVCFIDGIHLSSEGSKIVLKEILNVLKGAEWEPSLYWKSMPSEFDEDSPYDPVTTDGKSTINLSSWVFPDNDKWD

SEQ ID NO: 6687 - protein, 253 aa, Glycine max
  misc_feature (1)..(253): Ceres Seq. ID no. 14316299
MPGSLRPRFVIFGSSIVQFGFYDEGWVAILSHLYARKVDIDLRGYAGWNSRRAVQVLDKVFPKDAPIQPSLVIVYFGGNDSSAPLSSGLGPHVPLQEYIENLRKIVDHLKSLSENTRILLLSTPPLNDAAITPNSDGKPTKTNEACQIYSEACLDVCRKMNIKAIDLWSAIQKRDNWQDVCFIDGIHLSSEGSKIVLKEILNVLKGAEWEPSLYWKSMPSEFDEDSPYDPVTTDGKSTINLSSWVFPDNDKWD

SEQ ID NO: 6688 - DNA, 1228 bp, Glycine max
  misc_feature (1)..(1228): Ceres Seq. ID no. 14316302
tttaagttgaacatgatggaatggccgtctttctcttttgggtatcttcccaaatcaggaaacactttctcatcttccctttcccagtttcacaccctacctcatggaaggctctgtcaacgaacgtcttcattttgggaagattggatatggatgcaatcattacaggagaagatgcaggattcgtgctccctgctgcaacgagatctactcatgccgtcactgtcataacgaggccgcgagcttgttgaagaatccctttgatcgccacgagctcgttcgccaagatgttaaacaagttatttgttcagtttgtgacactgagcaacctgttgctcaagtttgcacaaactgtggcgtcaaaatgggagaatatttctgcaacatctgcaaattcttcgatgatgatgttgagaaagaacagtttcactgtgatgattgtgggatctgcagggttggtggtcgagataattttttccactgcaagaagtgcgggtcttgttatgcagttggtctgcatgataatcatttatgtgtggagaactccatgaggcatcactgtcccatttgttacgagtacctttttgattcattgaaagatgtcattgttatgaaatgtggtcacacaatgcaccatgaatgttacctggagatgataaaaaatgacaaatattgttgtcccatatgctccaagtcagtgattgacatgtctaagacatggaagagaattgatgaagagattgaagcaaccgtcatgcctcaagattatcgaaacaggaaggtttggatactatgtaatgactgcaatgacacaacagaagtttacttccacattcttggccaaaaatgtggtcactgcagatcatataatacccgcacagttgcacctccagttcttccccaatgaccagatctcttgggttcaagaagggaacactgtcagcagaaagttaaagttagcaccctgttattactatggagggttattgaattaattgagcatcaaaagtgattggtgtattgtgtcctagatagttttcttaggttattcttcctccaacatatggagtgggattgttgtctcttggttatttattgggcaggtataaacatctttatactgtaatagagggaaaacatttttcccgtcatgaattgctggtaatagtgatgcattgatacttgatgattgattgcattgtcggccatagtggttttctataaaaag

SEQ ID NO: 6689 - protein, 267 aa, Glycine max
  misc_feature (1)..(267): Ceres Seq. ID no. 14316303
MEGSVNERLHFGKIGYGCNHYRRRCRIRAPCCNEIYSCRHCHNEAASLLKNPFDRHELVRQDVKQVICSVCDTEQPVAQVCTNCGVKMGEYFCNICKFFDDDVEKEQFHCDDCGICRVGGRDNFFHCKKCGSCYAVGLHDNHLCVENSMRHHCPICYEYLFDSLKDVIVMKCGHTMHHECYLEMIKNDKYCCPICSKSVIDMSKTWKRIDEEIEATVMPQDYRNRKVWILCNDCNDTTEVYFHILGQKCGHCRSYNTRTVAPPVLPQ

SEQ ID NO: 6690 - protein, 180 aa, Glycine max
  misc_feature (1)..(180): Ceres Seq. ID no. 14316304
MGEYFCNICKFFDDDVEKEQFHCDDCGICRVGGRDNFFHCKKCGSCYAVGLHDNHLCVENSMRHHCPICYEYLFDSLKDVIVMKCGHTMHHECYLEMIKNDKYCCPICSKSVIDMSKTWKRIDEEIEATVMPQDYRNRKVWILCNDCNDTTEVYFHILGQKCGHCRSYNTRTVAPPVLPQ

SEQ ID NO: 6691 - DNA, 1251 bp, Glycine max
  misc_feature (1)..(1251): Ceres Seq. ID no. 14316312
aacgtatggatcgaaggactatgtctatgatgtctagcaaagttgatcccttccagcatctcaaactcgtccccaattccgacggcacgatcactcgccagcgtgatgacccacccatctcaccctcactcaatcccacccttcccgtcctcacccaagacgcaaccatcaaccgatcaaacaacaccttcgcccgcatattcctaccccgcgaagcactcgattcctccccctccaacaacctccctctcgtcgtttacttccacggcggcggcttcgtcctcttcagcgccgcctctgacttcttccacgacgcatgcgtaaacctcgcagacgacaccaactccatcgtcgtttccgtggagtaccgcctcgcaccggaacacagactccccgcggcgtacgaagatgccgtcgaagcgctgcactggatcaaagcacagtcaaacgattggttgcgcaaccacgcggatttttccaactgttaccttatgggaagtagcgccggagcaaacatcgcgtaccacgtgggtctacgtgtagctgcggagcttaacgtttatggagacaattatctggcgccacttaagatcagagggctgatattgagtcagccgttcttcggaggaacgaagagggtgccttctgaggtgaggcttgtggacgatccggttttgccgccgcacgtgtgtgacttactgtgggagttgtcgctgcccctgggggttgaccgtgatcacgagtattgcaatccgacggctggcgatgggcctgtgattctggatcgggtgaggcagcttgcgtggcgggtgctggtgagtgggtgccatggggacccacttctggatcatcagatggctctggcaagactgatagaggagaagggtgtggctgtggtcacccgttttgaccaagggggatgtcatgggattgaggttcgtgctcgtaagcaccaaaaccaactctataacctagtcaaagattttattgcataatttctgacatggaactaccatttctttttaagctctatactgtataattacattttcaaaatattgctacaaataaatgttattttctctcttttgatactctcctccacccctcacttagagactgtttggtattacgaaaatagagagggagattaaggaagaaagtgaaaatgagttgtttaataatgtaacggaattgaaggtgtgtataatggcacacatagtatttcagtagcctacatttttaaatttg

SEQ ID NO: 6692 - protein, 330 aa, Glycine max
  misc_feature (1)..(330): Ceres Seq. ID no. 14316313
RMDRRTMSMMSSKVDPFQHLKLVPNSDGTITRQRDDPPISPSLNPTLPVLTQDATINRSNNTFARIFLPREALDSSPSNNLPLVVYFHGGGFVLFSAASDFFHDACVNLADDTNSIVVSVEYRLAPEHRLPAAYEDAVEALHWIKAQSNDWLRNHADFSNCYLMGSSAGANIAYHVGLRVAAELNVYGDNYLAPLKIRGLILSQPFFGGTKRVPSEVRLVDDPVLPPHVCDLLWELSLPLGVDRDHEYCNPTAGDGPVILDRVRQLAWRVLVSGCHGDPLLDHQMALARLIEEKGVAVVTRFDQGGCHGIEVRARKHQNQLYNLVKDFIA

SEQ ID NO: 6693 - protein, 329 aa, Glycine max
  misc_feature (1)..(329): Ceres Seq. ID no. 14316314
MDRRTMSMMSSKVDPFQHLKLVPNSDGTITRQRDDPPISPSLNPTLPVLTQDATINRSNNTFARIFLPREALDSSPSNNLPLVVYFHGGGFVLFSAASDFFHDACVNLADDTNSIVVSVEYRLAPEHRLPAAYEDAVEALHWIKAQSNDWLRNHADFSNCYLMGSSAGANIAYHVGLRVAAELNVYGDNYLAPLKIRGLILSQPFFGGTKRVPSEVRLVDDPVLPPHVCDLLWELSLPLGVDRDHEYCNPTAGDGPVILDRVRQLAWRVLVSGCHGDPLLDHQMALARLIEEKGVAVVTRFDQGGCHGIEVRARKHQNQLYNLVKDFIA

SEQ ID NO: 6694 - protein, 324 aa, Glycine max
  misc_feature (1)..(324): Ceres Seq. ID no. 14316315
MSMMSSKVDPFQHLKLVPNSDGTITRQRDDPPISPSLNPTLPVLTQDATINRSNNTFARIFLPREALDSSPSNNLPLVVYFHGGGFVLFSAASDFFHDACVNLADDTNSIVVSVEYRLAPEHRLPAAYEDAVEALHWIKAQSNDWLRNHADFSNCYLMGSSAGANIAYHVGLRVAAELNVYGDNYLAPLKIRGLILSQPFFGGTKRVPSEVRLVDDPVLPPHVCDLLWELSLPLGVDRDHEYCNPTAGDGPVILDRVRQLAWRVLVSGCHGDPLLDHQMALARLIEEKGVAVVTRFDQGGCHGIEVRARKHQNQLYNLVKDFIA

SEQ ID NO: 6695 - DNA, 803 bp, Glycine max
  misc_feature (1)..(803): Ceres Seq. ID no. 14316320
agttggcgaatgacaatgcaatgctcgtgtcgttttggtgtcactgagtcagtctgagtaggaagaggaagccatgggcaacacatcctccatgctcacccaatacgacatcgaagaggttcagcaacattgcaaaaacgcttttacgcaacaggagatagtttctctgtaccaacgcttctgtcagctggatcgcaacaactgcggtttcatcccttccgatgaattcctctccattcccgaattcgccgtcaatcctctctctcagagtttgttgaggatgctggatgggttgaacttcaaggaatttgtggccttcttgtccgccttcagtccccgtgccactctccaccacaaaattgaattcattttcaaggtctatgacaccgattgcaatggaaaagttaccttccatgacatgttgagggctttaaggaatttgagtggacccttcatgtctgagcaacagagagaggacgttctgacacaggtccttgaggaagctggctatgcaaaggattcttcattagtcttgtctgacttcatgaagattcttggcaattcgggtttgaagatggaagtagaggttccggtggattagagtgaggataatacaattccctttttgagttttcttttttcttttttttgaggataactttccctttcagtttgatgacggaggttcttggttctggtatttagttcttcctcttaatgggtaaaagattatttgttcagtgattaattactgcaaacaaagttatggattatataatgtttaacaaatgctttcaaaactg

SEQ ID NO: 6696 - protein, 175 aa, Glycine max
  misc_feature (1)..(175): Ceres Seq. ID no. 14316321
MGNTSSMLTQYDIEEVQQHCKNAFTQQEIVSLYQRFCQLDRNNCGFIPSDEFLSIPEFAVNPLSQSLLRMLDGLNFKEFVAFLSAFSPRATLHHKIEFIFKVYDTDCNGKVTFHDMLRALRNLSGPFMSEQQREDVLTQVLEEAGYAKDSSLVLSDFMKILGNSGLKMEVEVPVD

SEQ ID NO: 6697 - protein, 169 aa, Glycine max
  misc_feature (1)..(169): Ceres Seq. ID no. 14316322
MLTQYDIEEVQQHCKNAFTQQEIVSLYQRFCQLDRNNCGFIPSDEFLSIPEFAVNPLSQSLLRMLDGLNFKEFVAFLSAFSPRATLHHKIEFIFKVYDTDCNGKVTFHDMLRALRNLSGPFMSEQQREDVLTQVLEEAGYAKDSSLVLSDFMKILGNSGLKMEVEVPVD

SEQ ID NO: 6698 - protein, 106 aa, Glycine max
  misc_feature (1)..(106): Ceres Seq. ID no. 14316323
MLDGLNFKEFVAFLSAFSPRATLHHKIEFIFKVYDTDCNGKVTFHDMLRALRNLSGPFMSEQQREDVLTQVLEEAGYAKDSSLVLSDFMKILGNSGLKMEVEVPVD

SEQ ID NO: 6699 - DNA, 1158 bp, Glycine max
  misc_feature (1)..(1158): Ceres Seq. ID no. 14316324
aatcccaagagagttggaaaacaaagtatagagtgaaagaatgggtgagaaaagcaagattttgatcataggaggcaccggctacatcggcaaacatatagtggaagcaagcgcaaaggctggaaatcccacttttgctttggtgagggaatccacactctctgacccctccaaggcacaactcatccacaattttgaggctttgggcgttaatttggtccgcggggatctgtacgatcatgagaagttggtgaaagctatcaagcaagtagatgtcgtcatatccacgctgggtcacctgcagcttgccgatcagctcaagatcatcgctgccattaaggaagccggtaatgttaagaggtttttcccttcggaattcggtaacgacgtggatcgtgtccatgccgtggaaccagcaaaatctgcattagctatcaaagcccaaattcgacgcagcattgaagccgaaggcatcccctatacgtacgtttccagcaactacttcgctggctattttcttcccacattagcacaaccaggtgcttttgctccacctccacccaaagacaaagtcattatcttgggcgatggaaatcctaaagcaattttcaacaaggaagaggacattggaacctacaccatcagggctgtggatgaccctaggacattgaacaagattctctacctcaggccccctaagaacatttactcgttcaacgagcttgtggccttgtgggagaacaagattggcaagaccctcgaaaaaatttatgtaccagaggagaaggttctcaaggacatcgaagaggcacctcttccaatcaatgtggtattagcaatcaaccactcagtgttcgtgaagggtgaccacaccaactttgagattgagccatctttcggggttgaggcttctgagttgtacccggatgtcaactacaccaccgtggaagaataccttggtcagttcgcttgagaatttaaaaggagaaagatgctcttgtgatcggatatttaaataatctgagttgttgatttggagagtggaagattgtgttttatgtcaaaagatcgctatgtgatgtaatcttgcctttcatgtgtagaatgttcctacttgaatggttgaaaaataataaatgacttacgagttgagataac

SEQ ID NO: 6700 - protein, 310 aa, Glycine max
  misc_feature (1)..(310): Ceres Seq. ID no. 14316325
MGEKSKILIIGGTGYIGKHIVEASAKAGNPTFALVRESTLSDPSKAQLIHNFEALGVNLVRGDLYDHEKLVKAIKQVDVVISTLGHLQLADQLKIIAAIKEAGNVKRFFPSEFGNDVDRVHAVEPAKSALAIKAQIRRSIEAEGIPYTYVSSNYFAGYFLPTLAQPGAFAPPPPKDKVIILGDGNPKAIFNKEEDIGTYTIRAVDDPRTLNKILYLRPPKNIYSFNELVALWENKIGKTLEKIYVPEEKVLKDIEEAPLPINVVLAINHSVFVKGDHTNFEIEPSFGVEASELYPDVNYTTVEEYLGQFA

SEQ ID NO: 6701 - DNA, 1179 bp, Glycine max
  misc_feature (1)..(1179): Ceres Seq. ID no. 14316328
attttcatttccccactctgtttactccgtgtccgcagaagatggaaagtggattacctttgcttaattatctcttgcagcagactctcagaaccatttgcacttctcccaattcttccactccttctaagtgggtatatgctgtcttctggaggatattacctcgcaactttcctccaccaaggtgggaatttggaggaactgctcttgatctctccaaaggaaataaaaggaactggatccttgtctgggaagatgggttctgcgattttaacgaatgcgagcaaaggaagagtggtagtggttacttgaacggtagatttggagctgacgtattcttcaaaatgtcgcatgaggtttacaattatggagagggactcgtgggaaaagttgccgcagataatagtcacaaatgggtttacaatgagagtcacaatgagtgtgaatctagctatattgcttcatggaatgcttcagtcgaacctcaaccaaaggcgtgggagtttcagttcaattcaggcattcagagtatagtcataatcgccgtcagagaaggcgtagtgcaattgggttcttttaacaagatatcagaggacctgaatctggtgatcagcatacagaggcaattcagctaccttcagagcatacctggtgtgtttggtattcaaagaccatacctacctcttcaacatccatacattgtgaagccaagtttcatagaaaacaatgcaatgactctatatgatatggggtggaacaccaaccctcagaatggagcaccaggcccatctctttgttcaggttctccttctctaccactaccaaccatgccctgtagttttggagctttgctatcaaagttaccatctggaatcccaccctataattccactcaagtccttgatgcagggacacaaagcaccattgagagagtgaagatagaggattgtgaatttcatcctacccttgatgacgatcacaaaggaagaaaggtcggttccctgaacaagtagcatggatttggaattggaagattaattaattaagagacaggaaccactttgaccataatgactcctaaatcatagtcagtatgttaagaaatggttagttatttattttctttcacttggccacaatgtgtattgtggtatgtttattggtggccgacaacctatc

SEQ ID NO: 6702 - protein, 336 aa, Glycine max
  misc_feature (1)..(336): Ceres Seq. ID no. 14316329
FHFPTLFTPCPQKMESGLPLLNYLLQQTLRTICTSPNSSTPSKWVYAVFWRILPRNFPPPRWEFGGTALDLSKGNKRNWILVWEDGFCDFNECEQRKSGSGYLNGRFGADVFFKMSHEVYNYGEGLVGKVAADNSHKWVYNESHNECESSYIASWNASVEPQPKAWEFQFNSGIQSIVIIAVREGVVQLGSFNKISEDLNLVISIQRQFSYLQSIPGVFGIQRPYLPLQHPYIVKPSFIENNAMTLYDMGWNTNPQNGAPGPSLCSGSPSLPLPTMPCSFGALLSKLPSGIPPYNSTQVLDAGTQSTIERVKIEDCEFHPTLDDDHKGRKVGSLNK

SEQ ID NO: 6703 - protein, 323 aa, Glycine max
  misc_feature (1)..(323): Ceres Seq. ID no. 14316330
MESGLPLLNYLLQQTLRTICTSPNSSTPSKWVYAVFWRILPRNFPPPRWEFGGTALDLSKGNKRNWILVWEDGFCDFNECEQRKSGSGYLNGRFGADVFFKMSHEVYNYGEGLVGKVAADNSHKWVYNESHNECESSYIASWNASVEPQPKAWEFQFNSGIQSIVIIAVREGVVQLGSFNKISEDLNLVISIQRQFSYLQSIPGVFGIQRPYLPLQHPYIVKPSFIENNAMTLYDMGWNTNPQNGAPGPSLCSGSPSLPLPTMPCSFGALLSKLPSGIPPYNSTQVLDAGTQSTIERVKIEDCEFHPTLDDDHKGRKVGSLNK

SEQ ID NO: 6704 - protein, 222 aa, Glycine max
  misc_feature (1)..(222): Ceres Seq. ID no. 14316331
MSHEVYNYGEGLVGKVAADNSHKWVYNESHNECESSYIASWNASVEPQPKAWEFQFNSGIQSIVIIAVREGVVQLGSFNKISEDLNLVISIQRQFSYLQSIPGVFGIQRPYLPLQHPYIVKPSFIENNAMTLYDMGWNTNPQNGAPGPSLCSGSPSLPLPTMPCSFGALLSKLPSGIPPYNSTQVLDAGTQSTIERVKIEDCEFHPTLDDDHKGRKVGSLNK

SEQ ID NO: 6705 - DNA, 938 bp, Glycine max
  misc_feature (1)..(938): Ceres Seq. ID no. 14316359
tacatggatgttgtagggaagctcaagcaccccaacattgttagactaagagcttattattacgctaaggaagaaaaacttcttgtctatgattatctccccaatggaagcttgcatgctcttcttcatgggaaccggggaccaggaaggattccgttagattggaccacgagaataagcttgatgttaggtgcagctagaggtttggcacggattcatgcggagtataacgcatcaaagatacctcacgggaacgtgaaatcttccaacgtgcttcttgacaaaaacggcgtcgctttaatatctgactttggcctttcgctgcttttaaaccctgttcacgcgattgcaaggttgggagggtacagggcgccggagcaagttgaggtgaagaggctgtcgcaggaggctgacgtgtacggcttcggggtgctactgttggaggttctgacgggtcgggctccgtcgaaggagtacacttctccggcgcgtgaggctgaggtggatcttccgaagtgggtgaaatcggtggtgaaagaagagtggacttcggaggtgtttgaccaggagctgctgaggtacaagaacatagaggatgagttggtggcgatgctgcacgtgggactggcgtgcgtggcggcgcaggcggagaagaggccgtgcatgttggaggttgtgaagatgattgaggagatcagagtggaagagtctcctctgggagatgattacgatgaggctcgctcgcgcacttcgctttcgccttcccttgccaccaccgaagacaacctcgcttgattattgtctcatgcatgcttgtcatttttagttccattgtgtgttagttaccgttttctttctaaaactttgctgttcttgcacttgtcttcagatatcactcatctattcaattaatccatggccatgacccgagtttgtgt

SEQ ID NO: 6706 - protein, 264 aa, Glycine max
  misc_feature (1)..(264): Ceres Seq. ID no. 14316360
YMDVVGKLKHPNIVRLRAYYYAKEEKLLVYDYLPNGSLHALLHGNRGPGRIPLDWTTRISLMLGAARGLARIHAEYNASKIPHGNVKSSNVLLDKNGVALISDFGLSLLLNPVHAIARLGGYRAPEQVEVKRLSQEADVYGFGVLLLEVLTGRAPSKEYTSPAREAEVDLPKWVKSVVKEEWTSEVFDQELLRYKNIEDELVAMLHVGLACVAAQAEKRPCMLEVVKMIEEIRVEESPLGDDYDEARSRTSLSPSLATTEDNLA

SEQ ID NO: 6707 - protein, 263 aa, Glycine max
  misc_feature (1)..(263): Ceres Seq. ID no. 14316361
MDVVGKLKHPNIVRLRAYYYAKEEKLLVYDYLPNGSLHALLHGNRGPGRIPLDWTTRISLMLGAARGLARIHAEYNASKIPHGNVKSSNVLLDKNGVALISDFGLSLLLNPVHAIARLGGYRAPEQVEVKRLSQEADVYGFGVLLLEVLTGRAPSKEYTSPAREAEVDLPKWVKSVVKEEWTSEVFDQELLRYKNIEDELVAMLHVGLACVAAQAEKRPCMLEVVKMIEEIRVEESPLGDDYDEARSRTSLSPSLATTEDNLA

SEQ ID NO: 6708 - protein, 203 aa, Glycine max
  misc_feature (1)..(203): Ceres Seq. ID no. 14316362
MLGAARGLARIHAEYNASKIPHGNVKSSNVLLDKNGVALISDFGLSLLLNPVHAIARLGGYRAPEQVEVKRLSQEADVYGFGVLLLEVLTGRAPSKEYTSPAREAEVDLPKWVKSVVKEEWTSEVFDQELLRYKNIEDELVAMLHVGLACVAAQAEKRPCMLEVVKMIEEIRVEESPLGDDYDEARSRTSLSPSLATTEDNLA

SEQ ID NO: 6709 - DNA, 1259 bp, Glycine max
  misc_feature (1)..(1259): Ceres Seq. ID no. 14316390
aaagaggtgtccgaatcgaacaggagcaagcaaagtcaaagaaaaagagagaggagagagagaaacaacaatcatcatcggccagaagcgaacacgacagacacatctgagaaaccaaacctgatagagatgtcgagtggaggaaaccttagttgcgtgttggtagctgtggatggcagcgaggaaagcatgaacgcgctgcgttgggcactgaacaacctcaagctccgatcccctgcacccgattccaccgatgctccttccttcaccgtcttccacgtccaatccccgccctccatcgccactggcctcaatcccggtgccatccccttcggtggccccagtgatctcgaagttcctgctttcactgcagccattgaagcgcaccaaaagcgcatcaccaacgccgtactcgatcacgccctcggaatttgctccgaattcaacctcaccagtaaggtcagaacccatgttcttgtaggagatccaaaggagaagatttgtgaagcagttcaggatttgaatgctgatgtgcttgtgatggggtctcgtgcttttggccccattaagaggatgttcctgggaagtgtaagcaactactgcgcccaccattctccatgccctgtcattattatcaaggaaaaggacattgtcaataagagaaactgatgcacttctactatgctaccatgattcttgtctcttgatcagtaggttctttaggtgggttgtcagtgccatatttcagttgctgacgctgcatccttgcttgccaaattaattatgtcgaaggctttttcgtcttgcaatttgcttgctttgttagaccagtgttgtacctcagctttgaagcttgtgtcttttgttgagccaatgctagccagaccctgcttcaagtacgtgttttcactttctgtggacaattctgctgtgtgtgtgaaattcttggagttaaagagtgctttataactgtgctgtcacaacgtcaattgttgtcccaaatggttcaaagagatatttgcctccaggtttgtattcgttctgaatttatacaatgttgtacagaaatgttgcattactattgctccttggtcagagccagttctagttgtgattgtgatatgcaacaaactggccatttgacatttgtcatgtacaaattttcaaattgagaatccagctagtgttggctgcagtgtgtcttactgttgcattattgacagtgtcctgcttaaataaatatttatatgatttatgac

SEQ ID NO: 6710 - protein, 222 aa, Glycine max
  misc_feature (1)..(222): Ceres Seq. ID no. 14316391
KEVSESNRSKQSQRKRERRERNNNHHRPEANTTDTSEKPNLIEMSSGGNLSCVLVAVDGSEESMNALRWALNNLKLRSPAPDSTDAPSFTVFHVQSPPSIATGLNPGAIPFGGPSDLEVPAFTAAIEAHQKRITNAVLDHALGICSEFNLTSKVRTHVLVGDPKEKICEAVQDLNADVLVMGSRAFGPIKRMFLGSVSNYCAHHSPCPVIIIKEKDIVNKRN

SEQ ID NO: 6711 - protein, 179 aa, Glycine max
  misc_feature (1)..(179): Ceres Seq. ID no. 14316392
MSSGGNLSCVLVAVDGSEESMNALRWALNNLKLRSPAPDSTDAPSFTVFHVQSPPSIATGLNPGAIPFGGPSDLEVPAFTAAIEAHQKRITNAVLDHALGICSEFNLTSKVRTHVLVGDPKEKICEAVQDLNADVLVMGSRAFGPIKRMFLGSVSNYCAHHSPCPVIIIKEKDIVNKRN

SEQ ID NO: 6712 - protein, 159 aa, Glycine max
  misc_feature (1)..(159): Ceres Seq. ID no. 14316393
MNALRWALNNLKLRSPAPDSTDAPSFTVFHVQSPPSIATGLNPGAIPFGGPSDLEVPAFTAAIEAHQKRITNAVLDHALGICSEFNLTSKVRTHVLVGDPKEKICEAVQDLNADVLVMGSRAFGPIKRMFLGSVSNYCAHHSPCPVIIIKEKDIVNKRN

SEQ ID NO: 6713 - DNA, 1220 bp, Glycine max
  misc_feature (1)..(1220): Ceres Seq. ID no. 14316412
agacgcgtcttttatcacattgaattcatccttctgtgttctgtttctttccttttcttcttgggcgaaaccctaatctccccccttcacccttcgtacaccgcgtcgcatctacttccatcttctctcagatccaatctccgattcttgcttcactatcacaagcaaacatgtctgcggctttggatatgaccctcgaagatataattaagaacaacaagaaatcttccctcgccaacaccaggggccgaggccgagcctcgggacccggacccgctcgccgcctccccaaccgtgccgccaatcgcgccgcaccgtatgccgctgccaaggcgccggagacagcttggaaacacgatatgtacgcgaaccagccagtggccgcggcgtatccaggtggtcgagcgtcttccatcgaaacagggactaagctctacatttccaatttggattatggcgtttccaatgatgatattaaggagttgtttcttgaagttggcgacgtgaaacggcatactgttcattatgacaggagtgggagatccaagggtacggcagaagtagtcttctcgcgccgagctgatgctgtagctgcagtgaagaggtacaacaatgttcagctggatgggaaaccaatgaaggtagagattgtggggacgaacatcgctacacatgctgcaccacccgctgtgaatggaacttttggaaacccaactggagttcctagaagtggacaagggagaagtgggtcattaggaaggccacgtggtgggagtagaggtcgtggcagcattcaacggggccggggacgtggaagaggaggtcgtgatgaaaaggtatctgctgaagatcttgatgctgatttggagaagtatcatgctgaggctatgcaattaaactgaaggaaacaacgatgttctgttttattgctattacatttgcggttgttagggccatgttgatggaacaccgccgaattatgtatctttatcacagtcgtgcttttcggaaaggaaaaggataacttagagtgaaaacttttacagttgatatatgtagtttgggattctgttatgaaatatttgttttcgttgggtatgactatgaaatgtggctgaagaaaccgaagtctgcttgtattatgcactccggcttcctttcattggatttaatcatttgtttattcaagtattcaacaagtgggtttggaagtgggaacc

SEQ ID NO: 6714 - protein, 243 aa, Glycine max
  misc_feature (1)..(243): Ceres Seq. ID no. 14316413
MSAALDMTLEDIIKNNKKSSLANTRGRGRASGPGPARRLPNRAANRAAPYAAAKAPETAWKHDMYANQPVAAAYPGGRASSIETGTKLYISNLDYGVSNDDIKELFLEVGDVKRHTVHYDRSGRSKGTAEVVFSRRADAVAAVKRYNNVQLDGKPMKVEIVGTNIATHAAPPAVNGTFGNPTGVPRSGQGRSGSLGRPRGGSRGRGSIQRGRGRGRGGRDEKVSAEDLDADLEKYHAEAMQLN

SEQ ID NO: 6715 - protein, 237 aa, Glycine max
  misc_feature (1)..(237): Ceres Seq. ID no. 14316414
MTLEDIIKNNKKSSLANTRGRGRASGPGPARRLPNRAANRAAPYAAAKAPETAWKHDMYANQPVAAAYPGGRASSIETGTKLYISNLDYGVSNDDIKELFLEVGDVKRHTVHYDRSGRSKGTAEVVFSRRADAVAAVKRYNNVQLDGKPMKVEIVGTNIATHAAPPAVNGTFGNPTGVPRSGQGRSGSLGRPRGGSRGRGSIQRGRGRGRGGRDEKVSAEDLDADLEKYHAEAMQLN

SEQ ID NO: 6716 - protein, 180 aa, Glycine max
  misc_feature (1)..(180): Ceres Seq. ID no. 14316415
MYANQPVAAAYPGGRASSIETGTKLYISNLDYGVSNDDIKELFLEVGDVKRHTVHYDRSGRSKGTAEVVFSRRADAVAAVKRYNNVQLDGKPMKVEIVGTNIATHAAPPAVNGTFGNPTGVPRSGQGRSGSLGRPRGGSRGRGSIQRGRGRGRGGRDEKVSAEDLDADLEKYHAEAMQLN

SEQ ID NO: 6717 - DNA, 1073 bp, Glycine max
  misc_feature (1)..(1073): Ceres Seq. ID no. 14316416
atcgcaaatttttctttttcttctcccctttagatgagtaacgccacagactccgccggcaaaatcccaccggagacgaggcccgccgagagcgacagtggtggtgatagtgggccccggcccacgatcaagatcaatgttatgcacggatcctctcaacacgagttccacctcccggcccaatcaacttttggggatgttaagaaactccttgttaataaaactggtttagagcctgtagagcaacgacttttcttcagagggatagaaaagggtgataacctacatttgcaccttgaaggtgtaaaggataagtcaaagcttttgcttttggagggcactgctagcaaagagaggaaacttgaggaaaccagaaaacaaaacgtaatgtctaaagcttttgaggctattgctggtgttagagctgaggtggacaagctctcaaatagggtgacttccatagaagtagctattaatggggggaacaaagcatccgagaaagagtttcttgtgctgacagagctgcttatgagtcaattgctgaaactggatggtattgaggctgaaggtgaagcaaagttgcagagaaaagctgaggtgaatcgtgtgcagaaccttgtggataaattagattctctaaaggcaaggaacgccaacccttttagcaacagtagcaatgctgtcaaagtaacaacccaatgggaaacctttgactctggaatggaaagcttggatgctccatccgataacccgtcttccacaaaagtaactcaagaatgggagcggtttgattagctcggaaaccgtttttggaacatctaagttataaatgttgtacaacatcatattactggcccttcatcatattagaggtcttggcacaacgatgttgccttgtgatatggtaggctgaaattttaattgcagaaatgttctctccgctgaggtaaagttgcatatgtttgatctatctcgtgcacttatttttaggcaaaatatgtaaaccaaattgtattcttgttacttgaatatattattgcatcttccgatcatttggtttgtcttctgtttgc

SEQ ID NO: 6718 - protein, 253 aa, Glycine max
  misc_feature (1)..(253): Ceres Seq. ID no. 14316417
MSNATDSAGKIPPETRPAESDSGGDSGPRPTIKINVMHGSSQHEFHLPAQSTFGDVKKLLVNKTGLEPVEQRLFFRGIEKGDNLHLHLEGVKDKSKLLLLEGTASKERKLEETRKQNVMSKAFEAIAGVRAEVDKLSNRVTSIEVAINGGNKASEKEFLVLTELLMSQLLKLDGIEAEGEAKLQRKAEVNRVQNLVDKLDSLKARNANPFSNSSNAVKVTTQWETFDSGMESLDAPSDNPSSTKVTQEWERFD

SEQ ID NO: 6719 - protein, 217 aa, Glycine max
  misc_feature (1)..(217): Ceres Seq. ID no. 14316418
MHGSSQHEFHLPAQSTFGDVKKLLVNKTGLEPVEQRLFFRGIEKGDNLHLHLEGVKDKSKLLLLEGTASKERKLEETRKQNVMSKAFEAIAGVRAEVDKLSNRVTSIEVAINGGNKASEKEFLVLTELLMSQLLKLDGIEAEGEAKLQRKAEVNRVQNLVDKLDSLKARNANPFSNSSNAVKVTTQWETFDSGMESLDAPSDNPSSTKVTQEWERFD

SEQ ID NO: 6720 - protein, 135 aa, Glycine max
  misc_feature (1)..(135): Ceres Seq. ID no. 14316419
MSKAFEAIAGVRAEVDKLSNRVTSIEVAINGGNKASEKEFLVLTELLMSQLLKLDGIEAEGEAKLQRKAEVNRVQNLVDKLDSLKARNANPFSNSSNAVKVTTQWETFDSGMESLDAPSDNPSSTKVTQEWERFD

SEQ ID NO: 6721 - DNA, 765 bp, Glycine max
  misc_feature (1)..(765): Ceres Seq. ID no. 14316428
acaatctctcatcccttgtttgtttccatttcttgcttctattatttacttgtttttctctagtattcatggtgctcgctggtaaacttagtactgaacttggggtgaaagcatccgctaccaaatggttcaacctcttaaccacgcaacttcaccatgttcagaacctttgtgaaagagtgcatgaaaccaagctgcatgatggtgatgactggcacggtgttggtaattcggttaaacactggacttatgtcatagacggcaaggtacacacatgtcaggagagtattgaagccattgatgaagagaacaaaacaatcaaattcatgctcttcggtggagatattagtcagcactacaagagctttaagctgatctttgaagtgactgataagaacgatggcggtgctgctgttaaatggactcttgaatatgagaagatcaaagagaatattgatcctccacatggctacatggactactttgacaaatccactaaagagatggatgcttatcttgtcaaggcatagctcctaaaattatcaagaaaataacaacaaaggagtaatggatttggctttgaggatatatatatatatatatatatatatatatatatatatatatatatatatatataagtgttttatctatatagttattgtgatgtttgaaatgtagaataaaattataatatgcgtgtttgcttctgtccatccttcgtttctgtcgaataaatgcaggttggtggattgaagtatatgt

SEQ ID NO: 6722 - protein, 175 aa, Glycine max
  misc_feature (1)..(175): Ceres Seq. ID no. 14316429
NLSSLVCFHFLLLLFTCFSLVFMVLAGKLSTELGVKASATKWFNLLTTQLHHVQNLCERVHETKLHDGDDWHGVGNSVKHWTYVIDGKVHTCQESIEAIDEENKTIKFMLFGGDISQHYKSFKLIFEVTDKNDGGAAVKWTLEYEKIKENIDPPHGYMDYFDKSTKEMDAYLVKA

SEQ ID NO: 6723 - protein, 153 aa, Glycine max
  misc_feature (1)..(153): Ceres Seq. ID no. 14316430
MVLAGKLSTELGVKASATKWFNLLTTQLHHVQNLCERVHETKLHDGDDWHGVGNSVKHWTYVIDGKVHTCQESIEAIDEENKTIKFMLFGGDISQHYKSFKLIFEVTDKNDGGAAVKWTLEYEKIKENIDPPHGYMDYFDKSTKEMDAYLVKA

SEQ ID NO: 6724 - DNA, 1312 bp, Glycine max
  misc_feature (1)..(1312): Ceres Seq. ID no. 14316436
acttcatttcactcacccctttaactgccatccattctttctctcttgaggggcaggggtaccacctcaaagaatatcctctttgatccctttctctatttccttttctttattattattatataataacaccctctaaatacttcctttacccctctttctctctctcatcttaaacacaaacaaatatactactacttcaaactttgatatgcaactggcggcagaactccaacgcacccatcaccgccaccaaaggcaaaggcaacaacaggacaccacccccatgtgccgccaaatccagctcactatctccgatcacaccgtcgccggagacgccgtcgctgacgacggcgaggatctcttcattccgcccctcaacttcgccatggttgataatggcattttccgctccggcttccccgaacccgccaacttctccttcctccaaaccctcggccttcgttccatcatatatctgtgtcctgagccgtatccggaggccaacatggagttcctcaagtcaaatgggatcaagctttttcagtttgggattgagggccataaggagccttttgtgaacatcccagaggacacaatccgtgaagcactagaagttgttcttgatgtcaggaaccacccagttataattcactgtaagcggggaaagcaccgaacaggttgcttggtaggatgctatagaaaattgcaaaaatggtgcttgtcatccgtctttgatgaataccaacgctttgcagccgccaaagcaagagtttcagatcagaggttcgtagagttgtttgatatttccagcatgaaacatttgcccatacccttttcatgtttgaagaggtaacatataccaagctatgctgagttgggtttactttctttagtttgtgaaagtgaagccaaggttcttcctttgaataaataggaaaaggtgatgaactccttcaatgcattgcagcggcaaaggaataattcttctcccattttcaaaataagacaagaaaattctaggaatagtagagcattacctgtatttgtatgtgttaaaattctgccctatatttcccttctctccctacaattggcccttagtgtacctcaccaccttttgtcctattttctttctctttatttttatgtttttctttgctgctccccattcatcaacaatgagtgtagatatatcttgattttttctcgaggctcagagaaattcaagaaggctacaaaaatgacttgtttgtctacccaaaatcttggtgggtagtaaagcagaggaacttataaaattttatttgct

SEQ ID NO: 6725 - protein, 214 aa, Glycine max
  misc_feature (1)..(214): Ceres Seq. ID no. 14316437
MQLAAELQRTHHRHQRQRQQQDTTPMCRQIQLTISDHTVAGDAVADDGEDLFIPPLNFAMVDNGIFRSGFPEPANFSFLQTLGLRSIIYLCPEPYPEANMEFLKSNGIKLFQFGIEGHKEPFVNIPEDTIREALEVVLDVRNHPVIIHCKRGKHRTGCLVGCYRKLQKWCLSSVFDEYQRFAAAKARVSDQRFVELFDISSMKHLPIPFSCLKR

SEQ ID NO: 6726 - protein, 189 aa, Glycine max
  misc_feature (1)..(189): Ceres Seq. ID no. 14316438
MCRQIQLTISDHTVAGDAVADDGEDLFIPPLNFAMVDNGIFRSGFPEPANFSFLQTLGLRSIIYLCPEPYPEANMEFLKSNGIKLFQFGIEGHKEPFVNIPEDTIREALEVVLDVRNHPVIIHCKRGKHRTGCLVGCYRKLQKWCLSSVFDEYQRFAAAKARVSDQRFVELFDISSMKHLPIPFSCLKR

SEQ ID NO: 6727 - protein, 155 aa, Glycine max
  misc_feature (1)..(155): Ceres Seq. ID no. 14316439
MVDNGIFRSGFPEPANFSFLQTLGLRSIIYLCPEPYPEANMEFLKSNGIKLFQFGIEGHKEPFVNIPEDTIREALEVVLDVRNHPVIIHCKRGKHRTGCLVGCYRKLQKWCLSSVFDEYQRFAAAKARVSDQRFVELFDISSMKHLPIPFSCLKR

SEQ ID NO: 6728 - DNA, 1292 bp, Glycine max
  misc_feature (1)..(1292): Ceres Seq. ID no. 14316440
acatactcatcaggacagattcaagggagatggatgatgaaattgaaaggttcatcaaagtatggatttcagcaatcttatgtctatgttattgttattacatagcttcaagaataccaaagggcttcttgagacttctctccctccttccaattctctacctcttcatcacccttcccttgaaactctcttcacccaccttagttggatacacttccttcttcatttcttggcttggcactttcaagctcttccttttctccttcaaccaaggccctcttgccctatcacccccaaacattgttcaattcatctccattgcttcccttcccatcacccccaaacaaaacccatcaaccaatgaaaaaaacaccaccaacaaacccaaatggcttttgttcctaaaagttcttatttttgtaatgatcttaggtgtttataactacaaagaaaccttgcatcctgatttcttgttagtcatttattgctgccacgtgtaccttgccttagagcttatgttagtccttgttggagccactgttcaaaccctttttggttttgagatagaacctcaattcaacgaaccctacctttgtacatctcttcaagacttttggggtcgtagatggaacctcacggttactcatattctacggcccaccgtatacgaccctatacgccgtatgtctacgagttttgtcggccccttgtgtgccacgtcagctgccatgttggccacgttccttgtgtccgggcttgtgcacgagttattatattattaccttacacgtgtgcctcccacgtgggaggttacgtgtttttttgtgcttcacggtgtgtgtatggtagtggaggtggctgtgaagaaggtggctctccgtcgtgggtggcagctgcaccgtgctgtgtcggggccgctcgtggtggcgcttttggcggtcaccgcgaattggctgttttttcctcaactgttgaggaatggtttggataggaagtccattgaggagtatgctattttggtggattttgttaagtcaaagttaccatttaagaatgtttaacttgctagggcgaacattgttaaaggatatgattgtgagccaaaagtaatgttcactctaaggactaaggatacttaaacattacgtatgtttaacgtgttagggtgcaaaggggctcattttttacttataaaaaataatataactattaaataagacatgttaattttggaaaacaatgagtgtgatcacccaataataaacatctgaagatgtgcaattcaaaagtct

SEQ ID NO: 6729 - protein, 352 aa, Glycine max
  misc_feature (1)..(352): Ceres Seq. ID no. 14316441
ILIRTDSREMDDEIERFIKVWISAILCLCYCYYIASRIPKGFLRLLSLLPILYLFITLPLKLSSPTLVGYTSFFISWLGTFKLFLFSFNQGPLALSPPNIVQFISIASLPITPKQNPSTNEKNTTNKPKWLLFLKVLIFVMILGVYNYKETLHPDFLLVIYCCHVYLALELMLVLVGATVQTLFGFEIEPQFNEPYLCTSLQDFWGRRWNLTVTHILRPTVYDPIRRMSTSFVGPLCATSAAMLATFLVSGLVHELLYYYLTRVPPTWEVTCFFVLHGVCMVVEVAVKKVALRRGWQLHRAVSGPLVVALLAVTANWLFFPQLLRNGLDRKSIEEYAILVDFVKSKLPFKNV

SEQ ID NO: 6730 - protein, 343 aa, Glycine max
  misc_feature (1)..(343): Ceres Seq. ID no. 14316442
MDDEIERFIKVWISAILCLCYCYYIASRIPKGFLRLLSLLPILYLFITLPLKLSSPTLVGYTSFFISWLGTFKLFLFSFNQGPLALSPPNIVQFISIASLPITPKQNPSTNEKNTTNKPKWLLFLKVLIFVMILGVYNYKETLHPDFLLVIYCCHVYLALELMLVLVGATVQTLFGFEIEPQFNEPYLCTSLQDFWGRRWNLTVTHILRPTVYDPIRRMSTSFVGPLCATSAAMLATFLVSGLVHELLYYYLTRVPPTWEVTCFFVLHGVCMVVEVAVKKVALRRGWQLHRAVSGPLVVALLAVTANWLFFPQLLRNGLDRKSIEEYAILVDFVKSKLPFKNV

SEQ ID NO: 6731 - protein, 212 aa, Glycine max
  misc_feature (1)..(212): Ceres Seq. ID no. 14316443
MILGVYNYKETLHPDFLLVIYCCHVYLALELMLVLVGATVQTLFGFEIEPQFNEPYLCTSLQDFWGRRWNLTVTHILRPTVYDPIRRMSTSFVGPLCATSAAMLATFLVSGLVHELLYYYLTRVPPTWEVTCFFVLHGVCMVVEVAVKKVALRRGWQLHRAVSGPLVVALLAVTANWLFFPQLLRNGLDRKSIEEYAILVDFVKSKLPFKNV

SEQ ID NO: 6732 - DNA, 1168 bp, Glycine max
  misc_feature (1)..(1168): Ceres Seq. ID no. 14316451
aactatcccttcttcctttctctcttctattctcattcgcatttcgcaccaagtcaatggcttccaccaccactctctccttccacttcccatatccaacaacatcgctctcttctcactctcaactttcgccctctccgcaaccttccccattcaaaccctgcaccgttgcttcccgccaaaacctctgcacctccaacaccctctctgtctctgcttccagaaaaaactcaacctctccaatttttctcgctacggcttctggcaaatctgagcctatgctccctcctttcaacgttttgattactggctcaaccaaaggaatagggtatgcgttggcgaaagagtttttaaaagctggtgacaacgtcctgatttgctcaagatcagatgaaagggtaaagactgctgtccagaacttgagagtagaatttggggagcagcatgtgtggggaactaaatgtgatgtaaaaaatgcagaggatgtgaagaatttagtttcatttgctcaagaaaaaatgaaatacattgatatatggataaacaatgctggatcaaatgcatatagctataagccacttgttgaggcttcagatgaagatcttattgaggtggttacaacaaatacacttggcttgatgatatgttgtcgagaggcaatcaagatgatggtgaaccaacctcgtggaggtcatattttcaatatagacggggcaggttcagatggaagaccaactcctaggtttgctgcatatggagcaacaaagagaagtgtggtgcatttaacaaagtcattacaggcagaattgcggatgcaagatgttaaaaacgttgtggtgcataatctttcgccaggaatggttacaacggatcttctcatgtctggtgttaatacaaagcaggcaaagtttttcattaatgtcttggcagaaccagctgaagtggttgcagaatacttagttccaaacattagatctgtccctgcaaatggatcaatgaaaccaacatacattcgattcctcacgggtttgaaagcctattcccagatattttcaagattggcattcggcgcaagaaggaatcgatacattcttgaagattgaactgcataaatatttgtgctatgtgcaacttttatttcttgttttaaatatctattcatcccccc

SEQ ID NO: 6733 - protein, 366 aa, Glycine max
  misc_feature (1)..(366): Ceres Seq. ID no. 14316452
LSLLPFSLLFSFAFRTKSMASTTTLSFHFPYPTTSLSSHSQLSPSPQPSPFKPCTVASRQNLCTSNTLSVSASRKNSTSPIFLATASGKSEPMLPPFNVLITGSTKGIGYALAKEFLKAGDNVLICSRSDERVKTAVQNLRVEFGEQHVWGTKCDVKNAEDVKNLVSFAQEKMKYIDIWINNAGSNAYSYKPLVEASDEDLIEVVTTNTLGLMICCREAIKMMVNQPRGGHIFNIDGAGSDGRPTPRFAAYGATKRSVVHLTKSLQAELRMQDVKNVVVHNLSPGMVTTDLLMSGVNTKQAKFFINVLAEPAEVVAEYLVPNIRSVPANGSMKPTYIRFLTGLKAYSQIFSRLAFGARRNRYILED

SEQ ID NO: 6734 - protein, 348 aa, Glycine max
  misc_feature (1)..(348): Ceres Seq. ID no. 14316453
MASTTTLSFHFPYPTTSLSSHSQLSPSPQPSPFKPCTVASRQNLCTSNTLSVSASRKNSTSPIFLATASGKSEPMLPPFNVLITGSTKGIGYALAKEFLKAGDNVLICSRSDERVKTAVQNLRVEFGEQHVWGTKCDVKNAEDVKNLVSFAQEKMKYIDIWINNAGSNAYSYKPLVEASDEDLIEVVTTNTLGLMICCREAIKMMVNQPRGGHIFNIDGAGSDGRPTPRFAAYGATKRSVVHLTKSLQAELRMQDVKNVVVHNLSPGMVTTDLLMSGVNTKQAKFFINVLAEPAEVVAEYLVPNIRSVPANGSMKPTYIRFLTGLKAYSQIFSRLAFGARRNRYILED

SEQ ID NO: 6735 - protein, 274 aa, Glycine max
  misc_feature (1)..(274): Ceres Seq. ID no. 14316454
MLPPFNVLITGSTKGIGYALAKEFLKAGDNVLICSRSDERVKTAVQNLRVEFGEQHVWGTKCDVKNAEDVKNLVSFAQEKMKYIDIWINNAGSNAYSYKPLVEASDEDLIEVVTTNTLGLMICCREAIKMMVNQPRGGHIFNIDGAGSDGRPTPRFAAYGATKRSVVHLTKSLQAELRMQDVKNVVVHNLSPGMVTTDLLMSGVNTKQAKFFINVLAEPAEVVAEYLVPNIRSVPANGSMKPTYIRFLTGLKAYSQIFSRLAFGARRNRYILED

SEQ ID NO: 6736 - DNA, 1112 bp, Glycine max
  misc_feature (1)..(1112): Ceres Seq. ID no. 14316455
aacaacaccgataggaggaattggagaagaaacaggaacagaaaggtttgggaaggaagcagaaatcgggggtggtgtgagagacaagcatggcgacgtgtcttcgccttgggagatttacgactattgattcgctctctctcttcgtttccaccgctagattctccttttcttcatcatcttcgtcgtcgtcctcgtcgtcatcttccggtaagtccaagacggggaagaagctgatggatcgtctttccaccgttatcgacgccgtcaatgatcgcaaactacctcctgagctacgtggccagcgcagcaatgtcaggtcagaaactgacattatcaacgttgttgagcaaagaatatggcataccatggaagaagggaagtttgagaatttgccaggcaaaggcaagccgcttaagctcgacacaaatcctcatgcagatccagctgaagacaccctgtaccgtatcctgtcaaaaaacggatatgcaccggagtgggttgaacttaacaaagagattagatctaaaatatctgaatggaggaagtccttgaagaaagcttgggctactaagtgcagtggagatcactctgagtgggttgaaagttcagaggctttgaaatctcagttacgagaaatcaatgataaggttttccgttataaccttattgtgccttttggtcggcaaatgtttggccttaagtgggagaaagagctaggttacttagaagaaaaatgagaatcattgttgttaaatttgagccagttggttcactatagtagaagattaaaatttgttattttcctgagaaaagtcatgccaggcgactaatcaactaggaactagcttaagttattcagttcaactattgttgattacttttaatttcttagcattatgttactggttatgattcctctttcaggcttattagtatggctatatttatatggttcataacctccgatcatgtacatcccaaggatacaatacaagtaaagatagtgaaaatgtatgtgactcaacaatattagttgtcctgacgattgtattatcagtttttgctttgagacaaattgtagacttcagttttctctttcagtaaaaaat

SEQ ID NO: 6737 - protein, 216 aa, Glycine max
  misc_feature (1)..(216): Ceres Seq. ID no. 14316456
MATCLRLGRFTTIDSLSLFVSTARFSFSSSSSSSSSSSSSGKSKTGKKLMDRLSTVIDAVNDRKLPPELRGQRSNVRSETDIINVVEQRIWHTMEEGKFENLPGKGKPLKLDTNPHADPAEDTLYRILSKNGYAPEWVELNKEIRSKISEWRKSLKKAWATKCSGDHSEWVESSEALKSQLREINDKVFRYNLIVPFGRQMFGLKWEKELGYLEEK

SEQ ID NO: 6738 - protein, 167 aa, Glycine max
  misc_feature (1)..(167): Ceres Seq. ID no. 14316457
MDRLSTVIDAVNDRKLPPELRGQRSNVRSETDIINVVEQRIWHTMEEGKFENLPGKGKPLKLDTNPHADPAEDTLYRILSKNGYAPEWVELNKEIRSKISEWRKSLKKAWATKCSGDHSEWVESSEALKSQLREINDKVFRYNLIVPFGRQMFGLKWEKELGYLEEK

SEQ ID NO: 6739 - protein, 123 aa, Glycine max
  misc_feature (1)..(123): Ceres Seq. ID no. 14316458
MEEGKFENLPGKGKPLKLDTNPHADPAEDTLYRILSKNGYAPEWVELNKEIRSKISEWRKSLKKAWATKCSGDHSEWVESSEALKSQLREINDKVFRYNLIVPFGRQMFGLKWEKELGYLEEK

SEQ ID NO: 6740 - DNA, 1107 bp, Glycine max
  misc_feature (1)..(1107): Ceres Seq. ID no. 14316459
atctctcataattgaaactaagctacctaccattctttcccattcctgagtttccattgccgcgacatctgaattcctccttgtcactcataatcaccaaatagaagccataaacaaatgaatgccatagcagcagaacaagtgctggagccatggcacaagctagacgacaaagtcgttttggtgacgggtgcttcctcggggctcgggcgagatttctgcatcgacctcgccaaagctggctgctgtgtcgtcgcggcagctcgtcgcctcgatcgcctcacttccctctgccacgaaatcaaccaccgatggccctcgaacgtcggaatccaccgcgcggtggcggtggagcttgatgtcgccgccgatggccccgccatcgacagggctgtgcagaaggcctgggacgcctttggccgcgttgattccttgattaacaacgctggtgtcagaggaagtgttaaatcacccttgaaattgtctgaagaggaatgggatcatgtcttcaagactaacctaactggttgttggttggtgtcaaaatatgtatgcaaacgcatgtgtgatatccagcttaagggatcaattattaatatttcttcagtttctggtttaaatcgggggcaattgcctggagctgctgcatatgcatcttcgaaggcaggggtaaacatgctgactaaggtcatggctatggaattggggatgcacaaaattagagtaaattccatatcccctggaattttcaaatctgaaataactgaaaatttattacaaaaagattggctgaatgatgtggtcaggaaaataatgcctttgagaagattaggtacttcagatccagcattaacatctctagctcgttatcttattcatgattcttctgagtacgtcacgggcaacaattttattgtcgattatggaggcaccttaccaggtgtaccaatttattcttctctgtaaattttggtacattatgcactaacgaaaagtaatactatgaattattccattacatatcttcaaattagacaatatggagttctgaagtctatgtatatggagaattattgtgaagtggctaccaccttgatcttaccatgt

SEQ ID NO: 6741 - protein, 282 aa, Glycine max
  misc_feature (1)..(282): Ceres Seq. ID no. 14316460
MNAIAAEQVLEPWHKLDDKVVLVTGASSGLGRDFCIDLAKAGCCVVAAARRLDRLTSLCHEINHRWPSNVGIHRAVAVELDVAADGPAIDRAVQKAWDAFGRVDSLINNAGVRGSVKSPLKLSEEEWDHVFKTNLTGCWLVSKYVCKRMCDIQLKGSIINISSVSGLNRGQLPGAAAYASSKAGVNMLTKVMAMELGMHKIRVNSISPGIFKSEITENLLQKDWLNDVVRKIMPLRRLGTSDPALTSLARYLIHDSSEYVTGNNFIVDYGGTLPGVPIYSSL

SEQ ID NO: 6742 - DNA, 1228 bp, Glycine max
  misc_feature (1)..(1228): Ceres Seq. ID no. 14316469
aaaaaaaaaaaagcgtaataagaaataacgagagaaaaattctggggtttagaggagaaaaggggagaaagggtgggtattgcttcacacaaacacaacagtgtctgctgcaccttgcaatggtttcgctatcaacatggtttcgctacattgcccacaagctcgaatactccttctccctcagctggaagaactacaaaggaggtcaaattacagacagagaggtacgtgatgttgtttggaaaaacttctttcaaggaaagctgacgtacttgcactggaataaaggagaggagatggcccctactattgatggaaaagcagtaactcttgttcggaaattaccagttgtagacccaacgcgtgtttttgtaggagatgttgtggttgtgaaggaccctgagaagccagataactacctactcagaagattaactgcagttgaaggctatgaaatggtttctactgatgaaaaggatgaagcctttgttctcgagaaggatcaatgctgggtagtggctgaaaatgaaaaattgaaagccaaggaagcgaaggatagccgaacatttggtccagttcagatgacagacattgtaggcagagtcatatattgcctgcgaagtgctgtagaccatggccgggtacaaaacagttatttcggcatgcgaaaggatacaccagtgctggaagtggaacttgatgttgatgagatggcaaagagtcacaaagcctgaaacatttgtcccgagaaacactaactagtttgctttacgcatgccttagtttcttcttgtggattttccttgaagcacagattgaataataaaaaatatgatttttaaattgttgcaatgggatgatggtgttatgtggatgtcctctgcatgctaggcaattggctagctcttcccaagcagaaattggaagcggtctgtgttaaagcttgagttcgacattattgtatgctaagttctagcaaggactcctctgccctttgttctattcatatttggctgtaaaattgaccgagttttggtcatttttgttaatagtcgaggatgatagaaaaaaaggctgcattgttagaaataatagtttcagatattttcattttatgaagacctagtgcctcgactgagtgttcacttcttgccaatttgtctttctagggaacaatcgttgatatctgttctctttagtcagttgagtgaaaaagaacgtttaagtg

SEQ ID NO: 6743 - protein, 243 aa, Glycine max
  misc_feature (1)..(243): Ceres Seq. ID no. 14316470
KKKSVIRNNERKILGFRGEKGRKGGYCFTQTQQCLLHLAMVSLSTWFRYIAHKLEYSFSLSWKNYKGGQITDREVRDVVWKNFFQGKLTYLHWNKGEEMAPTIDGKAVTLVRKLPVVDPTRVFVGDVVVVKDPEKPDNYLLRRLTAVEGYEMVSTDEKDEAFVLEKDQCWVVAENEKLKAKEAKDSRTFGPVQMTDIVGRVIYCLRSAVDHGRVQNSYFGMRKDTPVLEVELDVDEMAKSHKA

SEQ ID NO: 6744 - protein, 204 aa, Glycine max
  misc_feature (1)..(204): Ceres Seq. ID no. 14316471
MVSLSTWFRYIAHKLEYSFSLSWKNYKGGQITDREVRDVVWKNFFQGKLTYLHWNKGEEMAPTIDGKAVTLVRKLPVVDPTRVFVGDVVVVKDPEKPDNYLLRRLTAVEGYEMVSTDEKDEAFVLEKDQCWVVAENEKLKAKEAKDSRTFGPVQMTDIVGRVIYCLRSAVDHGRVQNSYFGMRKDTPVLEVELDVDEMAKSHKA

SEQ ID NO: 6745 - protein, 145 aa, Glycine max
  misc_feature (1)..(145): Ceres Seq. ID no. 14316472
MAPTIDGKAVTLVRKLPVVDPTRVFVGDVVVVKDPEKPDNYLLRRLTAVEGYEMVSTDEKDEAFVLEKDQCWVVAENEKLKAKEAKDSRTFGPVQMTDIVGRVIYCLRSAVDHGRVQNSYFGMRKDTPVLEVELDVDEMAKSHKA

SEQ ID NO: 6746 - DNA, 1224 bp, Glycine max
  misc_feature (1)..(1224): Ceres Seq. ID no. 14316497
aaaagtgagaagctttcgcttgttttggtgttccagttccacttagagccatgacagacatctccaagtcccttctctttacctttaccatcatcatcagctttggcttgtgcattctttatgcatctgcagaactccagagatttgcacactcttccaaacatgatggtgctcttagcttcttggtgcttggtgactagggaagaagaggtgcttacaaccaatcactagttgctttccagatgggaaaggttggagagaagcttgatatcgactttgtagtttccactggagacaacttctatgacaatggactgactagtgaccatgacaacgcgtttcaagaatcattcactaaaatttacacagcaaaaagcttgcaaaatcagtggtacagcgtgttaggcaaccacgactataggggtgatgcagaggcccaattgagcccggtccttagagaaattgatagcagatggctttgcttaaggtcctttattgtagattcagagctggttgagattttctttgtagacaccactccttttgttgacgagtacttcactgaaccaccggaacacaagtatgattggcggggcattggcccacaaaaatcttatatttctaacttactcaaggacctagaattggcactgaggggatcaacagcaaaatggaggattgttgttggtcaccatgccattagaagtgttgggcatcatggtgatactcaagaactcataaatcggcctctccctatccttcaggcaaataacgttcacttttacatgaacgggcatgatcattgtcttgagcacattagtgacacggagagccccattcagttcctgactagcggggcagggtcaaaggcttggagaggagacattgaaggaatgaaccgaagaggcgtaaatttcttctatgatggacaaggcttcgtgtcagtgaaattgactcagacggatgccaccattgagttctatgatgtttttggcaacgttttgcacagattgacttcttcaaaacagctacattcttccatgtaaagtttagagctagatactagacattgagattaaatagaccaatccaaattggttgatgaaatttcaaactaatccttgatgtcatgcttgagtatgtacgagaaatgaaaatatgaatgaaggattcttcactgtgattcattcaccgcagtgatgaattgctgtttaaaaagaaaac

SEQ ID NO: 6747 - protein, 267 aa, Glycine max
  misc_feature (1)..(267): Ceres Seq. ID no. 14316498
MGKVGEKLDIDFVVSTGDNFYDNGLTSDHDNAFQESFTKIYTAKSLQNQWYSVLGNHDYRGDAEAQLSPVLREIDSRWLCLRSFIVDSELVEIFFVDTTPFVDEYFTEPPEHKYDWRGIGPQKSYISNLLKDLELALRGSTAKWRIVVGHHAIRSVGHHGDTQELINRPLPILQANNVHFYMNGHDHCLEHISDTESPIQFLTSGAGSKAWRGDIEGMNRRGVNFFYDGQGFVSVKLTQTDATIEFYDVFGNVLHRLTSSKQLHSSM

SEQ ID NO: 6748 - DNA, 1339 bp, Glycine max
  misc_feature (1)..(1339): Ceres Seq. ID no. 14316499
gaatccttcatatcactgccggcgcgcaagagaggaccatccttgttctgccctctacctcgttcatacaaacatttcgcacacgcagctctatctctccacaacacatccaccatgggtctcatcaagggcggcttcttgcgcctgttccaaacactgctatacgcgctctgcttctgctgcgccggcattgccctcggcatctactcatacttcctcgcggtccaagccgatcgcgaccagggcatccccagatggcaaaaggctgttgagggtatctccggcgtggctgttctgtacaccatcgctgccgtggtcctcacttgctgccttggtggtatcagcttcttcgccttcaccgcgattgtccttgacatcctcttcgtcggcggcttcattgccatcgctgttctgacccgccacggtgcttcctcttgcactggcatcgtcaacacccctctcggtatcggcaatgccaacgccaactctgagggcttcggcaacaacggtctcggcactggaaacggcgagaacctcacctacgctgtttctcctcgcaacgcttgccgcatgaacacagccgtcttcgccgtgtctattgttgccgctttcctgttcctcatcaccgctctcttccaagtcttccttgtccgcaagcacaagaaggagaagcgtttcggccctggcccgtccaacaactacaccagcggccctgccaagcgcaacttctggcagcgcaagaagaagaccaacgacagggatcttgagaaggatgtcatcactcccgcaccagctggcaccctcaccactggccatgccaccgacatccgtccctcgcacgacacggcctacactggaagcactgtcgctgcccccggcgacaggtacgacaaggtcgacggcgccaacggctacgctacccagcagcacaccggccacgcggctcacggttcccacggcgcctactacggagctcctcagggaaccgccaacccgtacaccatggacactaatggcgatcacactctgcttcgcgagaacaaccctgtctaccgcggcgttgcttagatcaatgattgtcccatcggcaacacgatcaacaactagacttcgagtctactgacagctagtctttcgggactgatcagctgccttttctttctgtttgctccatgacgcgatttaatgaacaagataccactataatgccacctgtaacataggacttctgaaaagaaggtgatacgaagttgggattggatggtggcgaggagcgatgtttactctaatatatgtaattgcaagaatgacagcggcacctagccgtttaataactaag

SEQ ID NO: 6749 - protein, 355 aa, Glycine max
  misc_feature (1)..(355): Ceres Seq. ID no. 14316500
ESFISLPARKRGPSLFCPLPRSYKHFAHAALSLHNTSTMGLIKGGFLRLFQTLLYALCFCCAGIALGIYSYFLAVQADRDQGIPRWQKAVEGISGVAVLYTIAAVVLTCCLGGISFFAFTAIVLDILFVGGFIAIAVLTRHGASSCTGIVNTPLGIGNANANSEGFGNNGLGTGNGENLTYAVSPRNACRMNTAVFAVSIVAAFLFLITALFQVFLVRKHKKEKRFGPGPSNNYTSGPAKRNFWQRKKKTNDRDLEKDVITPAPAGTLTTGHATDIRPSHDTAYTGSTVAAPGDRYDKVDGANGYATQQHTGHAAHGSHGAYYGAPQGTANPYTMDTNGDHTLLRENNPVYRGVA

SEQ ID NO: 6750 - protein, 317 aa, Glycine max
  misc_feature (1)..(317): Ceres Seq. ID no. 14316501
MGLIKGGFLRLFQTLLYALCFCCAGIALGIYSYFLAVQADRDQGIPRWQKAVEGISGVAVLYTIAAVVLTCCLGGISFFAFTAIVLDILFVGGFIAIAVLTRHGASSCTGIVNTPLGIGNANANSEGFGNNGLGTGNGENLTYAVSPRNACRMNTAVFAVSIVAAFLFLITALFQVFLVRKHKKEKRFGPGPSNNYTSGPAKRNFWQRKKKTNDRDLEKDVITPAPAGTLTTGHATDIRPSHDTAYTGSTVAAPGDRYDKVDGANGYATQQHTGHAAHGSHGAYYGAPQGTANPYTMDTNGDHTLLRENNPVYRGVA

SEQ ID NO: 6751 - DNA, 518 bp, Glycine max
  misc_feature (1)..(518): Ceres Seq. ID no. 14316511
gaaacaggagttatatttggtaacatagtctatgagacatcttctaatgttcttgagagaacagttattgttctaaatgatatccatattgacatcatggactacatttctcctgcatcttgtgccgatgtggcattcagaactatgtgggctgagtttgaggggcaccgcagattcttaggtcaccgcaagacaatcaacccagacaggaaaggacttgttggaattttttatatgctggaaactggagagctagaagaaggaagggaactatcaaatatggtgcagcggatgcacaagaacaggcaaggagctccaaggaaaaggcacggttctctaccgggaattaaaggccgagcacgatttaggactgaagagcccttttatgaaaatccatatcctgagtgtatatgtggttctaaaagcaaacttgatataacatgacgacaaaccaacctgcagttccaatctagaattttcttgaaggaccggttaatctgtaaatttttggttttgat

SEQ ID NO: 6752 - protein, 147 aa, Glycine max
  misc_feature (1)..(147): Ceres Seq. ID no. 14316512
ETGVIFGNIVYETSSNVLERTVIVLNDIHIDIMDYISPASCADVAFRTMWAEFEGHRRFLGHRKTINPDRKGLVGIFYMLETGELEEGRELSNMVQRMHKNRQGAPRKRHGSLPGIKGRARFRTEEPFYENPYPECICGSKSKLDIT

SEQ ID NO: 6753 - protein, 115 aa, Glycine max
  misc_feature (1)..(115): Ceres Seq. ID no. 14316513
MDYISPASCADVAFRTMWAEFEGHRRFLGHRKTINPDRKGLVGIFYMLETGELEEGRELSNMVQRMHKNRQGAPRKRHGSLPGIKGRARFRTEEPFYENPYPECICGSKSKLDIT

SEQ ID NO: 6754 - protein, 99 aa, Glycine max
  misc_feature (1)..(99): Ceres Seq. ID no. 14316514
MWAEFEGHRRFLGHRKTINPDRKGLVGIFYMLETGELEEGRELSNMVQRMHKNRQGAPRKRHGSLPGIKGRARFRTEEPFYENPYPECICGSKSKLDIT

SEQ ID NO: 6755 - DNA, 672 bp, Glycine max
  misc_feature (1)..(672): Ceres Seq. ID no. 14316515
attccaacttatcatactatcacattattatcaaccttataatcttcctcttagcaccaaccatgactacccagtttctcattctctcccttctcatctcatgccacgtcctcactgcaaccctagccgaagaaaccggctttgtaggttcactagaccgcaaggcattaggtctagataaaaaagacaaggtcagtcatttccggttctacttccacgagaggttcaccggaagcaacgccacctcggtcaccgtcgttcctccgctgccccagtacaactccaccaccaacttcgggttggtggggatcaccgacaacgccttgaccgtgggacccgaacccgggtccaaggtggtcggaaagatcgaggggttgtacgcgggcacctcacaatcggagttcaatttattgattgttgtgaattttgccttgaccgaaggaaagtataatggcagcaccatcaccgtggtggggcggaaccgcctctccctcaagattagggagatgcctgtgattggaggaagtggggtttttaaatttgccactgggtatgttgaaaccagcactctctatgttgatgctgataggtctaccattgagtacaacatttatgtttcacattactgatcaatttgtggtaactttatgttacaaaacttcttctatgtac

SEQ ID NO: 6756 - protein, 208 aa, Glycine max
  misc_feature (1)..(208): Ceres Seq. ID no. 14316516
SNLSYYHIIINLIIFLLAPTMTTQFLILSLLISCHVLTATLAEETGFVGSLDRKALGLDKKDKVSHFRFYFHERFTGSNATSVTVVPPLPQYNSTTNFGLVGITDNALTVGPEPGSKVVGKIEGLYAGTSQSEFNLLIVVNFALTEGKYNGSTITVVGRNRLSLKIREMPVIGGSGVFKFATGYVETSTLYVDADRSTIEYNIYVSHY

SEQ ID NO: 6757 - protein, 188 aa, Glycine max
  misc_feature (1)..(188): Ceres Seq. ID no. 14316517
MTTQFLILSLLISCHVLTATLAEETGFVGSLDRKALGLDKKDKVSHFRFYFHERFTGSNATSVTVVPPLPQYNSTTNFGLVGITDNALTVGPEPGSKVVGKIEGLYAGTSQSEFNLLIVVNFALTEGKYNGSTITVVGRNRLSLKIREMPVIGGSGVFKFATGYVETSTLYVDADRSTIEYNIYVSHY

SEQ ID NO: 6758 - DNA, 772 bp, Glycine max
  misc_feature (1)..(772): Ceres Seq. ID no. 14316530
attctccaaccaacggcgacaacaacaaagattctttctagtttcttcctttcctttcctttttcgtcgccaacacggtaaacaaaaccccccaaatttcctcaattagggtttcaatccacattccaattccccaaccctcttcttccccatcctccaaatcccgaaactttccccaactgggtcctcaagtacgccacggcgagccctcgtagctcgcgatctcagaaaccaacgatgccgaaatcctcacgattcctcgtcgtcgcgatcgccgtcgccgcgctctgcgtgatcctccccgtcgcggcggcggcggatctcgaggaccccggcgtgctgcggctgccgtcggacagcctgtgcggcaaaacgacgccgtcttcgtgcccggcaaagtgcttccgcgccgaccccgtttgcggcgcggacggcgtgacgtactggtgcggttgcgcagaggcggcgtgcgcaggcgtggaggttgcgaaattggggttctgtgaagtcgggaatggtggctcggcgccgattcctgggcaagctctgcttttggtgcacattgtttggctcattgtgttggggttctccgtgttgttcggtcttttttagataattgggtttctttatgtatctaccatgatcagagggtgttatggttttggttctttgggattctttgagggttctttttgtaaattgatcaaacggccattcttgtattgtatgtatgattattcttattattgtaatttcacaactttcttgattc

SEQ ID NO: 6759 - protein, 124 aa, Glycine max
  misc_feature (1)..(124): Ceres Seq. ID no. 14316531
MPKSSRFLVVAIAVAALCVILPVAAAADLEDPGVLRLPSDSLCGKTTPSSCPAKCFRADPVCGADGVTYWCGCAEAACAGVEVAKLGFCEVGNGGSAPIPGQALLLVHIVWLIVLGFSVLFGLF

SEQ ID NO: 6760 - DNA, 1443 bp, Glycine max
  misc_feature (1)..(1443): Ceres Seq. ID no. 14316532
ttttttttctgcaaacaaatcaaccctcaaatttccttttgcttcctagaaagatttagttcccggaagcttctctctttgcacttgcatgatttgatctccgccgtggattcgtgatggtgattttatgaacttcctcctctgccccctctttccttttctgattatcattatttttatatttaactagagagagagactcatccttccttcgagacatgagatgaggccgatgcaactgccaccgccttccgcttccggggccaaccctgcccctgccaccaccaacaacaacaacaaggagcagcgtccccagcgccgccgcaaggacctcacgctgccgctgccgcagcgagacaccaacttggcggtgccacttcctctgccgccatcgacggcgcctgctgcggcggcgagcggcggagcgagccagcaggcggcgcagcaggtgatccctttctcggagctggagagactgaaccgcatcgggagcgggagcggcgggacggtgtacaaggtggtccaccgcacgagcgggcgcgtgtacgcgctgaaggtgatatacggtcaccacgaggagtcggtgcggcggcagatccaccgggaaatccagatcctccgtgacgtggacgatgcgaacgtggtgaagtgtcacgagatgtacgatcagaacagcgaaatccaggtgctgctggagttcatggacggaggttctctggaggggaaacacatcacgcaggagcagcagctggcagatctgtctcggcagattcttagggggctggcgtacctgcaccggcggcacatcgtccacagggacatcaagccgtcgaatctgcttataaactcgcggaagcaggtgaagatcgctgacttcggggtgggtcggatactgaatcagacgatggatccgtgcaattcgtcggtggggacgatcgcctacatgagtccggagaggatcaatacggacataaacgacgggcaatacgacgcgtacgcaggggacatatggagctttggggttagcatactggagttctacatgggaaggttccccttcgcggttgggaggcagggcgattgggccagtctcatgtgcgccatttgtatgtctcagcctcccgaggctcctccttctgcttcccctcacttcaaggacttcatcttgcgctgtcttcagcgcgatccctctcgccgctggtctgcttccaggttgctcgaacaccccttcattgctccgccgctgcccaaccacaatcagactcctccaaacctccatcagctactccctcctccgccaaggcctcttccctcctagtatgatggatccttctacatgcctattgcctattgcctagctagctagccctgtgtgccgctttattttcattttcattttcattttcatacagaatcaaatcttaatattggattttcagccgt

SEQ ID NO: 6761 - protein, 364 aa, Glycine max
  misc_feature (1)..(364): Ceres Seq. ID no. 14316533
MRPMQLPPPSASGANPAPATTNNNNKEQRPQRRRKDLTLPLPQRDTNLAVPLPLPPSTAPAAAASGGASQQAAQQVIPFSELERLNRIGSGSGGTVYKVVHRTSGRVYALKVIYGHHEESVRRQIHREIQILRDVDDANVVKCHEMYDQNSEIQVLLEFMDGGSLEGKHITQEQQLADLSRQILRGLAYLHRRHIVHRDIKPSNLLINSRKQVKIADFGVGRILNQTMDPCNSSVGTIAYMSPERINTDINDGQYDAYAGDIWSFGVSILEFYMGRFPFAVGRQGDWASLMCAICMSQPPEAPPSASPHFKDFILRCLQRDPSRRWSASRLLEHPFIAPPLPNHNQTPPNLHQLLPPPPRPLPS

SEQ ID NO: 6762 - protein, 361 aa, Glycine max
  misc_feature (1)..(361): Ceres Seq. ID no. 14316534
MQLPPPSASGANPAPATTNNNNKEQRPQRRRKDLTLPLPQRDTNLAVPLPLPPSTAPAAAASGGASQQAAQQVIPFSELERLNRIGSGSGGTVYKVVHRTSGRVYALKVIYGHHEESVRRQIHREIQILRDVDDANVVKCHEMYDQNSEIQVLLEFMDGGSLEGKHITQEQQLADLSRQILRGLAYLHRRHIVHRDIKPSNLLINSRKQVKIADFGVGRILNQTMDPCNSSVGTIAYMSPERINTDINDGQYDAYAGDIWSFGVSILEFYMGRFPFAVGRQGDWASLMCAICMSQPPEAPPSASPHFKDFILRCLQRDPSRRWSASRLLEHPFIAPPLPNHNQTPPNLHQLLPPPPRPLPS

SEQ ID NO: 6763 - protein, 219 aa, Glycine max
  misc_feature (1)..(219): Ceres Seq. ID no. 14316535
MYDQNSEIQVLLEFMDGGSLEGKHITQEQQLADLSRQILRGLAYLHRRHIVHRDIKPSNLLINSRKQVKIADFGVGRILNQTMDPCNSSVGTIAYMSPERINTDINDGQYDAYAGDIWSFGVSILEFYMGRFPFAVGRQGDWASLMCAICMSQPPEAPPSASPHFKDFILRCLQRDPSRRWSASRLLEHPFIAPPLPNHNQTPPNLHQLLPPPPRPLPS

SEQ ID NO: 6764 - DNA, 1061 bp, Glycine max
  misc_feature (1)..(1061): Ceres Seq. ID no. 14316536
gaacaaattaagagtaattgtcaccaacatagtaacatttaaccacacctgtggccaaatgacatcctcagttcccttggtctccaccttattgctttgctctattgctcttctctactctgcatcatttggagctgaagcatggacctcgccctacatacccgtctcttccctcatcagcaaaagtctttatgacacatttttccttcacaaagatgacactgcatgccctgccaaagacttctacccctacgacgccttcattcgtgcatccaaatccttccctgcgtttggtaccaccggatgtttagcaacacgcaagcgtgagattgctgcgtttctcgctcagatttcccacgaaaccactggcggctgggccaccgcacccgacggcccatttgcatggggtctctgcttcaaggaagaaattagtcctcagagtaattactgtgattctactaacacccaatggccttgtttcccaggcaaaagctacaagggtcgaggacccattcaactttcttggaactacaactatggtccagcagggaaggctttgggatttgatgggctgaggaacccagagattgtggcgaacaattctgtgatagccttcaaaactgctatgtggttttggatgacagagcaaaagccaaaaccttcatgccacaatgtgatggttgggatatatgtgccgacagaagatgacatagcagcaaaccgaacagcgggttatggtttggtgactaacataatcaatggtggactggaatgtgggattcctggtgatgcaagagtgaatgatcggattgggtttttcgaaaggtatacgaagttgttcaacgtggacactggacctaacttggattgtgcatatcagaaacccttctaactctttcgttatgtttttgttttgtgtttttcttttcctttaatttaatttttttttctctgccaagactttaataatgtattgaaagaaagcaaatactacctgcttcatggaattttcctaatgtactcaaaacagaagttgacaaacaaagttttatattattctt

SEQ ID NO: 6765 - protein, 296 aa, Glycine max
  misc_feature (1)..(296): Ceres Seq. ID no. 14316537
NKLRVIVTNIVTFNHTCGQMTSSVPLVSTLLLCSIALLYSASFGAEAWTSPYIPVSSLISKSLYDTFFLHKDDTACPAKDFYPYDAFIRASKSFPAFGTTGCLATRKREIAAFLAQISHETTGGWATAPDGPFAWGLCFKEEISPQSNYCDSTNTQWPCFPGKSYKGRGPIQLSWNYNYGPAGKALGFDGLRNPEIVANNSVIAFKTAMWFWMTEQKPKPSCHNVMVGIYVPTEDDIAANRTAGYGLVTNIINGGLECGIPGDARVNDRIGFFERYTKLFNVDTGPNLDCAYQKPF

SEQ ID NO: 6766 - protein, 277 aa, Glycine max
  misc_feature (1)..(277): Ceres Seq. ID no. 14316538
MTSSVPLVSTLLLCSIALLYSASFGAEAWTSPYIPVSSLISKSLYDTFFLHKDDTACPAKDFYPYDAFIRASKSFPAFGTTGCLATRKREIAAFLAQISHETTGGWATAPDGPFAWGLCFKEEISPQSNYCDSTNTQWPCFPGKSYKGRGPIQLSWNYNYGPAGKALGFDGLRNPEIVANNSVIAFKTAMWFWMTEQKPKPSCHNVMVGIYVPTEDDIAANRTAGYGLVTNIINGGLECGIPGDARVNDRIGFFERYTKLFNVDTGPNLDCAYQKPF

SEQ ID NO: 6767 - DNA, 1195 bp, Glycine max
  misc_feature (1)..(1195): Ceres Seq. ID no. 14316543
atcgtcaaggaaaactaagttcttcagtcttgacttgagtgctttgagttcatggatccaatccaacacaagttcgtcaacgttggtgctctcaagctccacgtcgcagaaaccggaaccggtccaaacgccgtcgtattcctgcacggcttcccggagatatggtactcgtggcggcaccagatgatagctctcgccggtgccggattcagagcggtttccttcgattacagaggttacggtctctccgacccgccacccgaacccgataagacctcttggtccgatcttctcagtgatctccttcatattcttgatgctcttgctctttctaaggtgtttcttgttgggaaagactttggagctcgtcctgcatatctattttcaattcttcaccctgaaagggtcttgggagttgtcacgttgggagttccatatgttcccccaggcccctctcagtatcacaaattccttcctgaaggcttctacattttgagatggcaggaacctggaagggcagaagctgattttggacgctttgatgcaaagactgttgtgcgaaatatttacatcctcttctcaagaagtgaaataccaatagctaatgaaaaccaggagatcatggatttggtggaacctgatactccgcttcccacttggttcacagaggaagatcttgcaacatacggagccttgtatgagaaatctggattccaaactgcattgcagattccatataggtcattaggtgaagtgcttagcttgccagatcctgtggttaaagttccggcatttctgataatgggtggcaaggattatgttctgaaatttccagggattgaagatttaacaaagggtgaaaaagcaaaatggtttgttccaaacttggaggttacatttatcccggagggaacccattttgttcaagaacagtttcccgagaaggtgaatcagcttattcttgacttccttgccaagcacacttgatattggactgtcgtcatgaatggtgtatgtggattgtgaactgtgggaaaatcagacaaagtgcagcacaaaatgatcgattgctgaagctaaatgatgcaaagcttgctggtagagctttgttagatgaatttcttgtacaaagaattcgtgaaatatgcgactgagttgtctagctaataaataaataaccggtttcttagttaac

SEQ ID NO: 6768 - protein, 311 aa, Glycine max
  misc_feature (1)..(311): Ceres Seq. ID no. 14316544
MDPIQHKFVNVGALKLHVAETGTGPNAVVFLHGFPEIWYSWRHQMIALAGAGFRAVSFDYRGYGLSDPPPEPDKTSWSDLLSDLLHILDALALSKVFLVGKDFGARPAYLFSILHPERVLGVVTLGVPYVPPGPSQYHKFLPEGFYILRWQEPGRAEADFGRFDAKTVVRNIYILFSRSEIPIANENQEIMDLVEPDTPLPTWFTEEDLATYGALYEKSGFQTALQIPYRSLGEVLSLPDPVVKVPAFLIMGGKDYVLKFPGIEDLTKGEKAKWFVPNLEVTFIPEGTHFVQEQFPEKVNQLILDFLAKHT

SEQ ID NO: 6769 - protein, 267 aa, Glycine max
  misc_feature (1)..(267): Ceres Seq. ID no. 14316545
MIALAGAGFRAVSFDYRGYGLSDPPPEPDKTSWSDLLSDLLHILDALALSKVFLVGKDFGARPAYLFSILHPERVLGVVTLGVPYVPPGPSQYHKFLPEGFYILRWQEPGRAEADFGRFDAKTVVRNIYILFSRSEIPIANENQEIMDLVEPDTPLPTWFTEEDLATYGALYEKSGFQTALQIPYRSLGEVLSLPDPVVKVPAFLIMGGKDYVLKFPGIEDLTKGEKAKWFVPNLEVTFIPEGTHFVQEQFPEKVNQLILDFLAKHT

SEQ ID NO: 6770 - DNA, 1299 bp, Glycine max
  misc_feature (1)..(1299): Ceres Seq. ID no. 14316550
ctcaagatcagatcctcatctaccaccattccaggtgtagccatcaaaacaacgtttgtttaacaaaacccattatcagatcagatccgatcagatcctcttcagattcggatcaccgccgagtccatgagcacgccagcgctttcagggggcacgggcctcttctctggattcacgcgtttatgcaagggccttgcggtggtgcttgtttgcggtcacattgcggttcagtttatcccttcagctgttaactatcttgctcttattcccgccaggacaatcccatttgcctggaatctcattacagctggatatgttgaacaatctatatatggggtagtggtcagcacattaagtctcctgtttattgggaagctgcttgaaccaatatggggctccagggaattctttaaatttatctttgtggttaatcttctaacttcagtatgtttattcatcactgctattgccttatactacattacaaggctggagacttacctttacatgccactttctggatttcatggagttgtatctggtttcttggttggcattaagcaaattataccagatcaagagcttcctttcattaagataaaaacaaagtggttgccatctatcactgtattgctttccattgctattagcttctggacactagaggctacagcatatcttccaaccattatatctggcacgtatataagctggatttatcttagatactggcagaggaaaccagaaactaaacatagaggtgatctgagtgaagattttgctttctccacatttttcccagaatttttaagaccagtcatagaccctatcgcttcaatatttcatcgaatgctctgtggaagatatgatgcttctaatgatggtcaaggcaacagtctggaaagtgagcctttaccaggttcggactcaattgaggcatccaggagacgagaaagaggtgctcgagcactggaagaacgattggctgcagagaggttggctgttgcacgacgtgagttgcaaagagaggctgaggaaaatgtataattccccagcgtttgtaaattttggatcagttcaggcaatatgcacctattaggagtgatattttcagaggtcgtacagtaattagaaattttttgtttaggtcaaggaaaattttaatgtggttttgccatggactatgatctttacaaaaccgaaggtttctctttcttttgtcagataaatatatttgactttcttgtgtactttacacaaatacatagaatctaaagagtttttcagttgttgtctccc

SEQ ID NO: 6771 - protein, 306 aa, Glycine max
  misc_feature (1)..(306): Ceres Seq. ID no. 14316551
MSTPALSGGTGLFSGFTRLCKGLAVVLVCGHIAVQFIPSAVNYLALIPARTIPFAWNLITAGYVEQSIYGVVVSTLSLLFIGKLLEPIWGSREFFKFIFVVNLLTSVCLFITAIALYYITRLETYLYMPLSGFHGVVSGFLVGIKQIIPDQELPFIKIKTKWLPSITVLLSIAISFWTLEATAYLPTIISGTYISWIYLRYWQRKPETKHRGDLSEDFAFSTFFPEFLRPVIDPIASIFHRMLCGRYDASNDGQGNSLESEPLPGSDSIEASRRRERGARALEERLAAERLAVARRELQREAEENV

SEQ ID NO: 6772 - protein, 179 aa, Glycine max
  misc_feature (1)..(179): Ceres Seq. ID no. 14316552
MPLSGFHGVVSGFLVGIKQIIPDQELPFIKIKTKWLPSITVLLSIAISFWTLEATAYLPTIISGTYISWIYLRYWQRKPETKHRGDLSEDFAFSTFFPEFLRPVIDPIASIFHRMLCGRYDASNDGQGNSLESEPLPGSDSIEASRRRERGARALEERLAAERLAVARRELQREAEENV

SEQ ID NO: 6773 - DNA, 877 bp, Glycine max
  misc_feature (1)..(877): Ceres Seq. ID no. 15168318
atcactgctcattactcaatcttcttacactcctaataagtgtttttcatttcacaaacaccctaatctatctataacaacaatggcatcagatcgaggtgtttttttgaacaaaagctggggtgttggtggaagagaaatgaaggacagagattttgatgaagaagatgtgtggagtgtagcaaatgatgatagtggcaaagaaaccacaagggcatgcaaggaatcttgtggttcttcttcttcttcttctgcatggcgtttacctgctgctccaagaaagattccaagggctaataataatgctaatcccctacctgcagcttctgatgctccattggttaaaggatcctcatcagcacctatggacatccctgactggtcaaagatttatggtaagagttgcaagaaagggtcaacagcagatgatggtgcaagcaacaagggtggtgatgatgatgatgatgacgacgatgacatggttcctccacatgaatggattgctaggaagcttgcaaggagccagatttcatctttctctgtgtgtgaagggatggggaggacactcaaaggaagagatcttagtaaggtgaggaatgctattttgaccaaaactggcttcatagagtagtggttaatttaagagatttaattaggttggttgaataatgttaatgagttattgtaaatcttgtgagtttgattcctacttggatgtactaatgtaagctacttggatgtcttcatgtaagcttcaaattttggcatcattagtagccataccacaatcaaatcatccattattgttttactcgggtcccatgcaatcgtttttgttttgattattctcactataatatatagtagtttattagtg

SEQ ID NO: 6774 - protein, 209 aa, Glycine max
  misc_feature (1)..(209): Ceres Seq. ID no. 15168319
SLLITQSSYTPNKCFSFHKHPNLSITTMASDRGVFLNKSWGVGGREMKDRDFDEEDVWSVANDDSGKETTRACKESCGSSSSSSAWRLPAAPRKIPRANNNANPLPAASDAPLVKGSSSAPMDIPDWSKIYGKSCKKGSTADDGASNKGGDDDDDDDDDMVPPHEWIARKLARSQISSFSVCEGMGRTLKGRDLSKVRNAILTKTGFIE

SEQ ID NO: 6775 - protein, 182 aa, Glycine max
  misc_feature (1)..(182): Ceres Seq. ID no. 15168320
MASDRGVFLNKSWGVGGREMKDRDFDEEDVWSVANDDSGKETTRACKESCGSSSSSSAWRLPAAPRKIPRANNNANPLPAASDAPLVKGSSSAPMDIPDWSKIYGKSCKKGSTADDGASNKGGDDDDDDDDDMVPPHEWIARKLARSQISSFSVCEGMGRTLKGRDLSKVRNAILTKTGFIE

SEQ ID NO: 6776 - protein, 163 aa, Glycine max
  misc_feature (1)..(163): Ceres Seq. ID no. 15168321
MKDRDFDEEDVWSVANDDSGKETTRACKESCGSSSSSSAWRLPAAPRKIPRANNNANPLPAASDAPLVKGSSSAPMDIPDWSKIYGKSCKKGSTADDGASNKGGDDDDDDDDDMVPPHEWIARKLARSQISSFSVCEGMGRTLKGRDLSKVRNAILTKTGFIE

SEQ ID NO: 6777 - DNA, 609 bp, Glycine max
  misc_feature (1)..(609): Ceres Seq. ID no. 15168323
ccctgtgaaattgtgaaattcaacctgctttgtcaccaggggaatattgacacactgatttattcagggaggcctttttatgcaattgaaccacctgtcttttggtgactatgcagtatgcacattttctgatgatcttgtatacatttgttcacaggtaagcttgggggataggagccaacgagcaaagacagcattgtgtaccatgggggcttccgtattcagtggaatcacacttacaaaattagtcggagtcctcgtcctttgcttctcaacatcacaaatttttgtggtgtattacttccagatgtatctggccttggttctcattggcttcttacacggtcttgtgtttctacctgtggttttgagcttgtttggtcctccattaagatatacagtcattaaggagcagctagaagacatgccttctgcttcatcagaacagcctctaattagatgaaaatcgagaaagttcattgcttatgtatctgaacatggtcacggagaaactcagtcgatttttgtaatttctgatgtttggtaggtttgatcatcagttatgttggtgtgtatataattccgataacatttgcttatatttgaagc

SEQ ID NO: 6778 - protein, 127 aa, Glycine max
  misc_feature (1)..(127): Ceres Seq. ID no. 15168324
MQLNHLSFGDYAVCTFSDDLVYICSQVSLGDRSQRAKTALCTMGASVFSGITLTKLVGVLVLCFSTSQIFVVYYFQMYLALVLIGFLHGLVFLPVVLSLFGPPLRYTVIKEQLEDMPSASSEQPLIR

SEQ ID NO: 6779 - protein, 85 aa, Glycine max
  misc_feature (1)..(85): Ceres Seq. ID no. 15168325
MGASVFSGITLTKLVGVLVLCFSTSQIFVVYYFQMYLALVLIGFLHGLVFLPVVLSLFGPPLRYTVIKEQLEDMPSASSEQPLIR

SEQ ID NO: 6780 - DNA, 1058 bp, Glycine max
  misc_feature (1)..(1058): Ceres Seq. ID no. 15168326
accaaacaacacatcaacagagaagccatgaaaactctgatttgtgcaccaaacgcagccttcaatctctcaaaactttctccatggaaaccaaacttccaagcttatcatcatcaccctacacacaaactcaactaccccttcaccacattaaagccacgtgctagtgccaaaggcttttcttccacggggcctccaactgttgcaagtgataatgccaatactactaagaagcccatgagaagaaaaaacaatgatgatgatgatgatgagcttccccaggaagttatgtacaggctaataggtaggatcttgttctctgttggggtgccaatggggttgggtttggccttgttgggcctttttggagagctcaaggaaaagcatgtgtgggatgcaccactgtggttaccctttttgacaacactcttgacttttggagcttcctctcttgggattgcgtatggagcactttccacaagtttggatgctgaaaaggaaggttcttttcttggggtggaacagcttcagaaaaattgggtagagatgtggcaggagaaacaagaggatgaaaactaggcagcctaatcaaggagaaattattagctaggtagtctccgaccaccatcacgtgtttatggcccccaccaatctctacatggcacacatgacacgagtttttcaatttatatgaaagaattaatagcattgaattatgtgttatgtgatgattagttgagattatgatggtccccgaggatgtagtaattcctgcttaatagtgataattttgcaaatgccaaatgggttcatgatgttgcatgagataaattagttctgtacatcaacatacccaagtggtaattttgcaccatataagaagtcagaaccataattattgttgtagttgttattataagtggtgaaagatttgagtagtttgtactaggtcttaggtttaaactttgttgctatcattgcataaaagaaaattgctcttctaagtgaaaatagattgtagtattggtctaccttgccatacgacaattttattcaat

SEQ ID NO: 6781 - protein, 192 aa, Glycine max
  misc_feature (1)..(192): Ceres Seq. ID no. 15168327
TKQHINREAMKTLICAPNAAFNLSKLSPWKPNFQAYHHHPTHKLNYPFTTLKPRASAKGFSSTGPPTVASDNANTTKKPMRRKNNDDDDDELPQEVMYRLIGRILFSVGVPMGLGLALLGLFGELKEKHVWDAPLWLPFLTTLLTFGASSLGIAYGALSTSLDAEKEGSFLGVEQLQKNWVEMWQEKQEDEN

SEQ ID NO: 6782 - protein, 183 aa, Glycine max
  misc_feature (1)..(183): Ceres Seq. ID no. 15168328
MKTLICAPNAAFNLSKLSPWKPNFQAYHHHPTHKLNYPFTTLKPRASAKGFSSTGPPTVASDNANTTKKPMRRKNNDDDDDELPQEVMYRLIGRILFSVGVPMGLGLALLGLFGELKEKHVWDAPLWLPFLTTLLTFGASSLGIAYGALSTSLDAEKEGSFLGVEQLQKNWVEMWQEKQEDEN

SEQ ID NO: 6783 - protein, 113 aa, Glycine max
  misc_feature (1)..(113): Ceres Seq. ID no. 15168329
MRRKNNDDDDDELPQEVMYRLIGRILFSVGVPMGLGLALLGLFGELKEKHVWDAPLWLPFLTTLLTFGASSLGIAYGALSTSLDAEKEGSFLGVEQLQKNWVEMWQEKQEDEN

SEQ ID NO: 6784 - DNA, 1613 bp, Glycine max
  misc_feature (1)..(1613): Ceres Seq. ID no. 15168348
ttggacaggttctaaagtttttgatagcctcagaaacaaaatcagacctcatcatagttttgctaacacaagtacattcattctcaaaaggtttaatttcatcctttctttccctctcttttcattggtgtgcactttcacttgtggagctagctgcaccaacagcagtggaaattgccttgttcttgagatgtctggtgttcttctttgggtgagttctggacccaaagagaacatcaactccttggtgagtttttcatgcaggagtggtggtggtggtgaaagaacacaaaagaggttttctggaatcagttttgcaagtggtgcctctgctttttcaagtgcagtggcagctgagactttaagatcctcagaggagagggtctatgaagtggtgctgaagcaagcagctctggtaaaagaaaacaaaaggggtacaaagatagctctagatttggacaaagacgttgaaggtgatttcaccaatgtggatctgttgaatgcagcttatgatcggtgtggtgaagtctgtgctgagtatgccaagacattttacttaggcacacaattgatgactgcagagcgccgaaaagctatttgggcaatttatgtgtggtgcagaagaactgatgagctagtggatggcccaaatgcttcgcacatcacccccggggccttggacaggtgggagcaacgactgagtgatgtttttgaaggtcgaccctatgatatgtatgatgctgccctctcacatactgtctcaaagtacccagttgatattcagccattcaaggacatgatcgaagggatgaggatggacctgagaaagtcaagatacgataactttgatgagctctacctttattgctactatgttgctgggacagtaggccttatgagtgtcccagtaatggggatagcaccagaagcaaatgcttcaacagagagcatttataatgctgcattggctctaggcattgcaaatcaacttactaacatactcagagatgttggagaggatgctagaagaggaagagtatatctcccacaagatgaattggcactagctggcctttcagatgaagacattttcagcggaagagttacagacaaatggcggaaattcatgaagggacaaataaagagggcgaggatgttttttgatgaagcagagaggggagttgcagacctcaactcagctagcaggtggcctgtgtgggcatcattgttgttgtataggcaaatattagattccattgaagccaatgattataataacttcacaaaaagggcatatgtaggaaaagtaaagaagctattatcactacctactgcctatggtttttcacttctaggccctcagaagtttgccaaaatggttaggagataactgttacaatgtgtgatacttttcagttagagttgtatacatctcaatttaccatgtgttgaagcgcatgagcaacccattcaattcatttaatcaatttgcaagatatcttagtaatcagttttaaaatgtgtaaaaaagaagaaggaagaatgtatcaatccatttgtataccataaatttcagatatcattcttcaaagggatacaacattttacttttg

SEQ ID NO: 6785 - protein, 462 aa, Glycine max
  misc_feature (1)..(462): Ceres Seq. ID no. 15168349
WTGSKVFDSLRNKIRPHHSFANTSTFILKRFNFILSFPLFSLVCTFTCGASCTNSSGNCLVLEMSGVLLWVSSGPKENINSLVSFSCRSGGGGERTQKRFSGISFASGASAFSSAVAAETLRSSEERVYEVVLKQAALVKENKRGTKIALDLDKDVEGDFTNVDLLNAAYDRCGEVCAEYAKTFYLGTQLMTAERRKAIWAIYVWCRRTDELVDGPNASHITPGALDRWEQRLSDVFEGRPYDMYDAALSHTVSKYPVDIQPFKDMIEGMRMDLRKSRYDNFDELYLYCYYVAGTVGLMSVPVMGIAPEANASTESIYNAALALGIANQLTNILRDVGEDARRGRVYLPQDELALAGLSDEDIFSGRVTDKWRKFMKGQIKRARMFFDEAERGVADLNSASRWPVWASLLLYRQILDSIEANDYNNFTKRAYVGKVKKLLSLPTAYGFSLLGPQKFAKMVRR

SEQ ID NO: 6786 - protein, 399 aa, Glycine max
  misc_feature (1)..(399): Ceres Seq. ID no. 15168350
MSGVLLWVSSGPKENINSLVSFSCRSGGGGERTQKRFSGISFASGASAFSSAVAAETLRSSEERVYEVVLKQAALVKENKRGTKIALDLDKDVEGDFTNVDLLNAAYDRCGEVCAEYAKTFYLGTQLMTAERRKAIWAIYVWCRRTDELVDGPNASHITPGALDRWEQRLSDVFEGRPYDMYDAALSHTVSKYPVDIQPFKDMIEGMRMDLRKSRYDNFDELYLYCYYVAGTVGLMSVPVMGIAPEANASTESIYNAALALGIANQLTNILRDVGEDARRGRVYLPQDELALAGLSDEDIFSGRVTDKWRKFMKGQIKRARMFFDEAERGVADLNSASRWPVWASLLLYRQILDSIEANDYNNFTKRAYVGKVKKLLSLPTAYGFSLLGPQKFAKMVRR

SEQ ID NO: 6787 - protein, 272 aa, Glycine max
  misc_feature (1)..(272): Ceres Seq. ID no. 15168351
MTAERRKAIWAIYVWCRRTDELVDGPNASHITPGALDRWEQRLSDVFEGRPYDMYDAALSHTVSKYPVDIQPFKDMIEGMRMDLRKSRYDNFDELYLYCYYVAGTVGLMSVPVMGIAPEANASTESIYNAALALGIANQLTNILRDVGEDARRGRVYLPQDELALAGLSDEDIFSGRVTDKWRKFMKGQIKRARMFFDEAERGVADLNSASRWPVWASLLLYRQILDSIEANDYNNFTKRAYVGKVKKLLSLPTAYGFSLLGPQKFAKMVRR

SEQ ID NO: 6788 - DNA, 1436 bp, Glycine max
  misc_feature (1)..(1436): Ceres Seq. ID no. 15168352
caccttccctcccctgttcaaaataccattaccatatcaaaaaccttaaccccattaattcataccctccccaccttcccccccgacacataacagctttcgaaccaaacctgttccttcttccttaatggccacaaacatcctccaagcaaaatggaaccaccactccgaagaagacgaagatcacaaagacaatgagcaacaagaagaagaagaagaagataatgaagcattgtcactctgcgatcttccgatcaacctcgaggacccaccgggaaaccaagaacactctcgccccaacgaaacatcgcaagaagaattcaatttccggttatggcgtgctccctttaacaaagagcccgaaatgtgtgcagcggatgaagtcttcttcaagggccaaatcctcccgttgcgcgtctcgttcagctccgaggccgggttgttagccacggtgtcccaatctcaacaacattacggtaagcaattcgttaggtcagaatcgttggatcgcaattctagcgattatcgtagtagtagtaatagtagtagaagtagtagtctcagaagtcaaaactcttccactagcactagcactagctccacaaccacaaacacaacaattcccaaaagtaagcacaaaattcgaaaccaatttcacacgcacccaagtcccaaaccgcaattaagagcatcagctccaacacacaaccaaggtagaaaatccacgtcagcatggggaattttccgtttaggtgttgtccctgctcccgagatagggttacaagatctcaaggttcgaaaccgaaactgcgtcgtcgtcagtcgtaatagtagtaatagtaacagtaacaacaacaacaacagttcgaaaagtgtcaaaacaagtaacaggaacaacaagaagggcagcagcaattacaataatgttttgaaacagttagtgggcaaaggcggtggtctattgagtggttgtgattgttcctttgaaacagtgcaacccaacaacattgtcatgataaaaggtggtaatggtaatagtggtggtggtaccgctaaaagcacgaacatgacagaaagtacaacgcacgccgcgaaagaaaaagtggtcgagtttaagaagcacaagcagcaaaagcagggaaagaaggttacgtcacgtcgccgaacgtttgaatggataaaggagcttcatgcaagccaacctgatgatgaagaggctttgttatcaaacgcatcatgagtggttccgtcgcatgcttaattggagtttactttaagattcttagattagatttagattagattgggtttagattgcctttcatttgaatattaaattttataatattgtagtgcaggtgctgtaacaaaaagttcttgctttctcgcgaggacgaggctgtaatttatttatttttattattttcattttctcc

SEQ ID NO: 6789 - protein, 370 aa, Glycine max
  misc_feature (1)..(370): Ceres Seq. ID no. 15168353
MATNILQAKWNHHSEEDEDHKDNEQQEEEEEDNEALSLCDLPINLEDPPGNQEHSRPNETSQEEFNFRLWRAPFNKEPEMCAADEVFFKGQILPLRVSFSSEAGLLATVSQSQQHYGKQFVRSESLDRNSSDYRSSSNSSRSSSLRSQNSSTSTSTSSTTTNTTIPKSKHKIRNQFHTHPSPKPQLRASAPTHNQGRKSTSAWGIFRLGVVPAPEIGLQDLKVRNRNCVVVSRNSSNSNSNNNNNSSKSVKTSNRNNKKGSSNYNNVLKQLVGKGGGLLSGCDCSFETVQPNNIVMIKGGNGNSGGGTAKSTNMTESTTHAAKEKVVEFKKHKQQKQGKKVTSRRRTFEWIKELHASQPDDEEALLSNAS

SEQ ID NO: 6790 - protein, 291 aa, Glycine max
  misc_feature (1)..(291): Ceres Seq. ID no. 15168354
MCAADEVFFKGQILPLRVSFSSEAGLLATVSQSQQHYGKQFVRSESLDRNSSDYRSSSNSSRSSSLRSQNSSTSTSTSSTTTNTTIPKSKHKIRNQFHTHPSPKPQLRASAPTHNQGRKSTSAWGIFRLGVVPAPEIGLQDLKVRNRNCVVVSRNSSNSNSNNNNNSSKSVKTSNRNNKKGSSNYNNVLKQLVGKGGGLLSGCDCSFETVQPNNIVMIKGGNGNSGGGTAKSTNMTESTTHAAKEKVVEFKKHKQQKQGKKVTSRRRTFEWIKELHASQPDDEEALLSNAS

SEQ ID NO: 6791 - DNA, 1379 bp, Glycine max
  misc_feature (1)..(1379): Ceres Seq. ID no. 15168355
gattgccctagttggcacctttccgtaagaagcacaagttctctctttttctttccaccgtcaccactcaccatgcaatgcaaataacccaattaagaaaccaaccaaccaacgaggcttgttctgttgtgttgtttgcttagtacgttaatggcaaaccaggtggttcctcgtgaatctcacccttatgcctttcatgtctctggccctcgcaagttcacttcccttaattggagggaccttatcatttccagttggaaggatgcaaattataagagaactgtcattgcctgctttatacaggcagtatacttgcttgaacttgatagacaggagaagagaacacaaggaaatgctcttgccccaaattggtggattcccttcaaatacaagcttaaacaaacactaattgatgaaagagatggatccatttttggcacaattcttgaatgggatagatctgctgcattggctgacttaataccaattagaccaagtggtgcccccagagctgtcttagcactcagaggaacattactcaaaagccctacaatgcgaagagatatcgaagatgacctacgttttgttgcttgggaaagcttgaagggctctgtgaggtttaaagcagctttggaggtactaaaatcgatttgtggtaaatacggaagcaacaacgtatgcattgcagggcattccttgggggctggttttgctcttcaagtgggaaaagaactagcaaaagaagggacttatgtggaggcacatttgtttaatccaccttctgtttcactagccatgagtctcaaaactattggagaaaaggctgagtttgtgtggaataggcttaaatccatgcttccttatagtggtgaggctcaaatcagcaatgatgtagacaaaacttcttcaagtgtaggattgaagagtaggatgcctcaactatctggttctggtttgaaagatgcaagtttgggggtagcaaaatgggttccttatttgtatgttaacaatggtgactatatctgctgctattacaatgatggtgctggcacaagcacaaaggtgaatgtaggaactacaaatggacaagtttcagcaaagttgtttgttgtctctaaggagaaacagaagtttcttgaggctcatggcctggaacaatggtggtcaagtgatgcagaacttcagcaggttatccatagtagcaatctcataagcaggcagcttcgatctttgtacactgctgctccttcccaagtaaacttataagcaggtggtgaaatgtaatttaaaataaaataaaaaaacaagatttgtattcctacatgttttcactgaaatttgatatttgtagtatgttgtaattcatactattttattat

SEQ ID NO: 6792 - protein, 371 aa, Glycine max
  misc_feature (1)..(371): Ceres Seq. ID no. 15168356
MANQVVPRESHPYAFHVSGPRKFTSLNWRDLIISSWKDANYKRTVIACFIQAVYLLELDRQEKRTQGNALAPNWWIPFKYKLKQTLIDERDGSIFGTILEWDRSAALADLIPIRPSGAPRAVLALRGTLLKSPTMRRDIEDDLRFVAWESLKGSVRFKAALEVLKSICGKYGSNNVCIAGHSLGAGFALQVGKELAKEGTYVEAHLFNPPSVSLAMSLKTIGEKAEFVWNRLKSMLPYSGEAQISNDVDKTSSSVGLKSRMPQLSGSGLKDASLGVAKWVPYLYVNNGDYICCYYNDGAGTSTKVNVGTTNGQVSAKLFVVSKEKQKFLEAHGLEQWWSSDAELQQVIHSSNLISRQLRSLYTAAPSQVNL

SEQ ID NO: 6793 - protein, 237 aa, Glycine max
  misc_feature (1)..(237): Ceres Seq. ID no. 15168357
MRRDIEDDLRFVAWESLKGSVRFKAALEVLKSICGKYGSNNVCIAGHSLGAGFALQVGKELAKEGTYVEAHLFNPPSVSLAMSLKTIGEKAEFVWNRLKSMLPYSGEAQISNDVDKTSSSVGLKSRMPQLSGSGLKDASLGVAKWVPYLYVNNGDYICCYYNDGAGTSTKVNVGTTNGQVSAKLFVVSKEKQKFLEAHGLEQWWSSDAELQQVIHSSNLISRQLRSLYTAAPSQVNL

SEQ ID NO: 6794 - DNA, 1357 bp, Glycine max
  misc_feature (1)..(1357): Ceres Seq. ID no. 15168389
gtatcatgctggagatatggctggggctattatgcaacaacacaaggagctaattataaatgaacgttgtcttggtctagatcatcctgacactgctcacagttatggaaatatggctctgttctaccatggccttaaccagacagaacttgcacttcgccatatgtcccgtgcttttctattattaagtttgtcatcggggccagatcatcctgatgttgcagcaacatttatcaatgttgcaatgatgtatcaggatataggaaagatgaacacagctcttcgttatctgcaagaagctttaaagaagaatgaaaggcttcttggcgaggaacatattcaaactgctgtttgttatcatgctctggctattgcatttaattgtatgggtgctttcaagctctctcaccagcatgagaagaaaacatatgatatacttgtcaaacaacttggtgaagatgattcaaggacacgggattcgcagaattggatgaacacatttaagatgcgtgagctgcagatgaatgctcaaaagcaaaagggtcaaactctgaatgcagcttcagctcagaaggctattgatatcttgaaggctcatcccgatttgatgcatgcattccaagctgccgcaattgctggaggatctggaagttcaggtgcatctgctaacaaatccctcaatgctgcagtaatgggtgaggcactttccagaggaaggggaattgatgaaagagctgcacgtgcagctgccgaagtcaggaaaaaggctgcagcaaggggcctgtcggttcgtccccacggtgtaccagtccaatccttgccaccccttacccaacttctgaatattataaattcaggtgtgactccagatgcagtggacaatgggaatgcagacggagcaaagaaggaagcaaatgacattcctccaagtgattcaattgatgccaagaaaggccaaacaatgcctgtgcaagaacaggaacatgctccagttggatcacattctccggttggactaggcaagggcttgtcatcattggatgctaagaaacaaaaatcgaaaccaaaggctggggcttgaaattttgaactgtaagctctggtagttggcaatggtagatttatttgagatcaaatattctttgtgagatggttggattgaccagtactttgctcagtttttttttttttttgaagagtgttgtagcgatcagaaataattttggcgcctttttttgtcctttctctgtagatttggtagatttaaatatccacatggaatgcaagtgacagtgatcaagtgcattttttgtctggtcaattactgataatctttcagtaaattatatatttgggg

SEQ ID NO: 6795 - protein, 359 aa, Glycine max
  misc_feature (1)..(359): Ceres Seq. ID no. 15168390
YHAGDMAGAIMQQHKELIINERCLGLDHPDTAHSYGNMALFYHGLNQTELALRHMSRAFLLLSLSSGPDHPDVAATFINVAMMYQDIGKMNTALRYLQEALKKNERLLGEEHIQTAVCYHALAIAFNCMGAFKLSHQHEKKTYDILVKQLGEDDSRTRDSQNWMNTFKMRELQMNAQKQKGQTLNAASAQKAIDILKAHPDLMHAFQAAAIAGGSGSSGASANKSLNAAVMGEALSRGRGIDERAARAAAEVRKKAAARGLSVRPHGVPVQSLPPLTQLLNIINSGVTPDAVDNGNADGAKKEANDIPPSDSIDAKKGQTMPVQEQEHAPVGSHSPVGLGKGLSSLDAKKQKSKPKAGA

SEQ ID NO: 6796 - protein, 354 aa, Glycine max
  misc_feature (1)..(354): Ceres Seq. ID no. 15168391
MAGAIMQQHKELIINERCLGLDHPDTAHSYGNMALFYHGLNQTELALRHMSRAFLLLSLSSGPDHPDVAATFINVAMMYQDIGKMNTALRYLQEALKKNERLLGEEHIQTAVCYHALAIAFNCMGAFKLSHQHEKKTYDILVKQLGEDDSRTRDSQNWMNTFKMRELQMNAQKQKGQTLNAASAQKAIDILKAHPDLMHAFQAAAIAGGSGSSGASANKSLNAAVMGEALSRGRGIDERAARAAAEVRKKAAARGLSVRPHGVPVQSLPPLTQLLNIINSGVTPDAVDNGNADGAKKEANDIPPSDSIDAKKGQTMPVQEQEHAPVGSHSPVGLGKGLSSLDAKKQKSKPKAGA

SEQ ID NO: 6797 - protein, 349 aa, Glycine max
  misc_feature (1)..(349): Ceres Seq. ID no. 15168392
MQQHKELIINERCLGLDHPDTAHSYGNMALFYHGLNQTELALRHMSRAFLLLSLSSGPDHPDVAATFINVAMMYQDIGKMNTALRYLQEALKKNERLLGEEHIQTAVCYHALAIAFNCMGAFKLSHQHEKKTYDILVKQLGEDDSRTRDSQNWMNTFKMRELQMNAQKQKGQTLNAASAQKAIDILKAHPDLMHAFQAAAIAGGSGSSGASANKSLNAAVMGEALSRGRGIDERAARAAAEVRKKAAARGLSVRPHGVPVQSLPPLTQLLNIINSGVTPDAVDNGNADGAKKEANDIPPSDSIDAKKGQTMPVQEQEHAPVGSHSPVGLGKGLSSLDAKKQKSKPKAGA

SEQ ID NO: 6798 - DNA, 1764 bp, Glycine max
  misc_feature (1)..(1764): Ceres Seq. ID no. 15168405
atttttctttttctattctttgcttcagtggccttaccagtgtgttgctcactgagaaaccaccaattttcagcatgacaaagataagtcctgaagttgaaatcaggatgccaatggaggcatttccaccagtttcagctgatgtgagctttatttctaatagttttccgaaatacaaactggatgttgataatcaagttctggaagagccagttgaggataacctgggtccttctttgaaggatgttattgaacaagaagctttcaatttgtcagaccaacacaagcgtatctcagttcgtgaccttgccagtaaatttgacaagaacttggctgcagctgctaagttgtctaatgaggcaaagctgagagaggtggcatctttggagggacatgttcttttgaaaaagctaagagatgcattagaaaatttaagaggacgttttgcaggaataaacaaagaggatgtggagaaagctatctctatggtggaagctttagcagttaagttaactcaaaacgaaggtgaattgattcaagagaagtttgaagtgaagaagcttgtaaactttctcaaacaggcttctgaagatgctaaaaagttggttaatcaagagaagtcttttgcttgtgccgaaattgaaagtgctagagctgtggtgctgagaattggggaggcgcttgaagaacaagaaaaagcttcccaagcttctaaaccacaggatgtggatggactaattgaagaagttcaagaagctagaagaatcaaattgttgcatcagccaagcaaggtgatggccatggaatatgaactacgtgctcttagggatcaaattcgagagaaatctatattttcaattaagcttcagaaagagctaaccatgagcaagagggatgaggaaaataaatctcgtttatacatgttagatggttctgaagctttgggttcatatctgcgagtccagccttgctcagctgaagtgccacaggtttcgaaatgttcatttcagtggtatcgcttgtcttctgaaggcagctggagggaagttatttcaggtgccaacaaaacaatatatgctcctgacccctctgatgttgggagaatcttacaagtagatattgtctcaaatgggaaaaaacttaccctaacaactgatcccattcaaactgtttcaggacttggaagccatgtggagacacttctacgaaaatctaataccgattttaatgtagttatttctcaaatgaatggaaaagatcactcttcacattctactcattcatttaatgtggggagaatgaggataaagctatgcagaggttggattacaaaagcaagagagatttactccccatcaatgcagctatgtggagttagaagtgatatcgctaatgcagcgaaggcgttgttttggcaagcaagaaagggcctctcatttgtattaacctttgaatcagagagagacagaaatgcagccattatggttgccaggaaatatgctcttgattgcaatgtcgtgctcgctgggccagatgatctagtgtaggagcaaaatttaactgactgagtttttccatcaaacgtgagatttatcagattcttggtgtgagtatacatgtgtgcttgttttgttaaagatatgatttcatctttgtgattgggtttcactaattgagttgcattgttttaggcatgttttttatttgcctaatcatgttgtaccaaactcaactttttataattattagttcatttgttcaaag

SEQ ID NO: 6799 - protein, 514 aa, Glycine max
  misc_feature (1)..(514): Ceres Seq. ID no. 15168406
FSFSILCFSGLTSVLLTEKPPIFSMTKISPEVEIRMPMEAFPPVSADVSFISNSFPKYKLDVDNQVLEEPVEDNLGPSLKDVIEQEAFNLSDQHKRISVRDLASKFDKNLAAAAKLSNEAKLREVASLEGHVLLKKLRDALENLRGRFAGINKEDVEKAISMVEALAVKLTQNEGELIQEKFEVKKLVNFLKQASEDAKKLVNQEKSFACAEIESARAVVLRIGEALEEQEKASQASKPQDVDGLIEEVQEARRIKLLHQPSKVMAMEYELRALRDQIREKSIFSIKLQKELTMSKRDEENKSRLYMLDGSEALGSYLRVQPCSAEVPQVSKCSFQWYRLSSEGSWREVISGANKTIYAPDPSDVGRILQVDIVSNGKKLTLTTDPIQTVSGLGSHVETLLRKSNTDFNVVISQMNGKDHSSHSTHSFNVGRMRIKLCRGWITKAREIYSPSMQLCGVRSDIANAAKALFWQARKGLSFVLTFESERDRNAAIMVARKYALDCNVVLAGPDDLV

SEQ ID NO: 6800 - protein, 490 aa, Glycine max
  misc_feature (1)..(490): Ceres Seq. ID no. 15168407
MTKISPEVEIRMPMEAFPPVSADVSFISNSFPKYKLDVDNQVLEEPVEDNLGPSLKDVIEQEAFNLSDQHKRISVRDLASKFDKNLAAAAKLSNEAKLREVASLEGHVLLKKLRDALENLRGRFAGINKEDVEKAISMVEALAVKLTQNEGELIQEKFEVKKLVNFLKQASEDAKKLVNQEKSFACAEIESARAVVLRIGEALEEQEKASQASKPQDVDGLIEEVQEARRIKLLHQPSKVMAMEYELRALRDQIREKSIFSIKLQKELTMSKRDEENKSRLYMLDGSEALGSYLRVQPCSAEVPQVSKCSFQWYRLSSEGSWREVISGANKTIYAPDPSDVGRILQVDIVSNGKKLTLTTDPIQTVSGLGSHVETLLRKSNTDFNVVISQMNGKDHSSHSTHSFNVGRMRIKLCRGWITKAREIYSPSMQLCGVRSDIANAAKALFWQARKGLSFVLTFESERDRNAAIMVARKYALDCNVVLAGPDDLV

SEQ ID NO: 6801 - protein, 479 aa, Glycine max
  misc_feature (1)..(479): Ceres Seq. ID no. 15168408
MPMEAFPPVSADVSFISNSFPKYKLDVDNQVLEEPVEDNLGPSLKDVIEQEAFNLSDQHKRISVRDLASKFDKNLAAAAKLSNEAKLREVASLEGHVLLKKLRDALENLRGRFAGINKEDVEKAISMVEALAVKLTQNEGELIQEKFEVKKLVNFLKQASEDAKKLVNQEKSFACAEIESARAVVLRIGEALEEQEKASQASKPQDVDGLIEEVQEARRIKLLHQPSKVMAMEYELRALRDQIREKSIFSIKLQKELTMSKRDEENKSRLYMLDGSEALGSYLRVQPCSAEVPQVSKCSFQWYRLSSEGSWREVISGANKTIYAPDPSDVGRILQVDIVSNGKKLTLTTDPIQTVSGLGSHVETLLRKSNTDFNVVISQMNGKDHSSHSTHSFNVGRMRIKLCRGWITKAREIYSPSMQLCGVRSDIANAAKALFWQARKGLSFVLTFESERDRNAAIMVARKYALDCNVVLAGPDDLV

SEQ ID NO: 6802 - DNA, 1224 bp, Glycine max
  misc_feature (1)..(1224): Ceres Seq. ID no. 15168413
aatgcccaagcctatgtgaagccaccaccatggcgatgaccaccacaacgacgtcgtctccaccatttctcttttcattcctttctccaaaaccctttcccccaaacccttcgctccctcttccccaattgcaaaaccgaacaccgctcagttccacccatcgcttcttctctgccatccccaaagcgaaacgcggcgtttcagggacccatttgtgcctcgcttctcgcgccaaagccaaacccaccccgtcttcggtggaacaagagagcgacgacaattttagaaaaagagtgcttcaaattgcgctgtgggttgcagaaggtgtctacattctatggctcttccttcttccttatgcccctggagatcctgtatgggccatcagttctgacacattgaactctcttgtgggtctttctctcaatttctttttaatattgcctttcatgaactttgttggaattcgtctgattgatgcgccagttcttcatcctatgtccgaaggactattcaattttgtgattggctggacgttcatgtttgcccctttgctgttcacagatcgcaacaatgatagatataaagggtctctagatgtactctggggcctgcaaatgttcctgacaaatacgtttctgatcccatacatggctatccgattgaatgatgctgatgatgagagtgttacaagaaaactttcacagtttggctcagtgatgacaaatggtgctccaattgttggagtgattggtgggagtgcatgcattgtatctctattgtgggctctttttggtcgaatggatgcaaattttgggggcatagcagatagatgggactacttggtgggttatcttggatcagaaaggctggcttatgctttcatatgggatatatgtctttacataattttccagccttggttgattggagacaacctccagaatgtccaggaaaacaaggttgttgtagtgaagtatcttagatatgtacccgtgattggcttaattgcgtatctattttgcttggaccctaaagaggtctgattattgtgtttggatgattagtttactttacacctttcagttaaaagttactatctcttgaacattttgaagttgaatttcacgttttgttggggggtaggggctcaaattacttgttggcctcaagtttaaacttttggtatgtaagtttgttaaatatttggagggatattttgtc

SEQ ID NO: 6803 - protein, 347 aa, Glycine max
  misc_feature (1)..(347): Ceres Seq. ID no. 15168414
CPSLCEATTMAMTTTTTSSPPFLFSFLSPKPFPPNPSLPLPQLQNRTPLSSTHRFFSAIPKAKRGVSGTHLCLASRAKAKPTPSSVEQESDDNFRKRVLQIALWVAEGVYILWLFLLPYAPGDPVWAISSDTLNSLVGLSLNFFLILPFMNFVGIRLIDAPVLHPMSEGLFNFVIGWTFMFAPLLFTDRNNDRYKGSLDVLWGLQMFLTNTFLIPYMAIRLNDADDESVTRKLSQFGSVMTNGAPIVGVIGGSACIVSLLWALFGRMDANFGGIADRWDYLVGYLGSERLAYAFIWDICLYIIFQPWLIGDNLQNVQENKVVVVKYLRYVPVIGLIAYLFCLDPKEV

SEQ ID NO: 6804 - protein, 338 aa, Glycine max
  misc_feature (1)..(338): Ceres Seq. ID no. 15168415
MAMTTTTTSSPPFLFSFLSPKPFPPNPSLPLPQLQNRTPLSSTHRFFSAIPKAKRGVSGTHLCLASRAKAKPTPSSVEQESDDNFRKRVLQIALWVAEGVYILWLFLLPYAPGDPVWAISSDTLNSLVGLSLNFFLILPFMNFVGIRLIDAPVLHPMSEGLFNFVIGWTFMFAPLLFTDRNNDRYKGSLDVLWGLQMFLTNTFLIPYMAIRLNDADDESVTRKLSQFGSVMTNGAPIVGVIGGSACIVSLLWALFGRMDANFGGIADRWDYLVGYLGSERLAYAFIWDICLYIIFQPWLIGDNLQNVQENKVVVVKYLRYVPVIGLIAYLFCLDPKEV

SEQ ID NO: 6805 - protein, 336 aa, Glycine max
  misc_feature (1)..(336): Ceres Seq. ID no. 15168416
MTTTTTSSPPFLFSFLSPKPFPPNPSLPLPQLQNRTPLSSTHRFFSAIPKAKRGVSGTHLCLASRAKAKPTPSSVEQESDDNFRKRVLQIALWVAEGVYILWLFLLPYAPGDPVWAISSDTLNSLVGLSLNFFLILPFMNFVGIRLIDAPVLHPMSEGLFNFVIGWTFMFAPLLFTDRNNDRYKGSLDVLWGLQMFLTNTFLIPYMAIRLNDADDESVTRKLSQFGSVMTNGAPIVGVIGGSACIVSLLWALFGRMDANFGGIADRWDYLVGYLGSERLAYAFIWDICLYIIFQPWLIGDNLQNVQENKVVVVKYLRYVPVIGLIAYLFCLDPKEV

SEQ ID NO: 6806 - DNA, 1480 bp, Glycine max
  misc_feature (1)..(1480): Ceres Seq. ID no. 15168421
acacagaaaaacaaatccttcaaacatcgttttatttttcttctctctaaactaaaaaaaatgaagggcaccatagttctacaccctgccatgagtaggggacacctagtccccatggtagaacttggcaagttcatatacactcaccaccaccaaaacctccccatcaaaatcctcctcccttcgccgcccaactccaccacccttcaatacatcgccgccgtctccgccaccacgccttcgatcaccttccaccacctctcaccctcacaacacttactccacgtcctccaaaccctcatctcccaatcttccaaacccaaagccttcatcctagacttcttcaaccactccgctgctgatgtcacacgaaccctaaaaatccccacctactattacttccccaactccgcgagttgcgtcgctctcttcctttacaccccaaccatccactacaacaccaagaaaggcttttccagttacagcgacacgcttcgccgcatccccggtttgccgccactgtcgccggaggacatgcccacctccctcctcgaccgccggagcttcgagtccttcgccaacatgtcgattcaaatgagaaaaacagatggaataatcgttaacacgttcgagaagcttgagaataaagctttcttcgcgttgaagaatgggatctgcatgtcattagaaacacataagtctcattcttcaacgccagaaacacgtaacccacgtgtcttttgcatgggcccacttgtttctaacggtggaggtgaacatgataatgatgatagtggttgcatgagttggctcgactcgcaaccgagtcgaaccgttgtgtttttaagctttggaagctacggaaggttctcgaagagtcagataagggagatagcgttagggttagagaggagtggacaaaggtttttgtgggttatgaggaacccatatgagagaagtgaattgattttggaggaattgttgccaaaagggtttttggaaagaactaaagagaggggaatggtgatgaagaattgggcgccacaagttaagattctgagtcatgactcggtgggtgggttcgtgactcactgcgggtggaactcggtgttggaagcggtctcttggggtgtgcctatggtgtcgtggcctttgtatgcggaacaaaggttgaatagggtggttatggttgaggagatgaaggtggctttggcgttgaaggagaacgaagatgggtttgttagggctagtgagttggaagagcgagttagggagcttatggactcggagagagggagagggaaagaggttagagagagagttttgagcgcgagatatgatgctgtagctgcactcagcgatggtggatcttcacgggttgagttgaatgacttggttgagttgtggatgcaatgatgcttaaaagagtattattttttttcctgcttttattttaagtcaactgggtcaaccagttcac

SEQ ID NO: 6807 - protein, 471 aa, Glycine max
  misc_feature (1)..(471): Ceres Seq. ID no. 15168422
TQKNKSFKHRFIFLLSKLKKMKGTIVLHPAMSRGHLVPMVELGKFIYTHHHQNLPIKILLPSPPNSTTLQYIAAVSATTPSITFHHLSPSQHLLHVLQTLISQSSKPKAFILDFFNHSAADVTRTLKIPTYYYFPNSASCVALFLYTPTIHYNTKKGFSSYSDTLRRIPGLPPLSPEDMPTSLLDRRSFESFANMSIQMRKTDGIIVNTFEKLENKAFFALKNGICMSLETHKSHSSTPETRNPRVFCMGPLVSNGGGEHDNDDSGCMSWLDSQPSRTVVFLSFGSYGRFSKSQIREIALGLERSGQRFLWVMRNPYERSELILEELLPKGFLERTKERGMVMKNWAPQVKILSHDSVGGFVTHCGWNSVLEAVSWGVPMVSWPLYAEQRLNRVVMVEEMKVALALKENEDGFVRASELEERVRELMDSERGRGKEVRERVLSARYDAVAALSDGGSSRVELNDLVELWMQ

SEQ ID NO: 6808 - protein, 451 aa, Glycine max
  misc_feature (1)..(451): Ceres Seq. ID no. 15168423
MKGTIVLHPAMSRGHLVPMVELGKFIYTHHHQNLPIKILLPSPPNSTTLQYIAAVSATTPSITFHHLSPSQHLLHVLQTLISQSSKPKAFILDFFNHSAADVTRTLKIPTYYYFPNSASCVALFLYTPTIHYNTKKGFSSYSDTLRRIPGLPPLSPEDMPTSLLDRRSFESFANMSIQMRKTDGIIVNTFEKLENKAFFALKNGICMSLETHKSHSSTPETRNPRVFCMGPLVSNGGGEHDNDDSGCMSWLDSQPSRTVVFLSFGSYGRFSKSQIREIALGLERSGQRFLWVMRNPYERSELILEELLPKGFLERTKERGMVMKNWAPQVKILSHDSVGGFVTHCGWNSVLEAVSWGVPMVSWPLYAEQRLNRVVMVEEMKVALALKENEDGFVRASELEERVRELMDSERGRGKEVRERVLSARYDAVAALSDGGSSRVELNDLVELWMQ

SEQ ID NO: 6809 - protein, 441 aa, Glycine max
  misc_feature (1)..(441): Ceres Seq. ID no. 15168424
MSRGHLVPMVELGKFIYTHHHQNLPIKILLPSPPNSTTLQYIAAVSATTPSITFHHLSPSQHLLHVLQTLISQSSKPKAFILDFFNHSAADVTRTLKIPTYYYFPNSASCVALFLYTPTIHYNTKKGFSSYSDTLRRIPGLPPLSPEDMPTSLLDRRSFESFANMSIQMRKTDGIIVNTFEKLENKAFFALKNGICMSLETHKSHSSTPETRNPRVFCMGPLVSNGGGEHDNDDSGCMSWLDSQPSRTVVFLSFGSYGRFSKSQIREIALGLERSGQRFLWVMRNPYERSELILEELLPKGFLERTKERGMVMKNWAPQVKILSHDSVGGFVTHCGWNSVLEAVSWGVPMVSWPLYAEQRLNRVVMVEEMKVALALKENEDGFVRASELEERVRELMDSERGRGKEVRERVLSARYDAVAALSDGGSSRVELNDLVELWMQ

SEQ ID NO: 6810 - DNA, 1968 bp, Glycine max
  misc_feature (1)..(1968): Ceres Seq. ID no. 15168429
aaaatcacaatcacaagttaagcctcttccacgcgcttcttgagcgactgaatcttaagccagaaacagcaccatctatcacgctctgccactgcatgtggttttaaatactttaacctcactcacatttctctctctctctctctctcactaatctctcgttgataaacacaatcaacaatcttgttcaaacaccccacgagcttctccagcattttcaatcctcttctcttttatcctcatcgctctgcaccaaaacctccccactcctcaattatttatttatctctcccactttttctcacacacattttctcaaacacatggtgtcctcactccttcacttcactctagcttaaataacccaacaaagttcacttcaaacctcaaccatggccctcgaaacgctcctcgtgaaggtcaaaaccgccatatcaaacagcatcgactcggtcccgccgaagctcctgaagaagaagccttctttcaaagcgaagcaaaacgtcggcgttttggcgttcgagatcggcggcgtgatgtcgaagctcctccacctctggcactcgctctccgacgcaaccatcgtgcgcgtccgaaacgacgccgtgaacctcgagggcgttcggaagatcatctccaacgacgagtcgttcctcctcggactcgcctgcgccgagttctccgagtcgctccgagtcgccgctaactcggtgacgcggctcagcgcgcgctgcgaggattccgccctgcgctccttccacctggccttcctcgagttcgcggactcgggccgcgacccgaacgggtgggccctctccggcccaaaagaaaccgattcgaagctcaagaaaatggagcgttacgtgacgttcacggcaacactctaccgcgaaatggaggagctcacggttcttgaaaactccttaagaaaagccctgaatcacgctgacggcaacagcgttgggagcaaagatcagcagaagctctacgagcttcagcagaagatcttttggcagaagcaagaggtgaaggatctaaaagaaagatctttatggagcagaagcttcgacaatgttgttgtactcctcgtaaggttcagcttcaccgttttagcaaggattaaggttgtcttcggaatcggtcaccacatgccttgtctgtctcgtactttgtcggcttccgccactgtttatccgtctgatcaaaaccctaatgggttcgtttatgagtcattggaagaagaagactcgaagcttgaagaagaggccgtgaatgggttttttgaggcaaactcgaagcttttgagaccacccgagagcacgctgggtgctgcgggtttggctttgcattacgcgaatctgatcatagtgatggagaagatgataaagtcaccgcacttggtgggtgtggatgcgagggatgatttgtatgggatgttgccgaggagcataaggtggggtttgaggggaaggttgagaggggtggggttttgtgcgagtgatcctctgctcgctggtgagtggagagatgcgttagggagaatattggggtggttgtcacctttggcacataacatgatcaagtggcaaagtgagagaagctttgagcaacacaatttggtgcccaagaccaatgtgttgttgttgcagactttgtttttcgctaacaaggacaagactgaggctgccatcactgaacttcttgtggggttgaactatatttggaggtttgagagggaaatgactgctaaggctttgtttgaatgcgccaattctaatgggctattgttaaagttgaacaaatccagtcaatgagagaggttcatatatatatatatgatgagtttcttttagtttcttactatttcttcacaggggctcgaattgtgtctctcttgaagtttaattttatgggggttgatcattttagacgatgtattgaaattgaatcgagtgatcgatcgatgat

SEQ ID NO: 6811 - protein, 473 aa, Glycine max
  misc_feature (1)..(473): Ceres Seq. ID no. 15168430
MALETLLVKVKTAISNSIDSVPPKLLKKKPSFKAKQNVGVLAFEIGGVMSKLLHLWHSLSDATIVRVRNDAVNLEGVRKIISNDESFLLGLACAEFSESLRVAANSVTRLSARCEDSALRSFHLAFLEFADSGRDPNGWALSGPKETDSKLKKMERYVTFTATLYREMEELTVLENSLRKALNHADGNSVGSKDQQKLYELQQKIFWQKQEVKDLKERSLWSRSFDNVVVLLVRFSFTVLARIKVVFGIGHHMPCLSRTLSASATVYPSDQNPNGFVYESLEEEDSKLEEEAVNGFFEANSKLLRPPESTLGAAGLALHYANLIIVMEKMIKSPHLVGVDARDDLYGMLPRSIRWGLRGRLRGVGFCASDPLLAGEWRDALGRILGWLSPLAHNMIKWQSERSFEQHNLVPKTNVLLLQTLFFANKDKTEAAITELLVGLNYIWRFEREMTAKALFECANSNGLLLKLNKSSQ

SEQ ID NO: 6812 - protein, 425 aa, Glycine max
  misc_feature (1)..(425): Ceres Seq. ID no. 15168431
MSKLLHLWHSLSDATIVRVRNDAVNLEGVRKIISNDESFLLGLACAEFSESLRVAANSVTRLSARCEDSALRSFHLAFLEFADSGRDPNGWALSGPKETDSKLKKMERYVTFTATLYREMEELTVLENSLRKALNHADGNSVGSKDQQKLYELQQKIFWQKQEVKDLKERSLWSRSFDNVVVLLVRFSFTVLARIKVVFGIGHHMPCLSRTLSASATVYPSDQNPNGFVYESLEEEDSKLEEEAVNGFFEANSKLLRPPESTLGAAGLALHYANLIIVMEKMIKSPHLVGVDARDDLYGMLPRSIRWGLRGRLRGVGFCASDPLLAGEWRDALGRILGWLSPLAHNMIKWQSERSFEQHNLVPKTNVLLLQTLFFANKDKTEAAITELLVGLNYIWRFEREMTAKALFECANSNGLLLKLNKSSQ

SEQ ID NO: 6813 - protein, 320 aa, Glycine max
  misc_feature (1)..(320): Ceres Seq. ID no. 15168432
MERYVTFTATLYREMEELTVLENSLRKALNHADGNSVGSKDQQKLYELQQKIFWQKQEVKDLKERSLWSRSFDNVVVLLVRFSFTVLARIKVVFGIGHHMPCLSRTLSASATVYPSDQNPNGFVYESLEEEDSKLEEEAVNGFFEANSKLLRPPESTLGAAGLALHYANLIIVMEKMIKSPHLVGVDARDDLYGMLPRSIRWGLRGRLRGVGFCASDPLLAGEWRDALGRILGWLSPLAHNMIKWQSERSFEQHNLVPKTNVLLLQTLFFANKDKTEAAITELLVGLNYIWRFEREMTAKALFECANSNGLLLKLNKSSQ

SEQ ID NO: 6814 - DNA, 1110 bp, Glycine max
  misc_feature (1)..(1110): Ceres Seq. ID no. 15168436
cctatcaaatccaaacactgccttaagcctttgattcccaaatcctcccttcctctcccattgcacagtgatcgttgcgatccatgacgacaccaccgtcttcctcctcagcttcgcaatcgcagttcgcctattcaaacccctcctcctcctcctcctacttccccgttccctttcaccttcagcaacccgcaaccactcactacgctgcgccctacgtcgccgccccctccgtgcaaatccccgctcctccagtcgtcggccccgttgcgcccgcccctgtacccggcgtatactccgccgtgccgcaatatcaggcacagcagttatttgagagggatgcgcagataataacgccggaggctctcgagaatgtcaaggcagcgattgcaagcagcgacgtggagcacaaaaccgatgccaaaaagaaagcggttcctcgcaaagctgctggccacgcttgggaggatcctatccttgcagagtggccagaagatgattatcggctcttctgtggggatcttggtaacgaggtgaatgatgatgttctctcaaaagcattttcacgatttccttcctttaacatggcacgagttgtcagagacaagcggactggtaaaacaaaaggttatggatttgtgagctttgccaatccttctgaccttgctggtgctcttaaagaaatgaatggtaagtatgttggaaaccgtcctataaaactacgcaagagtaagtggagggagaggacagattatgaagcactggagaaacagaagaatcacattcaaaagaaaccgaaaatggcaaggaaaggtgtgctgcacaagtgacaggctggaatctgtgtaaatcaggttaactaagtagagaacactttacaaatgctatttcttttttccatctgaaaggtatttcccatgtaaccgaaaaaagcccccccaagacattcctttcccgtttgcaaaatactatagttgttattttaaagtgtatgatgtatgcccaataccaaaaaaccttatttatgtttacatttcaggaatttgtggcagtcgtttaatacagcatgaggaaggaactcagaaaatgtataaaatttgattgactggc

SEQ ID NO: 6815 - protein, 248 aa, Glycine max
  misc_feature (1)..(248): Ceres Seq. ID no. 15168437
MTTPPSSSSASQSQFAYSNPSSSSSYFPVPFHLQQPATTHYAAPYVAAPSVQIPAPPVVGPVAPAPVPGVYSAVPQYQAQQLFERDAQIITPEALENVKAAIASSDVEHKTDAKKKAVPRKAAGHAWEDPILAEWPEDDYRLFCGDLGNEVNDDVLSKAFSRFPSFNMARVVRDKRTGKTKGYGFVSFANPSDLAGALKEMNGKYVGNRPIKLRKSKWRERTDYEALEKQKNHIQKKPKMARKGVLHK

SEQ ID NO: 6816 - DNA, 669 bp, Glycine max
  misc_feature (1)..(669): Ceres Seq. ID no. 15168438
aatcccaagctcacacacactaaaccaaagtaagaggtatagtgttctaagagtgagcaacttgtgagaaatggcttccaaggctgcacttctcttgtgtctcaatgttctctttttcactgtggttagttccacatatgtgccatgtaatccaccccccaaaactcccaaacacccacctgtcccaaagccaccatccccaaagcaagcaagctgccccaaagacactattaagttcggtgtgtgtgctgatgtgttaggtttgattaatgtgcaacttgggaagccaccaaagaccccatgctgcaacctaattcagggtcttggaaaccttaaaattgcagaaaattgtacacaaatgtttttgcattgtggtggtttcagagaccatgatatttttgacgatgcgggtgcaattgcacttttgtatctccatttcaaaccttgttccttccttcaatggctctacaattgaaagtgaaacgtggtttaaagaataaaactctttcaaagttggaaattttctttactcacatgtcgcttttttattgggggtatgaaatgaagacagtgatttggtacatgtagacagcatgctcttttctcagttcattctgtctatggcaagtgtttagtggcagtggtgtaatggtggttttaagagttttc

SEQ ID NO: 6817 - protein, 134 aa, Glycine max
  misc_feature (1)..(134): Ceres Seq. ID no. 15168439
MASKAALLLCLNVLFFTVVSSTYVPCNPPPKTPKHPPVPKPPSPKQASCPKDTIKFGVCADVLGLINVQLGKPPKTPCCNLIQGLGNLKIAENCTQMFLHCGGFRDHDIFDDAGAIALLYLHFKPCSFLQWLYN

SEQ ID NO: 6818 - DNA, 759 bp, Glycine max
  misc_feature (1)..(759): Ceres Seq. ID no. 15168440
aaaaagagaagattggattggggattaggaaaaaatggcgtgcaggggtatgcttcgttccaccattctcatagaacccagcctactccgttctttaaatttcaattctaacaaacatcacatagcttcactcaaccaatggtcttgccggtttcattctccaaaacccccttattcttcctctcagaacgaaacgccgttgtctcaggaccctgtcttgaaggccatttcagagatttccaaaggcgaagggagggttggccaaacaacaaacgtaattattggaagcactgctgccgatgattctaacaatgaatggttggctttggaccagaaggtgaactcgtacccaaccgatcgaggatttaccgccattggaactggaggtgaggattttgtgcaagccatggttgttgctgtcgaatctgtaatccaacaaccaattcctcagggatatgtgaagcaaaagttatcgtcggggggcaaatatgtatctgtaaatattgggcccattcaagttgtttctagtgaacaggtccaagctgtatataatgccatgaggacagacaaccgggtgaaatattttttataatctgtcacattgttttgtagagaacaccacgattgcaaggtatgtaccaacatggtttttttactacctaagcattaattaacccatgatatcattctaatcagagtaatcatggtgcaatttggatttcttttgtaatccctgaagatgtaacatcatgatttgtt

SEQ ID NO: 6819 - protein, 185 aa, Glycine max
  misc_feature (1)..(185): Ceres Seq. ID no. 15168441
MACRGMLRSTILIEPSLLRSLNFNSNKHHIASLNQWSCRFHSPKPPYSSSQNETPLSQDPVLKAISEISKGEGRVGQTTNVIIGSTAADDSNNEWLALDQKVNSYPTDRGFTAIGTGGEDFVQAMVVAVESVIQQPIPQGYVKQKLSSGGKYVSVNIGPIQVVSSEQVQAVYNAMRTDNRVKYFL

SEQ ID NO: 6820 - protein, 180 aa, Glycine max
  misc_feature (1)..(180): Ceres Seq. ID no. 15168442
MLRSTILIEPSLLRSLNFNSNKHHIASLNQWSCRFHSPKPPYSSSQNETPLSQDPVLKAISEISKGEGRVGQTTNVIIGSTAADDSNNEWLALDQKVNSYPTDRGFTAIGTGGEDFVQAMVVAVESVIQQPIPQGYVKQKLSSGGKYVSVNIGPIQVVSSEQVQAVYNAMRTDNRVKYFL

SEQ ID NO: 6821 - DNA, 1445 bp, Glycine max
  misc_feature (1)..(1445): Ceres Seq. ID no. 15168443
ttagtttgggtggaaatatcatttcccttttctattagaatttttcacttccaccgcattctctgaagaaacctcttgcactgtggacgcagcctccgccgcggggcattaccgccattgaagctgattcatgcttttttcaccgttcctcacaagaccaggtttgaagctattgccattggaaattaggacttcttttttgttactgaaaaattagagtagacaaaaaatgctcagacggaggctatctgttctctcaacatcaatcaccagaagctcaaattatagcaaacccagtctcggatacccatctatccaatctcatccctttcagctccctcactctcccagtgcttatcaaataattagtcctaatgcattcccggattttcaaggttttagagcttacagtcttctgagcttgaatgatctgagagataaggttcccagaaaacagccgacgaggaaggggcgtgggattgggtctggaaagggcaagactgcagggaggggtcacaagggtcagagagccagaaaaggtataaaattggggttcgaaggaggtcagacccctcttcgccgaagattacccaaacgtgggttcaagaacccatttagcctcacttttcagccaataggtttggggaaaattgcaaagtttattaatgctgggaagatagattcttctgaactgattacaatgaaaacactaaaggatgcaggggtactagggaagcaaatgaaagatggagtaagattgatggggcgtggttctgagcagatcaagtggccaattcatctagaggtatcaagggttactgttagggctaaggaagcagttgaagcagctggtgggtctgtgagaagggtgtattacaataagttgggcttgaaggcactggtgaagcctgagtggtttgaaaagaaaggaagattgctgcctaaagcagctagacctcctccaaagcaaaaggataaagttgatagcattggtcggttgcctgccccaacaaagccatttccatttttagttgaagcaagcaaggatcttccagttcagcatcttagttgaataactaacatttttggcaccagtttttaggattttgtaattctgtgtggtgcaaacgtctgactcacaagtttttcatgcagttcttgcaaatgctcaggtagttaattcaagaatgagataaatgaatttccttggggacaaatgaaagggagaatcttgtttattatttaatttcttttaaggatttgatcttcgtcactcagttgaaaagagagccttagtttcttgtgtatgtgtgcttggagtaggatcttagccccttcatgaagggaaaattgcaagaacagtctgcaatgtttaacttttctccggatatggatggtacttgtcaaatgacttggctgaattttaataaatggacgattgttcc

SEQ ID NO: 6822 - protein, 280 aa, Glycine max
  misc_feature (1)..(280): Ceres Seq. ID no. 15168444
MLRRRLSVLSTSITRSSNYSKPSLGYPSIQSHPFQLPHSPSAYQIISPNAFPDFQGFRAYSLLSLNDLRDKVPRKQPTRKGRGIGSGKGKTAGRGHKGQRARKGIKLGFEGGQTPLRRRLPKRGFKNPFSLTFQPIGLGKIAKFINAGKIDSSELITMKTLKDAGVLGKQMKDGVRLMGRGSEQIKWPIHLEVSRVTVRAKEAVEAAGGSVRRVYYNKLGLKALVKPEWFEKKGRLLPKAARPPPKQKDKVDSIGRLPAPTKPFPFLVEASKDLPVQHLS

SEQ ID NO: 6823 - DNA, 822 bp, Glycine max
  misc_feature (1)..(822): Ceres Seq. ID no. 15168445
acatccaaaattcagagtgtggttgtaaagttgcaatggaagtgttgagagttcaggtttttgttatgtccattgtggctcttgctttggcttatgtggcaccttccatcaatgctcaggtccttcctcctgcccctgcccctgcacccacaagtgatgggatatcagttgaccaaggaattgcctatgtgctaatgctgctggctctggtccttacttacatcattcactaacctctctatcaccccattcatctattcactatgtttttcttcaactctattctttcaatgaaattcttttttattatgtgtatgtatatttctgagttttcccctatctatctatttatttccgcaattagtcattttcaattagtagtaatcagtggtgaaacctatttttctggttgcacaccacttaggaacctctttgtcaacgaattttggcagaatgccctagttgcttggctgatcataggcaccaattgcccacataaaaaaaaaagtgggttagggttttgggtagattaagcaacttttacttttggctattcttgtcctttttacgcttgagagaagcagttgttgtaggcgttgtctccacaaaacaacttgcattgttaaattcatctttggttactgagattccaagggcatgtcgatgaacccaagtctttaaaacggagatattaaatgagggatatggttaaatcgaagtggtttatttcatctccacataaggggtgtagaatatcttgatattagaaactataatttcgtacagactatcataaggaacgtttgttccatgaatttgatt

SEQ ID NO: 6824 - protein, 89 aa, Glycine max
  misc_feature (1)..(89): Ceres Seq. ID no. 15168446
MFFFNSILSMKFFFIMCMYISEFSPIYLFISAISHFQLVVISGETYFSGCTPLRNLFVNEFWQNALVAWLIIGTNCPHKKKSGLGFWVD

SEQ ID NO: 6825 - protein, 80 aa, Glycine max
  misc_feature (1)..(80): Ceres Seq. ID no. 15168447
MKFFFIMCMYISEFSPIYLFISAISHFQLVVISGETYFSGCTPLRNLFVNEFWQNALVAWLIIGTNCPHKKKSGLGFWVD

SEQ ID NO: 6826 - protein, 76 aa, Glycine max
  misc_feature (1)..(76): Ceres Seq. ID no. 15168448
IQNSECGCKVAMEVLRVQVFVMSIVALALAYVAPSINAQVLPPAPAPAPTSDGISVDQGIAYVLMLLALVLTYIIH

SEQ ID NO: 6827 - protein, 65 aa, Glycine max
  misc_feature (1)..(65): Ceres Seq. ID no. 15168449
MEVLRVQVFVMSIVALALAYVAPSINAQVLPPAPAPAPTSDGISVDQGIAYVLMLLALVLTYIIH

SEQ ID NO: 6828 - DNA, 1478 bp, Glycine max
  misc_feature (1)..(1478): Ceres Seq. ID no. 15168464
aatgccagcagcggggaaggtaagtaggtgtctctcactctcccaccgaatccacattctaaagtaatacgccggagaatgacgtcacactcccactacccacccgacttagacgccgactccgtcacctcctccccacgctccgatcacttccacgacgcgccgccccgcatccgcttcatgtgcagcttcggcggcaagatcctcccccgcccccacgacaaccagctccgctacgtcggcggcgacacccgcatcgtcgccgtcaaccgctccatcactttctccgccctcattctcaaactctccaaactctcaggcatgagcaacataacagccaagtaccagctcccgaacgaggatctggacgcgttgatctcggtcaccacggacgaggacgtggagaacatgatggacgagtacgaccgcgtcgcacacaatcagaacccgcgatcggcgcggctccggctcttcctcttccccgaaggagaagactcccgcgccagcagcatcagctcgctcctaaacggctcagccaagcgcgaaaactggttcctcgacgctttaaacggcggcgtttcgggcctcgaacgaggccgctccgaagcctcttctatggtctctgaagtacccgattacctcttcgggttagacaactccgaagaaataacaaatcaccaacgcgacccgagacccaaacccggacccattattcaagataacgtttccgtttcagatccgggttcgcccgccccggttgtctcgtccccttattgttccacgtcatcagcgccgcccgtgccctctctcccgaaccttccctatgttaaaaccaaacctttaaacttaaatccggttcctgatactgactccaaggaaaatcaaaccgaacctgaaacggaacctcacccgaacctgaacctgaaccaaaacccgaacatgtattcaaataaccctgttgttcactaccctccagaagctgcttattcggcgcattcagtaaacccggttccggtttactatgtttccggtccggttcgaccgggatccgtgccggttcctatgcaaaccccttatcactacgttcaacaatcgtatcatgctgtggtgccacctcaggttcctatcgggtaccatcctttggttccgggttcgggtcaagtatatggagcgggcgtgaggcacatgaccccactgcaaccttacagcccctccaccacggcggtggttcatgacggtttgaaacagcacgtgtatcatgccgtgccaaattcgggtccggttccggttcacccagttattccgatgacgggtttggatgaaccgcagagaggtggagcgtaatttgtgacgggtcggggccccaattcacttaataactgatcccatttttatttagtggatgggtgctgaatttttactaccataccatcatgcaaatggtaatttatgtctatatatatacaagtgccttcact

SEQ ID NO: 6829 - protein, 421 aa, Glycine max
  misc_feature (1)..(421): Ceres Seq. ID no. 15168465
MTSHSHYPPDLDADSVTSSPRSDHFHDAPPRIRFMCSFGGKILPRPHDNQLRYVGGDTRIVAVNRSITFSALILKLSKLSGMSNITAKYQLPNEDLDALISVTTDEDVENMMDEYDRVAHNQNPRSARLRLFLFPEGEDSRASSISSLLNGSAKRENWFLDALNGGVSGLERGRSEASSMVSEVPDYLFGLDNSEEITNHQRDPRPKPGPIIQDNVSVSDPGSPAPVVSSPYCSTSSAPPVPSLPNLPYVKTKPLNLNPVPDTDSKENQTEPETEPHPNLNLNQNPNMYSNNPVVHYPPEAAYSAHSVNPVPVYYVSGPVRPGSVPVPMQTPYHYVQQSYHAVVPPQVPIGYHPLVPGSGQVYGAGVRHMTPLQPYSPSTTAVVHDGLKQHVYHAVPNSGPVPVHPVIPMTGLDEPQRGGA

SEQ ID NO: 6830 - protein, 387 aa, Glycine max
  misc_feature (1)..(387): Ceres Seq. ID no. 15168466
MCSFGGKILPRPHDNQLRYVGGDTRIVAVNRSITFSALILKLSKLSGMSNITAKYQLPNEDLDALISVTTDEDVENMMDEYDRVAHNQNPRSARLRLFLFPEGEDSRASSISSLLNGSAKRENWFLDALNGGVSGLERGRSEASSMVSEVPDYLFGLDNSEEITNHQRDPRPKPGPIIQDNVSVSDPGSPAPVVSSPYCSTSSAPPVPSLPNLPYVKTKPLNLNPVPDTDSKENQTEPETEPHPNLNLNQNPNMYSNNPVVHYPPEAAYSAHSVNPVPVYYVSGPVRPGSVPVPMQTPYHYVQQSYHAVVPPQVPIGYHPLVPGSGQVYGAGVRHMTPLQPYSPSTTAVVHDGLKQHVYHAVPNSGPVPVHPVIPMTGLDEPQRGGA

SEQ ID NO: 6831 - protein, 340 aa, Glycine max
  misc_feature (1)..(340): Ceres Seq. ID no. 15168467
MSNITAKYQLPNEDLDALISVTTDEDVENMMDEYDRVAHNQNPRSARLRLFLFPEGEDSRASSISSLLNGSAKRENWFLDALNGGVSGLERGRSEASSMVSEVPDYLFGLDNSEEITNHQRDPRPKPGPIIQDNVSVSDPGSPAPVVSSPYCSTSSAPPVPSLPNLPYVKTKPLNLNPVPDTDSKENQTEPETEPHPNLNLNQNPNMYSNNPVVHYPPEAAYSAHSVNPVPVYYVSGPVRPGSVPVPMQTPYHYVQQSYHAVVPPQVPIGYHPLVPGSGQVYGAGVRHMTPLQPYSPSTTAVVHDGLKQHVYHAVPNSGPVPVHPVIPMTGLDEPQRGGA

SEQ ID NO: 6832 - DNA, 594 bp, Glycine max
  misc_feature (1)..(594): Ceres Seq. ID no. 15168472
aagtgaggatagaggctggggctgtggctgaggctgagttctgtaattgtgttttggctgtggacaatggctctgtcttctgggcttttcttgtgttcttcttcccgtgttctcccaccaccagaaacccacactttcatgaggaccaggccttcttctgctgccttgcgcaccatttccgttagctgttgcaccgtctctcagtcgtctaagccagcccgcaaaatccgtggtatcatgaaaccccgcaaagtctcccccgagatggaagacctcgtcggcgctcccgagatggctcgaacccaagtcctcaaacggatttgggcttacattaaggacaacaatcttcaggaccctacagacaagaggactataaattgcgatgagaagctgaagaaggtgtttgcagggaaagatcaagttgagatgctagagattgctcgcttgattagccctcacttccttaaaagtgaaagtgaaagttaagtttttgtatgaaggtcatgctttggtgtattgaacaattacatttggccttgagacatagtagcgtttagtttttgtggtactctgaaaacagaacgagccttgttg

SEQ ID NO: 6833 - protein, 139 aa, Glycine max
  misc_feature (1)..(139): Ceres Seq. ID no. 15168473
MALSSGLFLCSSSRVLPPPETHTFMRTRPSSAALRTISVSCCTVSQSSKPARKIRGIMKPRKVSPEMEDLVGAPEMARTQVLKRIWAYIKDNNLQDPTDKRTINCDEKLKKVFAGKDQVEMLEIARLISPHFLKSESES

SEQ ID NO: 6834 - protein, 115 aa, Glycine max
  misc_feature (1)..(115): Ceres Seq. ID no. 15168474
MRTRPSSAALRTISVSCCTVSQSSKPARKIRGIMKPRKVSPEMEDLVGAPEMARTQVLKRIWAYIKDNNLQDPTDKRTINCDEKLKKVFAGKDQVEMLEIARLISPHFLKSESES

SEQ ID NO: 6835 - protein, 82 aa, Glycine max
  misc_feature (1)..(82): Ceres Seq. ID no. 15168475
MKPRKVSPEMEDLVGAPEMARTQVLKRIWAYIKDNNLQDPTDKRTINCDEKLKKVFAGKDQVEMLEIARLISPHFLKSESES

SEQ ID NO: 6836 - DNA, 1202 bp, Glycine max
  misc_feature (1)..(1202): Ceres Seq. ID no. 15168484
gtaacaccgttgttcgaaacttcaaatcaaaaaaagctcagagaacccatcccgccgccgccgtgtactccgaccgccacctccattcgccgatgtactctcaatcccttggtaattattgatttcttctattatcctttgagttaaagtcgaaggagtgcgattattctgatttgagaagcaaaaataccaaagagtgaagaaaagaaaagaaaaaatgctgtacataattggtttagggttgggtgatgagcaagacatcactctcaaaggcttggaagctgtgaagaagtgcagcaaggtttacatggaagcctacacttccctcctctcctttggtctctccaccaatggcatctccaacctggaaaaactatacggtaaacccattattcttgctgacagagaaatggtagaagaaaaggctgatgaaattctctctgaagctgatcatgcccatgttgctttccttgttgttggggatccttttggggctaccactcacactgacctggttgttcgagcaaagaagatggcaattgaagtcaaagtagtacacaatgcatctgtgatgaatgctattggagtttgtggtctacagctttaccgttatggggagaccgtttctataccattctttacagagacttggagacctgatagcttctatgaaaagattcaaagaaacctatcaatgggactgcacacgctttgcttgttagatattcgtgtgaaggaacccacactagaatctttgtgcagaggaagaaaagcttatgaaccacccagatatatgacaataaacacagccattgagcagctcttggagattgtgcaagcacgtgaagaacctgcatatactgaggataccgagtgtgttgggcttgcacggcttgggagtgaagatcagatgatagtagctggaacaatgaagcagttgcagatggttgattttggagcacctttgcattgccttgttataacaggccagacccatcctgtggaggaagaaatgctgtatttttacagatgcaggacatcgatacaacattaagacagcagcaccagtttaatttagcaaaaaagacttgtttgtttcttttgaaggaacccttgtatttttgttcttcctgtaaaaactttttggttgctaatcagggccaaaattaactaaattcattggtggctgaaaaattatgggc

SEQ ID NO: 6837 - protein, 278 aa, Glycine max
  misc_feature (1)..(278): Ceres Seq. ID no. 15168485
MLYIIGLGLGDEQDITLKGLEAVKKCSKVYMEAYTSLLSFGLSTNGISNLEKLYGKPIILADREMVEEKADEILSEADHAHVAFLVVGDPFGATTHTDLVVRAKKMAIEVKVVHNASVMNAIGVCGLQLYRYGETVSIPFFTETWRPDSFYEKIQRNLSMGLHTLCLLDIRVKEPTLESLCRGRKAYEPPRYMTINTAIEQLLEIVQAREEPAYTEDTECVGLARLGSEDQMIVAGTMKQLQMVDFGAPLHCLVITGQTHPVEEEMLYFYRCRTSIQH

SEQ ID NO: 6838 - protein, 248 aa, Glycine max
  misc_feature (1)..(248): Ceres Seq. ID no. 15168486
MEAYTSLLSFGLSTNGISNLEKLYGKPIILADREMVEEKADEILSEADHAHVAFLVVGDPFGATTHTDLVVRAKKMAIEVKVVHNASVMNAIGVCGLQLYRYGETVSIPFFTETWRPDSFYEKIQRNLSMGLHTLCLLDIRVKEPTLESLCRGRKAYEPPRYMTINTAIEQLLEIVQAREEPAYTEDTECVGLARLGSEDQMIVAGTMKQLQMVDFGAPLHCLVITGQTHPVEEEMLYFYRCRTSIQH

SEQ ID NO: 6839 - protein, 214 aa, Glycine max
  misc_feature (1)..(214): Ceres Seq. ID no. 15168487
MVEEKADEILSEADHAHVAFLVVGDPFGATTHTDLVVRAKKMAIEVKVVHNASVMNAIGVCGLQLYRYGETVSIPFFTETWRPDSFYEKIQRNLSMGLHTLCLLDIRVKEPTLESLCRGRKAYEPPRYMTINTAIEQLLEIVQAREEPAYTEDTECVGLARLGSEDQMIVAGTMKQLQMVDFGAPLHCLVITGQTHPVEEEMLYFYRCRTSIQH

SEQ ID NO: 6840 - DNA, 987 bp, Glycine max
  misc_feature (1)..(987): Ceres Seq. ID no. 15168488
atacgtcgtcgttttgccccccagaacctctgaagaagaagaaatggcgagtagcagcagcaacactccgaaggaaagcgttgttgtcgattgcggaaggcgtcgaacctcttgcggctattgcagatcctctcgtcacaatagcatctctcatggcatgtgggcacatagccttactgtggatgactaccaagatcttcttgatcgtggctggagaaggtctggatgttttctttataaaccagagatggaaaggacatgctgcccttcttatacaattcgcttgaaagcaagtgactttgttccttctaaggagcaacttcgtgtatctagacgaatgcaaaggtgggttccatttgacattgcaaggcctctgcttgacagaaaaccttatgttgtcttatcagattcttccattttacaaaatggagagtcatccctacctcaaactacggaagatgtaatgagaaggggttttgatgatgttggccaagaagatgcaaatgatgttccaatgcttgatgatgaagaaatggttgagtctgaatcagaatgctctgatgatgaacctgacctagaaaccacttcagatgatgatccagaaattgctgatgtcagcaaggttttgctagggataaagggatctcatgtgaaatacaaggatctgcgggttgtctttggtcctgagcagcagagttacttggagtcacaattgcggagatacaggaaggttgtgggtccattgctatccgagcgaatcgtctattcgctcggataatataaatattagtacttgagtagttgagtttaataagatgctactgctaatcttcccagaaaaaaaaaaaaaaaaaccctgcaaataagattcatgtattcttctgttggatggtctgatgttggcaatagcaattgtgtgaaccttgaagtttttttataatcaactttcccatgcatttgcatatatggaattcagtgttgtattcc

SEQ ID NO: 6841 - protein, 258 aa, Glycine max
  misc_feature (1)..(258): Ceres Seq. ID no. 15168489
YVVVLPPRTSEEEEMASSSSNTPKESVVVDCGRRRTSCGYCRSSRHNSISHGMWAHSLTVDDYQDLLDRGWRRSGCFLYKPEMERTCCPSYTIRLKASDFVPSKEQLRVSRRMQRWVPFDIARPLLDRKPYVVLSDSSILQNGESSLPQTTEDVMRRGFDDVGQEDANDVPMLDDEEMVESESECSDDEPDLETTSDDDPEIADVSKVLLGIKGSHVKYKDLRVVFGPEQQSYLESQLRRYRKVVGPLLSERIVYSLG

SEQ ID NO: 6842 - protein, 244 aa, Glycine max
  misc_feature (1)..(244): Ceres Seq. ID no. 15168490
MASSSSNTPKESVVVDCGRRRTSCGYCRSSRHNSISHGMWAHSLTVDDYQDLLDRGWRRSGCFLYKPEMERTCCPSYTIRLKASDFVPSKEQLRVSRRMQRWVPFDIARPLLDRKPYVVLSDSSILQNGESSLPQTTEDVMRRGFDDVGQEDANDVPMLDDEEMVESESECSDDEPDLETTSDDDPEIADVSKVLLGIKGSHVKYKDLRVVFGPEQQSYLESQLRRYRKVVGPLLSERIVYSLG

SEQ ID NO: 6843 - protein, 206 aa, Glycine max
  misc_feature (1)..(206): Ceres Seq. ID no. 15168491
MWAHSLTVDDYQDLLDRGWRRSGCFLYKPEMERTCCPSYTIRLKASDFVPSKEQLRVSRRMQRWVPFDIARPLLDRKPYVVLSDSSILQNGESSLPQTTEDVMRRGFDDVGQEDANDVPMLDDEEMVESESECSDDEPDLETTSDDDPEIADVSKVLLGIKGSHVKYKDLRVVFGPEQQSYLESQLRRYRKVVGPLLSERIVYSLG

SEQ ID NO: 6844 - DNA, 1409 bp, Glycine max
  misc_feature (1)..(1409): Ceres Seq. ID no. 15168492
aacgaaatcttcctctgaaatcatagtaaaatacatccccactgaagttcaagttcttgtgtgtaaaatggccaacattttcctacacaatgggggcaacacttgcaaggctaccctctatctcttattcataaccacagccttttttatcgcaaactctgcaaggattctagatgaagtggaatcccaaccccaagccataggcaatctaccagcacctggagctaccaatccttcactcacaacagctccagtcaccaccacaccacagatagatcctgccaccactttgccaagtggccaaacatctgcacccaccaccatatcacagcaggtaggtcctgccaccactttgccaagtggccaaacacctgcaaccgccgccaccatgaaccctgctactaaagaagactctggagaggaagatgataaccaagtagagccgccagttccagaaacagaagctccagctgctgtcactgcaccggctgaagaggaaactccagctatccctagtgcagctccagtgacaccaaactctttggcaaaagagccatctttttctttcttcatgcatgacatccttggagggtcacgtccatcagcaagagtggtagcaggaatagtagcaaacactgatgtcactggcctaccattctcaaagctcaacaacaacctcttcccaatcactggaggaattccactggtaaaccccaagctcaacggcatcataaccaacaacaatctcccaaaccttgtaggcctcagtggtgcacaatcctccactgtgttcaagaacagtggcaccagcaacactgtcactggtggcaacaaccaaccatttgtctcagcaggtaacctccctgcaggattcaccatccagaagctcatgttcggctcggtgacggtgatcgacgaccagctaactgaagggcacgagcttgattctgctgtgattggaaaggcacaagggttctacttggcaagttcattggatggtagcagccagaccattttgttgacagttttggtgcatggtggtgaacatgatcaacatcatgatgtggtggatgacagtatcaatttctttgggattcataggacagcttcatcagaatctgaggtagcagtgattggtgggactggcaagtatgagaatgctagagggtatgcttcacttgagactcttctcaaggaggaccagcacaccactgatggggtggacaccatcctgcatttcaatgtctacctcactgagtagagagactagctacctgtcattgtgattgattgcctttcatatttagagtttgaatttgaatatttgtgtatggtttgttcaaattggtgctatatgtctctgttaatgcttcatcaagtttgaaacaaagctcattctgctttctttt

SEQ ID NO: 6845 - protein, 419 aa, Glycine max
  misc_feature (1)..(419): Ceres Seq. ID no. 15168493
TKSSSEIIVKYIPTEVQVLVCKMANIFLHNGGNTCKATLYLLFITTAFFIANSARILDEVESQPQAIGNLPAPGATNPSLTTAPVTTTPQIDPATTLPSGQTSAPTTISQQVGPATTLPSGQTPATAATMNPATKEDSGEEDDNQVEPPVPETEAPAAVTAPAEEETPAIPSAAPVTPNSLAKEPSFSFFMHDILGGSRPSARVVAGIVANTDVTGLPFSKLNNNLFPITGGIPLVNPKLNGIITNNNLPNLVGLSGAQSSTVFKNSGTSNTVTGGNNQPFVSAGNLPAGFTIQKLMFGSVTVIDDQLTEGHELDSAVIGKAQGFYLASSLDGSSQTILLTVLVHGGEHDQHHDVVDDSINFFGIHRTASSESEVAVIGGTGKYENARGYASLETLLKEDQHTTDGVDTILHFNVYLTE

SEQ ID NO: 6846 - protein, 397 aa, Glycine max
  misc_feature (1)..(397): Ceres Seq. ID no. 15168494
MANIFLHNGGNTCKATLYLLFITTAFFIANSARILDEVESQPQAIGNLPAPGATNPSLTTAPVTTTPQIDPATTLPSGQTSAPTTISQQVGPATTLPSGQTPATAATMNPATKEDSGEEDDNQVEPPVPETEAPAAVTAPAEEETPAIPSAAPVTPNSLAKEPSFSFFMHDILGGSRPSARVVAGIVANTDVTGLPFSKLNNNLFPITGGIPLVNPKLNGIITNNNLPNLVGLSGAQSSTVFKNSGTSNTVTGGNNQPFVSAGNLPAGFTIQKLMFGSVTVIDDQLTEGHELDSAVIGKAQGFYLASSLDGSSQTILLTVLVHGGEHDQHHDVVDDSINFFGIHRTASSESEVAVIGGTGKYENARGYASLETLLKEDQHTTDGVDTILHFNVYLTE

SEQ ID NO: 6847 - protein, 290 aa, Glycine max
  misc_feature (1)..(290): Ceres Seq. ID no. 15168495
MNPATKEDSGEEDDNQVEPPVPETEAPAAVTAPAEEETPAIPSAAPVTPNSLAKEPSFSFFMHDILGGSRPSARVVAGIVANTDVTGLPFSKLNNNLFPITGGIPLVNPKLNGIITNNNLPNLVGLSGAQSSTVFKNSGTSNTVTGGNNQPFVSAGNLPAGFTIQKLMFGSVTVIDDQLTEGHELDSAVIGKAQGFYLASSLDGSSQTILLTVLVHGGEHDQHHDVVDDSINFFGIHRTASSESEVAVIGGTGKYENARGYASLETLLKEDQHTTDGVDTILHFNVYLTE

SEQ ID NO: 6848 - DNA, 1600 bp, Glycine max
  misc_feature (1)..(1600): Ceres Seq. ID no. 15168496
aacacttacccatcccatggaatccgcaacatcatggagtaaccctctcccactttccagtctcccttccccttcgcattcacgccacccctccgccttcaaatttatggctttttcaactcttcacactttctcactcccttccctttcttctccctcttctttccacccatttcccctttcctctctctctccaaaacccacttctttcaaccctcgccctctcttccctcgcaccatgcacgcctcgcgcatccaagatgccgttggaggggcactggccctcgtccaatcgtcccccgctacgtggcagtccgcgcttctcagcaacgcgctgatctttttcttggggtctccgattttggtcagcgggttgtctctttccgggatcggtgctgcgtttctgctcggaacgctcacttggcgcgcttttgggccttctgggttcttccttgttgccacgtactttgttattggtactgctgctacaaaggtcaaaatggcacagaaagtggctcagggggttgctgagaaaaaaagaggaagaaggggtccgggcagtgttattggatccagtgctgctggttgcatttgtgctttcctcacgatttttggtgttgggggagaggcattttctcggctttggagacttggatttgttgccagtttctgcactaagttgagtgacactgtctcaagtgagattgggaaggcatatggcaaaacaacgtaccttgttacaacattcaaggtagtcccaagaggcacagaaggggctgttagtgttgaaggaaccttggcagggattttagcatccatagttctagcatttgtcagttttctcatcggtgaggttggttcacatgaagcaattatatgtgtactagctgctcagattgctaatcttggtgagagcataattggtgctgcacttcaagagaaggaaggatttaaatggcttaacaatgatgcagtcaatgtcatcaacatatcaatgggcagtatcatagcagtcttcatgcagcaagcactccagatctggggttcctaaacttgatgcagggttttcgaggagctcaatcatattaacatagtgaccatcttgataagtgcttatctagggcacggatttgaacaatggagcagtttggataaaatgattattcgtttatttgtcattgaaaactgacttggatatttatactcctggatgtttgagtgccatatgagaagcagccttctctgacacaagattcatctgcaaatttaaaatggctagaaacccgtccttctgatcatacccaaaccatgttggttgttacaaaggtgtggcaatggaaaccacaaaactcagtaagctgtagccatgattcaactcttgtatgggaagtagtggttcttccaaaatgtagatgtgaacttcttcttcttgatctagaacagtttcaaccaagcatttctgtctatcgttcttgtttgtcccttttattttctggctgttgggagggtaagattgggggggaggggtctttgtttctggccttgatccgtttttttaaatgcatgcactcactgaaatacagtcattgaaagaatagtt

SEQ ID NO: 6849 - protein, 349 aa, Glycine max
  misc_feature (1)..(349): Ceres Seq. ID no. 15168497
TLTHPMESATSWSNPLPLSSLPSPSHSRHPSAFKFMAFSTLHTFSLPSLSSPSSFHPFPLSSLSPKPTSFNPRPLFPRTMHASRIQDAVGGALALVQSSPATWQSALLSNALIFFLGSPILVSGLSLSGIGAAFLLGTLTWRAFGPSGFFLVATYFVIGTAATKVKMAQKVAQGVAEKKRGRRGPGSVIGSSAAGCICAFLTIFGVGGEAFSRLWRLGFVASFCTKLSDTVSSEIGKAYGKTTYLVTTFKVVPRGTEGAVSVEGTLAGILASIVLAFVSFLIGEVGSHEAIICVLAAQIANLGESIIGAALQEKEGFKWLNNDAVNVINISMGSIIAVFMQQALQIWGS

SEQ ID NO: 6850 - protein, 344 aa, Glycine max
  misc_feature (1)..(344): Ceres Seq. ID no. 15168498
MESATSWSNPLPLSSLPSPSHSRHPSAFKFMAFSTLHTFSLPSLSSPSSFHPFPLSSLSPKPTSFNPRPLFPRTMHASRIQDAVGGALALVQSSPATWQSALLSNALIFFLGSPILVSGLSLSGIGAAFLLGTLTWRAFGPSGFFLVATYFVIGTAATKVKMAQKVAQGVAEKKRGRRGPGSVIGSSAAGCICAFLTIFGVGGEAFSRLWRLGFVASFCTKLSDTVSSEIGKAYGKTTYLVTTFKVVPRGTEGAVSVEGTLAGILASIVLAFVSFLIGEVGSHEAIICVLAAQIANLGESIIGAALQEKEGFKWLNNDAVNVINISMGSIIAVFMQQALQIWGS

SEQ ID NO: 6851 - protein, 314 aa, Glycine max
  misc_feature (1)..(314): Ceres Seq. ID no. 15168499
MAFSTLHTFSLPSLSSPSSFHPFPLSSLSPKPTSFNPRPLFPRTMHASRIQDAVGGALALVQSSPATWQSALLSNALIFFLGSPILVSGLSLSGIGAAFLLGTLTWRAFGPSGFFLVATYFVIGTAATKVKMAQKVAQGVAEKKRGRRGPGSVIGSSAAGCICAFLTIFGVGGEAFSRLWRLGFVASFCTKLSDTVSSEIGKAYGKTTYLVTTFKVVPRGTEGAVSVEGTLAGILASIVLAFVSFLIGEVGSHEAIICVLAAQIANLGESIIGAALQEKEGFKWLNNDAVNVINISMGSIIAVFMQQALQIWGS

SEQ ID NO: 6852 - DNA, 1200 bp, Glycine max
  misc_feature (1)..(1200): Ceres Seq. ID no. 15168500
taacacacaacacaacacaaacactacatagacattgaatcaaaaatcaatggtggttgcatccattcgtcttcttccttctccattcctctctttcgcgcctcgtttctctccatattcatattcatggcgctgccgtccctcttccaccattcccttttcttccatccactccaaagcttctactaagggagatggtggagtagtggaatttggtggtgatcaaacagagcttatatttttggggactggaaccagtgaaggggttccacgtgtcagctgcttgactaatcctttacacaaatgtgaggtgtgttcaaaagctgctcaaccgggtaataagaataggagacttaacacaagcatcctcattcgtcaccccggttcctcaggaacacacaataatattcttatagatgctggaaaatttttctatcacagtgctctccggtggtttcctgcttttgggataagaacaattgatgcggtcattattactcattcacatgctgatgcaatcggaggtcttgatgatcttagagattggacaaacaatgttcagcctcatattccaatatatgtagccaagcgtgactttgaggtgatgacaaagacccattattatttagtagatactagtgttatcttacctggtgcccaagtctcagagttgcaattcaatatcgtatcagaagaaccattttttgtacatggactgaagttcaccccattaccagtgtggcacggccagaattatcggtcccttggttttcgttttggtaatatatgttacattagtgatgtcagcgacattcctgaagaaacatatccacttctgaaggactgtgaaattctaatcccggatgctttgaggcctgattgctctacttctacacattttggacttcaaagggccttggacgaagtgcgaaaaattcaacccaaaagaacactttttaccggtatgatgcatctgatggatcatgaagaagtgaatgactcccttgcgaagctattggagtctgaaggccttgatgcacaactgagctatgacgggcttcgtataccaattagactctagtttgtatacagtctctttcataagatgactttttttttttttctcaaagagaaattattaaataaacattcaaataattttacaagttcatacattctgcaggttcctgcatctattct

SEQ ID NO: 6853 - protein, 343 aa, Glycine max
  misc_feature (1)..(343): Ceres Seq. ID no. 15168501
MVVASIRLLPSPFLSFAPRFSPYSYSWRCRPSSTIPFSSIHSKASTKGDGGVVEFGGDQTELIFLGTGTSEGVPRVSCLTNPLHKCEVCSKAAQPGNKNRRLNTSILIRHPGSSGTHNNILIDAGKFFYHSALRWFPAFGIRTIDAVIITHSHADAIGGLDDLRDWTNNVQPHIPIYVAKRDFEVMTKTHYYLVDTSVILPGAQVSELQFNIVSEEPFFVHGLKFTPLPVWHGQNYRSLGFRFGNICYISDVSDIPEETYPLLKDCEILIPDALRPDCSTSTHFGLQRALDEVRKIQPKRTLFTGMMHLMDHEEVNDSLAKLLESEGLDAQLSYDGLRIPIRL

SEQ ID NO: 6854 - DNA, 1730 bp, Glycine max
  misc_feature (1)..(1730): Ceres Seq. ID no. 15168502
cttcttggtcttcttctcttaatcctctccaccacattcgaagggaacgttacaaaaaaatcaccattttttctcattgttaatcaagttaagataagatcattcctctctatcaacaaacctttattgtgtatatatatatatattcccacaattcacatcactcttgtccttcactcattcactctatatatccacttcatataatttcctccacattgtgcaccgttcatggtgatggcaaaactaaagcacccttcattggtggcacttcttctagtactagcgtgtctttttattgctccaacatcctcaacatccagaaaaacaagtttcaagcagcagcacccttgcccaacaacaaatgggttccgagtcatgcttcgccacgtcgattcgggaaaaaacttaaccaaactagagcgtgtccaacacgggatcaagcgtggaaagagcaggcttcagaagcttaatgcaatggtgttggcagcatcatcaacacctgattctgaagatcagttagaagcccctattcacgcaggaaatggagagtacttaatagagttagccattggaacaccaccagtgtcttaccctgcggttttggacactggcagtgaccttatatggacacagtgcaagccttgcacacggtgttacaaacaaccaacacccatttttgatcccaagaagtcctcttctttttccaaggtttcatgcggtagtagcttgtgcagtgctttgccttcttcaacatgcagtgatgggtgtgagtatgtttattcatacggtgattattcaatgacacaaggcgttttggctaccgagactttcacttttgggaagtctaagaacaaggtttccgttcacaacattggttttggttgtggggaggacaatgaaggtgatggatttgaacaagcttcagggctggttggtcttggacgtggtcctttgtctttggtttctcaactcaaggaacaaagattttcttattgtttgaccccaattgatgacacaaaagaaagtgttttgttgttggggtctttgggtaaagtgaaagatgcaaaagaagtggtgacaacacctcttctcaaaaaccctttgcaaccttctttttactatctttctcttgaagctatctctgttggggacactcgattgtccattgagaagtccacttttgaagtgggggatgatgggaatggtggtgtgatcatagactctggcaccacaatcacctacgttcaacaaaaggcctatgaggcactcaaaaaagagttcatttctcaaaccaaacttgctttggacaaaactagctcaacagggttggatctttgtttctccttgccatcagggtcaacacaagtggagattccaaagcttgttttccatttcaagggtggggatttggagcttcctgctgagaactacatgattggtgactccaatttgggagtggcttgtttggccatgggtgcttctagtggaatgtctatatttggaaatgttcaacagcagaacattttggtgaaccatgatcttgaaaaggagaccatttcttttgttcctacgtcgtgtgatcagttgtgagagtgtgtgatatatttactgattagtgtatgtttttattgctttgtttgtttgataattttctgttgccggacttgtgttgttatgattgaatctcttagttgttgcaataatatgaacatttttattctctgttc

SEQ ID NO: 6855 - protein, 453 aa, Glycine max
  misc_feature (1)..(453): Ceres Seq. ID no. 15168503
MVMAKLKHPSLVALLLVLACLFIAPTSSTSRKTSFKQQHPCPTTNGFRVMLRHVDSGKNLTKLERVQHGIKRGKSRLQKLNAMVLAASSTPDSEDQLEAPIHAGNGEYLIELAIGTPPVSYPAVLDTGSDLIWTQCKPCTRCYKQPTPIFDPKKSSSFSKVSCGSSLCSALPSSTCSDGCEYVYSYGDYSMTQGVLATETFTFGKSKNKVSVHNIGFGCGEDNEGDGFEQASGLVGLGRGPLSLVSQLKEQRFSYCLTPIDDTKESVLLLGSLGKVKDAKEVVTTPLLKNPLQPSFYYLSLEAISVGDTRLSIEKSTFEVGDDGNGGVIIDSGTTITYVQQKAYEALKKEFISQTKLALDKTSSTGLDLCFSLPSGSTQVEIPKLVFHFKGGDLELPAENYMIGDSNLGVACLAMGASSGMSIFGNVQQQNILVNHDLEKETISFVPTSCDQL

SEQ ID NO: 6856 - protein, 451 aa, Glycine max
  misc_feature (1)..(451): Ceres Seq. ID no. 15168504
MAKLKHPSLVALLLVLACLFIAPTSSTSRKTSFKQQHPCPTTNGFRVMLRHVDSGKNLTKLERVQHGIKRGKSRLQKLNAMVLAASSTPDSEDQLEAPIHAGNGEYLIELAIGTPPVSYPAVLDTGSDLIWTQCKPCTRCYKQPTPIFDPKKSSSFSKVSCGSSLCSALPSSTCSDGCEYVYSYGDYSMTQGVLATETFTFGKSKNKVSVHNIGFGCGEDNEGDGFEQASGLVGLGRGPLSLVSQLKEQRFSYCLTPIDDTKESVLLLGSLGKVKDAKEVVTTPLLKNPLQPSFYYLSLEAISVGDTRLSIEKSTFEVGDDGNGGVIIDSGTTITYVQQKAYEALKKEFISQTKLALDKTSSTGLDLCFSLPSGSTQVEIPKLVFHFKGGDLELPAENYMIGDSNLGVACLAMGASSGMSIFGNVQQQNILVNHDLEKETISFVPTSCDQL

SEQ ID NO: 6857 - protein, 404 aa, Glycine max
  misc_feature (1)..(404): Ceres Seq. ID no. 15168505
MLRHVDSGKNLTKLERVQHGIKRGKSRLQKLNAMVLAASSTPDSEDQLEAPIHAGNGEYLIELAIGTPPVSYPAVLDTGSDLIWTQCKPCTRCYKQPTPIFDPKKSSSFSKVSCGSSLCSALPSSTCSDGCEYVYSYGDYSMTQGVLATETFTFGKSKNKVSVHNIGFGCGEDNEGDGFEQASGLVGLGRGPLSLVSQLKEQRFSYCLTPIDDTKESVLLLGSLGKVKDAKEVVTTPLLKNPLQPSFYYLSLEAISVGDTRLSIEKSTFEVGDDGNGGVIIDSGTTITYVQQKAYEALKKEFISQTKLALDKTSSTGLDLCFSLPSGSTQVEIPKLVFHFKGGDLELPAENYMIGDSNLGVACLAMGASSGMSIFGNVQQQNILVNHDLEKETISFVPTSCDQL

SEQ ID NO: 6858 - DNA, 1066 bp, Glycine max
  misc_feature (1)..(1066): Ceres Seq. ID no. 15168506
aataatttaatagtgtaatgtccgaagatcaaaaccctctgatggggcatcgtatttgattggtcggtcatagcaattagcaactccacccttcaaacttgaaaggaaaaaaggactttggttatccacgccacaccacgctgtaattaactaaactttctagaatcttcttctctcgccatggccgcgccgtcgtcctccgccgcggcaaacatcatgctggcgatctccgagaagaagacgaacagtgtagatctgtatcgccctctccgcaactacgtggccttccactactcggagcgagaggcgcagaacctcgagtatgatctccaaaccctgaagcaactccgctccgatgtggagcgccactccgatccatcgctcccggcgcgccgtgatctcctccaatcctactacaaatctctctgcctcgtggagacgcggttccctatctcttccgaccccgatcacgtcaacgccctcaccttcgtctggttcgacgccttcaagcccaagcagaaggcctcgcagcagaacatccacctcgagaaggcctccgtgctcttcaatttgggtgccgtttacagccagattggtttgtcctatgatcggaacactgtagatggccgccgtcaggcctcccacgccttcatcgcggctgccggatccttcgccttccttcgcgacaatgcttccctgaaggcctccgttgggagttccaccactgtggatttgtccgttgagtgcgccgggatgctggagaagctcatgctcgcgcaggcgcaggagtgcgtcttcgagaacaccattgccaaagggagcactcccggtgtctatgccaagatctctaggcaggtccggtgctagtttgttctatgttttaacttataatcattctttcatgtttgatacttgagttgagtgattatgaagatggttggtacaatttcgatttcgttattatagttttgctctcatttgtgttgttttttgatgttgaaatggtttttctttatgcatgggcaatgagtttcaatgtattaggggtatccgcgcttattgaagc

SEQ ID NO: 6859 - protein, 228 aa, Glycine max
  misc_feature (1)..(228): Ceres Seq. ID no. 15168507
MAAPSSSAAANIMLAISEKKTNSVDLYRPLRNYVAFHYSEREAQNLEYDLQTLKQLRSDVERHSDPSLPARRDLLQSYYKSLCLVETRFPISSDPDHVNALTFVWFDAFKPKQKASQQNIHLEKASVLFNLGAVYSQIGLSYDRNTVDGRRQASHAFIAAAGSFAFLRDNASLKASVGSSTTVDLSVECAGMLEKLMLAQAQECVFENTIAKGSTPGVYAKISRQVRC

SEQ ID NO: 6860 - protein, 216 aa, Glycine max
  misc_feature (1)..(216): Ceres Seq. ID no. 15168508
MLAISEKKTNSVDLYRPLRNYVAFHYSEREAQNLEYDLQTLKQLRSDVERHSDPSLPARRDLLQSYYKSLCLVETRFPISSDPDHVNALTFVWFDAFKPKQKASQQNIHLEKASVLFNLGAVYSQIGLSYDRNTVDGRRQASHAFIAAAGSFAFLRDNASLKASVGSSTTVDLSVECAGMLEKLMLAQAQECVFENTIAKGSTPGVYAKISRQVRC

SEQ ID NO: 6861 - DNA, 1589 bp, Glycine max
  misc_feature (1)..(1589): Ceres Seq. ID no. 15168513
gttacatttcttaccctctttgactctctctagtgtcatcaaatgggtacccccggaaatgatgaaccaggtacccagaccccacaaaacacaaaaagttctccccttttcagatacaattcacccttcattcagatcgttttaattgggttggtctgtttctgttgcccgggaatgttcaacgccctctccggcatgggtggcggtggccaagtcaacgcaaccgcctccaacaacgccctcaccgccctctacaccaccttcgccatcttcggcatcctcggcggcggcatctacaacattctcggaccccacctcaccctcttcgcaggttgctccacctacgtcctctacgcaggctccttcctctactacaaccactaccagcaccagttcttcgccatcgtcgccggcgccatcctcggcgtcggcgcagggctcctctgggccgcgcagggcgccatcatgacctcctaccctccggagaatcggaaaggcacttacatttccatcttctggagcatcttcaacatggggggtgtcatcggtggcctaattcccttcattctcaattacaatcgcggtgactcagctgtcactgtcaacgacggaacctacataggattcatggtatttatggccgttggggctgttctgtcgttgaccattttacccgctagcaaggttgttcgcgacgatgggactcggtgtactaaaatgttgtactccaatgcggcaactgaatccgttgaaattctcaagcttttctacaactggaagatgcttctcattattcccgctgcttggtctagtaattttttttatacctaccagtttaaccatgttaataagccgcagttcaatttgaggactagagggttcaacaatgtgttctattggggggcgcagatggtgggttcggttgggattgggtatgtgatggatttcagctttaggagcaggaggaagagaggggttgtggggattggtgtggttgctcttcttgcttctgctatttggggtggtgcacttgcgaatcagattaagcatgaccccggggtgatcttggatttcaaggactccggttctcgctatgctgggccttttgttttgtatttcagttttgggttgcttgatgccgtgttccaaagcatggtctattgggttatcggtgccctggccaatgattctgagattcttagcaggtatgctgggttctataaaggcatacaaagtgcaggggcagcagtggcttggcaaattgataaccataatgtgtccgctatggctcagttgattgtgaattgggtgctcactactgtgagctatccgttgttgttgattttggttgttttggctgtgaaagaaggagacaacaggggagaagaggaacctgtcaaagaggttgctggctttgcccactgatattgttttgttacctgtaaaaatcaactgcatattttgtctttatttctgttatcttgtttttcattgttaccattgtcatcacatataaaagtctgaaatggatgaagatttatctgtatgagttcatgcgtcggagaatattaaaggcaacaaattaatgc

SEQ ID NO: 6862 - protein, 460 aa, Glycine max
  misc_feature (1)..(460): Ceres Seq. ID no. 15168514
MGTPGNDEPGTQTPQNTKSSPLFRYNSPFIQIVLIGLVCFCCPGMFNALSGMGGGGQVNATASNNALTALYTTFAIFGILGGGIYNILGPHLTLFAGCSTYVLYAGSFLYYNHYQHQFFAIVAGAILGVGAGLLWAAQGAIMTSYPPENRKGTYISIFWSIFNMGGVIGGLIPFILNYNRGDSAVTVNDGTYIGFMVFMAVGAVLSLTILPASKVVRDDGTRCTKMLYSNAATESVEILKLFYNWKMLLIIPAAWSSNFFYTYQFNHVNKPQFNLRTRGFNNVFYWGAQMVGSVGIGYVMDFSFRSRRKRGVVGIGVVALLASAIWGGALANQIKHDPGVILDFKDSGSRYAGPFVLYFSFGLLDAVFQSMVYWVIGALANDSEILSRYAGFYKGIQSAGAAVAWQIDNHNVSAMAQLIVNWVLTTVSYPLLLILVVLAVKEGDNRGEEEPVKEVAGFAH

SEQ ID NO: 6863 - protein, 416 aa, Glycine max
  misc_feature (1)..(416): Ceres Seq. ID no. 15168515
MFNALSGMGGGGQVNATASNNALTALYTTFAIFGILGGGIYNILGPHLTLFAGCSTYVLYAGSFLYYNHYQHQFFAIVAGAILGVGAGLLWAAQGAIMTSYPPENRKGTYISIFWSIFNMGGVIGGLIPFILNYNRGDSAVTVNDGTYIGFMVFMAVGAVLSLTILPASKVVRDDGTRCTKMLYSNAATESVEILKLFYNWKMLLIIPAAWSSNFFYTYQFNHVNKPQFNLRTRGFNNVFYWGAQMVGSVGIGYVMDFSFRSRRKRGVVGIGVVALLASAIWGGALANQIKHDPGVILDFKDSGSRYAGPFVLYFSFGLLDAVFQSMVYWVIGALANDSEILSRYAGFYKGIQSAGAAVAWQIDNHNVSAMAQLIVNWVLTTVSYPLLLILVVLAVKEGDNRGEEEPVKEVAGFAH

SEQ ID NO: 6864 - protein, 409 aa, Glycine max
  misc_feature (1)..(409): Ceres Seq. ID no. 15168516
MGGGGQVNATASNNALTALYTTFAIFGILGGGIYNILGPHLTLFAGCSTYVLYAGSFLYYNHYQHQFFAIVAGAILGVGAGLLWAAQGAIMTSYPPENRKGTYISIFWSIFNMGGVIGGLIPFILNYNRGDSAVTVNDGTYIGFMVFMAVGAVLSLTILPASKVVRDDGTRCTKMLYSNAATESVEILKLFYNWKMLLIIPAAWSSNFFYTYQFNHVNKPQFNLRTRGFNNVFYWGAQMVGSVGIGYVMDFSFRSRRKRGVVGIGVVALLASAIWGGALANQIKHDPGVILDFKDSGSRYAGPFVLYFSFGLLDAVFQSMVYWVIGALANDSEILSRYAGFYKGIQSAGAAVAWQIDNHNVSAMAQLIVNWVLTTVSYPLLLILVVLAVKEGDNRGEEEPVKEVAGFAH

SEQ ID NO: 6865 - DNA, 1524 bp, Glycine max
  misc_feature (1)..(1524): Ceres Seq. ID no. 15168517
acttgattacatcccctccgttcatggaccaatatgctcaagcttcttcttccatcctcatcctctaaactcatctccagacacattttctcacaactatcacgccccaccaccaccatgtccataaatctacgcacccacgccttcgcgggtaacccgctccgatcccccaaccgggtcgacccgttttcgcccgcctccgcgctcgagaccctcacgacccgaatcctcgacgccgcgcacgtgtcctcaccgtccgtggattttaaggtcttgccttttagaaatgggagggtgctggcttcttcggagagtggtgacacgtggcgcctcgggtggatcgcgctggaggaagtgaagggtctattgggtgcggatttgagcgcggactcgttcgtttatttggggtcagactcggactcagactcggtggtgtactgggcgatcgacgtgtcgagggagagtgggttggtgacggaattcagtggcgtgaggttgtgcttcgtggagctcaggacgctcatggtcgctaccgattgggtggatttgaagaccatggggaacctcgccatcgccggtcatgccagggcacttcttgaatggcataaaatatcacgattttgtggacattgtggagagaaaacagtccctatggaagctgggagacgtaaacagtgctcaaatgaatcatgcaaacagaggatatatccacgacttgacccggtggtcattatgctagtaattgatcgggagaatgaccgtgcccttttgagcaaacaatcgagatttgtacctagaatgtggagctgcttagcaggttttatagagccaggagaaagcttggaggaggctgtaagaagagaaacgtgggaggagactggtattgaagtgggagaagttgtatatcatagctctcagccatggcctgttggaccgaatagcatgccatgtcagctgatggtggggttctttgcatatgcgaaatcccttgaaataaatgtggacaaagaagagttggaagatgctcagtggcacagtagagaatatgtaagaaaggctctgacatttgctgaatacaagaaagcccaacaaactgcggtagcgaaggtagaacaaatgtgtaagggagtagaaaaggctcacagcttgtctaccgatttcaatgtggaaagtggtgaacttgctccaatgtttgttcctggaccctttgcaatagctcatcaccttatttcctcctgggcattcccagatcaaaatgtaaatggcagtgaatgtcattcaaaacaggctagtggttctatgtcaaatttgtaggagtgcaaattatttttttaaaggcacctttgattttacattgttttccatactaaactgatgtgagatataatcaatcaccataagactgactgcattatgttgcattttctttgttgggcgtagaaacataaattgggcagttgaattgtttagggtttttttatgtgtaagaattaaataagatatcaagagatttataacatttac

SEQ ID NO: 6866 - protein, 426 aa, Glycine max
  misc_feature (1)..(426): Ceres Seq. ID no. 15168518
MLKLLLPSSSSKLISRHIFSQLSRPTTTMSINLRTHAFAGNPLRSPNRVDPFSPASALETLTTRILDAAHVSSPSVDFKVLPFRNGRVLASSESGDTWRLGWIALEEVKGLLGADLSADSFVYLGSDSDSDSVVYWAIDVSRESGLVTEFSGVRLCFVELRTLMVATDWVDLKTMGNLAIAGHARALLEWHKISRFCGHCGEKTVPMEAGRRKQCSNESCKQRIYPRLDPVVIMLVIDRENDRALLSKQSRFVPRMWSCLAGFIEPGESLEEAVRRETWEETGIEVGEVVYHSSQPWPVGPNSMPCQLMVGFFAYAKSLEINVDKEELEDAQWHSREYVRKALTFAEYKKAQQTAVAKVEQMCKGVEKAHSLSTDFNVESGELAPMFVPGPFAIAHHLISSWAFPDQNVNGSECHSKQASGSMSNL

SEQ ID NO: 6867 - protein, 398 aa, Glycine max
  misc_feature (1)..(398): Ceres Seq. ID no. 15168519
MSINLRTHAFAGNPLRSPNRVDPFSPASALETLTTRILDAAHVSSPSVDFKVLPFRNGRVLASSESGDTWRLGWIALEEVKGLLGADLSADSFVYLGSDSDSDSVVYWAIDVSRESGLVTEFSGVRLCFVELRTLMVATDWVDLKTMGNLAIAGHARALLEWHKISRFCGHCGEKTVPMEAGRRKQCSNESCKQRIYPRLDPVVIMLVIDRENDRALLSKQSRFVPRMWSCLAGFIEPGESLEEAVRRETWEETGIEVGEVVYHSSQPWPVGPNSMPCQLMVGFFAYAKSLEINVDKEELEDAQWHSREYVRKALTFAEYKKAQQTAVAKVEQMCKGVEKAHSLSTDFNVESGELAPMFVPGPFAIAHHLISSWAFPDQNVNGSECHSKQASGSMSNL

SEQ ID NO: 6868 - protein, 263 aa, Glycine max
  misc_feature (1)..(263): Ceres Seq. ID no. 15168520
MVATDWVDLKTMGNLAIAGHARALLEWHKISRFCGHCGEKTVPMEAGRRKQCSNESCKQRIYPRLDPVVIMLVIDRENDRALLSKQSRFVPRMWSCLAGFIEPGESLEEAVRRETWEETGIEVGEVVYHSSQPWPVGPNSMPCQLMVGFFAYAKSLEINVDKEELEDAQWHSREYVRKALTFAEYKKAQQTAVAKVEQMCKGVEKAHSLSTDFNVESGELAPMFVPGPFAIAHHLISSWAFPDQNVNGSECHSKQASGSMSNL

SEQ ID NO: 6869 - DNA, 1471 bp, Glycine max
  misc_feature (1)..(1471): Ceres Seq. ID no. 15168521
aaggtttcaattccgtcaaattctcaaaccctaaaataaattcagcaaatcacaaaagagaactatttattcctattccttgtatgcaatcttcctgaatataccagaattgttttcattattactactcaacaatttctttctttctttctttcttttggttttgcagcaacaaaatcaacaccaagcaaatggaagtaacagtcctcatgagctgcttccgccgctgcctcagccgccacaggcccctcacgtgggggttgaatccgagcaaatccggtccggtctgatggcggatcgggccaagattccggcaccggaaggagttctgaagtgtcctcggtgtgaatccaccaacacaaagttttgctacttcaacaattacagcctctctcagccaaggcacttctgcaagacatgtaggcgttattggacaagaggtggtgctctcaggaacgttcctgttggtggaggatgccgtaggaacaaaaagaacaaaaggtctcgctccaaatctccggtttctactgagaaaccatcacttcccaataatacaagtgcaatccctgagcttattggtcgtttcccacaacctttcatggcctctcttcagagtatgaaccgctatggtgtagggattaacacaggtgttaacttgcgtgagattcaagcacagaacgcttctcaaatggagtttcaaattggaggtcttggcaatggttcaagcgttgctactgcaggaggaggaggaggaggaggagtggagcagtggcggtttcagcagtttcctttcttgaatggttttgagtcaacttcagctgcttctaattcctacccttttcaaagtgaaattgttgaaggtttggttggagatattaatgccacaagttctaggattactcagctgccagcacgggttaaaatggaatataacggtggcttgaatttgtcaagatctcctttgaatgtctcagaaaatagtaaccatttctattcatggacggatttatctggtcttgcatcttcttcagcgagtcatctcttgtaactttgacctctcatatgggttagtagccacaaaaatttaagggttttggtgctgttattttttgatcaataattgaatgagtttccattttatgaagctctctctctccctttctcttggcatgtttaaactcatttatttatcgatccaaaaaatatttgtaccaataaactcttagatttatatatccgggttagaatgacagctctccaatgtcgttccaccgtcttcacgcgtcagtgttgttaacagaaatccaatcaggctggtagaatttaatcttcaattgtatatttttcttatcattggtttgtttatgtttttgcatcgagtcaagtttcttttgtgttctttttggctttctttgaacaacagtgtgtgcatgtattatgttttgtttgtttatgcgatatcatttgggct

SEQ ID NO: 6870 - protein, 252 aa, Glycine max
  misc_feature (1)..(252): Ceres Seq. ID no. 15168522
MADRAKIPAPEGVLKCPRCESTNTKFCYFNNYSLSQPRHFCKTCRRYWTRGGALRNVPVGGGCRRNKKNKRSRSKSPVSTEKPSLPNNTSAIPELIGRFPQPFMASLQSMNRYGVGINTGVNLREIQAQNASQMEFQIGGLGNGSSVATAGGGGGGGVEQWRFQQFPFLNGFESTSAASNSYPFQSEIVEGLVGDINATSSRITQLPARVKMEYNGGLNLSRSPLNVSENSNHFYSWTDLSGLASSSASHLL

SEQ ID NO: 6871 - protein, 149 aa, Glycine max
  misc_feature (1)..(149): Ceres Seq. ID no. 15168523
MASLQSMNRYGVGINTGVNLREIQAQNASQMEFQIGGLGNGSSVATAGGGGGGGVEQWRFQQFPFLNGFESTSAASNSYPFQSEIVEGLVGDINATSSRITQLPARVKMEYNGGLNLSRSPLNVSENSNHFYSWTDLSGLASSSASHLL

SEQ ID NO: 6872 - protein, 143 aa, Glycine max
  misc_feature (1)..(143): Ceres Seq. ID no. 15168524
MNRYGVGINTGVNLREIQAQNASQMEFQIGGLGNGSSVATAGGGGGGGVEQWRFQQFPFLNGFESTSAASNSYPFQSEIVEGLVGDINATSSRITQLPARVKMEYNGGLNLSRSPLNVSENSNHFYSWTDLSGLASSSASHLL

SEQ ID NO: 6873 - DNA, 983 bp, Glycine max
  misc_feature (1)..(983): Ceres Seq. ID no. 15168530
actttgggatttaaatacttttccatatgggtacttcgaaagttctcagcattgttttcttcgtgctattgggcgtaggcatatgctccgctgcaagaacactcctcaccattggtggaggtgtgcatggtgagataggtgttggtgttggtgtaggaggttatggtggtggtggaggttcaggtggaggtggaggatatggaggcgcgggagggcatggtgtaggtagtgacgaaggttcaaccactccaacgataaccgaatgctacgagccgagcgaggcgagcatcgagtggagcgtgaccaccgcggagggacacgacgacgccgtttccaacggcgtcgtcgtcgaagaaaagtggaagcggaaaggtggaaacggtttgttggtgagctgtcggagccagaaggcggttagcgtggggccgcaaccggtgaaatgtggatcagagggacaaagaaatgccacgtcatcgttatcatcacatgtgaacgtgattgggagtgtaaataagccaccacttgctcatgctaggggtcaccgcaacgcacctcgcgtgtcgcttgctttcgcgacatagccatttgcgttgcgcgcgcgcgcattcatgcaccttctcttcttctctcccaaacaaacaagaccccgagaataacgtccgcgcgcgctttttccgttttgtttgttccttcctccgttttgaattattctgtcgccttttgttttcctgttccatttatatatatccgttggggtcacgttcttttctggatagaatgtcgttgtttatgagatatgatgtttttttttttatgttgcaaacaattttaatttgagagttatgcttataaagtgtaaacagccattccttgaactaccataggtgatttgtgattgatcagatgattatctaagatccttgtattataagtagataattttttctctctcggctaaaatataattttcatttcattccact

SEQ ID NO: 6874 - protein, 184 aa, Glycine max
  misc_feature (1)..(184): Ceres Seq. ID no. 15168531
MGTSKVLSIVFFVLLGVGICSAARTLLTIGGGVHGEIGVGVGVGGYGGGGGSGGGGGYGGAGGHGVGSDEGSTTPTITECYEPSEASIEWSVTTAEGHDDAVSNGVVVEEKWKRKGGNGLLVSCRSQKAVSVGPQPVKCGSEGQRNATSSLSSHVNVIGSVNKPPLAHARGHRNAPRVSLAFAT

SEQ ID NO: 6875 - protein, 102 aa, Glycine max
  misc_feature (1)..(102): Ceres Seq. ID no. 15168532
MLGVTATHLACRLLSRHSHLRCARAHSCTFSSSLPNKQDPENNVRARFFRFVCSFLRFELFCRLLFSCSIYIYPLGSRSFLDRMSLFMRYDVFFFMLQTILI

SEQ ID NO: 6876 - DNA, 1292 bp, Glycine max
  misc_feature (1)..(1292): Ceres Seq. ID no. 15168537
acttcccattttattcttcatttcactgacaccacactttatttacatcttcgtatttccctttcctcgaaacttaattagaactcaaaatatagaaaaataagacaacatattaattcgtcgtgttcctcatcatgttcctatttgaggatctctggtccctcccgcgcctcttctcagagtcgcttaatttacagtctttacgcgaatcctttacgagctcgagctgtgacagaacggagtcggagcaatgccgcgacgagtcggcggcgatggttctgaaattcgtggcggtggcgtcgattctggtcgccggattcgggggagtctcgattccgctggtcgggaagtcgcggcggtttcttcgaccggacggcgacgttttcgcggcggcgaaggcgttcgcggcgggggtgattttagcgacggggttcgtccacatgctgagggactcgtgggacgcgcttcgggagccgtgcttggggacgcactcgcgcgcgtgggcgaagtttcccttcaccggtttcttcgccatggtgtcagcgctctttactctactggttgactttttagcgacggaatattacgagcgcagagaggcgcgtgggcgcgtggagcgagggaaggttgttgattatgatgaaggttgtgacgaggcgttgttggaaacgggaatcgtggaggttaaggatcttgggcgagggggaagacactcccactctcacgacggcgatgatgtggaaagtagtgttcgacacgtcgtcgtttcacaggtattggaacttgggattgtatcacattcgatgataattgggttatctctaggagtttcacaaagtccctgtaccatgaaacccctaattgtggcattatccttccatcaattctttgaaggatttgcacttggtggttgcatctcccaagcccaattcaagaccttatcagcaacaataatgtcatgtttttttgcactaacaacgccacttggtgttgctattggagctagtgttgcttcaatttttaacccttacagtccagtagcactcatcactgaaggcatcttggacgccttgtcagctgggattttagtgtatatggctttagtggacttaatagctgcagattttcttagcaagaaaatgcgttgtaactttaggtttcagataatatgttactgtctgcttttccttggggctggattgatgtcttcacttgcaatttgggcatgatactttcctatgttgctgtaaattatttttcaattaatgttgatatataggtttattgttttc

SEQ ID NO: 6877 - protein, 364 aa, Glycine max
  misc_feature (1)..(364): Ceres Seq. ID no. 15168538
MFLFEDLWSLPRLFSESLNLQSLRESFTSSSCDRTESEQCRDESAAMVLKFVAVASILVAGFGGVSIPLVGKSRRFLRPDGDVFAAAKAFAAGVILATGFVHMLRDSWDALREPCLGTHSRAWAKFPFTGFFAMVSALFTLLVDFLATEYYERREARGRVERGKVVDYDEGCDEALLETGIVEVKDLGRGGRHSHSHDGDDVESSVRHVVVSQVLELGIVSHSMIIGLSLGVSQSPCTMKPLIVALSFHQFFEGFALGGCISQAQFKTLSATIMSCFFALTTPLGVAIGASVASIFNPYSPVALITEGILDALSAGILVYMALVDLIAADFLSKKMRCNFRFQIICYCLLFLGAGLMSSLAIWA

SEQ ID NO: 6878 - protein, 318 aa, Glycine max
  misc_feature (1)..(318): Ceres Seq. ID no. 15168539
MVLKFVAVASILVAGFGGVSIPLVGKSRRFLRPDGDVFAAAKAFAAGVILATGFVHMLRDSWDALREPCLGTHSRAWAKFPFTGFFAMVSALFTLLVDFLATEYYERREARGRVERGKVVDYDEGCDEALLETGIVEVKDLGRGGRHSHSHDGDDVESSVRHVVVSQVLELGIVSHSMIIGLSLGVSQSPCTMKPLIVALSFHQFFEGFALGGCISQAQFKTLSATIMSCFFALTTPLGVAIGASVASIFNPYSPVALITEGILDALSAGILVYMALVDLIAADFLSKKMRCNFRFQIICYCLLFLGAGLMSSLAIWA

SEQ ID NO: 6879 - protein, 262 aa, Glycine max
  misc_feature (1)..(262): Ceres Seq. ID no. 15168540
MLRDSWDALREPCLGTHSRAWAKFPFTGFFAMVSALFTLLVDFLATEYYERREARGRVERGKVVDYDEGCDEALLETGIVEVKDLGRGGRHSHSHDGDDVESSVRHVVVSQVLELGIVSHSMIIGLSLGVSQSPCTMKPLIVALSFHQFFEGFALGGCISQAQFKTLSATIMSCFFALTTPLGVAIGASVASIFNPYSPVALITEGILDALSAGILVYMALVDLIAADFLSKKMRCNFRFQIICYCLLFLGAGLMSSLAIWA

SEQ ID NO: 6880 - DNA, 809 bp, Glycine max
  misc_feature (1)..(809): Ceres Seq. ID no. 15168553
atcctcatccaaattatcccatcatacctttactttaccccacccaaagcgaaaaaaaaaaggattcaaacatatttgccttatacaattcaaatggcacacacaaaagtggatatgggtttggttttggtggtaatggccatgctatgcgcaggagctgcagctcaatctcaatcgagttgcacaaatgtgttagtgagcctgtcaccgtgccttaactatatcacagggaattcttcaaccccatcttcaggatgctgctcacagcttgccagtgtggtgcgctcacaaccacaatgcctatgtcaggttcttagcggcggtggatcatcactggggatcaacattaaccaaactcaggctctggctttgcctgttgcttgcaaggtgcagaccccacccaccagtcaatgtaacaatgctgctgcttcaccaccaacaggaacagttgcggaatctccaaattcagctccatcaggaaccggaggatccaaaaacctacccacaactgataatggctcatccagcgggaattccatcaagttatcgattcctctgatacttattttggcagcaacatacgtgtcaactttcacaacatactgattctatattcggtcgattttccatttgctattttttgcttgtttgccaattgtccttgtttaatcatttgctattattgagcttccttagtctgaagggttcaatctattcattcgtgacccctactgggatacattgttttgtataatctgagacatgtgttctctcatttatcaataaaatgggttgtaacttggtttgct

SEQ ID NO: 6881 - protein, 201 aa, Glycine max
  misc_feature (1)..(201): Ceres Seq. ID no. 15168554
ILIQIIPSYLYFTPPKAKKKRIQTYLPYTIQMAHTKVDMGLVLVVMAMLCAGAAAQSQSSCTNVLVSLSPCLNYITGNSSTPSSGCCSQLASVVRSQPQCLCQVLSGGGSSLGININQTQALALPVACKVQTPPTSQCNNAAASPPTGTVAESPNSAPSGTGGSKNLPTTDNGSSSGNSIKLSIPLILILAATYVSTFTTY

SEQ ID NO: 6882 - protein, 170 aa, Glycine max
  misc_feature (1)..(170): Ceres Seq. ID no. 15168555
MAHTKVDMGLVLVVMAMLCAGAAAQSQSSCTNVLVSLSPCLNYITGNSSTPSSGCCSQLASVVRSQPQCLCQVLSGGGSSLGININQTQALALPVACKVQTPPTSQCNNAAASPPTGTVAESPNSAPSGTGGSKNLPTTDNGSSSGNSIKLSIPLILILAATYVSTFTTY

SEQ ID NO: 6883 - protein, 163 aa, Glycine max
  misc_feature (1)..(163): Ceres Seq. ID no. 15168556
MGLVLVVMAMLCAGAAAQSQSSCTNVLVSLSPCLNYITGNSSTPSSGCCSQLASVVRSQPQCLCQVLSGGGSSLGININQTQALALPVACKVQTPPTSQCNNAAASPPTGTVAESPNSAPSGTGGSKNLPTTDNGSSSGNSIKLSIPLILILAATYVSTFTTY

SEQ ID NO: 6884 - DNA, 985 bp, Glycine max
  misc_feature (1)..(985): Ceres Seq. ID no. 15168557
attgcctcacacacacaaacacaacagtgtctgctgcaccctacaatggtttcgctaccaacatggtttcgctactttcaccacaaggtcggatactccgtttccctcgccgtgaagaacaataaaggagatccaatcacagccagagagataaatgatgctgtttggaaaaacttctttctaggaaagctgacatacttgctctggaataaaggagaggagatggcccctactattgatggaaaagcagtaactcttgttcggaaattaccagctgtagacccaacgagtgtttttgtaggagatgttgtggttatgaaggaccctgagaagccagataactacctactcagaagattaactgcaattgaaggctatgaagtggtttctactgatgaaaaggatgaaccctttattcttgagaaggatcaatgctgggtagaggctgaaaatgaaaaattgaatgccaaggaagcgaaggatagccgaacatttggtccagttcagatgacagacattgtaggcagagtcatatattgcctgcgaagtgctgtagaccatggccgtgtacaaaacagtgatttcggcatgcgaaacgatacaccagtgctggaagtggaacttgatgttgatgagatggcaaagagtcacaaagcctgaaacatttttcccaagaaacactaactagtttactttacgcatgccttagtttcttcttgtggattttccttgaagcacagattgaagaataaaaaaatatgatttttaaattgttgcaatgggatgatggtgttatgtggatgtcctctgcatgctaggcaattggctgcggcctgtgttaaagcttgagttcaacattattgtatgctaagttctagcaaggactcctctgccctttgttctattcatttggctgtaaaattgaccaagttttggtctttttttgttaatggtcgaggaagataataaaagatgctgcgttgtt

SEQ ID NO: 6885 - protein, 219 aa, Glycine max
  misc_feature (1)..(219): Ceres Seq. ID no. 15168558
IASHTQTQQCLLHPTMVSLPTWFRYFHHKVGYSVSLAVKNNKGDPITAREINDAVWKNFFLGKLTYLLWNKGEEMAPTIDGKAVTLVRKLPAVDPTSVFVGDVVVMKDPEKPDNYLLRRLTAIEGYEVVSTDEKDEPFILEKDQCWVEAENEKLNAKEAKDSRTFGPVQMTDIVGRVIYCLRSAVDHGRVQNSDFGMRNDTPVLEVELDVDEMAKSHKA

SEQ ID NO: 6886 - protein, 204 aa, Glycine max
  misc_feature (1)..(204): Ceres Seq. ID no. 15168559
MVSLPTWFRYFHHKVGYSVSLAVKNNKGDPITAREINDAVWKNFFLGKLTYLLWNKGEEMAPTIDGKAVTLVRKLPAVDPTSVFVGDVVVMKDPEKPDNYLLRRLTAIEGYEVVSTDEKDEPFILEKDQCWVEAENEKLNAKEAKDSRTFGPVQMTDIVGRVIYCLRSAVDHGRVQNSDFGMRNDTPVLEVELDVDEMAKSHKA

SEQ ID NO: 6887 - protein, 145 aa, Glycine max
  misc_feature (1)..(145): Ceres Seq. ID no. 15168560
MAPTIDGKAVTLVRKLPAVDPTSVFVGDVVVMKDPEKPDNYLLRRLTAIEGYEVVSTDEKDEPFILEKDQCWVEAENEKLNAKEAKDSRTFGPVQMTDIVGRVIYCLRSAVDHGRVQNSDFGMRNDTPVLEVELDVDEMAKSHKA

SEQ ID NO: 6888 - DNA, 1278 bp, Glycine max
  misc_feature (1)..(1278): Ceres Seq. ID no. 15168580
aattacgaaaacccctcttccaattctgaattagcctctctaatccttcgcagcgccagaaaacttcaaactacagtcaacgtttcaaaatccgcttctctgttcatcttctccccacccctgcctaaccgactataattttttcataacccgcttctgaatggaagtcaatcccacccacgacggtggcgatgacacctcggaaacgccactgccgccaatggtggacccatctccgtctccgtctccgcaaatgaaagaagaggtgatggacgcggagcaaggcggtgacgtatcgcttccaatgagcgttgttccggcgtcgttgacagtgtcaactgaggcagcggcgaaacgatcgtcgaaggaccggcacacgaaggtggagggacgcggccggagaatccgtatgccggcgacgtgcgcggcgaggatctttcagctgacgcgggaactgggacacaagtccgacggagaaacaatccggtggttgctggagcacgcagagccggcgatcatcgaggccaccggaaccggcaccataccggcgatcgcggtctcggtcggcggcacactcaagattccgacatcctcggaagcgagagcccagggagaagaagacactccgaaaaagcgaaggagaagagcattaaagagcgaattcatcaacctgaacgaaaaccaggtttcggtgtcttcagggctggcaccaatcgcacaaagcagcgcatatggaagtggtggtggtggacttgttcctctgtggcatggtaacggtgctgctgctgggcctttcttcgtgtttccgaacgcttcaaacccacctcagtattgggccattccggcaaccgcggccccgtttttcaacgtccaggcccggcccatttcggggttcgtttccgccttgcagatgcaacatgataaccaccaccactctttaataaacgctgctgcctcgggttctgttaaatcttcgtccactgtgagtgtcactagcagtgctgcttccactcaaatgctcaaggatttctccttcgaaatttatgacaagaaagagcttcaatttttaggtcaaccaccacaaccctcttcatagccttgaactttaatacaatattcaaatactagtgtctattttttgttttttcaattttagttttagacatgtttgtttgtaatagttaggaggatttagggacaaattatattgtattttaattgaaaccttttaatttaagctgttgatattttttttaaagtaaaattgtatttttgacc

SEQ ID NO: 6889 - protein, 311 aa, Glycine max
  misc_feature (1)..(311): Ceres Seq. ID no. 15168581
MEVNPTHDGGDDTSETPLPPMVDPSPSPSPQMKEEVMDAEQGGDVSLPMSVVPASLTVSTEAAAKRSSKDRHTKVEGRGRRIRMPATCAARIFQLTRELGHKSDGETIRWLLEHAEPAIIEATGTGTIPAIAVSVGGTLKIPTSSEARAQGEEDTPKKRRRRALKSEFINLNENQVSVSSGLAPIAQSSAYGSGGGGLVPLWHGNGAAAGPFFVFPNASNPPQYWAIPATAAPFFNVQARPISGFVSALQMQHDNHHHSLINAAASGSVKSSSTVSVTSSAASTQMLKDFSFEIYDKKELQFLGQPPQPSS

SEQ ID NO: 6890 - protein, 291 aa, Glycine max
  misc_feature (1)..(291): Ceres Seq. ID no. 15168582
MVDPSPSPSPQMKEEVMDAEQGGDVSLPMSVVPASLTVSTEAAAKRSSKDRHTKVEGRGRRIRMPATCAARIFQLTRELGHKSDGETIRWLLEHAEPAIIEATGTGTIPAIAVSVGGTLKIPTSSEARAQGEEDTPKKRRRRALKSEFINLNENQVSVSSGLAPIAQSSAYGSGGGGLVPLWHGNGAAAGPFFVFPNASNPPQYWAIPATAAPFFNVQARPISGFVSALQMQHDNHHHSLINAAASGSVKSSSTVSVTSSAASTQMLKDFSFEIYDKKELQFLGQPPQPSS

SEQ ID NO: 6891 - protein, 280 aa, Glycine max
  misc_feature (1)..(280): Ceres Seq. ID no. 15168583
MKEEVMDAEQGGDVSLPMSVVPASLTVSTEAAAKRSSKDRHTKVEGRGRRIRMPATCAARIFQLTRELGHKSDGETIRWLLEHAEPAIIEATGTGTIPAIAVSVGGTLKIPTSSEARAQGEEDTPKKRRRRALKSEFINLNENQVSVSSGLAPIAQSSAYGSGGGGLVPLWHGNGAAAGPFFVFPNASNPPQYWAIPATAAPFFNVQARPISGFVSALQMQHDNHHHSLINAAASGSVKSSSTVSVTSSAASTQMLKDFSFEIYDKKELQFLGQPPQPSS

SEQ ID NO: 6892 - DNA, 1026 bp, Glycine max
  misc_feature (1)..(1026): Ceres Seq. ID no. 15168588
acacaagacactcaaattacatggtcatagtgtacacctagttaggcaaacacaccaaacaccaaacaccaaactagttggctcaattctctttgaatggctttggaggctttgaattcaccaacagcagccaccactccgttccgtggctaccaagaagaggaggaggacgaggaggctgaccttcacttacgtgagccttgggctaaaaggaaacgctccaaacgaccgcgttttgagacggaggaagagtacctcgctctttgcctcatcatgctcgcacaaagcggtaacaccagaaacatccacaacaacaacacccaattaccgtcttcttcactgtcagacaaagaagcgtcgccgccggtgaaactaacacacaggtgcaccgtttgcaacaaggcctttggttcttatcaagcactcggtggacacaaggccagccaccgcaaggcctcgtcggaatccaaccccaccgcctccgtctctgccctagccaacgacagcgtttctgcttccaccgtcggcggcggaaggatgcacgagtgttccatctgtcacaagagtttccctaccggtcaggccctgggtggccacaagcgctgccactacgacggcgggaacaaccacagtaacagcaacgccaacggaaacaacagcagcggcgccactacctccgacggcggcgctgcctcctcctcccacacgctccgtgggtttgacctgaaccttccggcgccgctgacggagttctggtcgccgatggggtttgatttcgggaagaagaaggtaggcggtgaacaagaggtggaaagcccgttgccggtaaccgccaagaggccgcgtttgtttacaggggaagatgatgaaaccgcgtagatttgtttgcagaattttattttaaattgattgaaattgaatttgttgctggtatatcgcgaatatgattatgaattcaaaccagttagtttaattttcattttatgtttttttttagtatataggtgggattgggattttgtttct

SEQ ID NO: 6893 - protein, 260 aa, Glycine max
  misc_feature (1)..(260): Ceres Seq. ID no. 15168589
MALEALNSPTAATTPFRGYQEEEEDEEADLHLREPWAKRKRSKRPRFETEEEYLALCLIMLAQSGNTRNIHNNNTQLPSSSLSDKEASPPVKLTHRCTVCNKAFGSYQALGGHKASHRKASSESNPTASVSALANDSVSASTVGGGRMHECSICHKSFPTGQALGGHKRCHYDGGNNHSNSNANGNNSSGATTSDGGAASSSHTLRGFDLNLPAPLTEFWSPMGFDFGKKKVGGEQEVESPLPVTAKRPRLFTGEDDETA

SEQ ID NO: 6894 - protein, 201 aa, Glycine max
  misc_feature (1)..(201): Ceres Seq. ID no. 15168590
MLAQSGNTRNIHNNNTQLPSSSLSDKEASPPVKLTHRCTVCNKAFGSYQALGGHKASHRKASSESNPTASVSALANDSVSASTVGGGRMHECSICHKSFPTGQALGGHKRCHYDGGNNHSNSNANGNNSSGATTSDGGAASSSHTLRGFDLNLPAPLTEFWSPMGFDFGKKKVGGEQEVESPLPVTAKRPRLFTGEDDETA

SEQ ID NO: 6895 - DNA, 949 bp, Glycine max
  misc_feature (1)..(949): Ceres Seq. ID no. 15168856
gtcttgttttgcccgtgacgcacactgttcttgctttccccagatttcaatttccctttagcacctcaaatttcttcccttttcctttctgggtctccatctactgttttttttttgggtcaaatacgaagatgggtgttcatccttagccattgagaatctaatctaagatttggagagaaagatgaaggatttcccagggacaccgggcactgtccttggtttggctctaaggatatcacagttcgtttttgctgctggatcaattgcttccatggctaccactcccagtttctttaactttacagctttttgttacttgatagcttcaatgggtttacaagtcatttggagttttgtgcttgctttattggatgcatatgccttggtgaaaaaaaaggtcctccacaacgccgtactggttagcctctttgtagttggagattgggtaacagcaacactatctctagccgcagcgtcttcctcggctggcatcacggttttgtacttcaatgatctgggacactgccattttggagaggaatgccaaaagtacctgatttcagtagcattagcgttcttgagctggttcccgatttcaatatcatccctaattatgctctggctattagctgcagggtagcagtctctacattccgcccgagttctctcatctatcacatgttcatcttattggaaaagttcttagaaagtgtcaataggaaaggaagtagagtagaggtttacacatttaaatcgattccttcatttctaccagaaatgggacagtagcagattgtaaaaagtaaaaatatatacatgattttgccttgcaaagaaattaggctaccgaactgttatcctgatttcctgatcctgtgactagaaggtcaaaactttatgtttacagggaattgggttgctaatgcatgtttgcttgtttacaatt

SEQ ID NO: 6896 - protein, 152 aa, Glycine max
  misc_feature (1)..(152): Ceres Seq. ID no. 15168857
MKDFPGTPGTVLGLALRISQFVFAAGSIASMATTPSFFNFTAFCYLIASMGLQVIWSFVLALLDAYALVKKKVLHNAVLVSLFVVGDWVTATLSLAAASSSAGITVLYFNDLGHCHFGEECQKYLISVALAFLSWFPISISSLIMLWLLAAG

SEQ ID NO: 6897 - protein, 122 aa, Glycine max
  misc_feature (1)..(122): Ceres Seq. ID no. 15168858
MATTPSFFNFTAFCYLIASMGLQVIWSFVLALLDAYALVKKKVLHNAVLVSLFVVGDWVTATLSLAAASSSAGITVLYFNDLGHCHFGEECQKYLISVALAFLSWFPISISSLIMLWLLAAG

SEQ ID NO: 6898 - protein, 103 aa, Glycine max
  misc_feature (1)..(103): Ceres Seq. ID no. 15168859
MGLQVIWSFVLALLDAYALVKKKVLHNAVLVSLFVVGDWVTATLSLAAASSSAGITVLYFNDLGHCHFGEECQKYLISVALAFLSWFPISISSLIMLWLLAAG

SEQ ID NO: 6899 - DNA, 1016 bp, Glycine max
  misc_feature (1)..(1016): Ceres Seq. ID no. 15168868
aacacttgttgttgttagggttttcataattcctgaaacaggggaaggaaatggcctcacaacaacacatcgagaagatgcagctccgccagaacttccgcaatctctggcactctgatcttttgagtacaattcaagctgacaccccttattgttgcttttctctgtggtgtgcaccgtgtgtatcatatctactccgcaaacgagctctttacgatgatatgtcaagatacacatgttgtgctggttacatgccctgcagtggtcggtgtggagaaagtaaatgtcctgaactctgccttggtgcggaggttgtctgctgttttggaaattcagtggcctcaactcgatttctgttacaagatgaatttaatattcaaactacgcaatgtgataattgcattattgctttcatgtttgtccttcaacaacttgcctgcatattttctattattgctttaattgtgggaaatagtgaaattcgacaggcttctcaattgctatcttgtttggctgactttgtctactgcacggtgtgtgcttgcatgcagactcagcataagattgaaatggacaaacgcgatgggaaatttggaccccaatcagtaatgggtgttccccctgttcaacaaatgtcacgctttgatcaggcagtccccccttttgttgggtattgaccacaaccagcatatggacagggctatggttattcacatgcctaagacccttctcatcctcccaactagcctgcccatcatcatcatcatcatcatcatcatccaccagcatatagctacttttggtgatttttttcataagaatgctttaggttgggttgcatttccatcaagtcatacatgtgtggtaaaattagtcagattgattatcaagttgcgtttcccttatacaagacaaacatattataccttgtctagttttatgtatactttgatgtcatattgtcattagactcattactgttcagcccgtggctatatttactttttttcttatgc

SEQ ID NO: 6900 - protein, 208 aa, Glycine max
  misc_feature (1)..(208): Ceres Seq. ID no. 15168869
MASQQHIEKMQLRQNFRNLWHSDLLSTIQADTPYCCFSLWCAPCVSYLLRKRALYDDMSRYTCCAGYMPCSGRCGESKCPELCLGAEVVCCFGNSVASTRFLLQDEFNIQTTQCDNCIIAFMFVLQQLACIFSIIALIVGNSEIRQASQLLSCLADFVYCTVCACMQTQHKIEMDKRDGKFGPQSVMGVPPVQQMSRFDQAVPPFVGY

SEQ ID NO: 6901 - protein, 199 aa, Glycine max
  misc_feature (1)..(199): Ceres Seq. ID no. 15168870
MQLRQNFRNLWHSDLLSTIQADTPYCCFSLWCAPCVSYLLRKRALYDDMSRYTCCAGYMPCSGRCGESKCPELCLGAEVVCCFGNSVASTRFLLQDEFNIQTTQCDNCIIAFMFVLQQLACIFSIIALIVGNSEIRQASQLLSCLADFVYCTVCACMQTQHKIEMDKRDGKFGPQSVMGVPPVQQMSRFDQAVPPFVGY

SEQ ID NO: 6902 - protein, 151 aa, Glycine max
  misc_feature (1)..(151): Ceres Seq. ID no. 15168871
MSRYTCCAGYMPCSGRCGESKCPELCLGAEVVCCFGNSVASTRFLLQDEFNIQTTQCDNCIIAFMFVLQQLACIFSIIALIVGNSEIRQASQLLSCLADFVYCTVCACMQTQHKIEMDKRDGKFGPQSVMGVPPVQQMSRFDQAVPPFVGY

SEQ ID NO: 6903 - DNA, 1508 bp, Glycine max
  misc_feature (1)..(1508): Ceres Seq. ID no. 15169013
gtaacaaaatatcccaaactctcactcgtcgacggccaccggatcgacctcaattcgccgtcgtccaatcgctctcagttccaccgcctccgccgccggcatccaattcagtttggccttgcatctctctcaggtattaagattctactaaaaaaaaggttgatcagcgtaaagatggagctcactattacacagcctgatgattggcatcttcacctccgtgatggttcccttcttgaagctgtcctccctcacagtgcgaagcattttggaagggccatagtaatgccaaatttgaaaccacccatcactaccacgtctgctgctgtcgcttatcgagagtccattttgaaagcaatacctaaagatagcaacttcactcctctcatgtcactttacctcacagacgtgactacccctgatgagattaaacttgcaaaaaaaagtggacttgtttatggtgtgaagttgtatcctgctggtgctacaacaaactcccaagatggtgttacagatctttttggaaattgtttttctgttcttgaggaaatggctgagcaaaatttaccattattggttcacggagaggttacagattcaaacgttgatatttttgaccgagaaaaagtctttattgaaacaattttaatgcctttaattcaaagacttccacagctgaaggttgtgatggagcatatcactactgcagatgctgttaaatttgtagagtcttgcaaagaaggttatgtagcagcaactgttacaccacagcatcttcttctgaatcgtaatgctttgttccaaggtggcttacagcctcacaattactgtcttccagtgctcaaaagagagatccatagacaggctattgtttcggctgtcactagtggaagtaaacgatttttccttggaactgatagtgctccacatgataggcgtaaaaaggaatgttcctgtggatgtgctggcatatacaactcaccggttgctctatcactatatgccaaagtttttgaagaggctggtgcacttgataagctagaggcttttacaagctttaacggacctgacttctatggcctccccagaaacaagtcaaagattaaactgaggaaagctccttggaaagtacctgattatttgtcatttccatttggagacatcgttcccatgtttgctggtgaaacccttgaatgggaggcattgccttgttgatttgctgtgtctatttgaaagtttggtatccttcagcttaaattattgattgctgagatgagaatttatgcagcgttcaagaactagagtcaagcaattttgttctaattttatcagtcagttctgcatttattttgcagattgttctcatttctatttcctaggtcaggtgaatttaagtatgaaccagaacacccactgtgactaataaattatgggaatttatatagtattcagagctatggtaattttgtagttctaatcagatcaatcaactaggcagagtttttcag

SEQ ID NO: 6904 - protein, 404 aa, Glycine max
  misc_feature (1)..(404): Ceres Seq. ID no. 15169014
VTKYPKLSLVDGHRIDLNSPSSNRSQFHRLRRRHPIQFGLASLSGIKILLKKRLISVKMELTITQPDDWHLHLRDGSLLEAVLPHSAKHFGRAIVMPNLKPPITTTSAAVAYRESILKAIPKDSNFTPLMSLYLTDVTTPDEIKLAKKSGLVYGVKLYPAGATTNSQDGVTDLFGNCFSVLEEMAEQNLPLLVHGEVTDSNVDIFDREKVFIETILMPLIQRLPQLKVVMEHITTADAVKFVESCKEGYVAATVTPQHLLLNRNALFQGGLQPHNYCLPVLKREIHRQAIVSAVTSGSKRFFLGTDSAPHDRRKKECSCGCAGIYNSPVALSLYAKVFEEAGALDKLEAFTSFNGPDFYGLPRNKSKIKLRKAPWKVPDYLSFPFGDIVPMFAGETLEWEALPC

SEQ ID NO: 6905 - protein, 346 aa, Glycine max
  misc_feature (1)..(346): Ceres Seq. ID no. 15169015
MELTITQPDDWHLHLRDGSLLEAVLPHSAKHFGRAIVMPNLKPPITTTSAAVAYRESILKAIPKDSNFTPLMSLYLTDVTTPDEIKLAKKSGLVYGVKLYPAGATTNSQDGVTDLFGNCFSVLEEMAEQNLPLLVHGEVTDSNVDIFDREKVFIETILMPLIQRLPQLKVVMEHITTADAVKFVESCKEGYVAATVTPQHLLLNRNALFQGGLQPHNYCLPVLKREIHRQAIVSAVTSGSKRFFLGTDSAPHDRRKKECSCGCAGIYNSPVALSLYAKVFEEAGALDKLEAFTSFNGPDFYGLPRNKSKIKLRKAPWKVPDYLSFPFGDIVPMFAGETLEWEALPC

SEQ ID NO: 6906 - protein, 309 aa, Glycine max
  misc_feature (1)..(309): Ceres Seq. ID no. 15169016
MPNLKPPITTTSAAVAYRESILKAIPKDSNFTPLMSLYLTDVTTPDEIKLAKKSGLVYGVKLYPAGATTNSQDGVTDLFGNCFSVLEEMAEQNLPLLVHGEVTDSNVDIFDREKVFIETILMPLIQRLPQLKVVMEHITTADAVKFVESCKEGYVAATVTPQHLLLNRNALFQGGLQPHNYCLPVLKREIHRQAIVSAVTSGSKRFFLGTDSAPHDRRKKECSCGCAGIYNSPVALSLYAKVFEEAGALDKLEAFTSFNGPDFYGLPRNKSKIKLRKAPWKVPDYLSFPFGDIVPMFAGETLEWEALPC

SEQ ID NO: 6907 - DNA, 1950 bp, Glycine max
  misc_feature (1)..(1950): Ceres Seq. ID no. 15169037
aaaaaaagttgaaaaccctcacacagaaagagtggtttgtgcggtggtgaagaagcgttcggaatagaagaagaagatgtcgtcggtttacgttctagagcctccgacgaaggggaaggtggtggtgaacactacgcgcggtcctttggacattgagctgtggccgaaagaggctccgaaggccgcgaggaacttcgttcagctctgcctcgaaaactattacggcaacaccatcttccaccgcatcatcaaggacttcctcgtccaaagcggcgaccccaccggcaccggcaccggtggtgaaagcatttatggtggtgtttttgctgatgagtttcattcacgtctgaaattcaagcacagaggaatagttgcaatggccaatgccggaactctgaattccaatggaagtcagtttttcatcactctcgaccgctgtgattggcttgatcgcaagcataccatttttggaaaagtgacgggagatacaatgtataatcttttgaggctgggtgaacttgaaactgataagaatgaccggcctttagatccgccgaagatattatcagttgaggtgttatggaatccatttgaagatattgttccaagaacacttcaaaaacttcagattgaagctaaagctgatacaaaaaataaagaatcagggaaaaaaggcgtaaaaaaattgaacttgctttcatttggggaagaagctgaagaagaggaaaaggaattggcatcggtgaagcaaaagattaagagcagtcacgatgtcttgaacgatcctcgtcttctaaaggaagatactcttaataatgaactgagttcatcaagaagagatatgcaattatctgtaagggatgcacttaactcaaagaaagacgagcctcagaaagattcagatgctggtagcacggcatgtcttgatttcagtgatgatgatgaagcagattttgatgcaagaatgcgcatgcaaatactcaaaaagaggaaggagttgggtgatctccctcccaagccaaagttgcgaaatgcaggaaggtccagtccagagaaccatgatacgtcgtctgcagccaggtccaatgctgtaagtgttgatgaggatcaaccaaaggtggaaaaattgtccttgaagaaaaagggagttggatctgaagcaagagctgaacgaatgtctaatgcagatgcagatttgcaactattgaatcaagctgagagaggaagacaattgcagaagcagaagaaacgcagacttcaagggcgtgaagatgaagttctggctaaacttgaaaaatttaagaattctttatcagcaaaggcgacacccccaactgatgaatctgaagacgttagtaatgaggaattgtcagactggaaaggtgttagtttaaagtttgccccacagactggcaaggaccgcatgtctcgcaatgaagacccaaacgactatgttgtgcatgaccctcttctggagaaggggaaagagaagttcaataggatgatagccaaacaaaagagacgagaacgagagtgggctgggagttcccttacttgaccttacatgtgccaacatggctgtgtaaatatacaaagctgattggttttcaaggctagcacatcactgtgctgctgggaaagtaaacttgccctaataggaacccaggagaaaaatgttgcatggaggagtttagcaaacatggttggcaagtacattgatattggtgagtgagatgtggggttactcatgaaaggacctactttgaattgttcgtatttttggtccaatgtcaaaagatgtattgtgtagattttaacacaccaagttgttgtgttttatatatttaggattcaagagaatattgtattattgtggaactaacgatttcggcagatgaagtcgttactcagaattatgctagttgagatgggttttacgttgcactattt

SEQ ID NO: 6908 - protein, 493 aa, Glycine max
  misc_feature (1)..(493): Ceres Seq. ID no. 15169038
MSSVYVLEPPTKGKVVVNTTRGPLDIELWPKEAPKAARNFVQLCLENYYGNTIFHRIIKDFLVQSGDPTGTGTGGESIYGGVFADEFHSRLKFKHRGIVAMANAGTLNSNGSQFFITLDRCDWLDRKHTIFGKVTGDTMYNLLRLGELETDKNDRPLDPPKILSVEVLWNPFEDIVPRTLQKLQIEAKADTKNKESGKKGVKKLNLLSFGEEAEEEEKELASVKQKIKSSHDVLNDPRLLKEDTLNNELSSSRRDMQLSVRDALNSKKDEPQKDSDAGSTACLDFSDDDEADFDARMRMQILKKRKELGDLPPKPKLRNAGRSSPENHDTSSAARSNAVSVDEDQPKVEKLSLKKKGVGSEARAERMSNADADLQLLNQAERGRQLQKQKKRRLQGREDEVLAKLEKFKNSLSAKATPPTDESEDVSNEELSDWKGVSLKFAPQTGKDRMSRNEDPNDYVVHDPLLEKGKEKFNRMIAKQKRREREWAGSSLT

SEQ ID NO: 6909 - protein, 393 aa, Glycine max
  misc_feature (1)..(393): Ceres Seq. ID no. 15169039
MANAGTLNSNGSQFFITLDRCDWLDRKHTIFGKVTGDTMYNLLRLGELETDKNDRPLDPPKILSVEVLWNPFEDIVPRTLQKLQIEAKADTKNKESGKKGVKKLNLLSFGEEAEEEEKELASVKQKIKSSHDVLNDPRLLKEDTLNNELSSSRRDMQLSVRDALNSKKDEPQKDSDAGSTACLDFSDDDEADFDARMRMQILKKRKELGDLPPKPKLRNAGRSSPENHDTSSAARSNAVSVDEDQPKVEKLSLKKKGVGSEARAERMSNADADLQLLNQAERGRQLQKQKKRRLQGREDEVLAKLEKFKNSLSAKATPPTDESEDVSNEELSDWKGVSLKFAPQTGKDRMSRNEDPNDYVVHDPLLEKGKEKFNRMIAKQKRREREWAGSSLT

SEQ ID NO: 6910 - protein, 355 aa, Glycine max
  misc_feature (1)..(355): Ceres Seq. ID no. 15169040
MYNLLRLGELETDKNDRPLDPPKILSVEVLWNPFEDIVPRTLQKLQIEAKADTKNKESGKKGVKKLNLLSFGEEAEEEEKELASVKQKIKSSHDVLNDPRLLKEDTLNNELSSSRRDMQLSVRDALNSKKDEPQKDSDAGSTACLDFSDDDEADFDARMRMQILKKRKELGDLPPKPKLRNAGRSSPENHDTSSAARSNAVSVDEDQPKVEKLSLKKKGVGSEARAERMSNADADLQLLNQAERGRQLQKQKKRRLQGREDEVLAKLEKFKNSLSAKATPPTDESEDVSNEELSDWKGVSLKFAPQTGKDRMSRNEDPNDYVVHDPLLEKGKEKFNRMIAKQKRREREWAGSSLT

SEQ ID NO: 6911 - DNA, 1349 bp, Glycine max
  misc_feature (1)..(1349): Ceres Seq. ID no. 15169041
ttgtttaggagacggatactttttgaagagctatttgaccgaaaatttgtggatgctgtgttaaatgagtggcaaaagactatgatggatttgcctgctgggcttcggcaagcttatgaaatggggttggttagctcagctcaaatggtaaaatttcttgcaatcaatgccaggccaaccaccagtaggtttatttcccgaactctgcctcaagcactatcaaggtctttcattggcaggttgcttgcagatcctgcattcttatataggtttctattggaggaggctgcaacagtaggttgctcattgtggtgggagataaaaactcggaaagacaggataaagcaggagtgggatcttgcactcatgaacgtgatgacagcagcagcatgcaatgcactagtcgtgtggtcccttgctccttgtcgatcatatgggaacacttttcggtttgacttacaaaatacattgcagaagcttccaaacaatatatttgaaaagagctatccacttcgggaatttgacttgcaaaagagaattcaatgctttttgttcaaggctgctgagttgtgcatggttggtttgagtgctggtgcagtacagggtgcgttgtcaaactctttggctagtaaaaaggaggggagattatctgtgacagtcccaagtgtgagcagtaatgctcttggttatggtgcttttcttggaatttatgctaacctgagatatcaactgttatgtgggtttgatagagcaatgatgacccattttgacgtcattggagttgccttgttcttcagcacagcattcagggtcttgaacgttcaattaggagagacctctaagcgtgcctggcttggagttgaggcagatccactggctcagtcggatgacctcttgaaagtttataacaggacttctgagaatgtagaaaagtcatcctcaaaatggtttatatcaaagaatgcggttgtttctgggcttggactcctaggcatcaaacaaaggaatgcagacgggtctggttcagaatcttcagctcctaaatctcgccggaaaaggattgttcggaagaaggttgcagcgggttctgcttagtatcttctgatgtaaacgtggtcatagtccaattttgccgtttgcttcttctggagggtcatttgtggtttactggctgcttcaccaagtccggggggtaattagtggaccaagatttttcatcacattgagggttttgtttttaaattttgttaggaattcttatattgatccttttgtgttttgctatctgattctgtactagtatatattttgaatcttttaaataaagtagagcaagtattttttttttc

SEQ ID NO: 6912 - protein, 364 aa, Glycine max
  misc_feature (1)..(364): Ceres Seq. ID no. 15169042
LFRRRILFEELFDRKFVDAVLNEWQKTMMDLPAGLRQAYEMGLVSSAQMVKFLAINARPTTSRFISRTLPQALSRSFIGRLLADPAFLYRFLLEEAATVGCSLWWEIKTRKDRIKQEWDLALMNVMTAAACNALVVWSLAPCRSYGNTFRFDLQNTLQKLPNNIFEKSYPLREFDLQKRIQCFLFKAAELCMVGLSAGAVQGALSNSLASKKEGRLSVTVPSVSSNALGYGAFLGIYANLRYQLLCGFDRAMMTHFDVIGVALFFSTAFRVLNVQLGETSKRAWLGVEADPLAQSDDLLKVYNRTSENVEKSSSKWFISKNAVVSGLGLLGIKQRNADGSGSESSAPKSRRKRIVRKKVAAGSA

SEQ ID NO: 6913 - protein, 337 aa, Glycine max
  misc_feature (1)..(337): Ceres Seq. ID no. 15169043
MMDLPAGLRQAYEMGLVSSAQMVKFLAINARPTTSRFISRTLPQALSRSFIGRLLADPAFLYRFLLEEAATVGCSLWWEIKTRKDRIKQEWDLALMNVMTAAACNALVVWSLAPCRSYGNTFRFDLQNTLQKLPNNIFEKSYPLREFDLQKRIQCFLFKAAELCMVGLSAGAVQGALSNSLASKKEGRLSVTVPSVSSNALGYGAFLGIYANLRYQLLCGFDRAMMTHFDVIGVALFFSTAFRVLNVQLGETSKRAWLGVEADPLAQSDDLLKVYNRTSENVEKSSSKWFISKNAVVSGLGLLGIKQRNADGSGSESSAPKSRRKRIVRKKVAAGSA

SEQ ID NO: 6914 - protein, 336 aa, Glycine max
  misc_feature (1)..(336): Ceres Seq. ID no. 15169044
MDLPAGLRQAYEMGLVSSAQMVKFLAINARPTTSRFISRTLPQALSRSFIGRLLADPAFLYRFLLEEAATVGCSLWWEIKTRKDRIKQEWDLALMNVMTAAACNALVVWSLAPCRSYGNTFRFDLQNTLQKLPNNIFEKSYPLREFDLQKRIQCFLFKAAELCMVGLSAGAVQGALSNSLASKKEGRLSVTVPSVSSNALGYGAFLGIYANLRYQLLCGFDRAMMTHFDVIGVALFFSTAFRVLNVQLGETSKRAWLGVEADPLAQSDDLLKVYNRTSENVEKSSSKWFISKNAVVSGLGLLGIKQRNADGSGSESSAPKSRRKRIVRKKVAAGSA

SEQ ID NO: 6915 - DNA, 1522 bp, Glycine max
  misc_feature (1)..(1522): Ceres Seq. ID no. 15169061
atagagaaccaaaacgcgacgcaattgcactttttcttcttctttcgcagctcagaatcgctcaaacaatgacagaggatagcagcgttagggtttcttcttccgacaaaacctccgcggccaacgatgcttcgcagacgcggcagagaaagaagagaaagtgggatcaaccggcggagtcattgatgccagttgggatggcagttcctggagcactccctttgagcaatgccgtgtctcttggaggggttgcatttcctgccatggctccgatgatctccggagctcttttgaggaatcctctggcagcttcttctcagcttccgcaacacacagttgcagctgctgttgccgcacaaaaattgaatcaacaaaagatccaagatgaattaataattgctcgagaaattgtcataaatgatgcagagtcttctgttcgctacaagttgacaaaacgccagacacaagaggagatccagaggtgcactggtgccatagttataactagggggaagtatcggctacctaatgcgccacatgatggagggaagccgctgtatcttcacatctctgcaggagctcatataaaagagacagcagaacggattttagctgttgatcgtgctgctgcaatgattgaagaaatgctcaaacaggagcaaaattcacagtcaatttcttccgcctcaccttctgctttggttaatatactgaagatgctgagtacatgcgtgtttttgggctttgatgctgatccttctttgaacattgttgctcgtatacgtggaccaaatgtaagcccttccctacccaattgatttatctagtcactcttggaggttgggttcatctatgacctgatgtggtttagtctgccacattttattagacaattgccacagtctagaagttttttttggtctcttttgattgtgatgtgaccccttggtcatctgctgtttttgttttcatactattctagtctttcactcactaggattacctgtgtctttgttctcaacttatgatttgatggtgcgaaaatacttgggtgttactaggagtactgattttccaagagttgattaagcaataaaagggaggactggggagactggaagagtgttgttacagtttatggttacatgagaaatactaggaacacactcttttaaacacaccctcttttatttgttgaaatttattgaaaatgactaaattttgtgtgtctcacatcatatttaatgattctctctcttgattttgtagtttcaataatttttaaccaattagagagtgtgtttctagcacttctcatgtttacatatggcattgtaatacttgttaggtgctgaaagtgatattcagatggatggaattggaaaatggttcttctgatgacttttgaagcacattttgtatgtgaatactttaatccaagagactggggtgaaagtatgtccacacatacactcaatcacaagtcacaagaacaaatgatgcttatcaaatatttctttac

SEQ ID NO: 6916 - protein, 271 aa, Glycine max
  misc_feature (1)..(271): Ceres Seq. ID no. 15169062
REPKRDAIALFLLLSQLRIAQTMTEDSSVRVSSSDKTSAANDASQTRQRKKRKWDQPAESLMPVGMAVPGALPLSNAVSLGGVAFPAMAPMISGALLRNPLAASSQLPQHTVAAAVAAQKLNQQKIQDELIIAREIVINDAESSVRYKLTKRQTQEEIQRCTGAIVITRGKYRLPNAPHDGGKPLYLHISAGAHIKETAERILAVDRAAAMIEEMLKQEQNSQSISSASPSALVNILKMLSTCVFLGFDADPSLNIVARIRGPNVSPSLPN

SEQ ID NO: 6917 - protein, 249 aa, Glycine max
  misc_feature (1)..(249): Ceres Seq. ID no. 15169063
MTEDSSVRVSSSDKTSAANDASQTRQRKKRKWDQPAESLMPVGMAVPGALPLSNAVSLGGVAFPAMAPMISGALLRNPLAASSQLPQHTVAAAVAAQKLNQQKIQDELIIAREIVINDAESSVRYKLTKRQTQEEIQRCTGAIVITRGKYRLPNAPHDGGKPLYLHISAGAHIKETAERILAVDRAAAMIEEMLKQEQNSQSISSASPSALVNILKMLSTCVFLGFDADPSLNIVARIRGPNVSPSLPN

SEQ ID NO: 6918 - protein, 210 aa, Glycine max
  misc_feature (1)..(210): Ceres Seq. ID no. 15169064
MPVGMAVPGALPLSNAVSLGGVAFPAMAPMISGALLRNPLAASSQLPQHTVAAAVAAQKLNQQKIQDELIIAREIVINDAESSVRYKLTKRQTQEEIQRCTGAIVITRGKYRLPNAPHDGGKPLYLHISAGAHIKETAERILAVDRAAAMIEEMLKQEQNSQSISSASPSALVNILKMLSTCVFLGFDADPSLNIVARIRGPNVSPSLPN

SEQ ID NO: 6919 - DNA, 1339 bp, Glycine max
  misc_feature (1)..(1339): Ceres Seq. ID no. 15169142
aattttcatgtatgttagcaattaattttgattaatttatatcttgaattaattaattaatgttcactcattctggtcaatacagttagttaggtaattgtaaaacaatcatagaacatatcttttccatttttatctcatgaaaaatgagttaaaaataagattatatgaaatggaacatgtgcaaggttatgtttgtctaaaatgtctgaggatagaacaacattaactcaactggttgaatttctggtggtctcttcatttgtaagtagtgttatcttgtggcaacttgcctcttctgacgataaagttttatagtcttgagggttatagatgtcacaaatagctttcaataacctaaagtaaacatatgccatgtatgcagaattccaaaaacaattggtgtctcaattccaatgaaggcaactttcttcataacttacataatggtggatgggtgggctggatgtgctggtgagattttaaggttgaagccattgatattttatcacttgaaaaacttcttcttagtgaagactgaaaaggaccgtgaagaagcaatggatccagggacatttggtttcaatacaggcgaacctcaaatacaactgtatttcttacttggccttgtgtatgctgtagtcacaccatttctacttccatacatcatagtgttctttggcttggcatatgtcgtctaccgtcatcagattattaatgtctacaaccaagagtatgagagtgctgcagcattctggcctgatgtccatggacgtattatatttgcgttagtgatctcacagctgctgttaatggggttattgagtacaaaagaagctgctaactcaactccattgctcattactctcccaattctgacaatatcattccatctgtattgcaagggacgatatgaacctgctttcgttaagcatccattacaggaagcaatgatgaaggacacattggagcgtgcaagagagccaaacttcaatttgaaagagttccttcagaatgcatatatccatccggtgtttaagggtgatgatgacagtgacagtgatgtaatgagcgaaaactgggaggagcaagaacctgtacttgtacaaacaaagcgccagtcccggaaaaacacaccattgcctagcaaacatagcggttcattatcatcttgaatgccacttcttatgagcataaaactagagcaatagatagtttgaagttcactattggtggcactgctgcatgatatacccaaactctactctcttttttttctgtatataaatcagaatctagataatctttcaatgaagtatataacagaagtatgcaggtc

SEQ ID NO: 6920 - protein, 252 aa, Glycine max
  misc_feature (1)..(252): Ceres Seq. ID no. 15169143
MKATFFITYIMVDGWAGCAGEILRLKPLIFYHLKNFFLVKTEKDREEAMDPGTFGFNTGEPQIQLYFLLGLVYAVVTPFLLPYIIVFFGLAYVVYRHQIINVYNQEYESAAAFWPDVHGRIIFALVISQLLLMGLLSTKEAANSTPLLITLPILTISFHLYCKGRYEPAFVKHPLQEAMMKDTLERAREPNFNLKEFLQNAYIHPVFKGDDDSDSDVMSENWEEQEPVLVQTKRQSRKNTPLPSKHSGSLSS

SEQ ID NO: 6921 - protein, 242 aa, Glycine max
  misc_feature (1)..(242): Ceres Seq. ID no. 15169144
MVDGWAGCAGEILRLKPLIFYHLKNFFLVKTEKDREEAMDPGTFGFNTGEPQIQLYFLLGLVYAVVTPFLLPYIIVFFGLAYVVYRHQIINVYNQEYESAAAFWPDVHGRIIFALVISQLLLMGLLSTKEAANSTPLLITLPILTISFHLYCKGRYEPAFVKHPLQEAMMKDTLERAREPNFNLKEFLQNAYIHPVFKGDDDSDSDVMSENWEEQEPVLVQTKRQSRKNTPLPSKHSGSLSS

SEQ ID NO: 6922 - protein, 204 aa, Glycine max
  misc_feature (1)..(204): Ceres Seq. ID no. 15169145
MDPGTFGFNTGEPQIQLYFLLGLVYAVVTPFLLPYIIVFFGLAYVVYRHQIINVYNQEYESAAAFWPDVHGRIIFALVISQLLLMGLLSTKEAANSTPLLITLPILTISFHLYCKGRYEPAFVKHPLQEAMMKDTLERAREPNFNLKEFLQNAYIHPVFKGDDDSDSDVMSENWEEQEPVLVQTKRQSRKNTPLPSKHSGSLSS

SEQ ID NO: 6923 - DNA, 1704 bp, Glycine max
  misc_feature (1)..(1704): Ceres Seq. ID no. 15169180
aactccctactaccagtattacccttctctctctctccctctttctctgttgggtcactcacattattaaaaataaccaccctcacacttcccaacgcttccttaaccatgagccacgccggcctctggcttccgccgcagttcctcgccggagaccctgacacaaccctttcgaactccgatttcagcttcccttccgagttcccctacgagttcggattgtcttctccggagagcagcgacgacggcgaagaggacttcttcgccggcctcagtcgccgactcggtcagacctcgcttcacgaaactcgcaagcaactctcatccactgtttcggagattccaaggaaaactcagggtttggtcggttcccctcagtccacgctcgccggaataggaagctggtccggtcggagcgccgtttccggcgacggaagccccaacgggtactcgcgtgtcccttcgccctcgacgacgccgtttgacgaaaacaacgacccctgggaagtgatttacgcagccgcagttcaaatcgcaaggatgaagatgaacaacaacaacaaccgagttccagcacagtatgattttcacaataatagaaggttactcactcatcattgccctaaccggagtttcaatcaggtcgtgagagcgaagcaacagtgtggttcggattggggaaggccaaccaagcctaataactatttggttcagcagcaacaggttaaggttcagagtagagcgcgtgagtttgggcacgagagtgtgaatgcgaaatgcactcgtccatctgcgtggcccccttcgcaagttcagcagcaaaacaaccgggtacagtttggcggatccgggtctagggttggtggatcttctgtgaaaagggggtgtggtggaactggggtgttcttgcctcgccattatgaaaccccttctgagccacgtcgccagaaaactggttgtgcgcctgttttgttaccagcaaaggtggttcatgctttgaacttgaatattgatgacttgaatgggactacccaaccgcgtttctcgaatgcttttgctacggattatgaagcgattttagcgaggagaaacgcgcttctcatgcaggagcagcagcagcagcagcagaggttaataagtgttcggcgagaagaggcagccaactatgaaattcgccttcctcaagagtggacttactgacaaaagaaggcacaaatttctcctaaggaatttgaagaaatttggaatagtctattttggttgttttgacagaagatgaaattgaagaatgtgtttgggctagtgtttaggttcaaataaaacatctagtttttctagggagaaaaaaaggttgcattgcagcttttgggacctggttttagtggaaggaaatagtgagaggatagtagttttaggcaaggcttctttttcctttttttaccctttttatagtaatattataagttgttgtaataagataggataagcgggtcgttttcatttgccttatggttatggtgatgacactgatggggctaaagcgcaaggtatggtatggttcaacgttggccaagtttcaagtccaagtgttgaaaattggtcgattacccatgtgtgcctttactgaaaatccctgctcattattatggtatatagtttgtaataagttatacttacaatgtaataaaattagctcttctatcg

SEQ ID NO: 6924 - protein, 399 aa, Glycine max
  misc_feature (1)..(399): Ceres Seq. ID no. 15169181
NSLLPVLPFSLSPSFSVGSLTLLKITTLTLPNASLTMSHAGLWLPPQFLAGDPDTTLSNSDFSFPSEFPYEFGLSSPESSDDGEEDFFAGLSRRLGQTSLHETRKQLSSTVSEIPRKTQGLVGSPQSTLAGIGSWSGRSAVSGDGSPNGYSRVPSPSTTPFDENNDPWEVIYAAAVQIARMKMNNNNNRVPAQYDFHNNRRLLTHHCPNRSFNQVVRAKQQCGSDWGRPTKPNNYLVQQQQVKVQSRAREFGHESVNAKCTRPSAWPPSQVQQQNNRVQFGGSGSRVGGSSVKRGCGGTGVFLPRHYETPSEPRRQKTGCAPVLLPAKVVHALNLNIDDLNGTTQPRFSNAFATDYEAILARRNALLMQEQQQQQQRLISVRREEAANYEIRLPQEWTY

SEQ ID NO: 6925 - protein, 363 aa, Glycine max
  misc_feature (1)..(363): Ceres Seq. ID no. 15169182
MSHAGLWLPPQFLAGDPDTTLSNSDFSFPSEFPYEFGLSSPESSDDGEEDFFAGLSRRLGQTSLHETRKQLSSTVSEIPRKTQGLVGSPQSTLAGIGSWSGRSAVSGDGSPNGYSRVPSPSTTPFDENNDPWEVIYAAAVQIARMKMNNNNNRVPAQYDFHNNRRLLTHHCPNRSFNQVVRAKQQCGSDWGRPTKPNNYLVQQQQVKVQSRAREFGHESVNAKCTRPSAWPPSQVQQQNNRVQFGGSGSRVGGSSVKRGCGGTGVFLPRHYETPSEPRRQKTGCAPVLLPAKVVHALNLNIDDLNGTTQPRFSNAFATDYEAILARRNALLMQEQQQQQQRLISVRREEAANYEIRLPQEWTY

SEQ ID NO: 6926 - protein, 219 aa, Glycine max
  misc_feature (1)..(219): Ceres Seq. ID no. 15169183
MKMNNNNNRVPAQYDFHNNRRLLTHHCPNRSFNQVVRAKQQCGSDWGRPTKPNNYLVQQQQVKVQSRAREFGHESVNAKCTRPSAWPPSQVQQQNNRVQFGGSGSRVGGSSVKRGCGGTGVFLPRHYETPSEPRRQKTGCAPVLLPAKVVHALNLNIDDLNGTTQPRFSNAFATDYEAILARRNALLMQEQQQQQQRLISVRREEAANYEIRLPQEWTY

SEQ ID NO: 6927 - DNA, 1363 bp, Glycine max
  misc_feature (1)..(1363): Ceres Seq. ID no. 15169195
tactataaagtataaacccactgcgcgcaccattctccactgtccaaggagatcaagcaccaaacccaacacacacctctctctctctctctctctctcttgtgctgttgttctatttctcattctttcgcaagtgaatgttgaactgactctgcggttcggttcggttttttttttttctgtttatggatccgggcgcgatgatgaacgagggttccttcgcgaacaatgcgagcggtaatacggcgccgtttagcttggcggagatctggcagcagttcccgccggcgattagtggcggcggtggattggggctcagaagcccgcagttcggtcacgggccaggagggcagtttggggatttcaccaccgggccgagccacggactcggacccagtaacagcagaaagcggcgcgactccgaggaggacgattccgctaagggcgtgtccaccagcaatgccgtgaatgagggtgatggaaaacgtgttaaagggaataggaacgagggtggtggtgatggtggtaataataaaggtgaaggtgaagtcagttcaggaaagcctgcggagcaaagcgctaagccagcttcggagcctccgaagcaagactacattcacgttcgagccagaaggggtcaagccactgatagtcacagtcttgcagaacgagctcgaagggaaaagattagtgaaaggatgaaaattcttcaggatttggtccctggttgtaataaggttattgggaaagcattggtccttgatgagataattaattatattcaatctcttcagcgccaagttgagtttttgtcaatgaagcttgaagcagtgaattcaagacttaactctggtattgaagcgtttcctcctaaagattttggtcagcaagcatttgatcctgctggcataccattcggttcgcaagctccaagagagtatagcagaggttcttcaccagactggttacatatgcagataggaggtagttttgaaagaacaacgtagtctacgagatcccttggtaataaatacataaaccagtggtattccattcttcagtagcacccagaaaacatcaatggtatactcagggaagcaagtacaatgggcacctcattcccattttctacactaggcatggagctgtcactgtttttcacaggactgcttcagtttctatttaagcatctccatatgttggtgtgttggaaaatgaattcatttactcaatatatgtagtatagtggacttttaggctttgtattctgctactcaacataacccttaaaatgatcattcttcttgtaaaagaatgctgcttcatcttaatacatgatgcttacagattgtgtaatactctc

SEQ ID NO: 6928 - protein, 273 aa, Glycine max
  misc_feature (1)..(273): Ceres Seq. ID no. 15169196
MDPGAMMNEGSFANNASGNTAPFSLAEIWQQFPPAISGGGGLGLRSPQFGHGPGGQFGDFTTGPSHGLGPSNSRKRRDSEEDDSAKGVSTSNAVNEGDGKRVKGNRNEGGGDGGNNKGEGEVSSGKPAEQSAKPASEPPKQDYIHVRARRGQATDSHSLAERARREKISERMKILQDLVPGCNKVIGKALVLDEIINYIQSLQRQVEFLSMKLEAVNSRLNSGIEAFPPKDFGQQAFDPAGIPFGSQAPREYSRGSSPDWLHMQIGGSFERTT

SEQ ID NO: 6929 - protein, 268 aa, Glycine max
  misc_feature (1)..(268): Ceres Seq. ID no. 15169197
MMNEGSFANNASGNTAPFSLAEIWQQFPPAISGGGGLGLRSPQFGHGPGGQFGDFTTGPSHGLGPSNSRKRRDSEEDDSAKGVSTSNAVNEGDGKRVKGNRNEGGGDGGNNKGEGEVSSGKPAEQSAKPASEPPKQDYIHVRARRGQATDSHSLAERARREKISERMKILQDLVPGCNKVIGKALVLDEIINYIQSLQRQVEFLSMKLEAVNSRLNSGIEAFPPKDFGQQAFDPAGIPFGSQAPREYSRGSSPDWLHMQIGGSFERTT

SEQ ID NO: 6930 - protein, 267 aa, Glycine max
  misc_feature (1)..(267): Ceres Seq. ID no. 15169198
MNEGSFANNASGNTAPFSLAEIWQQFPPAISGGGGLGLRSPQFGHGPGGQFGDFTTGPSHGLGPSNSRKRRDSEEDDSAKGVSTSNAVNEGDGKRVKGNRNEGGGDGGNNKGEGEVSSGKPAEQSAKPASEPPKQDYIHVRARRGQATDSHSLAERARREKISERMKILQDLVPGCNKVIGKALVLDEIINYIQSLQRQVEFLSMKLEAVNSRLNSGIEAFPPKDFGQQAFDPAGIPFGSQAPREYSRGSSPDWLHMQIGGSFERTT

SEQ ID NO: 6931 - DNA, 1396 bp, Glycine max
  misc_feature (1)..(1396): Ceres Seq. ID no. 15169282
aaactgaggcacacagaaaaaatgggttcttcttcttctatgtggacggtgtgtgtgattttggcatcactggcctctgcagcactctgtgccaacccacgcaggccagtggatgtacaatttggccgaaactacgtgcccacatgggcctttgatcacatcaaatatttcaatggtggttctgacattcagcttcatcttgacaagtacactggtgcgtataacttcttcattcctatgtagatggctttagaaatttcatgagtgatatgagtatatgaccaaaatagtgaagactaactctcacgagtcgagttatgttcaaacttaaattctatcattctgtttggatacaggctagaaatacttttgagagtttttttaactggaaatataaaacttttcctggtagaaaaactctcaaaagcacttacttaaagttttgtatccagacaagttcaagacgacattattttggtcatgtcactagtaaacacgagattttgatcttgtaacaaagttaaggttaactatccctttattgctcatgttctatacaactttgtacaggtactggcttccagtccaaagggtcttacttgtttggtcacttcagcatgtacataaagatggttcctggagattctgctggcacagtcactgctttctatgtatggacaaaatgaaaaaaaaaaagtttctatttttatttgcttcagtcattgtgtagtatgtgaacgtgacctttgttttgttatggttggaactgtgcagttatcttcccaaaacgcggagcatgatgagatagactttgagttcttggggaacagaacaggacaaccttacattctgcaaacaaatgtgttcaccggaggcaagggtgatagagagcaaagaatctatctctggtttgatcccacgaaagaataccacagatactccattctctggaacttgtatcagattgtgtaagcacacttcactcaaactctttcatacccttttttcatttttcaccctttcttggaaatcccagtcttatacttaaaaataatgtatataaatgcagaacagacacattctaaaatgagttagtgttgtagttaagttcaacctaaatctaaactttaaaatggaatcagaacctataacagttgtttgcagacattccggcttgcaaattttaaactttatgttgaaacttggaaatgctcactcctcctccatctgccaatgatgggaccaaaataacaaagtgaaattttttaagattagactttaaaatctaagtaaaagcttgcagatatatgattaacattgatggttggaaaggaaaggttcaaatctttactactgatatttttactaaaactagaagaataatatttattggttg

SEQ ID NO: 6932 - protein, 100 aa, Glycine max
  misc_feature (1)..(100): Ceres Seq. ID no. 15169283
MYGQNEKKKVSIFICFSHCVVCERDLCFVMVGTVQLSSQNAEHDEIDFEFLGNRTGQPYILQTNVFTGGKGDREQRIYLWFDPTKEYHRYSILWNLYQIV

SEQ ID NO: 6933 - protein, 80 aa, Glycine max
  misc_feature (1)..(80): Ceres Seq. ID no. 15169284
KLRHTEKMGSSSSMWTVCVILASLASAALCANPRRPVDVQFGRNYVPTWAFDHIKYFNGGSDIQLHLDKYTGAYNFFIPM

SEQ ID NO: 6934 - protein, 73 aa, Glycine max
  misc_feature (1)..(73): Ceres Seq. ID no. 15169285
MGSSSSMWTVCVILASLASAALCANPRRPVDVQFGRNYVPTWAFDHIKYFNGGSDIQLHLDKYTGAYNFFIPM

SEQ ID NO: 6935 - DNA, 1263 bp, Glycine max
  misc_feature (1)..(1263): Ceres Seq. ID no. 15169286
gttttcttttaggaggatatattttgtttgttcttgtttctctcttctttaataacttttttgtaaaaaaaactaggtaaaaccatttctgaaactacaaaaccagactacggtgctcttgcacttgttcaattaaaatgatttgtgatctggtactaattgttttcaatgtgttacagacgggattttgggctccatgtctgagatacagaccttacctggtgaaattccttctaatgaaagggctggatgtgaagtgattaaatctgatgacaaactttcacattttgagaatttctgccagtctggattgtctcatcttggaattaaacattcacaggatataaaccttcaaggcatatggaaggaagcagaaccatttgccgaccttgtaggaccttattggtctctcagagctgctttagggcctcttttggaaactcttattatacttgataggttattgtttcttcaagagcaaggcagtgctctagaagcctgcttgttaccgatatttgatccaaaaatatcaccaagaaatgtggcaataattgcaaaaaagatcgacaaagatttaagatcctcctgttgctaaaaggtaagtagtggctgcacgtgtcatttatgtgtatccctaccatttaatactgttacccaattacagctctttgaatatcctttcattttattactctattactgtctttctgtaactggatacatcccaatcttctctttccaaaaaacaaaggtgtgaagctagacaatgcagcttctgtcttcaagcatgaatgactcaatgttgcttggttggagtggagtttctttatgagatccttttcttggttggatgatttttctgtcacatgttgatattgttaaatttgttaaaccatgtaaagtaacggtattgcttctccctattccactgctagactttcttgagagttgagttgattgtcaagattccctcagttgaagaaagtcaatttcacatgggacaaggtcacaatgatctacaattcaatgcctgtctttcatgagttgtgttgattctcaagatcggtgcaggtgaaggtcaagatcatttgggacaaggagacaatgctgctgactgctttcctctgttcttgttggtgaaagtttgttactcaggttccaacatcatgctaagttactttgttatcataatcatatgtaatgttctgagtagctagctgggcaattcacttaaatgatgcaagcttgtaaaatttttgcacc

SEQ ID NO: 6936 - protein, 132 aa, Glycine max
  misc_feature (1)..(132): Ceres Seq. ID no. 15169287
MSEIQTLPGEIPSNERAGCEVIKSDDKLSHFENFCQSGLSHLGIKHSQDINLQGIWKEAEPFADLVGPYWSLRAALGPLLETLIILDRLLFLQEQGSALEACLLPIFDPKISPRNVAIIAKKIDKDLRSSCC

SEQ ID NO: 6937 - DNA, 1573 bp, Glycine max
  misc_feature (1)..(1573): Ceres Seq. ID no. 15169288
tcttgagatggaaaaggactatgttacttctgaagctctggtgcttgtgaaagatctgctaagaaaatatccacaatggagtcaggattgtattgctgttgttggaaatatcagtagtaaaaatgtccaagaacccaaggctaaggcagctcttatatggatgttgggggaatattctcaagacatgcatgatgctccatatgtcttggagagtttagttgaaaactgggatgaggagcattctgctgaggttcgcttacatcttcttactgcagttatgaagtgtttctttaagcgaccacctgaaactcaaaaagcattaggagctgcattggctgctgggattgctactgattttcaccaggatgttcatgatagggccttattttattacaggcttctgcaatataatgtatcagtggcagagagtgtggtcaaccctccaaagcaagcagtttcagtatttgctgatactcaaagcagtgaaatcaaagatcgcatatttgatgaatttaacagtttgtctgttgtataccaaaagccttcttatatgttcactgataaggaacaccgagggacatttgaatttgcagatgaacttggaaatctatctattagtgcagaatctgcagattctgttgttccagcccagagagtggaagcaaatgacaaggatctgcttctaagtacttcagaaaaagatgaaggaagagatcctggtagcaatggttctgtctataatgcgccttcctataatggttcatctgctcctacaacttcacaaccacttgcagatttggcatttccaagtactggcatatctggtcaagctcctgcttctagcttggcaattgatgatctgcttggtttagattttccagttgagactgcagccatgccttcacctcctccattgaacctaaacccaaaagctgtactggatcctggcgcatttcagcagaaatggcgtcaactgccaatatccttatctgaggaatattctctaagtcctcaaggagtcacatcgttgacaactcctcatgcacttcttcgccacatgcaaagtcattcaatacaatgcattgcatccggtggtcagtctcccaacttcaagttctttttctttgctcagaaagcagaagcagcatcaatgtatcttgttgagtgtataatcaacacatcgtcagccaagtcacagattaaaataaaagctgatgaccaaagttcatcccaggcattctctactttattccaatcagccttgtccaaatttggtttaccttaaatctttatggtgccttcagagctttgaaatcagctgttatgaaatgttgcaatcctagattgaatatataagggaatggaggatattgactccatacctcccccctccccgaaagagaaagaaaattcagattgatgtataacaggaaaatgcaggggggttccattggctaaaagattttgtagttgttctgtatccaaatcatcgtgatccatcaaatattcagttgtagaaaacctagtctgggttgcaagtttgtagaggttttatgttgatgttctgacgttt

SEQ ID NO: 6938 - protein, 427 aa, Glycine max
  misc_feature (1)..(427): Ceres Seq. ID no. 15169289
LEMEKDYVTSEALVLVKDLLRKYPQWSQDCIAVVGNISSKNVQEPKAKAALIWMLGEYSQDMHDAPYVLESLVENWDEEHSAEVRLHLLTAVMKCFFKRPPETQKALGAALAAGIATDFHQDVHDRALFYYRLLQYNVSVAESVVNPPKQAVSVFADTQSSEIKDRIFDEFNSLSVVYQKPSYMFTDKEHRGTFEFADELGNLSISAESADSVVPAQRVEANDKDLLLSTSEKDEGRDPGSNGSVYNAPSYNGSSAPTTSQPLADLAFPSTGISGQAPASSLAIDDLLGLDFPVETAAMPSPPPLNLNPKAVLDPGAFQQKWRQLPISLSEEYSLSPQGVTSLTTPHALLRHMQSHSIQCIASGGQSPNFKFFFFAQKAEAASMYLVECIINTSSAKSQIKIKADDQSSSQAFSTLFQSALSKFGLP

SEQ ID NO: 6939 - protein, 425 aa, Glycine max
  misc_feature (1)..(425): Ceres Seq. ID no. 15169290
MEKDYVTSEALVLVKDLLRKYPQWSQDCIAVVGNISSKNVQEPKAKAALIWMLGEYSQDMHDAPYVLESLVENWDEEHSAEVRLHLLTAVMKCFFKRPPETQKALGAALAAGIATDFHQDVHDRALFYYRLLQYNVSVAESVVNPPKQAVSVFADTQSSEIKDRIFDEFNSLSVVYQKPSYMFTDKEHRGTFEFADELGNLSISAESADSVVPAQRVEANDKDLLLSTSEKDEGRDPGSNGSVYNAPSYNGSSAPTTSQPLADLAFPSTGISGQAPASSLAIDDLLGLDFPVETAAMPSPPPLNLNPKAVLDPGAFQQKWRQLPISLSEEYSLSPQGVTSLTTPHALLRHMQSHSIQCIASGGQSPNFKFFFFAQKAEAASMYLVECIINTSSAKSQIKIKADDQSSSQAFSTLFQSALSKFGLP

SEQ ID NO: 6940 - protein, 374 aa, Glycine max
  misc_feature (1)..(374): Ceres Seq. ID no. 15169291
MLGEYSQDMHDAPYVLESLVENWDEEHSAEVRLHLLTAVMKCFFKRPPETQKALGAALAAGIATDFHQDVHDRALFYYRLLQYNVSVAESVVNPPKQAVSVFADTQSSEIKDRIFDEFNSLSVVYQKPSYMFTDKEHRGTFEFADELGNLSISAESADSVVPAQRVEANDKDLLLSTSEKDEGRDPGSNGSVYNAPSYNGSSAPTTSQPLADLAFPSTGISGQAPASSLAIDDLLGLDFPVETAAMPSPPPLNLNPKAVLDPGAFQQKWRQLPISLSEEYSLSPQGVTSLTTPHALLRHMQSHSIQCIASGGQSPNFKFFFFAQKAEAASMYLVECIINTSSAKSQIKIKADDQSSSQAFSTLFQSALSKFGLP

SEQ ID NO: 6941 - DNA, 1242 bp, Glycine max
  misc_feature (1)..(1242): Ceres Seq. ID no. 15169292
ggtatccgtgtcttccccaaccattccttaacccaccgcaaattcaaattcaattcgagctgaacctagggttagtcctattgccttcaccgatctcgaatttcggaaacggtaaaagaaaatgcacgtcaaatcggcgcagtcatcgttccgggatcggacacaggaattccacagcatcacagagaggttgaagaagtccggatcagggcccaatgggcccagtagtagcagcacttcttccagatcggaggaacagcgatccgcgatcgcgaatcaatcggagttcaatagaagggcctccaaaatcggctacgggattcaccaaacgtctcagaagctcgccaaactcgccaaattagcgaaaaggacttcggtttttgatgaccctactatggaaatccaagagcttacgggggttattaagcaggatatcactgctctgaactctgctgttgtggatcttcagttggtgtgtagctctaggaatgagactggaaatgtttctgccgatacctctagccattcgagcacggtggtcgatgacttgaagacacggttgatgagcaccaccaaagagtttaaggatgttttgaccatgagaactgagaatatgaaagtgcatgagaatagaagacagttgttttcgtcttctgcttctaaggattctgcgaatccttttattcggcaacggccgttggctgcaagggcggctgctagtacttctagtgcccctgctcttccctgggctaatgggtcaccatcttcatctcaggcgtttcccaagaagcaagtggatggggagagtcaaccattgttgcaacagcaacagcagcagcaggaggtagttccattgcaagatagttacatgcaaagcagagctgaagcacttcagaatgttgagtccactattcatgagcttagcaacattttcaatcagctagcaacacttgtttcccaacaaggagagattgccatcaggattgatgaaaacatggatgatacattggcaaacgtagagggagcacagggggctttgttgaagtatctgaacagcatatcttctaatcggtggttgatgatcaaaattttctttgtattaatatttttccttatggttttcttattttttgtggcatagtcatttgggtgacagaaatgaaaacaatgacatgagtgtcggcgttctgtatttctttaatatttatttctccaaatatatatattcattcttgcagagtt

SEQ ID NO: 6942 - protein, 339 aa, Glycine max
  misc_feature (1)..(339): Ceres Seq. ID no. 15169293
MHVKSAQSSFRDRTQEFHSITERLKKSGSGPNGPSSSSTSSRSEEQRSAIANQSEFNRRASKIGYGIHQTSQKLAKLAKLAKRTSVFDDPTMEIQELTGVIKQDITALNSAVVDLQLVCSSRNETGNVSADTSSHSSTVVDDLKTRLMSTTKEFKDVLTMRTENMKVHENRRQLFSSSASKDSANPFIRQRPLAARAAASTSSAPALPWANGSPSSSQAFPKKQVDGESQPLLQQQQQQQEVVPLQDSYMQSRAEALQNVESTIHELSNIFNQLATLVSQQGEIAIRIDENMDDTLANVEGAQGALLKYLNSISSNRWLMIKIFFVLIFFLMVFLFFVA

SEQ ID NO: 6943 - protein, 248 aa, Glycine max
  misc_feature (1)..(248): Ceres Seq. ID no. 15169294
MEIQELTGVIKQDITALNSAVVDLQLVCSSRNETGNVSADTSSHSSTVVDDLKTRLMSTTKEFKDVLTMRTENMKVHENRRQLFSSSASKDSANPFIRQRPLAARAAASTSSAPALPWANGSPSSSQAFPKKQVDGESQPLLQQQQQQQEVVPLQDSYMQSRAEALQNVESTIHELSNIFNQLATLVSQQGEIAIRIDENMDDTLANVEGAQGALLKYLNSISSNRWLMIKIFFVLIFFLMVFLFFVA

SEQ ID NO: 6944 - protein, 192 aa, Glycine max
  misc_feature (1)..(192): Ceres Seq. ID no. 15169295
MSTTKEFKDVLTMRTENMKVHENRRQLFSSSASKDSANPFIRQRPLAARAAASTSSAPALPWANGSPSSSQAFPKKQVDGESQPLLQQQQQQQEVVPLQDSYMQSRAEALQNVESTIHELSNIFNQLATLVSQQGEIAIRIDENMDDTLANVEGAQGALLKYLNSISSNRWLMIKIFFVLIFFLMVFLFFVA

SEQ ID NO: 6945 - DNA, 1307 bp, Glycine max
  misc_feature (1)..(1307): Ceres Seq. ID no. 15169296
gacagacacagcatccaatatccatcgagagatgttggaggcgaagtgtctgaagaaagcagtggttccttccactctgattgaggacccttctcctggaagccttcagtgcacacgtcttgctctccgtgtttgcgaggacccaagttcttgttttgtctacatagcctccggtccccacatttataagctccacattgctctgggagaatcttcagtcagcgaaggaaaagatagcctattgatacctgaacacactgagattattgcctcttcgttactcaaccgatgccctcatcgttcagaaattcagagtattgctcttgctgaggtggagggctgtggctatatattgctgggaagtgtggattcacatggtcatctcattgtgtctaaactagatgcgtctggtgaagatgttgacaagctaacatattctgcattgcctcatgataatggtatcggggaaggaagttggtcaggactctgcttttgcccaaatcaatggtctatgacagttgttgctcgtagcttttgcaaaagcattgatgtttatgatcaagacatccacattcgctcattacgaccgctttggtaccctacttcgttaaacttcttgcaaaatggagtcaatggaaatcaaagtcctaccttagctattacggaaggaagccagctgacaacgtgggacttgagaatgaaagaaaatggtggttgtgtacatcggatttgtggcagccctggcgatatcttttatgctgtttgcagttcttccaatggtaatgttgctgtgggtggagctgatcgtactgtgactatttatgatcctcgcagatggtcggcattgtctagattggtgcactgttcaaaatatgagataacaggactggctttctcaacaattgaccctgactgtatctatattcaaggggttgattatgaggtcttttgtggacaatggaaagagaacaacaaaatattttcatttagaggagactcaaattggcttggctttagtaagtgctccgacaaagatgttttggctggatggtgtgattcaggcagcatatttatagctgatgttgcaagtgcaagttgataaagtggtgtctgtccagtaatttccccatctctgtagaaaattgtcacctcaatgtatgtaaccatggttgagtttcatgtttgaagggaaaaagaaaagtggtggatttattatgattaaacttcatatgcagtacatgttataatgcatttctaaccacagaatgtgacttaagattacggaatgcattatttttgtgcactgt

SEQ ID NO: 6946 - protein, 365 aa, Glycine max
  misc_feature (1)..(365): Ceres Seq. ID no. 15169297
TDTASNIHREMLEAKCLKKAVVPSTLIEDPSPGSLQCTRLALRVCEDPSSCFVYIASGPHIYKLHIALGESSVSEGKDSLLIPEHTEIIASSLLNRCPHRSEIQSIALAEVEGCGYILLGSVDSHGHLIVSKLDASGEDVDKLTYSALPHDNGIGEGSWSGLCFCPNQWSMTVVARSFCKSIDVYDQDIHIRSLRPLWYPTSLNFLQNGVNGNQSPTLAITEGSQLTTWDLRMKENGGCVHRICGSPGDIFYAVCSSSNGNVAVGGADRTVTIYDPRRWSALSRLVHCSKYEITGLAFSTIDPDCIYIQGVDYEVFCGQWKENNKIFSFRGDSNWLGFSKCSDKDVLAGWCDSGSIFIADVASAS

SEQ ID NO: 6947 - protein, 355 aa, Glycine max
  misc_feature (1)..(355): Ceres Seq. ID no. 15169298
MLEAKCLKKAVVPSTLIEDPSPGSLQCTRLALRVCEDPSSCFVYIASGPHIYKLHIALGESSVSEGKDSLLIPEHTEIIASSLLNRCPHRSEIQSIALAEVEGCGYILLGSVDSHGHLIVSKLDASGEDVDKLTYSALPHDNGIGEGSWSGLCFCPNQWSMTVVARSFCKSIDVYDQDIHIRSLRPLWYPTSLNFLQNGVNGNQSPTLAITEGSQLTTWDLRMKENGGCVHRICGSPGDIFYAVCSSSNGNVAVGGADRTVTIYDPRRWSALSRLVHCSKYEITGLAFSTIDPDCIYIQGVDYEVFCGQWKENNKIFSFRGDSNWLGFSKCSDKDVLAGWCDSGSIFIADVASAS

SEQ ID NO: 6948 - protein, 195 aa, Glycine max
  misc_feature (1)..(195): Ceres Seq. ID no. 15169299
MTVVARSFCKSIDVYDQDIHIRSLRPLWYPTSLNFLQNGVNGNQSPTLAITEGSQLTTWDLRMKENGGCVHRICGSPGDIFYAVCSSSNGNVAVGGADRTVTIYDPRRWSALSRLVHCSKYEITGLAFSTIDPDCIYIQGVDYEVFCGQWKENNKIFSFRGDSNWLGFSKCSDKDVLAGWCDSGSIFIADVASAS

SEQ ID NO: 6949 - DNA, 1471 bp, Glycine max
  misc_feature (1)..(1471): Ceres Seq. ID no. 15169300
gtgttagtagagagacagagacaccggtcacagtcacaccacaccggcaaatattttgcattgcttagggttttggaacagattcaattcagcgttacttcaatccaagcacatggcgaaaggaaagcatacgcatacccgagcacaggggaagaagtggtcaacgttctcgctggttctgtgggcgcttttcttcctcacactcatcctcgtcgtgctccttgctctcggcattgtttatcttccaactaccgacgacgattttccaaccacggatctcagcgccttcaggcgcaagacctctcaaagtgccgagagtttggtggaaaatccgccggagcagtggaccgagattctctcctgggagcctagagcgttcatctatcacaattttctgtcaaaagaagaatgtgagtacttgattgaacttgccaaacctcaaatggtaaaatcaagtgttgttgatagcaagactgggaagagtacagaaagcagggttcgaaccagttcaggaatgttcttgaagagaggaaaggacaaaattgtccagaatatagagaaaagaattgctgactttaccttcatacctgaagagaatggagaaggacttcaaattcttcactacgaagtaggacaaaaatatgagcctcactatgattacttccttgatgagttcaacactaagaatggaggccaacgtattgctacagttcttatgtacctttcagatgttgaagaaggcggtgagactgtatttccggctgccaatgcaaattttagttctgtgccttggtggaatgatttatcccaatgtgcaagaaagggtctctcagtgaaaccaaaaatgggtgatgctctgctattttggagcatgaggcctgatgccacactagatccatctagtttacatggtggttgcccagtaattaaaggaaataaatggtcttcaacaaagtggatgcatcttcgtgagtacaaggtttgacccatcaactgcacaggattaacgtggtacagggtgagtatttcatcacattttggattggataaacacaagttcagtgcatttcatgttcaccttttatgctacctagtgatgttcccctttgctcaggtgcgccagcattttcttcacttgtagaataaaccatttggtttctctttctcatggatagacaattttggcattgccaagggaaaaaagaatactttcagttaatgatctgagttttagtcttgtagagttttcaagcgaatatgtctattaggtaagaggctcaccagggagtgatgtgttgaatacaagtagagataaatttgcaatttactggggagtgatgtgttgaatacaagtagagataaatttgcaatttagcatagtgaaaggatggtatgttggtcatagataagtttttgagaatgtgctatatttcacagaagtaagaaaaacaataatttttttagtttgtat

SEQ ID NO: 6950 - protein, 290 aa, Glycine max
  misc_feature (1)..(290): Ceres Seq. ID no. 15169301
MAKGKHTHTRAQGKKWSTFSLVLWALFFLTLILVVLLALGIVYLPTTDDDFPTTDLSAFRRKTSQSAESLVENPPEQWTEILSWEPRAFIYHNFLSKEECEYLIELAKPQMVKSSVVDSKTGKSTESRVRTSSGMFLKRGKDKIVQNIEKRIADFTFIPEENGEGLQILHYEVGQKYEPHYDYFLDEFNTKNGGQRIATVLMYLSDVEEGGETVFPAANANFSSVPWWNDLSQCARKGLSVKPKMGDALLFWSMRPDATLDPSSLHGGCPVIKGNKWSSTKWMHLREYKV

SEQ ID NO: 6951 - protein, 180 aa, Glycine max
  misc_feature (1)..(180): Ceres Seq. ID no. 15169302
MVKSSVVDSKTGKSTESRVRTSSGMFLKRGKDKIVQNIEKRIADFTFIPEENGEGLQILHYEVGQKYEPHYDYFLDEFNTKNGGQRIATVLMYLSDVEEGGETVFPAANANFSSVPWWNDLSQCARKGLSVKPKMGDALLFWSMRPDATLDPSSLHGGCPVIKGNKWSSTKWMHLREYKV

SEQ ID NO: 6952 - protein, 156 aa, Glycine max
  misc_feature (1)..(156): Ceres Seq. ID no. 15169303
MFLKRGKDKIVQNIEKRIADFTFIPEENGEGLQILHYEVGQKYEPHYDYFLDEFNTKNGGQRIATVLMYLSDVEEGGETVFPAANANFSSVPWWNDLSQCARKGLSVKPKMGDALLFWSMRPDATLDPSSLHGGCPVIKGNKWSSTKWMHLREYKV

SEQ ID NO: 6953 - DNA, 1415 bp, Glycine max
  misc_feature (1)..(1415): Ceres Seq. ID no. 15169316
aaatacttgctattcgggatcatggcgatgtttgtttgaaacaacagcaacggagaggatgagaagagagtgaagtttgtgaaagagatggcactcgtaacaacaaacccaaccatcaatgaggggcctctgttcgccgaagttgacatgggttccgacttcaacgccccaacggttcgagctaccgttgttcaagcctccaccatcttctacgacacaccagccaccttagataaggctgagaggttgttggctgaagctactagctatgggtcccagcttgtggtgtttccagaagcctttgtgggtggctacccgcgtggttcagcttttggtctttcgatcggaaatcgcactgttaagggtagagaggagtttcgcaagtatcattctgcagccattgatgtgcctggtcctgaagttgatagattggcagcaatggcagggaagtataaagtacatttagtgatgggtgtgatagagagggacggctacacactttattgcaccgttctgttctttgattctcagggtcattacctaggaaagcacaggaaaatcatgccaactgcattggagcgggttatctggggatttggggatggatcaaccattccagtgtttgaaactcccgttggaaaaataggtgctgccatttgttgggagaacagaatgccactattaaggacagcaatgtatgccaaaggtgtggagatatattgtgctccaacagctgatgccagggatgtgtggcaggcatcaatgacccatattgcacttgaaggtggatgttttgttttgtcagcaaaccagttttgtcggagaagggattacccaccccctccagagtatgtttttgctggcacagaagtggacctgacaccggattctgttgtgtgcgccggaggtagtgtcattatatcaccattaggggctgttctggctggaccaaattatgacggggaggcgctaatctcagcagaccttgatcttggagaaattgcaagagctaagtttgattttgatgtggttggacactattcaaggcctgaagtgcttagcttaactgtaaaggaccatccaacgaaccccgttacttttacatcaacatcgacaaaaattgaagacaagaccaagtagtttcttcctttcatggcttgcaacttccaaacctccagttctggacctgtccacatagccttatttgaccccttgtatgttaactcttgtgtccatatatgaaaggttatttgggcattttgtcgtggtttatatcaccacattaaaatgacattggaactcatatttgctatttttcacataatttcataagctaaaaattaagcttatgaaagtaaccttgcacgaaagcttaagcaaatcaactggttgttttaattatcgagtttttactg

SEQ ID NO: 6954 - protein, 350 aa, Glycine max
  misc_feature (1)..(350): Ceres Seq. ID no. 15169317
MALVTTNPTINEGPLFAEVDMGSDFNAPTVRATVVQASTIFYDTPATLDKAERLLAEATSYGSQLVVFPEAFVGGYPRGSAFGLSIGNRTVKGREEFRKYHSAAIDVPGPEVDRLAAMAGKYKVHLVMGVIERDGYTLYCTVLFFDSQGHYLGKHRKIMPTALERVIWGFGDGSTIPVFETPVGKIGAAICWENRMPLLRTAMYAKGVEIYCAPTADARDVWQASMTHIALEGGCFVLSANQFCRRRDYPPPPEYVFAGTEVDLTPDSVVCAGGSVIISPLGAVLAGPNYDGEALISADLDLGEIARAKFDFDVVGHYSRPEVLSLTVKDHPTNPVTFTSTSTKIEDKTK

SEQ ID NO: 6955 - protein, 330 aa, Glycine max
  misc_feature (1)..(330): Ceres Seq. ID no. 15169318
MGSDFNAPTVRATVVQASTIFYDTPATLDKAERLLAEATSYGSQLVVFPEAFVGGYPRGSAFGLSIGNRTVKGREEFRKYHSAAIDVPGPEVDRLAAMAGKYKVHLVMGVIERDGYTLYCTVLFFDSQGHYLGKHRKIMPTALERVIWGFGDGSTIPVFETPVGKIGAAICWENRMPLLRTAMYAKGVEIYCAPTADARDVWQASMTHIALEGGCFVLSANQFCRRRDYPPPPEYVFAGTEVDLTPDSVVCAGGSVIISPLGAVLAGPNYDGEALISADLDLGEIARAKFDFDVVGHYSRPEVLSLTVKDHPTNPVTFTSTSTKIEDKTK

SEQ ID NO: 6956 - protein, 233 aa, Glycine max
  misc_feature (1)..(233): Ceres Seq. ID no. 15169319
MAGKYKVHLVMGVIERDGYTLYCTVLFFDSQGHYLGKHRKIMPTALERVIWGFGDGSTIPVFETPVGKIGAAICWENRMPLLRTAMYAKGVEIYCAPTADARDVWQASMTHIALEGGCFVLSANQFCRRRDYPPPPEYVFAGTEVDLTPDSVVCAGGSVIISPLGAVLAGPNYDGEALISADLDLGEIARAKFDFDVVGHYSRPEVLSLTVKDHPTNPVTFTSTSTKIEDKTK

SEQ ID NO: 6957 - DNA, 1710 bp, Glycine max
  misc_feature (1)..(1710): Ceres Seq. ID no. 15169326
aaggcaatggcaaagccaagaagatcaaagatgatgtctttgaaactccctttcctgttgaccttgttcctcgcactctcccaagctcaaccgcattccgatgatccaccgccgccaccctcctccaacgtctgcgtcatcggcgctggcatcggtggctcctccgtcgctcacttcctccgcaaatactcgccgtcctccactccctccaccaaaatccgagtgttcgagcgcaacggccgcgtcgggggacgcatcgccaccgtgacggtggcgggcgagaccttcgaggccggagcgtccattctccatccaaagaacctgcacacagtggattacgttaagatcctgaagctgaaggtcaaagagccgaccgcgtcggaggattccctctctctcggcatttgggatgggaacaagttcgttttcaaaacggtgtcgccgcttagttccactgttcccctcatcgataagcttctcaaacttccgtttgttaatactctcgtatcgttcgttaattccgcactcatgttcgttcgctacggcttctcgctctttaagatgcagaacttcgttgagattgctgtggataaattcgtaaagtactatgaagatcctggttcaagacctatttttgagactgtggatgagatgctgcagtgggctggtctgtataatcttactaccaggactttgcgggatgaattggtggatgctgggttgtctacctcgttgatcaatgaacttgttactgtcatcacacgcattaattatggccagagtgtctccatgagtgggttgggtggtgtggtttctctagcaggatcaggtggaggattatggtccatcgaaggaggcaactggcaaatggctgctggactgattaatcagtcagatgtggcattacacctgcatgaagaaataaaatctgttgctgaccttggagattactacgaactcaactcaacaaaaggaaacagttacagatgtgaagttgctgtggttgctacaccactggatgagttagatattcaatttattcctccaatttcaattcctgagagaaaattacagcacacatttacaacttttgtcaggggccttctaaaccctgcatattttggtctgaaggctgtgacaaaaattccagatcttgtgggcacaatagaggaccctgagcttccattttcatgcattgcagttctcaagaagcacaatgaaaaagaatctacttataaattattttctcgtcaaccaatggcagacacattactggatagcatcttcagtgtgaggaaggagaccattcggataaactgggctgcatatcctcattaccacgccccagaagtatttgcaccatttatattggacgggcgacatctatactacgttaatgcatttgaaaatgcagctagcaccatggagacaagtgctgtggcagctgagaatattgcccgactcatactgtcaagatattttggccaagtaattgtgcattcatctaatttgtctgcaagttctcaaggagagggtactcatttagatttgtgagacagtgatcgtaagatattgttagtttggatgatggtagattttatataaattgcatctgaattctgaaaatttggaaaatcatacaatgtataaacactgggtcaataaatgattactctctccacccataaagccgatacattgcctgtttac

SEQ ID NO: 6958 - protein, 517 aa, Glycine max
  misc_feature (1)..(517): Ceres Seq. ID no. 15169327
KAMAKPRRSKMMSLKLPFLLTLFLALSQAQPHSDDPPPPPSSNVCVIGAGIGGSSVAHFLRKYSPSSTPSTKIRVFERNGRVGGRIATVTVAGETFEAGASILHPKNLHTVDYVKILKLKVKEPTASEDSLSLGIWDGNKFVFKTVSPLSSTVPLIDKLLKLPFVNTLVSFVNSALMFVRYGFSLFKMQNFVEIAVDKFVKYYEDPGSRPIFETVDEMLQWAGLYNLTTRTLRDELVDAGLSTSLINELVTVITRINYGQSVSMSGLGGVVSLAGSGGGLWSIEGGNWQMAAGLINQSDVALHLHEEIKSVADLGDYYELNSTKGNSYRCEVAVVATPLDELDIQFIPPISIPERKLQHTFTTFVRGLLNPAYFGLKAVTKIPDLVGTIEDPELPFSCIAVLKKHNEKESTYKLFSRQPMADTLLDSIFSVRKETIRINWAAYPHYHAPEVFAPFILDGRHLYYVNAFENAASTMETSAVAAENIARLILSRYFGQVIVHSSNLSASSQGEGTHLDL

SEQ ID NO: 6959 - protein, 515 aa, Glycine max
  misc_feature (1)..(515): Ceres Seq. ID no. 15169328
MAKPRRSKMMSLKLPFLLTLFLALSQAQPHSDDPPPPPSSNVCVIGAGIGGSSVAHFLRKYSPSSTPSTKIRVFERNGRVGGRIATVTVAGETFEAGASILHPKNLHTVDYVKILKLKVKEPTASEDSLSLGIWDGNKFVFKTVSPLSSTVPLIDKLLKLPFVNTLVSFVNSALMFVRYGFSLFKMQNFVEIAVDKFVKYYEDPGSRPIFETVDEMLQWAGLYNLTTRTLRDELVDAGLSTSLINELVTVITRINYGQSVSMSGLGGVVSLAGSGGGLWSIEGGNWQMAAGLINQSDVALHLHEEIKSVADLGDYYELNSTKGNSYRCEVAVVATPLDELDIQFIPPISIPERKLQHTFTTFVRGLLNPAYFGLKAVTKIPDLVGTIEDPELPFSCIAVLKKHNEKESTYKLFSRQPMADTLLDSIFSVRKETIRINWAAYPHYHAPEVFAPFILDGRHLYYVNAFENAASTMETSAVAAENIARLILSRYFGQVIVHSSNLSASSQGEGTHLDL

SEQ ID NO: 6960 - protein, 507 aa, Glycine max
  misc_feature (1)..(507): Ceres Seq. ID no. 15169329
MMSLKLPFLLTLFLALSQAQPHSDDPPPPPSSNVCVIGAGIGGSSVAHFLRKYSPSSTPSTKIRVFERNGRVGGRIATVTVAGETFEAGASILHPKNLHTVDYVKILKLKVKEPTASEDSLSLGIWDGNKFVFKTVSPLSSTVPLIDKLLKLPFVNTLVSFVNSALMFVRYGFSLFKMQNFVEIAVDKFVKYYEDPGSRPIFETVDEMLQWAGLYNLTTRTLRDELVDAGLSTSLINELVTVITRINYGQSVSMSGLGGVVSLAGSGGGLWSIEGGNWQMAAGLINQSDVALHLHEEIKSVADLGDYYELNSTKGNSYRCEVAVVATPLDELDIQFIPPISIPERKLQHTFTTFVRGLLNPAYFGLKAVTKIPDLVGTIEDPELPFSCIAVLKKHNEKESTYKLFSRQPMADTLLDSIFSVRKETIRINWAAYPHYHAPEVFAPFILDGRHLYYVNAFENAASTMETSAVAAENIARLILSRYFGQVIVHSSNLSASSQGEGTHLDL

SEQ ID NO: 6961 - DNA, 1791 bp, Glycine max
  misc_feature (1)..(1791): Ceres Seq. ID no. 15169330
aaacctctccatccttgtgcagttttttttattcaagaggaggaaaacaacagattcttgtatcttattttggactaaaaaagggctgcttcatttctttctttttaaaaacagatttggtaaaaaatatactgttcttgtaagcagctgttaaccatttatcgaacatgcatgcactcatttacctaaaatgccttcattcactaattacattttaggatatgtcaatctcccacttgatgatgaatacccaaatatttattgcttcctttatggttttgaaagaggaccttcttctatgaatagcataatgagaatccttggtcattacctttaagcatgatatattatcaaaccaaaaatgtgtcactaagtgtaattcactaaagcagtgtgtaagcttttcagggtaaaaacaaatatggatgaacatccacgttaattgtggtgttttgcaatctacataatttggaatatgttgcagatttagccctggaaatgctaaatgagaaggacatgctagcctatgctcggggtgaggagaatcagacagggttgcatgtcttggctcgaactccaggttgtggttgccaactacgatgtcgaaaacacctcctacatttctgtaagaaggacactcctattttaaaactagtaaaaaaaaatgtgggatatagttctttccctggatgaccaaacgatgatggaaaccatctcggaaccatctcaagtgatatttattgctgctgaagttggaaattttgaatttctatctgtggttttgagcacttaccctgatttgatatgggaactggattccacgggtcgaagtataatccatattgctgttttgcatcgtcatgctagcatcttcaatttaatacatgaaataggcccaatgaaagaggtcatattaacttttaatgatgatcaagagaacaatttactacattatgctgcaagacaagcaccaccagatcgacttaatgcagtttctggagcagctcttcaaatgatgctcgagttgtcatggtttgaggaggtgaaaaagataatgctaccatcatccatagagaaacgaaattctaatggcattattcctcgtcaactattcaccatggagcatgaagaattactcgagaaaggagagtcgtggatgaagagaactgctaagtcttgcatggttgtttcaactcttattacaacaggagtgttcactgctgcattcagtgtaccaggtggtaacaatgacgataaagaaggaagccccaattatttggggaaaccaacattcttgatatttgcattatcagattccatagcaatgatctcatcttcggcttcaatcctaattttcttgtccatccttatctctcgatatgccgaggaagactttctcaagtcactgcccttaaagttgatatccgcacttttggcactatttatctcaataataagcatgatggtagcattcagtagtgccttctttataacctattactatggttcaaatggggttcctatcttcatttctgcacttgcttttatacctatacctgtttttatatttctgcaatttcgcctttggtctgacattttgtatttagcctacatgtgtagttttctatttagacctagtaaacgtatgattcactagaaagattgtggttttgtactaaataatgaacttcactttcatgtactctatgggttaaatgttgtaagaaaatattaatcttgtattggtatttataagtagaagataaattggatatagatacttgtaattag

SEQ ID NO: 6962 - protein, 330 aa, Glycine max
  misc_feature (1)..(330): Ceres Seq. ID no. 15169331
MWDIVLSLDDQTMMETISEPSQVIFIAAEVGNFEFLSVVLSTYPDLIWELDSTGRSIIHIAVLHRHASIFNLIHEIGPMKEVILTFNDDQENNLLHYAARQAPPDRLNAVSGAALQMMLELSWFEEVKKIMLPSSIEKRNSNGIIPRQLFTMEHEELLEKGESWMKRTAKSCMVVSTLITTGVFTAAFSVPGGNNDDKEGSPNYLGKPTFLIFALSDSIAMISSSASILIFLSILISRYAEEDFLKSLPLKLISALLALFISIISMMVAFSSAFFITYYYGSNGVPIFISALAFIPIPVFIFLQFRLWSDILYLAYMCSFLFRPSKRMIH

SEQ ID NO: 6963 - protein, 318 aa, Glycine max
  misc_feature (1)..(318): Ceres Seq. ID no. 15169332
MMETISEPSQVIFIAAEVGNFEFLSVVLSTYPDLIWELDSTGRSIIHIAVLHRHASIFNLIHEIGPMKEVILTFNDDQENNLLHYAARQAPPDRLNAVSGAALQMMLELSWFEEVKKIMLPSSIEKRNSNGIIPRQLFTMEHEELLEKGESWMKRTAKSCMVVSTLITTGVFTAAFSVPGGNNDDKEGSPNYLGKPTFLIFALSDSIAMISSSASILIFLSILISRYAEEDFLKSLPLKLISALLALFISIISMMVAFSSAFFITYYYGSNGVPIFISALAFIPIPVFIFLQFRLWSDILYLAYMCSFLFRPSKRMIH

SEQ ID NO: 6964 - protein, 317 aa, Glycine max
  misc_feature (1)..(317): Ceres Seq. ID no. 15169333
METISEPSQVIFIAAEVGNFEFLSVVLSTYPDLIWELDSTGRSIIHIAVLHRHASIFNLIHEIGPMKEVILTFNDDQENNLLHYAARQAPPDRLNAVSGAALQMMLELSWFEEVKKIMLPSSIEKRNSNGIIPRQLFTMEHEELLEKGESWMKRTAKSCMVVSTLITTGVFTAAFSVPGGNNDDKEGSPNYLGKPTFLIFALSDSIAMISSSASILIFLSILISRYAEEDFLKSLPLKLISALLALFISIISMMVAFSSAFFITYYYGSNGVPIFISALAFIPIPVFIFLQFRLWSDILYLAYMCSFLFRPSKRMIH

SEQ ID NO: 6965 - DNA, 2271 bp, Glycine max
  misc_feature (1)..(2271): Ceres Seq. ID no. 15169346
ggaagtcgaagtcttcgcttgccaattgcatttcttctcagcttcttgctgcttccgcgaatggcccgaaacctaggaggattactggcgctacttttcgctgtttcgatctgcggagccgtcacgattcccggccccgtctccgatgctcaccgttccgccgcgttagagctcttcgatggatcgttttcaagtttagaagaggcctatgaggcactaagagtttttgagattcttacgattgggaataagcctgatgtgagcacaacgacttgcaagaaagtagtggaaaaccttgggtcgtcatcgcctgtgaaggatttgttctatgcgttaaaggttaatgacatattaaaatgcaaggttaatggggatgttttcaaggatattgctttgagacttaaagccactgtcaatgatgcgagtactttggttgagatgtactattcaataggaagtttggttcttataaaggaccaggcttctgatgttgatgtgcttcttactgatgccgatggatccttccattcaatcaaggctctgagccaaagtgatggaaggtggcgttatagttctaataatccagagtctagtacctatgctgctggattagcacttgaagcacttgctggagtgatctcattagcatcttctgaaattgatcagtctagggtgaatacagtgaaaaatgatatattgaagcttttcgacagcattgagaaatatgatgatggaacattctattttgatgagaaatttgttggtggacgtgagcatcagggttctctttccacaacttcttctgttgttcgaggggttacagcatttgctgctgtaacttctggaaaaataaatcttccaggggataaaatattgggtttagcaaattttttcctgggaattggaatcccaggagatgccaaggacttcttcaatcaagttgaatcattagctcttctagagaacaacaaggtttcgatcccattggtactgtcacttcctgcaacggtttattcattatccaaaaaagatcagctcaaggttagggtgaacactgtacttggttcagctgcaccacctttaacagttaagcttgtgcaagctttccgctctaacgctaaagattcagctattgagagcaaggagctccaatatgatcaaaataatggaattcatttcttggaagctttcccagacaatgtagatgtgggaacttatgtgtttgtttttgagattgcacttcacgattctgctggtgaaaaagtttatgctactggaggccaaattcatgtaccaatatatgtcactggcattattaaagtcagcaatgctgaaattgctgttcttgacagtgatcttggaagtgttgaaacccagaaaacgctagatttggctggaaatgatgatgtttcactctcagctaaccacttgcaaaagttgcgcttttctttccagttgacaacacctcacggtcatgcttttaagcctcatcaggcatttttcaagttgaagcatgagacaaagcatgaacacatctttgtggttggaaatactggcaggaagtttgagattattcttgattttcttggtttggtggagaaattttattacctctctggcagatatgacattgagctgactgttggggatactgtcatggagaactctttcttacggctgcttggtgaagttgatttagatcttcccgaagcacctgagaaggcagcccgtcttcctccactccctgtcgatccttactcaagatatgggcccaaagccgagatagcccacttattcagggctccagaaaagcgaccaccccaggaactctctcttactttcttgggtttgatccttctgccatttattggctttttagttgggctgttacgcctgggagtgaacttgaagaattttccttcttcagctgtacctgctacatatgccttcttattccatcttggcattgctgcagttctattgctttatgtacttttctggttgaagctggacttgttcactacactcaaaactgtaggatttttgggagcttttctgttgtttgtgggacacagaattctttcccatctcgcttcaacatcatctaagttgaagtctgcatgagtaaaaggaagattatctatttataaagacatgacatgataatgtgtttttccttgaaaaaatgatactaatccaattttgtaggactttgttgtactagttcgtaacgaatttagagctcaattatatcaagagaaaagttttatc

SEQ ID NO: 6966 - protein, 707 aa, Glycine max
  misc_feature (1)..(707): Ceres Seq. ID no. 15169347
GSRSLRLPIAFLLSFLLLPRMARNLGGLLALLFAVSICGAVTIPGPVSDAHRSAALELFDGSFSSLEEAYEALRVFEILTIGNKPDVSTTTCKKVVENLGSSSPVKDLFYALKVNDILKCKVNGDVFKDIALRLKATVNDASTLVEMYYSIGSLVLIKDQASDVDVLLTDADGSFHSIKALSQSDGRWRYSSNNPESSTYAAGLALEALAGVISLASSEIDQSRVNTVKNDILKLFDSIEKYDDGTFYFDEKFVGGREHQGSLSTTSSVVRGVTAFAAVTSGKINLPGDKILGLANFFLGIGIPGDAKDFFNQVESLALLENNKVSIPLVLSLPATVYSLSKKDQLKVRVNTVLGSAAPPLTVKLVQAFRSNAKDSAIESKELQYDQNNGIHFLEAFPDNVDVGTYVFVFEIALHDSAGEKVYATGGQIHVPIYVTGIIKVSNAEIAVLDSDLGSVETQKTLDLAGNDDVSLSANHLQKLRFSFQLTTPHGHAFKPHQAFFKLKHETKHEHIFVVGNTGRKFEIILDFLGLVEKFYYLSGRYDIELTVGDTVMENSFLRLLGEVDLDLPEAPEKAARLPPLPVDPYSRYGPKAEIAHLFRAPEKRPPQELSLTFLGLILLPFIGFLVGLLRLGVNLKNFPSSAVPATYAFLFHLGIAAVLLLYVLFWLKLDLFTTLKTVGFLGAFLLFVGHRILSHLASTSSKLKSA

SEQ ID NO: 6967 - protein, 687 aa, Glycine max
  misc_feature (1)..(687): Ceres Seq. ID no. 15169348
MARNLGGLLALLFAVSICGAVTIPGPVSDAHRSAALELFDGSFSSLEEAYEALRVFEILTIGNKPDVSTTTCKKVVENLGSSSPVKDLFYALKVNDILKCKVNGDVFKDIALRLKATVNDASTLVEMYYSIGSLVLIKDQASDVDVLLTDADGSFHSIKALSQSDGRWRYSSNNPESSTYAAGLALEALAGVISLASSEIDQSRVNTVKNDILKLFDSIEKYDDGTFYFDEKFVGGREHQGSLSTTSSVVRGVTAFAAVTSGKINLPGDKILGLANFFLGIGIPGDAKDFFNQVESLALLENNKVSIPLVLSLPATVYSLSKKDQLKVRVNTVLGSAAPPLTVKLVQAFRSNAKDSAIESKELQYDQNNGIHFLEAFPDNVDVGTYVFVFEIALHDSAGEKVYATGGQIHVPIYVTGIIKVSNAEIAVLDSDLGSVETQKTLDLAGNDDVSLSANHLQKLRFSFQLTTPHGHAFKPHQAFFKLKHETKHEHIFVVGNTGRKFEIILDFLGLVEKFYYLSGRYDIELTVGDTVMENSFLRLLGEVDLDLPEAPEKAARLPPLPVDPYSRYGPKAEIAHLFRAPEKRPPQELSLTFLGLILLPFIGFLVGLLRLGVNLKNFPSSAVPATYAFLFHLGIAAVLLLYVLFWLKLDLFTTLKTVGFLGAFLLFVGHRILSHLASTSSKLKSA

SEQ ID NO: 6968 - protein, 561 aa, Glycine max
  misc_feature (1)..(561): Ceres Seq. ID no. 15169349
MYYSIGSLVLIKDQASDVDVLLTDADGSFHSIKALSQSDGRWRYSSNNPESSTYAAGLALEALAGVISLASSEIDQSRVNTVKNDILKLFDSIEKYDDGTFYFDEKFVGGREHQGSLSTTSSVVRGVTAFAAVTSGKINLPGDKILGLANFFLGIGIPGDAKDFFNQVESLALLENNKVSIPLVLSLPATVYSLSKKDQLKVRVNTVLGSAAPPLTVKLVQAFRSNAKDSAIESKELQYDQNNGIHFLEAFPDNVDVGTYVFVFEIALHDSAGEKVYATGGQIHVPIYVTGIIKVSNAEIAVLDSDLGSVETQKTLDLAGNDDVSLSANHLQKLRFSFQLTTPHGHAFKPHQAFFKLKHETKHEHIFVVGNTGRKFEIILDFLGLVEKFYYLSGRYDIELTVGDTVMENSFLRLLGEVDLDLPEAPEKAARLPPLPVDPYSRYGPKAEIAHLFRAPEKRPPQELSLTFLGLILLPFIGFLVGLLRLGVNLKNFPSSAVPATYAFLFHLGIAAVLLLYVLFWLKLDLFTTLKTVGFLGAFLLFVGHRILSHLASTSSKLKSA

SEQ ID NO: 6969 - DNA, 1439 bp, Glycine max
  misc_feature (1)..(1439): Ceres Seq. ID no. 15169350
gagaactagattcagattcagattcagatgtcctgaagcgccctcacacatggccacgacaacaaggtcaccgaatcgttcctccgaggacgccgccgatcccacgccgttcctcggcacttcttccgacgaatccacctccggccgccgcctcctccgccgcccgagtctccgcgaggctgcgcgcttcctgcgccaggccagcggccgccgcctcatgcgcgagccgtccatggtggtgcgggaggcggcggcggagcagctcgaggagaggcagagcgattgggcctattccaagcccgtcgtcgtcttggacattctctggaacttcgccttcgtcgcggccgccgcaaccgtcttcattctcagccgcaacgagaatcccaacatgcctctcaggctgtggattgtaggctacgctctgcagtgcgttcttcacgtcgcgtgcgtctgcgtcgagtaccagcgccgcctacgccgccgcgaacagtccaacgccgccgctatcgcgggtggcggcagcggagatttgggtccgccttcgatggacggctctggacactacgtgtcgttggcgcagttcgacgacgatggtataagtatggcaaagcatttggaatcagccaacacaatgttttcgtttatttggtgggttgttggattctattgggtgtcagctgatagtgaatctttggtccgagattctcccctgctctactggttatgtatagccttcctgggttttgatgttttctttgtcgttttctgtatggcactagcatgcatcgttggtattgctgtttgctgttgtcttccatgtatcattgcactcctgtatgcagttgcagaccaggaaggggcatcaaaagaagacattgagcagttgtcaaaattcaagttccaaagaactgaaactaatgagaaacttgctgggaatacacaaggagctgctggaggaataatgattgaatgcgatgctgattctcccattgaacatgttctttctgacgaggatgcggaatgttgcatctgcctttctgcttatgatgacggggttgaacttagacaacttccttgtggccaccattttcactgtgcctgtgtggacaaatggctgcatatcaatgctacatgccccctctgcaagtacaacatcttgaaaagtaccagtcatgctcaagacgaagtgtagtcagaatagctcctagcagccatgttggggaaattgcatctcttttggtttacagtataataggcacaacttgttaatataattcaatgcaggcctttattgtagttgctactgctgcatatcgtttatctcatagtgatagttgttttgattattcttcgttatggtggcttcttaatggttgtgtacatctgctcattgtataccgtaaataattatcttgaggaaagttggttgacgttttttt

SEQ ID NO: 6970 - protein, 396 aa, Glycine max
  misc_feature (1)..(396): Ceres Seq. ID no. 15169351
RTRFRFRFRCPEAPSHMATTTRSPNRSSEDAADPTPFLGTSSDESTSGRRLLRRPSLREAARFLRQASGRRLMREPSMVVREAAAEQLEERQSDWAYSKPVVVLDILWNFAFVAAAATVFILSRNENPNMPLRLWIVGYALQCVLHVACVCVEYQRRLRRREQSNAAAIAGGGSGDLGPPSMDGSGHYVSLAQFDDDGISMAKHLESANTMFSFIWWVVGFYWVSADSESLVRDSPLLYWLCIAFLGFDVFFVVFCMALACIVGIAVCCCLPCIIALLYAVADQEGASKEDIEQLSKFKFQRTETNEKLAGNTQGAAGGIMIECDADSPIEHVLSDEDAECCICLSAYDDGVELRQLPCGHHFHCACVDKWLHINATCPLCKYNILKSTSHAQDEV

SEQ ID NO: 6971 - protein, 380 aa, Glycine max
  misc_feature (1)..(380): Ceres Seq. ID no. 15169352
MATTTRSPNRSSEDAADPTPFLGTSSDESTSGRRLLRRPSLREAARFLRQASGRRLMREPSMVVREAAAEQLEERQSDWAYSKPVVVLDILWNFAFVAAAATVFILSRNENPNMPLRLWIVGYALQCVLHVACVCVEYQRRLRRREQSNAAAIAGGGSGDLGPPSMDGSGHYVSLAQFDDDGISMAKHLESANTMFSFIWWVVGFYWVSADSESLVRDSPLLYWLCIAFLGFDVFFVVFCMALACIVGIAVCCCLPCIIALLYAVADQEGASKEDIEQLSKFKFQRTETNEKLAGNTQGAAGGIMIECDADSPIEHVLSDEDAECCICLSAYDDGVELRQLPCGHHFHCACVDKWLHINATCPLCKYNILKSTSHAQDEV

SEQ ID NO: 6972 - protein, 324 aa, Glycine max
  misc_feature (1)..(324): Ceres Seq. ID no. 15169353
MREPSMVVREAAAEQLEERQSDWAYSKPVVVLDILWNFAFVAAAATVFILSRNENPNMPLRLWIVGYALQCVLHVACVCVEYQRRLRRREQSNAAAIAGGGSGDLGPPSMDGSGHYVSLAQFDDDGISMAKHLESANTMFSFIWWVVGFYWVSADSESLVRDSPLLYWLCIAFLGFDVFFVVFCMALACIVGIAVCCCLPCIIALLYAVADQEGASKEDIEQLSKFKFQRTETNEKLAGNTQGAAGGIMIECDADSPIEHVLSDEDAECCICLSAYDDGVELRQLPCGHHFHCACVDKWLHINATCPLCKYNILKSTSHAQDEV

SEQ ID NO: 6973 - DNA, 2086 bp, Glycine max
  misc_feature (1)..(2086): Ceres Seq. ID no. 15169400
gtccctttgcagcagtcaaagaaatcagaacctgagaagccaaattatagtgaagccaacaagggtgaaccagctcatgaaacatttatgcaacaaacaaagggtaaggataaacaatctgcaactgctactgcagaaacagatgataatcaagaagttagtggcctacctactaatattccaggaagcaacactaaaacagttatcaaaaatgagttaaaggcagtcagttctgttgccacacagaatactgaattaccttcagcgagagcttggaaacctgctcctggtttcaaggcaaaatctctcttagaaattcaactggaagaacaaaaaaagtcactgacagaaaagcttgtatctgaggttgctactcctgtcaattccatgagctcaacaactccctgggttggagttgtcgccaatccagactctatgaaggtgtcaaatgatggccacagagaagcagaaaatactgaatatctggctaaagctgaaaaatctcaaaatagtaaaagcaagaaaagcccattacatgatctattggcagaagatcttgtaccaaaatctagtgaaagagatggcaaggttcctgacagtatgctcccctcacaaaatatagctgttcactcaaaactggtagatgatggagactttattgaagctaaagacactaaaagaagccggaaaaaatctgcaaagttgaagagttcaggagctaaggtttcaatgccagttgcctctagtgaagtacccataagcccaattcacattgaaaaggtaaaaagctcccgttctgttcagcaggagaaagaacaactgccttccattccttcaggaccctctttgggagattttgttctttggaaaggagagccaacaagcccatctcctcctccagcatggactactgattctgctaggattcctaaaccaacatcattaagggacattctaaaggagcaggagaagaagtcctctgcagtactcccaaatcaactgcctactcctcaaaaatcacaaactgcccaagctgcacggagtagtggttcttcacgcccaatttcagcttcatctccatcaaaaactgcaccttctagccagataaactcccaagcttctctgtcaaaatacagaggggatgatgatatgttttggggtccagtcgagcaatccaagcaagaaaataagcagtcaaatttccctcaacttgctaggcaggggagctggggttctaaaagtgttcccatgaaaggtaattcacctggatcattgagtcgacaaaaatctgggagtggcaaaccaactgagcaatctctatcatcatcacctgcctcttctcaatcactgctaaaactgaaaaaagatgcaatgaccaagaattctgaagccatggacttcagagtttggtgtgagaatgaatgtgcgaggctcattgggacaaaagatacaagtttccttgagttttgcttgaagcagacaagatctgaagcagagatatttctcacagaaaacctgggattatatgaccatgatcatgaattcattgataaattcctcaattacatggacctactaccatcagatgttttggaaatagcttttcaaaccgtgaatgatcggaaagttgatgcaaatacagatgtactagagctaggttacactgatggatccttttcaaaagttggaaagaagaaaggcggcaacaaaggaaaaaaggtaagctcttcagttttgggattcaatgtcgtgagtaacaggatcatgatgggtgagatccagacagtagaagactaacataacataggttattgcggaacgtgtaaatattttttggccatacgtgtattttgtaaatgtattttctgttattcatttaactttttttggcttttttaacagtagcagcatcaattgtatctgctcaatcagttttgttgtcttaaatgtattttgacgtttgatcacgctgacaaacataatattgtgtcagccttaacttgattcaattaatttgctgtttatcttttgtaagcaagctaattgattcgtaggcagagtctgtagcttgtaaagcccgttttgg

SEQ ID NO: 6974 - protein, 598 aa, Glycine max
  misc_feature (1)..(598): Ceres Seq. ID no. 15169401
VPLQQSKKSEPEKPNYSEANKGEPAHETFMQQTKGKDKQSATATAETDDNQEVSGLPTNIPGSNTKTVIKNELKAVSSVATQNTELPSARAWKPAPGFKAKSLLEIQLEEQKKSLTEKLVSEVATPVNSMSSTTPWVGVVANPDSMKVSNDGHREAENTEYLAKAEKSQNSKSKKSPLHDLLAEDLVPKSSERDGKVPDSMLPSQNIAVHSKLVDDGDFIEAKDTKRSRKKSAKLKSSGAKVSMPVASSEVPISPIHIEKVKSSRSVQQEKEQLPSIPSGPSLGDFVLWKGEPTSPSPPPAWTTDSARIPKPTSLRDILKEQEKKSSAVLPNQLPTPQKSQTAQAARSSGSSRPISASSPSKTAPSSQINSQASLSKYRGDDDMFWGPVEQSKQENKQSNFPQLARQGSWGSKSVPMKGNSPGSLSRQKSGSGKPTEQSLSSSPASSQSLLKLKKDAMTKNSEAMDFRVWCENECARLIGTKDTSFLEFCLKQTRSEAEIFLTENLGLYDHDHEFIDKFLNYMDLLPSDVLEIAFQTVNDRKVDANTDVLELGYTDGSFSKVGKKKGGNKGKKVSSSVLGFNVVSNRIMMGEIQTVED

SEQ ID NO: 6975 - protein, 569 aa, Glycine max
  misc_feature (1)..(569): Ceres Seq. ID no. 15169402
MQQTKGKDKQSATATAETDDNQEVSGLPTNIPGSNTKTVIKNELKAVSSVATQNTELPSARAWKPAPGFKAKSLLEIQLEEQKKSLTEKLVSEVATPVNSMSSTTPWVGVVANPDSMKVSNDGHREAENTEYLAKAEKSQNSKSKKSPLHDLLAEDLVPKSSERDGKVPDSMLPSQNIAVHSKLVDDGDFIEAKDTKRSRKKSAKLKSSGAKVSMPVASSEVPISPIHIEKVKSSRSVQQEKEQLPSIPSGPSLGDFVLWKGEPTSPSPPPAWTTDSARIPKPTSLRDILKEQEKKSSAVLPNQLPTPQKSQTAQAARSSGSSRPISASSPSKTAPSSQINSQASLSKYRGDDDMFWGPVEQSKQENKQSNFPQLARQGSWGSKSVPMKGNSPGSLSRQKSGSGKPTEQSLSSSPASSQSLLKLKKDAMTKNSEAMDFRVWCENECARLIGTKDTSFLEFCLKQTRSEAEIFLTENLGLYDHDHEFIDKFLNYMDLLPSDVLEIAFQTVNDRKVDANTDVLELGYTDGSFSKVGKKKGGNKGKKVSSSVLGFNVVSNRIMMGEIQTVED

SEQ ID NO: 6976 - protein, 469 aa, Glycine max
  misc_feature (1)..(469): Ceres Seq. ID no. 15169403
MSSTTPWVGVVANPDSMKVSNDGHREAENTEYLAKAEKSQNSKSKKSPLHDLLAEDLVPKSSERDGKVPDSMLPSQNIAVHSKLVDDGDFIEAKDTKRSRKKSAKLKSSGAKVSMPVASSEVPISPIHIEKVKSSRSVQQEKEQLPSIPSGPSLGDFVLWKGEPTSPSPPPAWTTDSARIPKPTSLRDILKEQEKKSSAVLPNQLPTPQKSQTAQAARSSGSSRPISASSPSKTAPSSQINSQASLSKYRGDDDMFWGPVEQSKQENKQSNFPQLARQGSWGSKSVPMKGNSPGSLSRQKSGSGKPTEQSLSSSPASSQSLLKLKKDAMTKNSEAMDFRVWCENECARLIGTKDTSFLEFCLKQTRSEAEIFLTENLGLYDHDHEFIDKFLNYMDLLPSDVLEIAFQTVNDRKVDANTDVLELGYTDGSFSKVGKKKGGNKGKKVSSSVLGFNVVSNRIMMGEIQTVED

SEQ ID NO: 6977 - DNA, 1799 bp, Glycine max
  misc_feature (1)..(1799): Ceres Seq. ID no. 15169423
tattcctcctcctgagaagtcaaaagagaatctcttgcttttctttaaactttatgaaccttcaaatgagaagcttcggtatgttgggcggctttttgtgaagagtagtgggaagccagaagatatattggtaaaactaaatgaaatggctggatatgctcctgatcaagatatagacatgttcgaggagataaaatttgtgcctaatgtcatgtgtgaacgggttgacaagaaatccacattctttgggagtcagcttgaggatggtgatattatttgcttccaaaagtccgtccaaactggaagtggagagcgatatcgctatccagatgttccttctttcttggaatatgtgcacaaccgtttggttgttcgctttaggactttggagaaaccaaaggaggatgaatttagtctggagctgacaaagcttgacacttatgacaatgttgtagaagaagttgctcaacatattggtttgagtgatccttctaaaattagactcacatctcataactgctactcccagcaacctaaaccacagtctatcaagtaccgaggaatggaacatttgtcagacatgctgattcactctaatcagacttctgatattctatactatgaagtattggatatccctctgccagaattgcaatgcctaaaaactcttaaaattgctttccatcatgataccaacgatgaagttgtgattcatactattagattaccgagacatagtactgtgtctgatgtaattaatgatcttaaatcaaaggtagatttatcacatcctgatgcagaacttagattgcttgaaattttctatcacaagatctataagattttccgtgtcagcgaaaagattgagaacattaatgatcaatattgtgctctacgagcagaggaggttcttgaagaagagaaaaaccttggcccgcatgatcggttgatccatgtttatcatttcttgaaagacacaactcaaaatcagcagcaagttcagaactttggacatccttttttattggttatccatgagggtgagacattaactgaagtcaaattgcgaatacagaaaaagttgcaagttccagatgaggagttttcaaagtggaagtttgcatttttgtcatttggtcgtcctgagtaccttcaagattcagatattgtttcagctcggtttcagaggagggatatctacggtgcatgggagcaatatctcggactggaacacactgacaatgcttcaaaaaggtcgaatgctgccaatcagaatcgtcacgagaaggcagtaaaaatctatgattagagaaacgtttcatcttgaccagtcattttaatggcaccatatgccagctgcacttgaagcgttctgaaggagagaatggagaagctaccaatcttctaaagggtagtctgttgaaaaccataattttcttagctgagatggtggggggtggtgtatagccttcaatagtgattaaaactcgtcttttgagcaaacaaatctttggttgttaggaggttgaatttgaaattcccttgtcatttggtacataacattttggggttgggttttgtatagaaggtataggaatgtaggtatagttaaactcttttctatggcccatttcaccatagtgggatctttatttgcttcagttggtgaagctccgcgaggatggggaaatgtgtaatgtttctacaggagctaacatgtaaatttcccttgtgcctttcttaaccttggttttgtttaccgtacttattggtgttaaaggaaaacattattttttccc

SEQ ID NO: 6978 - protein, 435 aa, Glycine max
  misc_feature (1)..(435): Ceres Seq. ID no. 15169424
IPPPEKSKENLLLFFKLYEPSNEKLRYVGRLFVKSSGKPEDILVKLNEMAGYAPDQDIDMFEEIKFVPNVMCERVDKKSTFFGSQLEDGDIICFQKSVQTGSGERYRYPDVPSFLEYVHNRLVVRFRTLEKPKEDEFSLELTKLDTYDNVVEEVAQHIGLSDPSKIRLTSHNCYSQQPKPQSIKYRGMEHLSDMLIHSNQTSDILYYEVLDIPLPELQCLKTLKIAFHHDTNDEVVIHTIRLPRHSTVSDVINDLKSKVDLSHPDAELRLLEIFYHKIYKIFRVSEKIENINDQYCALRAEEVLEEEKNLGPHDRLIHVYHFLKDTTQNQQQVQNFGHPFLLVIHEGETLTEVKLRIQKKLQVPDEEFSKWKFAFLSFGRPEYLQDSDIVSARFQRRDIYGAWEQYLGLEHTDNASKRSNAANQNRHEKAVKIYD

SEQ ID NO: 6979 - protein, 387 aa, Glycine max
  misc_feature (1)..(387): Ceres Seq. ID no. 15169425
MAGYAPDQDIDMFEEIKFVPNVMCERVDKKSTFFGSQLEDGDIICFQKSVQTGSGERYRYPDVPSFLEYVHNRLVVRFRTLEKPKEDEFSLELTKLDTYDNVVEEVAQHIGLSDPSKIRLTSHNCYSQQPKPQSIKYRGMEHLSDMLIHSNQTSDILYYEVLDIPLPELQCLKTLKIAFHHDTNDEVVIHTIRLPRHSTVSDVINDLKSKVDLSHPDAELRLLEIFYHKIYKIFRVSEKIENINDQYCALRAEEVLEEEKNLGPHDRLIHVYHFLKDTTQNQQQVQNFGHPFLLVIHEGETLTEVKLRIQKKLQVPDEEFSKWKFAFLSFGRPEYLQDSDIVSARFQRRDIYGAWEQYLGLEHTDNASKRSNAANQNRHEKAVKIYD

SEQ ID NO: 6980 - protein, 376 aa, Glycine max
  misc_feature (1)..(376): Ceres Seq. ID no. 15169426
MFEEIKFVPNVMCERVDKKSTFFGSQLEDGDIICFQKSVQTGSGERYRYPDVPSFLEYVHNRLVVRFRTLEKPKEDEFSLELTKLDTYDNVVEEVAQHIGLSDPSKIRLTSHNCYSQQPKPQSIKYRGMEHLSDMLIHSNQTSDILYYEVLDIPLPELQCLKTLKIAFHHDTNDEVVIHTIRLPRHSTVSDVINDLKSKVDLSHPDAELRLLEIFYHKIYKIFRVSEKIENINDQYCALRAEEVLEEEKNLGPHDRLIHVYHFLKDTTQNQQQVQNFGHPFLLVIHEGETLTEVKLRIQKKLQVPDEEFSKWKFAFLSFGRPEYLQDSDIVSARFQRRDIYGAWEQYLGLEHTDNASKRSNAANQNRHEKAVKIYD

SEQ ID NO: 6981 - DNA, 1163 bp, Glycine max
  misc_feature (1)..(1163): Ceres Seq. ID no. 15169431
aaagtttaaaccctacagaaaaacgctacataaaccccgcaacaaacaaccaacccccaaacccctcactcttctcggcgtccatcggaaatttccaaggtaaaaagatgaatctgaagaacatgaagattccgaacgttccaggcggcggtgcgtcctctgcgctgctgaagcttgggcttcttggtggaattggtttatatgcagctgctaacagtctctacaacgttgaaggaggtcaccgagccattgttttcaaccgtctagttggtgtcaaagacaaggtctatcctgaaggaacacactttatgattccgtggtttgagaggcctgttatctatgatgtccgtgcacgaccccatctagttgagagtacatctggtagtcgtgatctacagatggtgaaaattggacttcgagttcttactcgccctttgcccaaccaattacctacggtttatcggacccttggagagaattataatgaaagggttttaccttcaatcatacatgaaactttgaaagccgtggttgcccagtacaatgccagccagcttattactcagcgagaggctgttagtcgggaaatccggaagattctaactgaaagggctgctaacttcaatattgcccttgatgatgtgtcaattactagtctgacttttggcaaggagtttactgctgcaattgaagctaagcaggtagctgcacaagaagctgagagggctaaatttgttgtggaaaaagctgagcaagacaagagaagtgctgtaattagagcacagggagaagcaaaaagtgcccaactgattgggcaagctattgccaacaatccagcttttatcacactgaggaagatagaagccgcaagggagattgcacatactatatcaaatgcggcaaacaaggtttacctgaattcagatgatctattgttgaatcttcaagagatgaaattggagccaggcagaaagtgagtgtgttagcctgtttgtttctttttggttttagcttgtaaactatcaatttcaggatcgattttcttgatatgtttttgcaaattcggatatagctggcttgattagacaactgagcggcaaccctttaaatctttgggaaaggattaattgagatccaaacgaatgcttcacattacttgaaac

SEQ ID NO: 6982 - protein, 324 aa, Glycine max
  misc_feature (1)..(324): Ceres Seq. ID no. 15169432
SLNPTEKRYINPATNNQPPNPSLFSASIGNFQGKKMNLKNMKIPNVPGGGASSALLKLGLLGGIGLYAAANSLYNVEGGHRAIVFNRLVGVKDKVYPEGTHFMIPWFERPVIYDVRARPHLVESTSGSRDLQMVKIGLRVLTRPLPNQLPTVYRTLGENYNERVLPSIIHETLKAVVAQYNASQLITQREAVSREIRKILTERAANFNIALDDVSITSLTFGKEFTAAIEAKQVAAQEAERAKFVVEKAEQDKRSAVIRAQGEAKSAQLIGQAIANNPAFITLRKIEAAREIAHTISNAANKVYLNSDDLLLNLQEMKLEPGRK

SEQ ID NO: 6983 - protein, 289 aa, Glycine max
  misc_feature (1)..(289): Ceres Seq. ID no. 15169433
MNLKNMKIPNVPGGGASSALLKLGLLGGIGLYAAANSLYNVEGGHRAIVFNRLVGVKDKVYPEGTHFMIPWFERPVIYDVRARPHLVESTSGSRDLQMVKIGLRVLTRPLPNQLPTVYRTLGENYNERVLPSIIHETLKAVVAQYNASQLITQREAVSREIRKILTERAANFNIALDDVSITSLTFGKEFTAAIEAKQVAAQEAERAKFVVEKAEQDKRSAVIRAQGEAKSAQLIGQAIANNPAFITLRKIEAAREIAHTISNAANKVYLNSDDLLLNLQEMKLEPGRK

SEQ ID NO: 6984 - protein, 284 aa, Glycine max
  misc_feature (1)..(284): Ceres Seq. ID no. 15169434
MKIPNVPGGGASSALLKLGLLGGIGLYAAANSLYNVEGGHRAIVFNRLVGVKDKVYPEGTHFMIPWFERPVIYDVRARPHLVESTSGSRDLQMVKIGLRVLTRPLPNQLPTVYRTLGENYNERVLPSIIHETLKAVVAQYNASQLITQREAVSREIRKILTERAANFNIALDDVSITSLTFGKEFTAAIEAKQVAAQEAERAKFVVEKAEQDKRSAVIRAQGEAKSAQLIGQAIANNPAFITLRKIEAAREIAHTISNAANKVYLNSDDLLLNLQEMKLEPGRK

SEQ ID NO: 6985 - DNA, 2254 bp, Glycine max
  misc_feature (1)..(2254): Ceres Seq. ID no. 15169439
gaagatgacgcgtcgataagtaaaaaaccctagaaaccacactgatatactcttagtgtcttacacacactgtggctttggcagcgcgactcgtcttcgttccttaccctcgggttgatctgtgagaggggcttgatagccctctctctctgctgctgcaattcagattgttggcaactattttttatacagacgatttgtcttcacatggaagcattgcttgcttgagggacgcctttgtctcaaaggagttggaattttcgggttttttgtgggattggagatttagagagtgcccttgcactccctgttttatttcatcaccatgattgccactgaaactatagtaccaagtacaaaattgaagatcaagttctcaaccaaaaggatagagattgattctgggccaaaatgtgagtttggacagaaagtgtatcacaatgataaaaacaggcgctgtaattctaatgaaaattcctcagcactgaattctaacaagaggggaccaccagtaagtgttgagggccaaaaggagaaaagacaaaagattgatcggaaagggtcgatgcagtgtgctacaatacttaagagtttaatgtctcactcatatagttgggtgtttcttaagccagtggaccctgtagcattgagtattccagattattttacaatcatatctcatccaatggatttgggcacaattaaatctaagctggagagaaacatttattctggcactgaggagtttgcagatgatgtcagactgaccttctcaaatgcaatgaaatataatcctcccggtaatgatgttcatatgatggcgaaggaactcagcaaaatatttgacagaaaatggaaagactttggtaggaaatggaagtttgaagatgagcatgataaaagcgaaactgaaacaattaaggaaactgggagaaaaagtcttgatgcaatgcttccccggcataaagattccttgcccaaaaaaacacaattattcgaacacataggaatgcacaagattagatcattggcaacaaaagatgccagagtggagacacctaaattatcacagattccttgcaagttgattgagaaagacttgcacaaaggcagcaaaggtaatcatgatgtggaacagccttctggctctctaaagtcatatttttcagtacgttttgtcacatccaagtgtagaatttgtggcaatatcatatgccattgtgaaaatcctagcaattcaacacaggtgtcatcagacatatcatccgaaggatctgaaggaagggacctaattgcacgtggtgccgattcattgagacaggattgccggactaaatgtacatcacctatggagaagaaatctgatcttgattctgatggagctgtaagttctttggacagtgaacatgtttgtcctagttctcagcatgtaactcctactactgatgcctcttctggggaagtatggagcatgcctgttttgcccgtccagctttctcctaaaaaggctcttcgtgctgctatacttaaaagccgctttgcagataccattttgaaagcacagcaaaagacccttcttgatcatggtgataaaggtaatcctcaaaaaatgcagcaggaaaaggagagattggaaaggattcagcgtgaagaaagagctaggatcgaagcccaaattaaaactgctgaagctgctgcaagaatgagggctgaggaagagtcaaggcagcggagagaaaaggaaagagaagcttcacgagctgcaatagaaaagatgaaaagaaccgttgatatagaacataatatggagattattaaagaacttgaaagtttgagtggatgcacgctatcttataaggccgttggcggtagaaatggctacaaagttgcattggagacattggataaacatcagtttgagaacccattggagcggcttggtttatttatcaaggaagacttcaccacagatcttgatgaggaggttttgaacggaggctttgaagaaggggaaatttttaactgaatgcaccttcatgcagttctgccagctctaagtgtttatatcccttttagacatggaaacagacaattattgtaaatgcacatattgtttggaatcaagtctttcgactatatctgccttaattaccctcttgtctgggaattagataactacacacgcttgcaattttgttttacaatattaaagtattccttccagcaaacatataaagaaagctcttacaggcga

SEQ ID NO: 6986 - protein, 566 aa, Glycine max
  misc_feature (1)..(566): Ceres Seq. ID no. 15169440
MIATETIVPSTKLKIKFSTKRIEIDSGPKCEFGQKVYHNDKNRRCNSNENSSALNSNKRGPPVSVEGQKEKRQKIDRKGSMQCATILKSLMSHSYSWVFLKPVDPVALSIPDYFTIISHPMDLGTIKSKLERNIYSGTEEFADDVRLTFSNAMKYNPPGNDVHMMAKELSKIFDRKWKDFGRKWKFEDEHDKSETETIKETGRKSLDAMLPRHKDSLPKKTQLFEHIGMHKIRSLATKDARVETPKLSQIPCKLIEKDLHKGSKGNHDVEQPSGSLKSYFSVRFVTSKCRICGNIICHCENPSNSTQVSSDISSEGSEGRDLIARGADSLRQDCRTKCTSPMEKKSDLDSDGAVSSLDSEHVCPSSQHVTPTTDASSGEVWSMPVLPVQLSPKKALRAAILKSRFADTILKAQQKTLLDHGDKGNPQKMQQEKERLERIQREERARIEAQIKTAEAAARMRAEEESRQRREKEREASRAAIEKMKRTVDIEHNMEIIKELESLSGCTLSYKAVGGRNGYKVALETLDKHQFENPLERLGLFIKEDFTTDLDEEVLNGGFEEGEIFN

SEQ ID NO: 6987 - protein, 486 aa, Glycine max
  misc_feature (1)..(486): Ceres Seq. ID no. 15169441
MQCATILKSLMSHSYSWVFLKPVDPVALSIPDYFTIISHPMDLGTIKSKLERNIYSGTEEFADDVRLTFSNAMKYNPPGNDVHMMAKELSKIFDRKWKDFGRKWKFEDEHDKSETETIKETGRKSLDAMLPRHKDSLPKKTQLFEHIGMHKIRSLATKDARVETPKLSQIPCKLIEKDLHKGSKGNHDVEQPSGSLKSYFSVRFVTSKCRICGNIICHCENPSNSTQVSSDISSEGSEGRDLIARGADSLRQDCRTKCTSPMEKKSDLDSDGAVSSLDSEHVCPSSQHVTPTTDASSGEVWSMPVLPVQLSPKKALRAAILKSRFADTILKAQQKTLLDHGDKGNPQKMQQEKERLERIQREERARIEAQIKTAEAAARMRAEEESRQRREKEREASRAAIEKMKRTVDIEHNMEIIKELESLSGCTLSYKAVGGRNGYKVALETLDKHQFENPLERLGLFIKEDFTTDLDEEVLNGGFEEGEIFN

SEQ ID NO: 6988 - protein, 476 aa, Glycine max
  misc_feature (1)..(476): Ceres Seq. ID no. 15169442
MSHSYSWVFLKPVDPVALSIPDYFTIISHPMDLGTIKSKLERNIYSGTEEFADDVRLTFSNAMKYNPPGNDVHMMAKELSKIFDRKWKDFGRKWKFEDEHDKSETETIKETGRKSLDAMLPRHKDSLPKKTQLFEHIGMHKIRSLATKDARVETPKLSQIPCKLIEKDLHKGSKGNHDVEQPSGSLKSYFSVRFVTSKCRICGNIICHCENPSNSTQVSSDISSEGSEGRDLIARGADSLRQDCRTKCTSPMEKKSDLDSDGAVSSLDSEHVCPSSQHVTPTTDASSGEVWSMPVLPVQLSPKKALRAAILKSRFADTILKAQQKTLLDHGDKGNPQKMQQEKERLERIQREERARIEAQIKTAEAAARMRAEEESRQRREKEREASRAAIEKMKRTVDIEHNMEIIKELESLSGCTLSYKAVGGRNGYKVALETLDKHQFENPLERLGLFIKEDFTTDLDEEVLNGGFEEGEIFN

SEQ ID NO: 6989 - DNA, 878 bp, Glycine max
  misc_feature (1)..(878): Ceres Seq. ID no. 15169753
agaaaactattttggtttaatttgcctttccttttcaagggagctcattgaagagacaaaaaacaatggctgaaacaaagttgagcatgatgaaggacaaaagatggtcactccgtggaatgactgctctcgtcacaggagccacccgaggcatagggcatgccattgttgaagaattggcagactttggagcaactgttcatatatgtgcacgtaatcaagatgatattgataagtgtttagaagagtggaaaaacgagggacttaatgtgactggctcagtatgtgatttacaatgttctgaccaacgtataagattaatggaagttgttggctccatctttcacggaaagctcaacatactagtgaacaatgctggaagatgtatagcaaagacaatattggattccactgcggaagatatatcaaccactatgggcaccaattttgagtcagcttatcatttgtgtcaacttgcacacccacttctaagagaatctgggtacgggagcgtagtatttatttcttccactgcaggtttaaggggttttccctttttttctgcttatgcagcctctaaagaattcttcagaagtgagcgacgttgtgaatgcagcaacgtctcaatcacttgttggtcgcatgggagaagctaaacagatatcagcattagttgcttttctttgccttccggttgcatcatacatcactggacaagttatatgtgttgatgggggtctcacaacttaattagtattctgttaattactatcatttggctgctgaattaaattctaatgtatgcagttggtgtttcctccaacccattcatgctttgtatatcattggctgggtttaattatttcttgtttttaagc

SEQ ID NO: 6990 - protein, 196 aa, Glycine max
  misc_feature (1)..(196): Ceres Seq. ID no. 15169754
MAETKLSMMKDKRWSLRGMTALVTGATRGIGHAIVEELADFGATVHICARNQDDIDKCLEEWKNEGLNVTGSVCDLQCSDQRIRLMEVVGSIFHGKLNILVNNAGRCIAKTILDSTAEDISTTMGTNFESAYHLCQLAHPLLRESGYGSVVFISSTAGLRGFPFFSAYAASKEFFRSERRCECSNVSITCWSHGRS

SEQ ID NO: 6991 - protein, 189 aa, Glycine max
  misc_feature (1)..(189): Ceres Seq. ID no. 15169755
MMKDKRWSLRGMTALVTGATRGIGHAIVEELADFGATVHICARNQDDIDKCLEEWKNEGLNVTGSVCDLQCSDQRIRLMEVVGSIFHGKLNILVNNAGRCIAKTILDSTAEDISTTMGTNFESAYHLCQLAHPLLRESGYGSVVFISSTAGLRGFPFFSAYAASKEFFRSERRCECSNVSITCWSHGRS

SEQ ID NO: 6992 - protein, 188 aa, Glycine max
  misc_feature (1)..(188): Ceres Seq. ID no. 15169756
MKDKRWSLRGMTALVTGATRGIGHAIVEELADFGATVHICARNQDDIDKCLEEWKNEGLNVTGSVCDLQCSDQRIRLMEVVGSIFHGKLNILVNNAGRCIAKTILDSTAEDISTTMGTNFESAYHLCQLAHPLLRESGYGSVVFISSTAGLRGFPFFSAYAASKEFFRSERRCECSNVSITCWSHGRS

SEQ ID NO: 6993 - DNA, 794 bp, Glycine max
  misc_feature (1)..(794): Ceres Seq. ID no. 15169812
tcagctacgggccccccccccaaagttgtttctacctttttctaactccactttatttttcagcattggaagtctagggaaaaacaactcaacaggcatagtcacgaaagtgattttggatacagcagttcttagggagactaccaacggtgtcagaattaagacttggcagggaggttctggatatgttcgaggggtgcgttttcagaatgtgagggtggaaaatgtatccaaccccattatcatagaccaattttactgtgattcgccaaccagttgtgaaaaccagacaacagcagtggagataagcgaggtgatgtaccagaacataagtggcactacaatgagtgctaaggccattaaatttgactgcagtgactcagtcccatgcaacaaactagtccttagcaatgtggacttagagaaacaagatggctctgttgaaacatattgccactcagcacaaggatttccctatggagtggtgcacccttctgctgattgccttagttccagcgacaaaacctctcaaattgaagaatcaactacagaggaagaagatattcgtcacattgaactataaatttgatttctaaagatgcattatacaattaataacctttttcttaatataattttatatcaaatggggtaagagtaagaggcttgttttctatcacacttagcagttgtagtgatatacgttggagggggcttgaggcgagatcagagagaaatcaagggatgtattggttattaaataattagacattacaacaaaattgatacaagag

SEQ ID NO: 6994 - protein, 193 aa, Glycine max
  misc_feature (1)..(193): Ceres Seq. ID no. 15169813
QLRAPPPKLFLPFSNSTLFFSIGSLGKNNSTGIVTKVILDTAVLRETTNGVRIKTWQGGSGYVRGVRFQNVRVENVSNPIIIDQFYCDSPTSCENQTTAVEISEVMYQNISGTTMSAKAIKFDCSDSVPCNKLVLSNVDLEKQDGSVETYCHSAQGFPYGVVHPSADCLSSSDKTSQIEESTTEEEDIRHIEL

SEQ ID NO: 6995 - DNA, 601 bp, Glycine max
  misc_feature (1)..(601): Ceres Seq. ID no. 15169814
gttagagacaaaataaaaacccaaataatttcaaaatagttttttagataatattttgatcggatggggttcttacacaagctgtgggatgacacggtggccggaccagctccggaaaatggtctgggagaattgagaaagcatgtttcattagccactgtccaatctcctcctctctccaccgatcaagtcacaagaagcatagtcgttaccaaggggaataacaatgttcgtgggctccggaatttgaagatgggtccgggtcgtgctccggattctccgaccgggtcaagtagcaccccgggaacgcctctaacccctggaacaccgtgtgatcactttggaccattcagcgcagataaaatcccatccgccggtgaagttgatgcctcaagtctcactacttatgaatggattgtgataaacgcattggaccgttgaaaacgacgagaaagagagaaagctctacgggtttttgtttataaatattaatcacctaagcatgtaattatgttaatatttacagatatggtaactgttaaataatgtctccttttaacaatgatttagtattatataacaaaacataaaattattacat

SEQ ID NO: 6996 - protein, 125 aa, Glycine max
  misc_feature (1)..(125): Ceres Seq. ID no. 15169815
MGFLHKLWDDTVAGPAPENGLGELRKHVSLATVQSPPLSTDQVTRSIVVTKGNNNVRGLRNLKMGPGRAPDSPTGSSSTPGTPLTPGTPCDHFGPFSADKIPSAGEVDASSLTTYEWIVINALDR

SEQ ID NO: 6997 - protein, 62 aa, Glycine max
  misc_feature (1)..(62): Ceres Seq. ID no. 15169816
MGPGRAPDSPTGSSSTPGTPLTPGTPCDHFGPFSADKIPSAGEVDASSLTTYEWIVINALDR

SEQ ID NO: 6998 - DNA, 498 bp, Glycine max
  misc_feature (1)..(498): Ceres Seq. ID no. 15169817
tattgtcaggaaaagaacctcattcttgaagtcacctctctcggtgtcgtcgccttcgtattcctcctcgtcgtcgtcgattagggaaaccacaattcaagaagatgaatgtgaagagaggctgaatgtttcatcatcacctatggctgcagggtgccctggttgcttatcatatgtaatgatcatgaagaacaaccctaagtgtcctaggtgtaactctcttgttcctattccttccatgaagaaacctaggattgacctcaacatatcaatttaagttgggtaattgatgaaaattgcctccattttcaatataatttgttattatttttttatatcaacgttttatgtaaatggaatgatagagatgataaatttaggtcgttttaagaataggatcatttgtttagtgatattggggccagggtttatgaatgtatattgaaaagtcactgccgttttactaggaaagttaatagaaaattctccaatttctgc

SEQ ID NO: 6999 - protein, 91 aa, Glycine max
  misc_feature (1)..(91): Ceres Seq. ID no. 15169818
IVRKRTSFLKSPLSVSSPSYSSSSSSIRETTIQEDECEERLNVSSSPMAAGCPGCLSYVMIMKNNPKCPRCNSLVPIPSMKKPRIDLNISI

SEQ ID NO: 7000 - protein, 51 aa, Glycine max
  misc_feature (1)..(51): Ceres Seq. ID no. 15169819
MKIASIFNIICYYFFISTFYVNGMIEMINLGRFKNRIICLVILGPGFMNVY

SEQ ID NO: 7001 - protein, 44 aa, Glycine max
  misc_feature (1)..(44): Ceres Seq. ID no. 15169820
MAAGCPGCLSYVMIMKNNPKCPRCNSLVPIPSMKKPRIDLNISI

SEQ ID NO: 7002 - DNA, 580 bp, Glycine max
  misc_feature (1)..(580): Ceres Seq. ID no. 15169825
aacattctttccatattaactagttaacatcatggctcatggcttgagttatattttacttttcaactaacatgttaatgttcttgaagatgtttgttatactttgtttgatgcaggatgtgatggatgacccttgtgttgctgctgatggatatacatatgatcgcaaagcaattgaaaagtggcttgaagagaacgacaaatcaccaatgacgaacatggctttacctcataagcatttaattcctaattacacactgctctcagcaattttggagtggaagtccagagaatcgtgatatcagcattatctttctccatgttaatattgagaccaatgatttctctgatgtagagagtggctagaaagtttggtgggtatgacctttagcagtgtcttggatgcagatttttttcgtagttgtaccattccaagcatgctgtctggttaatttaggtagagcgatttcaagtgtagataaatttgattctattgtctgattctgtgtatacatacatatgtcaaatcttgttcttactataaataaaataagaaccatgtatacattcaaggctagct

SEQ ID NO: 7003 - protein, 75 aa, Glycine max
  misc_feature (1)..(75): Ceres Seq. ID no. 15169826
MLMFLKMFVILCLMQDVMDDPCVAADGYTYDRKAIEKWLEENDKSPMTNMALPHKHLIPNYTLLSAILEWKSRES

SEQ ID NO: 7004 - protein, 73 aa, Glycine max
  misc_feature (1)..(73): Ceres Seq. ID no. 15169827
MFLKMFVILCLMQDVMDDPCVAADGYTYDRKAIEKWLEENDKSPMTNMALPHKHLIPNYTLLSAILEWKSRES

SEQ ID NO: 7005 - protein, 69 aa, Glycine max
  misc_feature (1)..(69): Ceres Seq. ID no. 15169828
MFVILCLMQDVMDDPCVAADGYTYDRKAIEKWLEENDKSPMTNMALPHKHLIPNYTLLSAILEWKSRES

SEQ ID NO: 7006 - DNA, 738 bp, Glycine max
  misc_feature (1)..(738): Ceres Seq. ID no. 15169910
agggtgtaaacttaaaacataaacaagtacgaagggaaggaatgaagtaaagaacataactaaacactagcaggaccaaaagggtattcttccgacgaagaaacacgatcgtatcgtatcaccggaaattctgactctcacagatttctgggagcgacaattgcaactccgattcgacttgaagagagggaggaaggtgaagaagattggcaaattataagaatacgttgagatgtcagcgcttttcaatttccattcatttctaaccgtgatacttctgggaatatgtgcctgcacttatttcaagatgcagtttccggctatccttgaccagaaaactgggtttcgtggtttcttctggaaggcagcaagaataggtgaacgcttaagcccatgggtagcagcaggttgctttatgatgggtgtttcaataatcttcttctaagctttgttttacactcaatagcatggcaccttctttgagttctttcaatggagatctgatggttgatggtgctgccctttcatggaccatctagtgattatattctttcttctgtacaaatgtttagaagtgaaaccagtagtaattgtaaccatgatttggcaactgacaaatatcaaatatgatttgttctatgaaatattgcaccataaacttgttagaagaatttgaaactggatcagctatgtggaacatttttggtcaaagtacgtataatattacgaacatatgct

SEQ ID NO: 7007 - protein, 70 aa, Glycine max
  misc_feature (1)..(70): Ceres Seq. ID no. 15169911
MSALFNFHSFLTVILLGICACTYFKMQFPAILDQKTGFRGFFWKAARIGERLSPWVAAGCFMMGVSIIFF

SEQ ID NO: 7008 - protein, 49 aa, Glycine max
  misc_feature (1)..(49): Ceres Seq. ID no. 15169912
MDHLVIIFFLLYKCLEVKPVVIVTMIWQLTNIKYDLFYEILHHKLVRRI

SEQ ID NO: 7009 - protein, 45 aa, Glycine max
  misc_feature (1)..(45): Ceres Seq. ID no. 15169913
MQFPAILDQKTGFRGFFWKAARIGERLSPWVAAGCFMMGVSIIFF

SEQ ID NO: 7010 - DNA, 758 bp, Glycine max
  misc_feature (1)..(758): Ceres Seq. ID no. 15169916
actgttcctcctactttccaagcttcctggcacactttgataagttttttgtgcagctccaatggcaacctctcaaatcacttcatcattgaggaacttgcctgcatttgaaaggtttcaaccttcaacgcttcgatttccttctgctgggcacgtcagaattgggacactgacacaaacctcgtttccctctttcgttgtcaaagccgccactgttgtcgcccccaagcacaccactgttaagcctctgggtgatgcatccaggaaattggttgaagaggttgggggcagctacttcttggtgagtttggtcgacaatgattacatcaatggtgatcttttcaccgtctttgcagatttctgacatgagcttattatttattagttctttagttatgtcacttctgttcgttgtcatgttcctttcctttcttttgttttcttctcagtaggatggttcatattacacgtggttctaagttgaagtaccaaattatttttctgggctttgtcccaaacatctttattttttcattcttctgagtcgcatgagtaacctgtacgttgacttaaggacaagttactccttcctttgaattcgatgtttcttaactgtgaaagtagaatatcgaagtcttgtgtgttatattttgcttttatttcttttctctgagaaccttgtcatcattggcatttgagaaaaaaaaatcatgtatattacaatctctctctctctatatatataacacaatagttgc

SEQ ID NO: 7011 - protein, 100 aa, Glycine max
  misc_feature (1)..(100): Ceres Seq. ID no. 15169917
MATSQITSSLRNLPAFERFQPSTLRFPSAGHVRIGTLTQTSFPSFVVKAATVVAPKHTTVKPLGDASRKLVEEVGGSYFLVSLVDNDYINGDLFTVFADF

SEQ ID NO: 7012 - DNA, 760 bp, Glycine max
  misc_feature (1)..(760): Ceres Seq. ID no. 15169960
acattcatcgtgaaccatcgcgaacatcccaatgaccaaaaatcctccaatatatatatataacttccccgttctctcacactcaacagaaaattgaaaaccaacataacaatgtcgttgattccaagtttcttcggcaccgggcgaagaaccaacgtcttcgaccccttctccctcgacgtgtgggacccattccatggcttccccggcaccaccgccctctccgctccgcgctccgagacggcggccttcgccaacacgcgtatcgactggaaggagacggcggaggcgcacgtgttcaaggcagacctgccggggctgaagaaggaagaggtgaaggtggagatcgaggaggagggaagggtgctgcagataagcggacagagaacaaaggagaaggaggacaagaacgacacgtggcaccgcctcgaacgctccagcggcagctttctccgccgcttccgcctgccggagaacgcgaaactcgatcaggtgaaggccggcatggagaacggagtgctcactgtcactgttcccaaggtggatgtcaagaagcccgatgtcaagcccgttcagatcactgaaggctaagttgtgttctcaatcaatcaaaattcatgtgtctcaataattgagtttgaggtgtgttgtgtgagatattattaccatgtattgttatagtgtggtgaactgttggtcgtgttgtgtaactttttttaataataaagaatattgatatatgaatatttttattttaaac

SEQ ID NO: 7013 - protein, 159 aa, Glycine max
  misc_feature (1)..(159): Ceres Seq. ID no. 15169961
MSLIPSFFGTGRRTNVFDPFSLDVWDPFHGFPGTTALSAPRSETAAFANTRIDWKETAEAHVFKADLPGLKKEEVKVEIEEEGRVLQISGQRTKEKEDKNDTWHRLERSSGSFLRRFRLPENAKLDQVKAGMENGVLTVTVPKVDVKKPDVKPVQITEG

SEQ ID NO: 7014 - DNA, 1012 bp, Glycine max
  misc_feature (1)..(1012): Ceres Seq. ID no. 15169972
aaggtgacgatggaattggaagttgacgagaacgacttgaaagccgccggcgctgaactcttcgccgaaggtggccggcgaggcattcgtatcaatggctggttgatcgagactcggaggcactccatactgaactcttccacattccaagagtgggaacagaaactcgatacgtctcatttaccagaaatggtttttggggaaaacactttgattctaaaacacttgagcagtggaaccaacattcattttaatgcatttgatgctctacgtggctggaaacaggaagccttgccgccagttgaagttcctgcggcggctaaatggaaatttagaagcaagccctctcagcaagtaatactagattacgactatacatttacaacaccttattgtggaagtggcactattgagattgataaagatctgaatgagggagagacttctaaggaaaccagtgatatccattgggaagactgcaaggatcaaattgatgtagttgcacttgcatccaaggagcccatacttttctatgatgaggtggtgttatatgaggatgaactcgctgataatggagtatcacttcttactataaaagtgagagttatgcctagctcttggtttcttctgttgcgtttctggcttagagttgatggagtgttgattagactgagagaaacacgtatgcattgtgtatttggtggaagtacaaatcccattatacttcgagagagttgctggagataatctacatttcaagctttgtctgcaaaagggcacccttttgattctggtgcgtatggtgatccgagtttcatcagccagaagctccccatcataatgcataagacccaaaagcttgtaatttcctcttaaagttataagactgtaaatccccataatgcaaaagggttcttgttcatatttattcatctttaccatggctgtttggaaccataaattgcttcttatgagataagctcatagatgcatgctaatcatgttctgttct

SEQ ID NO: 7015 - protein, 248 aa, Glycine max
  misc_feature (1)..(248): Ceres Seq. ID no. 15169973
KVTMELEVDENDLKAAGAELFAEGGRRGIRINGWLIETRRHSILNSSTFQEWEQKLDTSHLPEMVFGENTLILKHLSSGTNIHFNAFDALRGWKQEALPPVEVPAAAKWKFRSKPSQQVILDYDYTFTTPYCGSGTIEIDKDLNEGETSKETSDIHWEDCKDQIDVVALASKEPILFYDEVVLYEDELADNGVSLLTIKVRVMPSSWFLLLRFWLRVDGVLIRLRETRMHCVFGGSTNPIILRESCWR

SEQ ID NO: 7016 - protein, 245 aa, Glycine max
  misc_feature (1)..(245): Ceres Seq. ID no. 15169974
MELEVDENDLKAAGAELFAEGGRRGIRINGWLIETRRHSILNSSTFQEWEQKLDTSHLPEMVFGENTLILKHLSSGTNIHFNAFDALRGWKQEALPPVEVPAAAKWKFRSKPSQQVILDYDYTFTTPYCGSGTIEIDKDLNEGETSKETSDIHWEDCKDQIDVVALASKEPILFYDEVVLYEDELADNGVSLLTIKVRVMPSSWFLLLRFWLRVDGVLIRLRETRMHCVFGGSTNPIILRESCWR

SEQ ID NO: 7017 - protein, 185 aa, Glycine max
  misc_feature (1)..(185): Ceres Seq. ID no. 15169975
MVFGENTLILKHLSSGTNIHFNAFDALRGWKQEALPPVEVPAAAKWKFRSKPSQQVILDYDYTFTTPYCGSGTIEIDKDLNEGETSKETSDIHWEDCKDQIDVVALASKEPILFYDEVVLYEDELADNGVSLLTIKVRVMPSSWFLLLRFWLRVDGVLIRLRETRMHCVFGGSTNPIILRESCWR

SEQ ID NO: 7018 - DNA, 871 bp, Glycine max
  misc_feature (1)..(871): Ceres Seq. ID no. 15170190
gatttacattcttgccattcgtgttgaactgaaaaccaaattgaaagaaagaagcctacggtctgaaaaatccacttgtcctgatgagttatgtaagtccagtaatggcagcagcaactgcccttctttctcttgcattagatccatgggatgaattccgagaaaacaagtactttgataattcattgcatattactcgaagttgcttgctgatgcttcttggtggcacacttgccttttttatggtactaacagaatatgttctggtctcagtaactagtgctgtcacagttacaatagctggggttgttaaggaggctgtcaccatattggttgcggtattgtactttcatgatcaattcacttggttgaaaggatttggcctattaactattatggttggtgtcagcttgtttaattggtacaaataccttaagcttcagaagggccatgctgatggcagtgatgtggcagagcattcaagagattctgcagccaaatatgttattcttgaggagatggaggaacaagaagatggcatctgaaaccattatgccccaaataataattcaaagccaaatgaagccatgattttttaagacctatgggcacaaaataatcttccagcaatatgccagttggcctgcaccatctcatcttttcgagagccctgttggaattgtggtttcaaagttctttttaagtttctttgagtgaacaattttttaagatataatgccctcctgcgatcaacatcacttatattctgtaaaaatatgcactcaaacagttaatagattttgtcatttttttagagttgacaaggtatatgttgcagatcacaacaggttgtaatagataattttttctc

SEQ ID NO: 7019 - protein, 153 aa, Glycine max
  misc_feature (1)..(153): Ceres Seq. ID no. 15170191
MSYVSPVMAAATALLSLALDPWDEFRENKYFDNSLHITRSCLLMLLGGTLAFFMVLTEYVLVSVTSAVTVTIAGVVKEAVTILVAVLYFHDQFTWLKGFGLLTIMVGVSLFNWYKYLKLQKGHADGSDVAEHSRDSAAKYVILEEMEEQEDGI

SEQ ID NO: 7020 - protein, 146 aa, Glycine max
  misc_feature (1)..(146): Ceres Seq. ID no. 15170192
MAAATALLSLALDPWDEFRENKYFDNSLHITRSCLLMLLGGTLAFFMVLTEYVLVSVTSAVTVTIAGVVKEAVTILVAVLYFHDQFTWLKGFGLLTIMVGVSLFNWYKYLKLQKGHADGSDVAEHSRDSAAKYVILEEMEEQEDGI

SEQ ID NO: 7021 - protein, 110 aa, Glycine max
  misc_feature (1)..(110): Ceres Seq. ID no. 15170193
MLLGGTLAFFMVLTEYVLVSVTSAVTVTIAGVVKEAVTILVAVLYFHDQFTWLKGFGLLTIMVGVSLFNWYKYLKLQKGHADGSDVAEHSRDSAAKYVILEEMEEQEDGI

SEQ ID NO: 7022 - DNA, 1360 bp, Glycine max
  misc_feature (1)..(1360): Ceres Seq. ID no. 15170203
gccacaccataattttcacactcactacacctcaccaaataatgaaccatggaataccaataccacccatcatcttatggcgtctcttcctcttctcactctagccaccatcaacaagggtcaacaacaccgaaatccctctcttcacaacgcagcctcgtctcagttccctccctcaaccaccaccaccacctccacaccccgaattccaccgtctaccaccactgcctcacaaccctcaagggtcacacctcctcctacatctcctccttaaccctctccggcaaattcctctacaccggctcctccgaccgcgaaatccgctcctggaaccgcatcccagaaaactcatcaaacaacaatgacaatagcaacaccgtactcacgggaaacggtgctgttaagtcgttagtaattcagtcaaacaaacttttcagcgcgcatcaagaccacaaaatccgtgtctggaaaataagcactaacaacaacaacgataacgatcatgaccagaaatacacacacgtggccacactccccaccctcggcgaccgcgcctcgaaaatcttgatccccaagaaccaggtacaaatccgaaggcacaagaaatgcacctgggttcaccacgtggacaccgtctcggctttggccctgtccagagacggaaccttgctgtactcagtctcttgggacagaacactcaaaatctggaaaacgaaagacttcacgtgcctggagtccctcgccaacgcgcacgacgacgccatcaacgctgtcgcagtctcctacgatgggcgcgtctacaccggatcagcggacaagaaaatcaaggtgtggaagaaattcgcaggagaaaagaaacacactttaatagaaaccttggagaagcacaactctggggttaatgctttggctctaagcagcgacgagaatgttgtatattctggtgcatgcgatagggctattttggtttgggagaagaaagagggtgatgatgggaaaatgggggtggtgggtgctttaaggggacacaccaagtccattttgtgtttatctgttgtggcggatttggtgtgtagtggctctgcggatacaacgattaggatttggagaggttgtgttgattcgcatgaatactcttgtttagcggttttggaagggcacagggcttcgattaagtgcataagcgcagtggttgaccactgcaacaacaacaacaacaacacatcgcagtccgaagcattattatcttttctagtctatagtggcggtttggactgcgacattaaggtgtggcagattttacttccggctagctaaattataggacccatcataataataataataggttttttaaatt

SEQ ID NO: 7023 - protein, 422 aa, Glycine max
  misc_feature (1)..(422): Ceres Seq. ID no. 15170204
MEYQYHPSSYGVSSSSHSSHHQQGSTTPKSLSSQRSLVSVPSLNHHHHLHTPNSTVYHHCLTTLKGHTSSYISSLTLSGKFLYTGSSDREIRSWNRIPENSSNNNDNSNTVLTGNGAVKSLVIQSNKLFSAHQDHKIRVWKISTNNNNDNDHDQKYTHVATLPTLGDRASKILIPKNQVQIRRHKKCTWVHHVDTVSALALSRDGTLLYSVSWDRTLKIWKTKDFTCLESLANAHDDAINAVAVSYDGRVYTGSADKKIKVWKKFAGEKKHTLIETLEKHNSGVNALALSSDENVVYSGACDRAILVWEKKEGDDGKMGVVGALRGHTKSILCLSVVADLVCSGSADTTIRIWRGCVDSHEYSCLAVLEGHRASIKCISAVVDHCNNNNNNTSQSEALLSFLVYSGGLDCDIKVWQILLPAS

SEQ ID NO: 7024 - DNA, 1540 bp, Glycine max
  misc_feature (1)..(1540): Ceres Seq. ID no. 15170209
aaaaaacttaaattgaaaacagagtccttccttgtctgttatcactgtgtaagcagtgatcgattctgcgaactgcgattcgcatcgccaattcaaaagcgttcgttcgtcggagatggagacgctaccgacgacgacgacaaagcgaggaggagcgagatcgaagcccgttcagacctcgaaatcgtctctcgttatggccttcttctcctgcgtcgcgtggctctacgtcgccggaaggttatggcaagacgcagagaatcgcaatttactcgctagtcttctgaaaaagaattcagctcagaggcctaaggttcttacagtggaagataagttaatggtgcttgggtgcagggatctggagaggaggattgtggaagctgagatggaattgacattggctaagagccaagggtacctaaaggggcaaggccagagaagcggctcttctgatcgtaggcttcttgctgttatcggagtgtatactggatttgggagtaaattgaagagaaatgttttcagggggtcttggatgcccagaggtgatgccttgaaaaaacttgaagaaagaggagtggtcatacgttttgttattggtcggagtgctaatcgaggtgatagcttagatcgcaatattgacgaggaaaatcgcacaacaaaggatttcctgattcttgaaggtcatgaggaagctcaagaagagttgcctaaaaaagttaaaaccttcttcagtactgcagttcagaactgggatgctgacttttatgtaaaagttgatgatggcattgatattgatctcgagggtttaattgaacttcttgaccgtcgtcgtggtcaggatagggcatatgttggatgcatgaagtcaggagaagtgatatcagaagagggaaagccatggtatgaacctgattggtggaaatttggggatgaaaaatcgtatttccgacatgcggctggttcacttgttataatttcaaagaatttggcacaatacattaatataaacagtgtatctttgaagacatatgcctatgatgatacatcattgggatcatggatgatgggcgtccaagcaacttacatagatgacagtcggctttgctgcagtagtatcagacaagacaaggtatgctccttggcttgattggaggatcacaagcacattcttccctactcttatgggaactcacacaatttgtctgaaaatcagtatcagttgaacattatgttcactcttttcagttgcatactgccttgagagctttgtagacaatatcaatataattcctttctagatccagttatctgttcattcttttagatgctagcagcgaaattgagggataactactgattacggagttcagcccttggtgctcaattgctatttccgggggtgatatgattgtacttttactctgctattggatatacacaacttctgttgatgaccaaatattgaagagaaaaaaaaactatatacaaaatattgatgtattgaaccgctgacgaactaattgtagactttgttgcactg

SEQ ID NO: 7025 - protein, 343 aa, Glycine max
  misc_feature (1)..(343): Ceres Seq. ID no. 15170210
METLPTTTTKRGGARSKPVQTSKSSLVMAFFSCVAWLYVAGRLWQDAENRNLLASLLKKNSAQRPKVLTVEDKLMVLGCRDLERRIVEAEMELTLAKSQGYLKGQGQRSGSSDRRLLAVIGVYTGFGSKLKRNVFRGSWMPRGDALKKLEERGVVIRFVIGRSANRGDSLDRNIDEENRTTKDFLILEGHEEAQEELPKKVKTFFSTAVQNWDADFYVKVDDGIDIDLEGLIELLDRRRGQDRAYVGCMKSGEVISEEGKPWYEPDWWKFGDEKSYFRHAAGSLVIISKNLAQYININSVSLKTYAYDDTSLGSWMMGVQATYIDDSRLCCSSIRQDKVCSLA

SEQ ID NO: 7026 - protein, 316 aa, Glycine max
  misc_feature (1)..(316): Ceres Seq. ID no. 15170211
MAFFSCVAWLYVAGRLWQDAENRNLLASLLKKNSAQRPKVLTVEDKLMVLGCRDLERRIVEAEMELTLAKSQGYLKGQGQRSGSSDRRLLAVIGVYTGFGSKLKRNVFRGSWMPRGDALKKLEERGVVIRFVIGRSANRGDSLDRNIDEENRTTKDFLILEGHEEAQEELPKKVKTFFSTAVQNWDADFYVKVDDGIDIDLEGLIELLDRRRGQDRAYVGCMKSGEVISEEGKPWYEPDWWKFGDEKSYFRHAAGSLVIISKNLAQYININSVSLKTYAYDDTSLGSWMMGVQATYIDDSRLCCSSIRQDKVCSLA

SEQ ID NO: 7027 - protein, 269 aa, Glycine max
  misc_feature (1)..(269): Ceres Seq. ID no. 15170212
MVLGCRDLERRIVEAEMELTLAKSQGYLKGQGQRSGSSDRRLLAVIGVYTGFGSKLKRNVFRGSWMPRGDALKKLEERGVVIRFVIGRSANRGDSLDRNIDEENRTTKDFLILEGHEEAQEELPKKVKTFFSTAVQNWDADFYVKVDDGIDIDLEGLIELLDRRRGQDRAYVGCMKSGEVISEEGKPWYEPDWWKFGDEKSYFRHAAGSLVIISKNLAQYININSVSLKTYAYDDTSLGSWMMGVQATYIDDSRLCCSSIRQDKVCSLA

SEQ ID NO: 7028 - DNA, 1258 bp, Glycine max
  misc_feature (1)..(1258): Ceres Seq. ID no. 15170216
atttatgcattggaaagactggttagagcattcagatcgagcattaagtccgtcaaaatattgaaggtgactctttatcctggaaacgtgttatcacttaaaatgtcaaagccgcaggggtttagctacaaaagtggacaatacatgtttgtgaattgtgctgctgtgtctccatttgaatggcatccattttccataacttccgcccctgatgatgattaccttagcgttcacataaaaatacttggtgactggactcgaagtctgaaagccaaattcacacaggcgtgccagcaacccctaaatggacagagtggacttctaagagctgaatgcttgaaaggagataacagcccaagttcctttcctaaggttctggtggatggtccgtatggggcgccagcacaagactacagggagtatgaggtggtgttgctggtggggcttggaattggggctacaccaatgataagtatactaaaggacatggtgaataattttaaggcgaatgatgaggaggagggagggcaagagagggtgagtgacttcaagacaaggagggcatacttctactgggtgactagagagcagggttcatttgactggttcaaaggggtaatgaacgaagtggcagaagaggaccgaaggaaagtgattgaactccacagctactgcaccagcgtctacgaagagggtgatgctcgctctgctcttattgctatgttgcagtccctaaaccatgcaaagaatggagtggacattgtctctgggacacgagtcatgtctcactttgcaaaacccaattggcgcagtgtctacaagcgcattgcgcttaatcatccagatgcccgagttggggtattttactgtgggccatcagccctcacccatgagcttcgtcagctagcattggatttctctcacaacacatccaccaagtacgacttccataaagaaaatttctgacaagatcgagctaagccgtccaccacctagatcattccactttgttttttgcctataaataattaagtttctacatgtggttcttatttatggctttgtaaaagcaccaaggcaggtgggagctaaatggttaaaatagagttgcctaccaattataaaaggtgtggacgtctgttaatgtctctgcgtgtctttatgtccatgtaaatttaaggagaaataaccactccttggaaacaccttgggagaaactagaaagtaatacagaagagagaataatgtctaaaaaaag

SEQ ID NO: 7029 - protein, 321 aa, Glycine max
  misc_feature (1)..(321): Ceres Seq. ID no. 15170217
IYALERLVRAFRSSIKSVKILKVTLYPGNVLSLKMSKPQGFSYKSGQYMFVNCAAVSPFEWHPFSITSAPDDDYLSVHIKILGDWTRSLKAKFTQACQQPLNGQSGLLRAECLKGDNSPSSFPKVLVDGPYGAPAQDYREYEVVLLVGLGIGATPMISILKDMVNNFKANDEEEGGQERVSDFKTRRAYFYWVTREQGSFDWFKGVMNEVAEEDRRKVIELHSYCTSVYEEGDARSALIAMLQSLNHAKNGVDIVSGTRVMSHFAKPNWRSVYKRIALNHPDARVGVFYCGPSALTHELRQLALDFSHNTSTKYDFHKENF

SEQ ID NO: 7030 - protein, 287 aa, Glycine max
  misc_feature (1)..(287): Ceres Seq. ID no. 15170218
MSKPQGFSYKSGQYMFVNCAAVSPFEWHPFSITSAPDDDYLSVHIKILGDWTRSLKAKFTQACQQPLNGQSGLLRAECLKGDNSPSSFPKVLVDGPYGAPAQDYREYEVVLLVGLGIGATPMISILKDMVNNFKANDEEEGGQERVSDFKTRRAYFYWVTREQGSFDWFKGVMNEVAEEDRRKVIELHSYCTSVYEEGDARSALIAMLQSLNHAKNGVDIVSGTRVMSHFAKPNWRSVYKRIALNHPDARVGVFYCGPSALTHELRQLALDFSHNTSTKYDFHKENF

SEQ ID NO: 7031 - protein, 273 aa, Glycine max
  misc_feature (1)..(273): Ceres Seq. ID no. 15170219
MFVNCAAVSPFEWHPFSITSAPDDDYLSVHIKILGDWTRSLKAKFTQACQQPLNGQSGLLRAECLKGDNSPSSFPKVLVDGPYGAPAQDYREYEVVLLVGLGIGATPMISILKDMVNNFKANDEEEGGQERVSDFKTRRAYFYWVTREQGSFDWFKGVMNEVAEEDRRKVIELHSYCTSVYEEGDARSALIAMLQSLNHAKNGVDIVSGTRVMSHFAKPNWRSVYKRIALNHPDARVGVFYCGPSALTHELRQLALDFSHNTSTKYDFHKENF

SEQ ID NO: 7032 - DNA, 1275 bp, Glycine max
  misc_feature (1)..(1275): Ceres Seq. ID no. 15170220
gattccatgcacattaatttattaattatatatgtaactctctccatcgatcagaattcattcagagaagtgagagttaaagatggaagggatagagcaccaaacactgaacgtgaatggcataaacatgcacatagccgagaagggtgaaggcccattgatcctcttcatccatggcttccccgacctatggtactcctggcgccaccagatcacagctcttgcctccctaggttaccgctgcgtggcgccggaccttcgtgggtacggcgacactgacgtgccggccaaccccacagcctacaccagcctccacgtcgtcggcgacctcgttgggcttctcgacgcgatcgtcggcgacgaggagaaggtgtttgtggtgggtcatgactggggtgcaatgactgcatggtctctttccctctatcgccccgaacgaatcagggctcttgttaacttgagcgttgttttcactccccgaaaccccaagagaaaaccccttgacactttaagagcagtgtacggaaatgactactatatctgcagatttcaggagcctggggaaatagaagctgagtttgcacagatcggcactgcaagagttctgaaggaattcctgacataccgcaaccctggtccactttatctaccaaagggtaaagcgtttgcacatccaactgattctcccatagcgttgccctcatggctatctgaagaagaatgtgactactatgccagtaaatatgacaagactggcttcacagggggattgaactactacagaaatttggatctaaattgggagctgacagcatcgtggactggtgctcaagtgaaagttccagttaagtttatagtgggtgatctagacctgacctataatgcaccaggagccaaggaatacattcacaaaggtgggttcaagagagatgtgccgcttctggaggatgtggttgttcttgaaggggctggtcactttctccatcaagaaaggcctgatgaaatcagcaaccacatttacgatttctttaagaaattctgatatgcctatgctcatgttggatgtgtctccctttgttcttggtttcattgaacggccttgttcttgctggctgagtggctgggtctgtattctcatagtggatgtgcatgcgtccatcgaaaactcttgctgagtgtgttttctcagtgtctgctcgtgtttttatataaataaatgtaaaaagtgtgtaaaaatcgttttacaaatttatcgtaaaaataacattactaaag

SEQ ID NO: 7033 - protein, 319 aa, Glycine max
  misc_feature (1)..(319): Ceres Seq. ID no. 15170221
MEGIEHQTLNVNGINMHIAEKGEGPLILFIHGFPDLWYSWRHQITALASLGYRCVAPDLRGYGDTDVPANPTAYTSLHVVGDLVGLLDAIVGDEEKVFVVGHDWGAMTAWSLSLYRPERIRALVNLSVVFTPRNPKRKPLDTLRAVYGNDYYICRFQEPGEIEAEFAQIGTARVLKEFLTYRNPGPLYLPKGKAFAHPTDSPIALPSWLSEEECDYYASKYDKTGFTGGLNYYRNLDLNWELTASWTGAQVKVPVKFIVGDLDLTYNAPGAKEYIHKGGFKRDVPLLEDVVVLEGAGHFLHQERPDEISNHIYDFFKKF

SEQ ID NO: 7034 - protein, 304 aa, Glycine max
  misc_feature (1)..(304): Ceres Seq. ID no. 15170222
MHIAEKGEGPLILFIHGFPDLWYSWRHQITALASLGYRCVAPDLRGYGDTDVPANPTAYTSLHVVGDLVGLLDAIVGDEEKVFVVGHDWGAMTAWSLSLYRPERIRALVNLSVVFTPRNPKRKPLDTLRAVYGNDYYICRFQEPGEIEAEFAQIGTARVLKEFLTYRNPGPLYLPKGKAFAHPTDSPIALPSWLSEEECDYYASKYDKTGFTGGLNYYRNLDLNWELTASWTGAQVKVPVKFIVGDLDLTYNAPGAKEYIHKGGFKRDVPLLEDVVVLEGAGHFLHQERPDEISNHIYDFFKKF

SEQ ID NO: 7035 - protein, 213 aa, Glycine max
  misc_feature (1)..(213): Ceres Seq. ID no. 15170223
MTAWSLSLYRPERIRALVNLSVVFTPRNPKRKPLDTLRAVYGNDYYICRFQEPGEIEAEFAQIGTARVLKEFLTYRNPGPLYLPKGKAFAHPTDSPIALPSWLSEEECDYYASKYDKTGFTGGLNYYRNLDLNWELTASWTGAQVKVPVKFIVGDLDLTYNAPGAKEYIHKGGFKRDVPLLEDVVVLEGAGHFLHQERPDEISNHIYDFFKKF

SEQ ID NO: 7036 - DNA, 1043 bp, Glycine max
  misc_feature (1)..(1043): Ceres Seq. ID no. 15170231
atactcaaagaggccagatgaagcttgcaagccaaatcgtaaaaggcttaaacctggagagaatcccaggcctcgaccgaaagatcgtcaaatgattcaagatcgagtgaaagagttacgagaaattgtgccaaacggagcaaaatgtagcatagatgcacttttggaacggaccattaagcatatgcttttcttacaaagtgtgacaaagcatgctgacaagctgaaacaaacaggggagtctaagattattaataaggaaggtgggctgcttttgaaagacaactttgagggtggggctacatgggcatatgaagttggctcacaatcaatggtttgccctattgtagttgaggatctgaatccacctcgtcagatgctagtggagatgctttgtgaggaacgaggtttctttttggaaatagctgacttaatcagaggattaggtttaaccatcttaaagggggtaatggaagctcacaatgacaaaatctgggcgcgctttgctgttgaggcaaacagggatttaacaaggatggaaatatttatgtcactagttcgtcttttggagaaaacggtgaagggcaacacatctccatccaacgcaattgataacatggtgtatcactctttcccacaggctgctcagataccagtaaccggaaggcctagtagtttgcagtgaacccacctgttacatgttttcgtagtaggatgtgttgagagcaagtccggtatgcgcttgcgatgactgacatcaaatccaatctaagatttcagatcctggcgtgacgagatacttgcacgtcaagcaatattttgttgtaaatggctgagctatgaatgaatatccactgattccatcattgaaagtttttgactccctaagcctgtttgattgtaattgacatctggaatcaattctcgacttctgtcttccaaattatatacgtgccatgcttatttttgtagcatttttttaatgcaatcaggctttctatatatttaaggtaatatatgcttttaaagaaagttaattacac

SEQ ID NO: 7037 - protein, 227 aa, Glycine max
  misc_feature (1)..(227): Ceres Seq. ID no. 15170232
YSKRPDEACKPNRKRLKPGENPRPRPKDRQMIQDRVKELREIVPNGAKCSIDALLERTIKHMLFLQSVTKHADKLKQTGESKIINKEGGLLLKDNFEGGATWAYEVGSQSMVCPIVVEDLNPPRQMLVEMLCEERGFFLEIADLIRGLGLTILKGVMEAHNDKIWARFAVEANRDLTRMEIFMSLVRLLEKTVKGNTSPSNAIDNMVYHSFPQAAQIPVTGRPSSLQ

SEQ ID NO: 7038 - protein, 197 aa, Glycine max
  misc_feature (1)..(197): Ceres Seq. ID no. 15170233
MIQDRVKELREIVPNGAKCSIDALLERTIKHMLFLQSVTKHADKLKQTGESKIINKEGGLLLKDNFEGGATWAYEVGSQSMVCPIVVEDLNPPRQMLVEMLCEERGFFLEIADLIRGLGLTILKGVMEAHNDKIWARFAVEANRDLTRMEIFMSLVRLLEKTVKGNTSPSNAIDNMVYHSFPQAAQIPVTGRPSSLQ

SEQ ID NO: 7039 - protein, 166 aa, Glycine max
  misc_feature (1)..(166): Ceres Seq. ID no. 15170234
MLFLQSVTKHADKLKQTGESKIINKEGGLLLKDNFEGGATWAYEVGSQSMVCPIVVEDLNPPRQMLVEMLCEERGFFLEIADLIRGLGLTILKGVMEAHNDKIWARFAVEANRDLTRMEIFMSLVRLLEKTVKGNTSPSNAIDNMVYHSFPQAAQIPVTGRPSSLQ

SEQ ID NO: 7040 - DNA, 865 bp, Glycine max
  misc_feature (1)..(865): Ceres Seq. ID no. 15170248
ttcaggtttcataaggtgacccttattcctatacgccgtcgtttctctgtttcgactttgaagccctatctgccgcaacgcgacgcgacttcctccgacgacgcgagccgagtgctcataaaaggaatagtagtaagcacattcatctcccctagatatgaactcagttgcaaggcgtttatcaagattattcagacattcaggtttcacgcctgaacccttcaataatggccatcatcaaatgcagaagcttcagcaatgcagaggcataagagtgaaggtcataggtgggaacttggaagcagcattgggattgatgcagcgtaagatgcaatcaagtgggattgagaggatgataaagcaagagcaaagattccatatcaaaaactctgagaagcgtgttttagcccaaaagaacttggagcggaagattcgatctgaagatcttgctaggaaacttaaggccattatgatcaagaaagtcaggggtctatgagaaagttgcatttcacacaaaaaagggccgacataagttgcagttattttataatttgcatgtggccactgcagttgacacattctttccaatgctcgaatcaggttgtatgtactttggtagctgtgattttgtgtttcagatgcatttgcaatttatactatgaataaagtatacattttatgataagtatgactatggtttggtcaagtcttgaatttgagtcaagatgttgaatgttctttagttgtgatggaagcagttttcaagcagcagttggatgcaggatgatcctgttatttctttttactgggataatttgtttaatatggtccttacagaatagaattgacgtatttaatgaattct

SEQ ID NO: 7041 - protein, 112 aa, Glycine max
  misc_feature (1)..(112): Ceres Seq. ID no. 15170249
MNSVARRLSRLFRHSGFTPEPFNNGHHQMQKLQQCRGIRVKVIGGNLEAALGLMQRKMQSSGIERMIKQEQRFHIKNSEKRVLAQKNLERKIRSEDLARKLKAIMIKKVRGL

SEQ ID NO: 7042 - protein, 84 aa, Glycine max
  misc_feature (1)..(84): Ceres Seq. ID no. 15170250
MQKLQQCRGIRVKVIGGNLEAALGLMQRKMQSSGIERMIKQEQRFHIKNSEKRVLAQKNLERKIRSEDLARKLKAIMIKKVRGL

SEQ ID NO: 7043 - protein, 71 aa, Glycine max
  misc_feature (1)..(71): Ceres Seq. ID no. 15170251
FRFHKVTLIPIRRRFSVSTLKPYLPQRDATSSDDASRVLIKGIVVSTFISPRYELSCKAFIKIIQTFRFHA

SEQ ID NO: 7044 - DNA, 1161 bp, Glycine max
  misc_feature (1)..(1161): Ceres Seq. ID no. 15170261
aaaagaattttgcatgactaactaactacctgcgagttgcatggaaattttacaattattttatctgatgcctctactgttttgcaggccaacatctagttgcatacttgaggcattgcatgttgatcctgcttctggtgtgtcaattgataaggataagggcactaaagtcttgaaaccatcagtaagtggttcttcagcattagcaaaattaaagactggtggttctggagggcccttaaaacaacaaggggagaagaaagaaactcctcaagaaagacttaaaagaatcatgaacaagcaactaaacaaacaaattaagaaagatactgctgctgaacttgccaagaaaagggaacaggagcggcagaggcaggaaaagcttgcggaaactagtagattgagtcggtatagacaccacagccgcagccgcagcaggagtttcagccgttcccctccaagaagatacagacgcagtagaagtccaagtagtagaggttccagaagatattattctagttctcgttccccttctcgcccccgttcccgctcacgttctcggtctccttattctcgatctcccaggataagaaatcgatcaaggcactgatggaatgctgtatacgtgtagaaaggctgacgaagttttgtgccatttgtttataatatggaatggatattaacatctggctttcatttctaccaaatgtttcgagggaaaccggtcttggttgagttgtgttgaagttgcgctatgcaatctttctgaaaccaaggttcagatttattgaattcaaatcaataacgtaggttcattgaagccaaaagaatatgattattgaactataatataatatagcatgtaagtttgataaaccctttttaacctagaatagatattttcttacctactgttgtaaatgtggcgtttatcattgaactttagcggtttacctgacactggagaaagcttaagggtaagcttatgaaatttaaagctgttgagttcgggtacgtcgaagcatgggcctagaggattttacatgatctatactaaaattaagagattcctgttattttcaataaatattgtgtattatcaaactaatatcacattatcagcttaataatttttttattaacaaaaggcttaaataaacg

SEQ ID NO: 7045 - protein, 189 aa, Glycine max
  misc_feature (1)..(189): Ceres Seq. ID no. 15170262
MEILQLFYLMPLLFCRPTSSCILEALHVDPASGVSIDKDKGTKVLKPSVSGSSALAKLKTGGSGGPLKQQGEKKETPQERLKRIMNKQLNKQIKKDTAAELAKKREQERQRQEKLAETSRLSRYRHHSRSRSRSFSRSPPRRYRRSRSPSSRGSRRYYSSSRSPSRPRSRSRSRSPYSRSPRIRNRSRH

SEQ ID NO: 7046 - protein, 180 aa, Glycine max
  misc_feature (1)..(180): Ceres Seq. ID no. 15170263
MPLLFCRPTSSCILEALHVDPASGVSIDKDKGTKVLKPSVSGSSALAKLKTGGSGGPLKQQGEKKETPQERLKRIMNKQLNKQIKKDTAAELAKKREQERQRQEKLAETSRLSRYRHHSRSRSRSFSRSPPRRYRRSRSPSSRGSRRYYSSSRSPSRPRSRSRSRSPYSRSPRIRNRSRH

SEQ ID NO: 7047 - protein, 105 aa, Glycine max
  misc_feature (1)..(105): Ceres Seq. ID no. 15170264
MNKQLNKQIKKDTAAELAKKREQERQRQEKLAETSRLSRYRHHSRSRSRSFSRSPPRRYRRSRSPSSRGSRRYYSSSRSPSRPRSRSRSRSPYSRSPRIRNRSRH

SEQ ID NO: 7048 - DNA, 1252 bp, Glycine max
  misc_feature (1)..(1252): Ceres Seq. ID no. 15170265
atgcgtgctagttaatgtcttttccagaagaactgttttctgtacttcggacagtgcatctactgaggggacttagcattggacttggaatcaattactcttgtgcagaacagtggagacccttcgcagaagaagctttgtcccgagctggcagattaaaacgtggcactgtgactcttgcttaagacaggcatttctgaatggcatgccttacatgatttctagtattatcattcgttggttgcttctgatgtgtctatttcatatgaagatatctctccatcctactaaaccaactacatctagttatgatgtcacttgatgttttcacaggtaaggatgttaagcccagaggcagcaaaatgttgagtaaaatatttttttggagacactaaataggcaggtctggatcaatctagtttgttgattctgattcactggtaacttcttgtgtgacgtttaggaaagattatccgacccggaccgacccgacccgacccgaagcgagttgcagcaccgaaaaatgttcggcagaatcagagcatccacttcgtcgctcgacaccttagacggttctccgtccaagattctcaaagacgacactttctccttctacgaggctactctcatgaagctaatgcttggtgcgcgacgcgatacgagtgaggttacaaatgattcttcagttaattcaccttctgcggaagaagcaaatctcaagccagattttaatcctgcaacaagcacttcttgttccgagacaacgatgatggacacggagtctgataacgataactcttcacctagggttactgatcacgtttctagtgggagctcggaacagctaaagcagagcaacgtttccattcttcatttcttcaaagttaaggataccggacaggccggtgtgtcttcttccgaagaggcaacaacgtcaatgcggaatggaagttctgaatctatctcatcaatttgtgttgaatctgattgcagaagtgaagtggaaggtgttcaaattttgcaatattgtgaaatgtcggattaaaggttatacaaatatttattactcctactgcttctatcagttaaatgccatgctaaatatttttctgttgtgttgtactgtatctcactctggttacacttgagtgtggaccatgtattgttatattagatacactggtttttataccaaagtttggtaaattaagagtgtgtttccagtgaataaattagatgaagttgcaaagtt

SEQ ID NO: 7049 - protein, 173 aa, Glycine max
  misc_feature (1)..(173): Ceres Seq. ID no. 15170266
MFGRIRASTSSLDTLDGSPSKILKDDTFSFYEATLMKLMLGARRDTSEVTNDSSVNSPSAEEANLKPDFNPATSTSCSETTMMDTESDNDNSSPRVTDHVSSGSSEQLKQSNVSILHFFKVKDTGQAGVSSSEEATTSMRNGSSESISSICVESDCRSEVEGVQILQYCEMSD

SEQ ID NO: 7050 - protein, 138 aa, Glycine max
  misc_feature (1)..(138): Ceres Seq. ID no. 15170267
MKLMLGARRDTSEVTNDSSVNSPSAEEANLKPDFNPATSTSCSETTMMDTESDNDNSSPRVTDHVSSGSSEQLKQSNVSILHFFKVKDTGQAGVSSSEEATTSMRNGSSESISSICVESDCRSEVEGVQILQYCEMSD

SEQ ID NO: 7051 - protein, 135 aa, Glycine max
  misc_feature (1)..(135): Ceres Seq. ID no. 15170268
MLGARRDTSEVTNDSSVNSPSAEEANLKPDFNPATSTSCSETTMMDTESDNDNSSPRVTDHVSSGSSEQLKQSNVSILHFFKVKDTGQAGVSSSEEATTSMRNGSSESISSICVESDCRSEVEGVQILQYCEMSD

SEQ ID NO: 7052 - DNA, 1411 bp, Glycine max
  misc_feature (1)..(1411): Ceres Seq. ID no. 15170272
gtttgagagagcagaatggttctatcaaacaagaaactgaagcttaagctgagagctgaattagcccaaagcaactccaacgccgccgctgaacccccttcattttctattaataataataactctctcaaaactcttctggactctgccacgcccacacccagattcttcaagagagagaagcgaagaaagcttcgatccgaccaacctccacaacaacccaacaaggaaaatgaaactgaaacacagggttcgcccaataagaagacaaagaggaagaagctagaggacgatgacgtggcagcaactggagtttccgacacaccaaagaagaagaaaaaccccaggacggctaaggaaaacgaatctaatggtggaggggaaatgccagaggctacagagttaaccaagaccaatacaactaccagtcaagacaatggtgatgctcctaatacaaatacaaagatttatgttggaggaattccctattattcaactgaggatgatattcgaagttattttgaaagctgtggcaccataactgaagttgattgcatgacttttcctgaaactggcaagtttagagggattgccattattactttcaagactgaagcagcagccaaaagagcattggctcttgatggagctgacatgggaggactctttcttaaaatccaaccatataaagcaactcgagccaataaagcctcagattttgctccagaaattttggaggggtacaatagaatatatgttggaaatttgtcgtgggatataacagaggaagaactgaggaaattcttcaataattctgagataacatcgctacgattcggtatggacaaggagacaggagagtttcgagggtatgcccatgtggattttggtgatagtcagtcactaaaaaaagcacttgcattggaccaaaatgttttgtttgggagacctgtcaggataagttgtgcggttcctttgaagaaaaaaactggaactcatgcaagctccacagttaatgaagctaatggtgataaatcaagttccacaggaagtgacaagataaatggagctgatggtgataaatcaagttccacaggaagtggcaagatgaggaggaggacatgctatgagtgtggtgagaaaggacatacatttgcggcatgcccaacgaaacaaacagttgctgcaactacaacctaaagcgtgtaggaaaactcaaacaggtcactgttcttttttcttctagcaaacagtttgattgtagtttataaaatacaataatgaggcatccataactgatcggatttacagtttcctacttcccttgttattgttatcattttttcctcttgaaatgaaaattctttgtctttgttataagcaaagaaaagtaggaagagattaaaaagtc

SEQ ID NO: 7053 - protein, 394 aa, Glycine max
  misc_feature (1)..(394): Ceres Seq. ID no. 15170273
MVLSNKKLKLKLRAELAQSNSNAAAEPPSFSINNNNSLKTLLDSATPTPRFFKREKRRKLRSDQPPQQPNKENETETQGSPNKKTKRKKLEDDDVAATGVSDTPKKKKNPRTAKENESNGGGEMPEATELTKTNTTTSQDNGDAPNTNTKIYVGGIPYYSTEDDIRSYFESCGTITEVDCMTFPETGKFRGIAIITFKTEAAAKRALALDGADMGGLFLKIQPYKATRANKASDFAPEILEGYNRIYVGNLSWDITEEELRKFFNNSEITSLRFGMDKETGEFRGYAHVDFGDSQSLKKALALDQNVLFGRPVRISCAVPLKKKTGTHASSTVNEANGDKSSSTGSDKINGADGDKSSSTGSGKMRRRTCYECGEKGHTFAACPTKQTVAATTT

SEQ ID NO: 7054 - protein, 271 aa, Glycine max
  misc_feature (1)..(271): Ceres Seq. ID no. 15170274
MPEATELTKTNTTTSQDNGDAPNTNTKIYVGGIPYYSTEDDIRSYFESCGTITEVDCMTFPETGKFRGIAIITFKTEAAAKRALALDGADMGGLFLKIQPYKATRANKASDFAPEILEGYNRIYVGNLSWDITEEELRKFFNNSEITSLRFGMDKETGEFRGYAHVDFGDSQSLKKALALDQNVLFGRPVRISCAVPLKKKTGTHASSTVNEANGDKSSSTGSDKINGADGDKSSSTGSGKMRRRTCYECGEKGHTFAACPTKQTVAATTT

SEQ ID NO: 7055 - protein, 214 aa, Glycine max
  misc_feature (1)..(214): Ceres Seq. ID no. 15170275
MTFPETGKFRGIAIITFKTEAAAKRALALDGADMGGLFLKIQPYKATRANKASDFAPEILEGYNRIYVGNLSWDITEEELRKFFNNSEITSLRFGMDKETGEFRGYAHVDFGDSQSLKKALALDQNVLFGRPVRISCAVPLKKKTGTHASSTVNEANGDKSSSTGSDKINGADGDKSSSTGSGKMRRRTCYECGEKGHTFAACPTKQTVAATTT

SEQ ID NO: 7056 - DNA, 1623 bp, Glycine max
  misc_feature (1)..(1623): Ceres Seq. ID no. 15170288
aataattaaatctttaatccgagcatttcattttgatatttcatcattcccatggctaaacatgatgattgcggtcgtatgattgacactaagggtggacaatccttcgaaattgaaatgaaaggaagccctgctactcctactcctgctgctacacaagatagtttcaaaggtggagtcaaaatccaacaatcttccaacgtacaagcttcctttactcttttcaaaagtttccttggtaccggagtcctagcactcccttatgcttataaaactgccggccttggtctctctttgattgttctcataatcgtttctgcaatgactactcgttgcttctctttacttctcgatgtagcagctcaaagaatcggaactggcaaaatctcactccagaaactcactcaagatgtcttgggaaccaagggaaaatatgcagtccaagcttcaatcatgatcatgcaattgggatgttgtattggtattttgatctttactagagatttcttgaaccatatcctttgtgaatttggtatcagctctctctgtaacaatacccttttcaatgtcctcttttgcttggctctgactgtccctttgactttgatcaacaatatgcattatttctacatcccaagtcttgctgccaacttctttatcttggtcggacttgccgctcaaatgttttacaacactcaagtcttacaagataaccctgaactcagatcaactttaggcactcatcttaaagaattcaactggaaagatttacctctcttctttggtattgctacatatgcctttgaaggtgttggtattatcttcagtatcagaagctcaatggaaaagccccaagactttaaattcctcttaaagaatcaaatgttgatccttactttgatctatgtcatcttccctactttctgctatattgctttggatgacagattaacagatattattttctttactctccctactgatgatcctttctaccttttaatccaaatcttttatgctatctctgctcttttatcattccccgttcagttcttccctgctattcgtatcatggaaaactccaaaattatgagatatagactctttaatgaaagaggaaaatgcaataataaacccctcagatatggaatgagaatggctgttattggtgtggtctttcttgttgcttataccgcgaccagtttccatcttttcttaaacttgctgggatcttgtgtattcacttttgttggatttatcttgccagtctggatctattctgtccatttcaagggaaagaccggcatcgcgaaaagacttatcaattatacaatgcttactgttgctgtcgtctttggagcagctggttttgttatgtcaatcatggaaatggttaacaaaagctctgaagatgttgcaactctctaaagtaaaattttttcttaactgactcattctatgaaaactctgtacttttttaactgtagtcaaagttgtaaattatatttgtgtaattgattgtatgtctttttaataaaaaacctctccttggatatgtctataatctgatccccgtatctaaataacttacaaaaataatgccatatcatttaaaatttactc

SEQ ID NO: 7057 - protein, 458 aa, Glycine max
  misc_feature (1)..(458): Ceres Seq. ID no. 15170289
MAKHDDCGRMIDTKGGQSFEIEMKGSPATPTPAATQDSFKGGVKIQQSSNVQASFTLFKSFLGTGVLALPYAYKTAGLGLSLIVLIIVSAMTTRCFSLLLDVAAQRIGTGKISLQKLTQDVLGTKGKYAVQASIMIMQLGCCIGILIFTRDFLNHILCEFGISSLCNNTLFNVLFCLALTVPLTLINNMHYFYIPSLAANFFILVGLAAQMFYNTQVLQDNPELRSTLGTHLKEFNWKDLPLFFGIATYAFEGVGIIFSIRSSMEKPQDFKFLLKNQMLILTLIYVIFPTFCYIALDDRLTDIIFFTLPTDDPFYLLIQIFYAISALLSFPVQFFPAIRIMENSKIMRYRLFNERGKCNNKPLRYGMRMAVIGVVFLVAYTATSFHLFLNLLGSCVFTFVGFILPVWIYSVHFKGKTGIAKRLINYTMLTVAVVFGAAGFVMSIMEMVNKSSEDVATL

SEQ ID NO: 7058 - protein, 449 aa, Glycine max
  misc_feature (1)..(449): Ceres Seq. ID no. 15170290
MIDTKGGQSFEIEMKGSPATPTPAATQDSFKGGVKIQQSSNVQASFTLFKSFLGTGVLALPYAYKTAGLGLSLIVLIIVSAMTTRCFSLLLDVAAQRIGTGKISLQKLTQDVLGTKGKYAVQASIMIMQLGCCIGILIFTRDFLNHILCEFGISSLCNNTLFNVLFCLALTVPLTLINNMHYFYIPSLAANFFILVGLAAQMFYNTQVLQDNPELRSTLGTHLKEFNWKDLPLFFGIATYAFEGVGIIFSIRSSMEKPQDFKFLLKNQMLILTLIYVIFPTFCYIALDDRLTDIIFFTLPTDDPFYLLIQIFYAISALLSFPVQFFPAIRIMENSKIMRYRLFNERGKCNNKPLRYGMRMAVIGVVFLVAYTATSFHLFLNLLGSCVFTFVGFILPVWIYSVHFKGKTGIAKRLINYTMLTVAVVFGAAGFVMSIMEMVNKSSEDVATL

SEQ ID NO: 7059 - protein, 436 aa, Glycine max
  misc_feature (1)..(436): Ceres Seq. ID no. 15170291
MKGSPATPTPAATQDSFKGGVKIQQSSNVQASFTLFKSFLGTGVLALPYAYKTAGLGLSLIVLIIVSAMTTRCFSLLLDVAAQRIGTGKISLQKLTQDVLGTKGKYAVQASIMIMQLGCCIGILIFTRDFLNHILCEFGISSLCNNTLFNVLFCLALTVPLTLINNMHYFYIPSLAANFFILVGLAAQMFYNTQVLQDNPELRSTLGTHLKEFNWKDLPLFFGIATYAFEGVGIIFSIRSSMEKPQDFKFLLKNQMLILTLIYVIFPTFCYIALDDRLTDIIFFTLPTDDPFYLLIQIFYAISALLSFPVQFFPAIRIMENSKIMRYRLFNERGKCNNKPLRYGMRMAVIGVVFLVAYTATSFHLFLNLLGSCVFTFVGFILPVWIYSVHFKGKTGIAKRLINYTMLTVAVVFGAAGFVMSIMEMVNKSSEDVATL

SEQ ID NO: 7060 - DNA, 1027 bp, Glycine max
  misc_feature (1)..(1027): Ceres Seq. ID no. 15170299
ttttaaatctgcaacctgcatagtgagacgtagatgccctggaaaatttctgtactgtagcaaacagagtagcaccaaaacaattttggttaaagagagtgaaaaacggggttagtaaattgcaatatcatattaagggcatgttgcaaatacgagtgaatgaatgtcttcgtttacgggtgcacgttccaaagcaaatgctaagtctgaaatgatcatagctaacgagattaacctctgccccatcaacacaagtaccattacatcaacctcgccagatacaagtgccaagaatgagaagaaaaagaagtctatccttccaaagattttcggatcaaagcgaaatgggagaggttcagacgaagagacactcaaatcatcaagtgcagaagaaggagatggagttactcttgatttggagaataagattgagacgagaagaaaagcatttttggaagcggcccccatcatgagaaaaagtttctcagaaagggagactagtcctgggatcgaaggcctaaatttgtccaattttgaacggcctatgatgactatggaaactgaacttctcaggatctttgttgcagcgtggaatgtgggagtcaccaagttatgacctcaacctccaagatttcttgctagtggaaggctccgcagatatatatgttttggggtacgaacatccatgcaacaaagtgaagaagaaaaaaataacgaacgaaagaagaagaagaagaagtatccctccccttcaccttaaaatttagttttcccttctcacaagtttggcatgttcgatgattgtgtgaatttagggcggaaagtgaaatacgggaaaaatggttgcttatggtaaattttgtttggaattgagattttatacatggacgtctcgaatgctcacttatgttgtatattttgttagttggttgttttgtgtttgtatctcttgatggctacaacatctcaccctttgtgactcctcttttataaaaatatcatcccaattttttctatgaatttgaat

SEQ ID NO: 7061 - protein, 150 aa, Glycine max
  misc_feature (1)..(150): Ceres Seq. ID no. 15170300
MSSFTGARSKANAKSEMIIANEINLCPINTSTITSTSPDTSAKNEKKKKSILPKIFGSKRNGRGSDEETLKSSSAEEGDGVTLDLENKIETRRKAFLEAAPIMRKSFSERETSPGIEGLNLSNFERPMMTMETELLRIFVAAWNVGVTKL

SEQ ID NO: 7062 - protein, 134 aa, Glycine max
  misc_feature (1)..(134): Ceres Seq. ID no. 15170301
MIIANEINLCPINTSTITSTSPDTSAKNEKKKKSILPKIFGSKRNGRGSDEETLKSSSAEEGDGVTLDLENKIETRRKAFLEAAPIMRKSFSERETSPGIEGLNLSNFERPMMTMETELLRIFVAAWNVGVTKL

SEQ ID NO: 7063 - DNA, 814 bp, Glycine max
  misc_feature (1)..(814): Ceres Seq. ID no. 15170302
atgataagcatccaaacattatatttggactgctaagattagccaagcatgattttgttgattctttatcattttccgagctagttattgcttgataagtttgtcctggaaaagtttaaattttcaaatttaaataccctcttatgtttcaaacttcttgtaaataggtaaagtgtgcgatgctgttgaagtaactggaaaaaatgtcatgtcaacatcatcaactgtgacaactgagcttgtcgatcacagatatggagaacaagcagctgaagcaacaagtgaagggtttagtgctgctggtcatgctttgggtactgcatgggctgcttttaagattaggaaggctctcaaccctaagagtgttcttaaacctacctccctggccaaagctggtgctaaagctgctgcttctgaatttaagtctaaaaattccaagtaatttatgccaggatatcttcaatacaggtttatccatcctacaatcagaagctgctgcttatgacttttcattacccattttttctctaagaaaaggcaggggaacatcaacgcatgatttgttgttgttcttaccatgtgagaacccaccatgattggtcacgagatccactagttatattgagaaaaaaagcatattatctttctttaacgagaccatatcttgatattggagaacatgactggatccaaatctgtgtgtatgtatatgtgcctgtgtgtagcaactgtatttattgcttgggctgtaagaacttcacaaatgtatggtgatgaatgttggaaattaaaatcactggtagttctgctctcc

SEQ ID NO: 7064 - protein, 113 aa, Glycine max
  misc_feature (1)..(113): Ceres Seq. ID no. 15170303
MENKQLKQQVKGLVLLVMLWVLHGLLLRLGRLSTLRVFLNLPPWPKLVLKLLLLNLSLKIPSNLCQDIFNTGLSILQSEAAAYDFSLPIFSLRKGRGTSTHDLLLFLPCENPP

SEQ ID NO: 7065 - protein, 96 aa, Glycine max
  misc_feature (1)..(96): Ceres Seq. ID no. 15170304
MLWVLHGLLLRLGRLSTLRVFLNLPPWPKLVLKLLLLNLSLKIPSNLCQDIFNTGLSILQSEAAAYDFSLPIFSLRKGRGTSTHDLLLFLPCENPP

SEQ ID NO: 7066 - protein, 77 aa, Glycine max
  misc_feature (1)..(77): Ceres Seq. ID no. 15170305
MSTSSTVTTELVDHRYGEQAAEATSEGFSAAGHALGTAWAAFKIRKALNPKSVLKPTSLAKAGAKAAASEFKSKNSK

SEQ ID NO: 7067 - DNA, 937 bp, Glycine max
  misc_feature (1)..(937): Ceres Seq. ID no. 15170313
caattctcacaagctattacatatatcagaatcattaaagataagattatattgctaagaagaaaaaatatgaaggttgtctacttgcttgttgccctcttggctttgacatcaactgttgtctctgcctatgaccctagtcctctgcaagatttttgtgtggcagccaaagaaaaagatggtgtatttgtgaacgggaaattctgcaaggaccccaagcttgtcaaagcagaagatttcttcagacatgtggaacctgggaaaactgacaacccactaggttcaaacgtgactcaggtgtttgttgatcaactaccgggactaaacacgctcggcataggtttggctcgcatagattttgctccaaagggtttgaacgctccccacactcaccctcgcggcactgagatccttatagtccttgagggtactctttatgttggatttgtgacttccaatcaagatggaaatcgtctcttcaccaaagtgctgaacaagggtgatgtgtttgtgttcccaattggtctcattcatttccaattgaatgtgggatatggcaatgctgttgccattgctggtcttagcagtcaaaatccaggagctatcactattgcaaatgctttgtttaaagctaatccacctatttcttctgaggttctcaccaaagctttccaggtggacaagagcataattgattatcttcaaaagcaatcttggtacgacaacaataactaatttgggagaatggacgatcatttcgcactagctagttattggatataattgaccactttatggtttcaatcaccccatacaatagacctaataaataaaatgtatgtgggttatttttatatttcatatttgttcttttggagtttgattaatttggtttaatacactgtttgagtttaataaaagaacctgttcttctttg

SEQ ID NO: 7068 - protein, 244 aa, Glycine max
  misc_feature (1)..(244): Ceres Seq. ID no. 15170314
QFSQAITYIRIIKDKIILLRRKNMKVVYLLVALLALTSTVVSAYDPSPLQDFCVAAKEKDGVFVNGKFCKDPKLVKAEDFFRHVEPGKTDNPLGSNVTQVFVDQLPGLNTLGIGLARIDFAPKGLNAPHTHPRGTEILIVLEGTLYVGFVTSNQDGNRLFTKVLNKGDVFVFPIGLIHFQLNVGYGNAVAIAGLSSQNPGAITIANALFKANPPISSEVLTKAFQVDKSIIDYLQKQSWYDNNN

SEQ ID NO: 7069 - protein, 221 aa, Glycine max
  misc_feature (1)..(221): Ceres Seq. ID no. 15170315
MKVVYLLVALLALTSTVVSAYDPSPLQDFCVAAKEKDGVFVNGKFCKDPKLVKAEDFFRHVEPGKTDNPLGSNVTQVFVDQLPGLNTLGIGLARIDFAPKGLNAPHTHPRGTEILIVLEGTLYVGFVTSNQDGNRLFTKVLNKGDVFVFPIGLIHFQLNVGYGNAVAIAGLSSQNPGAITIANALFKANPPISSEVLTKAFQVDKSIIDYLQKQSWYDNNN

SEQ ID NO: 7070 - DNA, 1026 bp, Glycine max
  misc_feature (1)..(1026): Ceres Seq. ID no. 15170337
aaaaaacgcagccaaaacagcaacaaacgacagagattcttcctcaacacaatcgaaaaaaaaaaaagcttccgattctaaaaccagaacaacaaaaaagtaaaacacacacgtcattttaaaacatttcatttttttggttatttatttaaagagcgagtgttgtaacaaatggtgaagccgaagagcgtggagaaacccgcagaggaacaacaacaacgaagtgtttcatcgtacagaggagtacggaagaggaagtgggggaagtacgtgtcggaaattaggttacccaacagccgtcaaaggatttggttgggttcctatgacagcgccgagaaggcggcacgcgcgttcgacgctgccatgttctgcttacgtggcagcggcgccaaatttaatttcccgagtgacccacccaacatcgccggcggggggaacatgacctcctcccagattcagatcgcggcggcgcgtttcgccaattcggagccccgaaatgagcgttcggatcaacccgtggagtctttaacttcggatgaggaaacggcatcgtttccggtcatttcggatacggatacatcatctcctcctctctcagacgtgacgttccaaaacgacgccgaattagtgactgggtcgttccctgatatgttttcggatttcgggtcgggcgattttgtgcccgatttctccgattttccgagcttcgacgatttcagccgggacttcttcttgcatgaacttccgggtttcaatttcggagaagagaacttggatggattgataattcaggactcgttcttgtggaatttctaagcgggtcagggttcggataattttattatatccgaacccgatatcagaatccggatcggatccgggtttgggttgggtcaaattttgcgtgccaagccctccatgtgttagtagttagtgatgattatagttttttttttaacgtaccaagtagtcaaatgtttcgattttttgggatgcgaatcataattcatttatttgtcatgactc

SEQ ID NO: 7071 - protein, 214 aa, Glycine max
  misc_feature (1)..(214): Ceres Seq. ID no. 15170338
MVKPKSVEKPAEEQQQRSVSSYRGVRKRKWGKYVSEIRLPNSRQRIWLGSYDSAEKAARAFDAAMFCLRGSGAKFNFPSDPPNIAGGGNMTSSQIQIAAARFANSEPRNERSDQPVESLTSDEETASFPVISDTDTSSPPLSDVTFQNDAELVTGSFPDMFSDFGSGDFVPDFSDFPSFDDFSRDFFLHELPGFNFGEENLDGLIIQDSFLWNF

SEQ ID NO: 7072 - protein, 150 aa, Glycine max
  misc_feature (1)..(150): Ceres Seq. ID no. 15170339
MFCLRGSGAKFNFPSDPPNIAGGGNMTSSQIQIAAARFANSEPRNERSDQPVESLTSDEETASFPVISDTDTSSPPLSDVTFQNDAELVTGSFPDMFSDFGSGDFVPDFSDFPSFDDFSRDFFLHELPGFNFGEENLDGLIIQDSFLWNF

SEQ ID NO: 7073 - protein, 125 aa, Glycine max
  misc_feature (1)..(125): Ceres Seq. ID no. 15170340
MTSSQIQIAAARFANSEPRNERSDQPVESLTSDEETASFPVISDTDTSSPPLSDVTFQNDAELVTGSFPDMFSDFGSGDFVPDFSDFPSFDDFSRDFFLHELPGFNFGEENLDGLIIQDSFLWNF

SEQ ID NO: 7074 - DNA, 859 bp, Glycine max
  misc_feature (1)..(859): Ceres Seq. ID no. 15170341
acagcatcaaaacaaacaaacaacacagtttttcttgtctctatattcttccggccaccgcagatggcggcggagcacgacagctgctgctcgcgctgtgtcaccttcctaataaccataggcctcacagcgctcttcctatggctgagtctccgcgttgacgaaccaaaatgctacctcgactacatttacgttcctgccctcaacaaaaccctaaattccaattccactcacaacaaaaacaccacaatactcttcgctctcaagctcaccaacgggaacaaggacaaaggcatccaatacgacgacgttctcctctccttcagagtcttcgagagcgtcaacctcacgcgcccactcggcaacgccaccgtgcaaaggttctaccagggccaccagaagaaggccaccaagcacggaaacttcagcggcggcggcggaaacctcaccgcggcggtggctgggagaatgtggtaccgtgtggactatgctactgcggtgaagtacaagattctcttctggtacacgaaacggcaccgtttatggggaggggcaaatgtggaaattggcgattcgggaatgaaggtgtatcgtaaagccgttaggcttggagggaagaaccccgtggtgatcgagtccggcgcatctaagctcagtggacgctatcgtgcgcttcttctttcccttcttctccctttttgtggcttgtgggtttagttgacttgactttttcacttcacccacttttgtgtgtattgttattattttatttttgtaatttgtattgtgacttttctttttgtctagttccaattcaaagattagagatgattatattcgattacacgagtttgaatcc

SEQ ID NO: 7075 - protein, 238 aa, Glycine max
  misc_feature (1)..(238): Ceres Seq. ID no. 15170342
TASKQTNNTVFLVSIFFRPPQMAAEHDSCCSRCVTFLITIGLTALFLWLSLRVDEPKCYLDYIYVPALNKTLNSNSTHNKNTTILFALKLTNGNKDKGIQYDDVLLSFRVFESVNLTRPLGNATVQRFYQGHQKKATKHGNFSGGGGNLTAAVAGRMWYRVDYATAVKYKILFWYTKRHRLWGGANVEIGDSGMKVYRKAVRLGGKNPVVIESGASKLSGRYRALLLSLLLPFCGLWV

SEQ ID NO: 7076 - protein, 217 aa, Glycine max
  misc_feature (1)..(217): Ceres Seq. ID no. 15170343
MAAEHDSCCSRCVTFLITIGLTALFLWLSLRVDEPKCYLDYIYVPALNKTLNSNSTHNKNTTILFALKLTNGNKDKGIQYDDVLLSFRVFESVNLTRPLGNATVQRFYQGHQKKATKHGNFSGGGGNLTAAVAGRMWYRVDYATAVKYKILFWYTKRHRLWGGANVEIGDSGMKVYRKAVRLGGKNPVVIESGASKLSGRYRALLLSLLLPFCGLWV

SEQ ID NO: 7077 - protein, 141 aa, Glycine max
  misc_feature (1)..(141): Ceres Seq. ID no. 15170344
MLPRLHLRSCPQQNPKFQFHSQQKHHNTLRSQAHQREQGQRHPIRRRSPLLQSLRERQPHAPTRQRHRAKVLPGPPEEGHQARKLQRRRRKPHRGGGWENVVPCGLCYCGEVQDSLLVHETAPFMGRGKCGNWRFGNEGVS

SEQ ID NO: 7078 - DNA, 1396 bp, Glycine max
  misc_feature (1)..(1396): Ceres Seq. ID no. 15170345
actgatctttcttttggtgttgaagaagagaagatcaatgatctacctgatcaatggacgactccaactcacctgatcccaccgcatcctttgcttttagatccacaaccacaaccacaacacctcagagcaacttcttgagaagccattctactaaagaaacccctttctcaaacttcattcactccccaccacgcctctcttgtcccactctttctcgtagcctccaaaactctcctatttcctctccacttcaccaccgtcaattctcaccccctccctctcctccttctcccacaaaactctctgattctgaacctcaaaccacttaccactgtgcctcttcagtcctcagaaacgatggacagatcctctccattgccctgtcatcaaatggtttggtctacactggctctgactcaaaccttgtgagggtgtggaagctccctgagttcaccgaatgtggacaactcaggaccaaggcttgcagggtggtggccctcgaagtgtccaatgacacggtttatgcagcatatggtgatggcaaaataagggtatggagaagaacttgggataaggtgttgaagcatgttcggttggctaccatcccaaagacactcggctatgttcgcagctacatcgccggcaaagacaagacaatgcacaaggggctaatcacggcaatggcaataaacacagcagaggacattctatacacagcttccctggacaaaacggtgaaagtgtggagaatctcagacctgaagtgcatagagaccatcaaggcacacactgagccaatcaacgccatcatagtggcagatgatggagtcctctaaacttgacttttatagaatttagttcacctattttcatctttatttcatgctttgaataatcataattttgatttttataaattatagttttatttatataaaatttttctaaaaaatttataagtcaataatgtccaatataaagagaagctaaatttatataaaactttaatataaaataggtctttaaaaagactcatcaaactagatattcaaataggtgaacaaaattatcaattaaaaattcacctattcccaattgccttccctatccacaactcatgaattaagaattttcaaagtagcaacatctattgaactaactctcttacttcatggaaatctttcataaaaaaatttagtaaaaaaaaaatctttcacaaatattactaattaatcctaaagatccatgctgaacaatttatataacattttttaaaaataaattttatcatgtcactatttttttatatttgattttttaaataatatgatagtaataaatgattgtattaaaagacttccgtttacatagagacagtgtgtggcagttggtt

SEQ ID NO: 7079 - protein, 261 aa, Glycine max
  misc_feature (1)..(261): Ceres Seq. ID no. 15170346
MDDSNSPDPTASFAFRSTTTTTTPQSNFLRSHSTKETPFSNFIHSPPRLSCPTLSRSLQNSPISSPLHHRQFSPPPSPPSPTKLSDSEPQTTYHCASSVLRNDGQILSIALSSNGLVYTGSDSNLVRVWKLPEFTECGQLRTKACRVVALEVSNDTVYAAYGDGKIRVWRRTWDKVLKHVRLATIPKTLGYVRSYIAGKDKTMHKGLITAMAINTAEDILYTASLDKTVKVWRISDLKCIETIKAHTEPINAIIVADDGVL

SEQ ID NO: 7080 - DNA, 1563 bp, Glycine max
  misc_feature (1)..(1563): Ceres Seq. ID no. 15170354
gtaggccccccccccgggattagcatatttgacaaagtcatcatttcttttcctaactatggcctttgaataacaatgagggaaaagtaaccatgccatatgggaaagtttttgtgaagctagaactcaggaccaatttggtttctgcagggccaatgtttcaatgaaaaacttcctaaattgattttaagccacttctggagggtctaagactgcatgcattggatcattggctaagatttgcatgctaagagacagatttgaaaaacagatgcatgaactttgcaattctgtaaatgtgggtttggttagatcaattatttaggagtggaagatgagtttcttttcatgttgcacgtcacaagagaagatcgacaagaactcattgaaaaagagcagtaagaactaccatcacgcaaaagctctgccgtcgttagccaacatgtgttttaaatctgataccagcaaacggaagtacatagaagaagaaatagcaaaaattgggaaagggaatattacctctcagactttttcttatcacgagctatgtgttgcaactcggaactttcaccctgacaatatgattggcgaaggaggctttggaagggtttacaaaggacgcctcaaaagcataaatcaggttgttgctgtgaagaaacttaatagaaatggattccaaggaaacagggaatttcttgtagaggttttgattttgagtctcttgcaccaccctaaccttgtcaatttggtagggtattgcgcagatggtgatcaaaggattttggtatacgagtacatggtgaatggctctttagaagatcaccttcttgaactatctccggacagaaagcctttggattggcgtactagaatgaacattgcagccggtgcagctaaaggacttgaatatttacatgaagtagcaaatccgcctgtgatataccgtgatttcaaagcatcaaacatactattagatgaaaacttcaaccctaagctctctgattttggacttgcaaagcttggtccaactggtgataaaactcatgtatccaccagggtaatgggaacttatggctactgtgcacctgagtatgcctcaacaggtcaattgactacaaaatcagatatatatagctttggagtagtgtttctagagatgatcacaggaagaagagcaattgatcagtcaagaccatctgaagagcaaaacttggtcacttgggcacaaccactattcaaagacagaaggaaattttcatcaatggttgatccattgctgaaagggaactacccaacaaagggtctacaccaagcactagcagttgcagcaatgtgtattcaggaggaagctgatacccgacctttgattagtgacgtagttacagctcttgatgttttagcaaagaggcatatacaagtgggaagacaacaccgttcaaaagagacttttttcgagcatggggaatgtagttaacaaaacgaacctgaaaacagtagaggattacacaaaaggacaatgaatgaaaaagcagctgctaatgaagtttgagaatcattctatag

SEQ ID NO: 7081 - protein, 379 aa, Glycine max
  misc_feature (1)..(379): Ceres Seq. ID no. 15170355
MSFFSCCTSQEKIDKNSLKKSSKNYHHAKALPSLANMCFKSDTSKRKYIEEEIAKIGKGNITSQTFSYHELCVATRNFHPDNMIGEGGFGRVYKGRLKSINQVVAVKKLNRNGFQGNREFLVEVLILSLLHHPNLVNLVGYCADGDQRILVYEYMVNGSLEDHLLELSPDRKPLDWRTRMNIAAGAAKGLEYLHEVANPPVIYRDFKASNILLDENFNPKLSDFGLAKLGPTGDKTHVSTRVMGTYGYCAPEYASTGQLTTKSDIYSFGVVFLEMITGRRAIDQSRPSEEQNLVTWAQPLFKDRRKFSSMVDPLLKGNYPTKGLHQALAVAAMCIQEEADTRPLISDVVTALDVLAKRHIQVGRQHRSKETFFEHGECS

SEQ ID NO: 7082 - protein, 343 aa, Glycine max
  misc_feature (1)..(343): Ceres Seq. ID no. 15170356
MCFKSDTSKRKYIEEEIAKIGKGNITSQTFSYHELCVATRNFHPDNMIGEGGFGRVYKGRLKSINQVVAVKKLNRNGFQGNREFLVEVLILSLLHHPNLVNLVGYCADGDQRILVYEYMVNGSLEDHLLELSPDRKPLDWRTRMNIAAGAAKGLEYLHEVANPPVIYRDFKASNILLDENFNPKLSDFGLAKLGPTGDKTHVSTRVMGTYGYCAPEYASTGQLTTKSDIYSFGVVFLEMITGRRAIDQSRPSEEQNLVTWAQPLFKDRRKFSSMVDPLLKGNYPTKGLHQALAVAAMCIQEEADTRPLISDVVTALDVLAKRHIQVGRQHRSKETFFEHGECS

SEQ ID NO: 7083 - protein, 297 aa, Glycine max
  misc_feature (1)..(297): Ceres Seq. ID no. 15170357
MIGEGGFGRVYKGRLKSINQVVAVKKLNRNGFQGNREFLVEVLILSLLHHPNLVNLVGYCADGDQRILVYEYMVNGSLEDHLLELSPDRKPLDWRTRMNIAAGAAKGLEYLHEVANPPVIYRDFKASNILLDENFNPKLSDFGLAKLGPTGDKTHVSTRVMGTYGYCAPEYASTGQLTTKSDIYSFGVVFLEMITGRRAIDQSRPSEEQNLVTWAQPLFKDRRKFSSMVDPLLKGNYPTKGLHQALAVAAMCIQEEADTRPLISDVVTALDVLAKRHIQVGRQHRSKETFFEHGECS

SEQ ID NO: 7084 - DNA, 500 bp, Glycine max
  misc_feature (1)..(500): Ceres Seq. ID no. 15170366
gcacttcacctcacttcaattccccaaaataccaaattccaatggcagaagcagaatccgaagcactgcgcctcaaggccatggcggagtccaagttcaaaggctccaacaataacgccaaatccgctctgaagtacgccaagcgcgcccaccgcctctgcccgcacctcactggtgtgtcggagaccgtcgctgccctctccgtcctcgctgcgccagactggtaccgcgccctcggcgtagagcccttcgccagcagcagcgtcatccggaggcagtacaagaagctcgccctactcctccaccccgacaagaacccccacgtggcctctgaggaggccttcaagctcctcgacgaagccttagactgatgcctaatttgccttacatcttacacggccctgattctcatcaccctttatacatttcttccagcattcatatttccctaagtttgagaacttcaccaaaagaataaactttgctaccaagtttattgc

SEQ ID NO: 7085 - protein, 122 aa, Glycine max
  misc_feature (1)..(122): Ceres Seq. ID no. 15170367
TSPHFNSPKYQIPMAEAESEALRLKAMAESKFKGSNNNAKSALKYAKRAHRLCPHLTGVSETVAALSVLAAPDWYRALGVEPFASSSVIRRQYKKLALLLHPDKNPHVASEEAFKLLDEALD

SEQ ID NO: 7086 - protein, 109 aa, Glycine max
  misc_feature (1)..(109): Ceres Seq. ID no. 15170368
MAEAESEALRLKAMAESKFKGSNNNAKSALKYAKRAHRLCPHLTGVSETVAALSVLAAPDWYRALGVEPFASSSVIRRQYKKLALLLHPDKNPHVASEEAFKLLDEALD

SEQ ID NO: 7087 - protein, 96 aa, Glycine max
  misc_feature (1)..(96): Ceres Seq. ID no. 15170369
MAESKFKGSNNNAKSALKYAKRAHRLCPHLTGVSETVAALSVLAAPDWYRALGVEPFASSSVIRRQYKKLALLLHPDKNPHVASEEAFKLLDEALD

SEQ ID NO: 7088 - DNA, 1142 bp, Glycine max
  misc_feature (1)..(1142): Ceres Seq. ID no. 15170370
attattttctcttcatcaatatgtgttgttagacaagtacagcatggctgccttgaaattattgggaaaattgcctgcttatgcaaacttaagcttctaagaattggtcaggaacattcatgttgaaaaggacaaaacactgggtagacttttggtagttgcaaaattcacatcatattttagctagcaagttgatttggaatttttattaattgacatacttgtggactttattttagtcaaagttgaaatttgacttgtttaaaaaatttatttctcttcattcctgtagataaatgccttatgcatggcattttatgctcgatctgaagaagctcgtcaaagtcatgctacacaaaattttgctttgagagcacttgcattggaagatgcactatctaaaggacttccaattgagacagaaatagcatctttgcagtcttatcttggaagcacagataaagattcagttttggatttggtgctagcatcccttcctgaagaaacacgaagcaacggcacagacacacaactgcagttaaagcagaagtttgatgccttaaaaggtagtgtaagacacttcagcttcttcccaccgggagggggaggtatgttggcacattctttggcacatgtagcatcctggttgaaggttagggaagacaatcaatctggtgatgggatcgaatctgtgatcaataaagttgaagtttatttggcagaaggaaaacttgctgaagcagcagcttgtctagaagaaagtgtgagaggcacacaagctgcagaaattgttgcaggttgggtgaggcaagcaagaaacagggctatttctgagcaagcagtgctgcttcttcaatcctatgccaattcccttagctttacatgattcttaaattttgaatatttacaaaaccatgtgaattcaatacatggcagagattatctttggcggattattccaacgggaattattgacctatgaggaaaaaaaataacgtttttgtttcataggagcagaaattagttgattctgtgaattctatgcaactccagtggcattggagttttgaccgaagtgatatcaggctctgtataattttgccttttgttttacctgaataacagaaatgttgcattgcaac

SEQ ID NO: 7089 - protein, 192 aa, Glycine max
  misc_feature (1)..(192): Ceres Seq. ID no. 15170371
MAFYARSEEARQSHATQNFALRALALEDALSKGLPIETEIASLQSYLGSTDKDSVLDLVLASLPEETRSNGTDTQLQLKQKFDALKGSVRHFSFFPPGGGGMLAHSLAHVASWLKVREDNQSGDGIESVINKVEVYLAEGKLAEAAACLEESVRGTQAAEIVAGWVRQARNRAISEQAVLLLQSYANSLSFT

SEQ ID NO: 7090 - DNA, 1005 bp, Glycine max
  misc_feature (1)..(1005): Ceres Seq. ID no. 15170384
gatctgctaaagaggggaatggcagttcctgattcaagctgtcgtcatggactaaggcttgtgatagaggattatccatttgccgtggacgggatagaaatctgggatgcaatagaaacctgggtgactgaatattgtaacttctattacacatccaatgacatggttgaggatgacagtgaacttcagagttggtggaaagaagtacgaaacgagggtcacggtgacttaaaagacaggcattggtggccagaaatgaagaccaaagaggagctgattcaatcatgcaccattatcatatggcttgcttctgctttccatgcagctgtgaattttggacagtacccttttgctggatacctccctaaccgtccaacggtgagtcgtagattcatgccggagccaggtaccccagagtatgaggagcttaagtcagaccctgacttggcattccttaaaacaatcactgcacagttccaaactctccttggtgtgtcattgatagaagttctgtccaggcactcaactgaagaggtttaccttggacaatgtgagaaccctgaatggactcttgatgctgaaccattggcagcatttgagaggttcagacagaagctgttggagattgagagcaatatcattgaaaggaacaaggacaagagattgaaaaacagaaatgggccagtgaagatgccttacacacttctctttcccaacacctcagattattctagggagggtggactcactggaaagggaatccccaacagcatatccatctaatacaatacaacactccttcctttctatcttcccattcaattctctttcaagccatgtataagtaatttgggtgtcaaataagcaatttgcgtgtcgtgattacttttgtagaaatttattactttgttatgccaagactatagagtgtgtataatttataacattgcttttgcgttcattttacttttgtctatggatttgtcttcgaattcgtgcggcagt

SEQ ID NO: 7091 - protein, 260 aa, Glycine max
  misc_feature (1)..(260): Ceres Seq. ID no. 15170385
DLLKRGMAVPDSSCRHGLRLVIEDYPFAVDGIEIWDAIETWVTEYCNFYYTSNDMVEDDSELQSWWKEVRNEGHGDLKDRHWWPEMKTKEELIQSCTIIIWLASAFHAAVNFGQYPFAGYLPNRPTVSRRFMPEPGTPEYEELKSDPDLAFLKTITAQFQTLLGVSLIEVLSRHSTEEVYLGQCENPEWTLDAEPLAAFERFRQKLLEIESNIIERNKDKRLKNRNGPVKMPYTLLFPNTSDYSREGGLTGKGIPNSISI

SEQ ID NO: 7092 - protein, 254 aa, Glycine max
  misc_feature (1)..(254): Ceres Seq. ID no. 15170386
MAVPDSSCRHGLRLVIEDYPFAVDGIEIWDAIETWVTEYCNFYYTSNDMVEDDSELQSWWKEVRNEGHGDLKDRHWWPEMKTKEELIQSCTIIIWLASAFHAAVNFGQYPFAGYLPNRPTVSRRFMPEPGTPEYEELKSDPDLAFLKTITAQFQTLLGVSLIEVLSRHSTEEVYLGQCENPEWTLDAEPLAAFERFRQKLLEIESNIIERNKDKRLKNRNGPVKMPYTLLFPNTSDYSREGGLTGKGIPNSISI

SEQ ID NO: 7093 - protein, 206 aa, Glycine max
  misc_feature (1)..(206): Ceres Seq. ID no. 15170387
MVEDDSELQSWWKEVRNEGHGDLKDRHWWPEMKTKEELIQSCTIIIWLASAFHAAVNFGQYPFAGYLPNRPTVSRRFMPEPGTPEYEELKSDPDLAFLKTITAQFQTLLGVSLIEVLSRHSTEEVYLGQCENPEWTLDAEPLAAFERFRQKLLEIESNIIERNKDKRLKNRNGPVKMPYTLLFPNTSDYSREGGLTGKGIPNSISI

SEQ ID NO: 7094 - DNA, 759 bp, Glycine max
  misc_feature (1)..(759): Ceres Seq. ID no. 15170395
aaaacctttttactatcagtcacttgctattttccttgtcctctttttcgtccaatcctaatacgatcatggaggatgctgctacttctaatgaggatagagaaaacaagttcctaactatggcaattgaagaagcatataaggcggttgaaagtggccatggtcgcccatttggtgcagttattgttcgaaacgatgaaatactttcaagctgtcataacatggttgtaagaaatgctgatcccactgcccatgctgagattactgctataagagaggcttgtcgaaagctgaatcaagttgaacttgctgactctgaaatctatgcttcttgcgagccttgtccaatgtgccttagtgcaattcatttttccaaaattaagaaactggtttatggagctaaagcagaagctgcggtagcaattgggtttgagagtatcattgctgatgcactgaaggacactggtttttatgagaaactcaacttagaggtaaaaaaggctgaaggtagtgttgctgtaatggcagaacaagtattcgagaagaccaaagacaagtttattattccctgattagttagctttaatcatcttattaaatgtgagcgcaagttacaattgttcaggaaaacttttgattcttggacaaaaataattttttgtcagactttattttggattagtcaggtctcattttcctgataatccggaggattagacaaaaaagaaatataaaatttgcacgttcatgtttctgtac

SEQ ID NO: 7095 - protein, 189 aa, Glycine max
  misc_feature (1)..(189): Ceres Seq. ID no. 15170396
NLFTISHLLFSLSSFSSNPNTIMEDAATSNEDRENKFLTMAIEEAYKAVESGHGRPFGAVIVRNDEILSSCHNMVVRNADPTAHAEITAIREACRKLNQVELADSEIYASCEPCPMCLSAIHFSKIKKLVYGAKAEAAVAIGFESIIADALKDTGFYEKLNLEVKKAEGSVAVMAEQVFEKTKDKFIIP

SEQ ID NO: 7096 - protein, 167 aa, Glycine max
  misc_feature (1)..(167): Ceres Seq. ID no. 15170397
MEDAATSNEDRENKFLTMAIEEAYKAVESGHGRPFGAVIVRNDEILSSCHNMVVRNADPTAHAEITAIREACRKLNQVELADSEIYASCEPCPMCLSAIHFSKIKKLVYGAKAEAAVAIGFESIIADALKDTGFYEKLNLEVKKAEGSVAVMAEQVFEKTKDKFIIP

SEQ ID NO: 7097 - protein, 150 aa, Glycine max
  misc_feature (1)..(150): Ceres Seq. ID no. 15170398
MAIEEAYKAVESGHGRPFGAVIVRNDEILSSCHNMVVRNADPTAHAEITAIREACRKLNQVELADSEIYASCEPCPMCLSAIHFSKIKKLVYGAKAEAAVAIGFESIIADALKDTGFYEKLNLEVKKAEGSVAVMAEQVFEKTKDKFIIP

SEQ ID NO: 7098 - DNA, 894 bp, Glycine max
  misc_feature (1)..(894): Ceres Seq. ID no. 15170399
aatcataacaacaacaatacaaaacaagtcaaacaaacaaaacacaacacaacaatattcaaaaatgtttagcaaaactggaaccttaactgtcaagccaatcatggccgaacttaagaaagacgaagacacactcacaaagcaagatccgtacgtcgttttctacttcggtgataagaaagttaaatcaaagacttgccgtggaggaggaaagaaaccttcttggcaagatgtgttcaccttccaaagaacaagcgaggatatgctcagaattgaactctgggacagagattacctctcccgtgatgactttttgggcgaaggagtagtttctatgtctagccttatgagcaccggcagaaccactaactgggtcgacctcactcacaagggaagatttgccggcaagcttttaatcgaaacggacttcagaggtgaccaaatcaagacaaccacaacaacaaccatgcaacaacctggttatgctatggacaagggtttccctaccatgcaacaacaaggctacatgccacaacaacctggttaccctatggataagggcatccctatgcaacagccttcatatcctatgcaacaacaaaacttccctatgcaacaacaaggcttccccactatgcaacaacaaagcttccctatgcaacaaggaggatacccaatccaacaagggggatacccaatgcaacaaggaggatacccaatgcaacaaggtggttaccaacaaggctatccccaaggcaagttttagtagagtagtcggataaatgcatataattcataataagaattaactcattccatagatttgaatgtaatcttctatatgattactgatagtatcaacaggtgtacaaaataatttacttcctgatcgat

SEQ ID NO: 7099 - protein, 254 aa, Glycine max
  misc_feature (1)..(254): Ceres Seq. ID no. 15170400
IITTTIQNKSNKQNTTQQYSKMFSKTGTLTVKPIMAELKKDEDTLTKQDPYVVFYFGDKKVKSKTCRGGGKKPSWQDVFTFQRTSEDMLRIELWDRDYLSRDDFLGEGVVSMSSLMSTGRTTNWVDLTHKGRFAGKLLIETDFRGDQIKTTTTTTMQQPGYAMDKGFPTMQQQGYMPQQPGYPMDKGIPMQQPSYPMQQQNFPMQQQGFPTMQQQSFPMQQGGYPIQQGGYPMQQGGYPMQQGGYQQGYPQGKF

SEQ ID NO: 7100 - protein, 233 aa, Glycine max
  misc_feature (1)..(233): Ceres Seq. ID no. 15170401
MFSKTGTLTVKPIMAELKKDEDTLTKQDPYVVFYFGDKKVKSKTCRGGGKKPSWQDVFTFQRTSEDMLRIELWDRDYLSRDDFLGEGVVSMSSLMSTGRTTNWVDLTHKGRFAGKLLIETDFRGDQIKTTTTTTMQQPGYAMDKGFPTMQQQGYMPQQPGYPMDKGIPMQQPSYPMQQQNFPMQQQGFPTMQQQSFPMQQGGYPIQQGGYPMQQGGYPMQQGGYQQGYPQGKF

SEQ ID NO: 7101 - protein, 220 aa, Glycine max
  misc_feature (1)..(220): Ceres Seq. ID no. 15170402
MAELKKDEDTLTKQDPYVVFYFGDKKVKSKTCRGGGKKPSWQDVFTFQRTSEDMLRIELWDRDYLSRDDFLGEGVVSMSSLMSTGRTTNWVDLTHKGRFAGKLLIETDFRGDQIKTTTTTTMQQPGYAMDKGFPTMQQQGYMPQQPGYPMDKGIPMQQPSYPMQQQNFPMQQQGFPTMQQQSFPMQQGGYPIQQGGYPMQQGGYPMQQGGYQQGYPQGKF

SEQ ID NO: 7102 - DNA, 1395 bp, Glycine max
  misc_feature (1)..(1395): Ceres Seq. ID no. 15170403
aagtttgaagcggcgccaccatagttggtgtagctagcgagggagggatatagggggaagcgtttattcattcattaagatggcatcggagcttcaattgcccccaggcttcagattccatccaacggaccaggagctggtgttgcactatctctgccgtaaatgcgcatcgcagcctatcgccgttcccatcatcgccgaaatcgacctctacaaatacgacccctgggacctacccggattggcttcctacggagagaaagagtggtacttcttttcaccacgggaccggaaatacccgaacggttccaggccgaaccgggcggcgggaaccggttactggaaggcaaccggggcggataagcccattggccaccccaaaccggttgggataaaaaaagctttggtgttttacgcagggaaagctccgaaaggggacaagagcaattggatcatgcacgagtatcgtctcgccgatgtagatcgctccgttcgcaaaaagaacagcctaaggttagatgattgggtgctttgccgtatttacaacaagaagggcacgatcgagaagttccaaccaagcagcgatgttgttgttagccgaaaaatggaatcatcggagatcgaagacaggaagccggagattctgaaaagcggaggaggttgtcttctgccgccggttccgccgccgcaagcgaaggcggcggtgaagaaggattacatgtacttcgacccgtcggattcaatcccgaagctgcacacggactcgagctgttcggagcacgtggtatcgccggaattcgcgagcgaggtgcagagcgagccaaagtggaaggagtgggagaaaagcctcgagtttccgtttaattacgtggatgccactctgaacaacagcaacagcttcacgacgcaattccagggcaataatcagatgatgtcgccgctgcaggacatgttcatgtactggcccaacaagcccttctgaacaaaccgatccacgccgcccattcgcatttgcacggtagcacgagactcaaggtctatgagtgtgcctgtgcgaccacacacagacgattatttatcaagttagcttagctagggcaaagaaagataaaaacattgaagctggaaacgcatgtgtttgttgggtccaccgtctgcaccggttctttttggtgttttgctatgtgacgacgacgacgacgatgacgatccaacggtgcatgtttgttgacctgtccctagtagtagtagcatgtgtacagctattgtatgtagaatgtagataggtacactactacacgttgttgtcatgtgatcatagaagctctcttaccgggaaaaataaaaattgatagaaggatggaaggtgtatttggaccttccctaattaatatt

SEQ ID NO: 7103 - protein, 300 aa, Glycine max
  misc_feature (1)..(300): Ceres Seq. ID no. 15170404
MASELQLPPGFRFHPTDQELVLHYLCRKCASQPIAVPIIAEIDLYKYDPWDLPGLASYGEKEWYFFSPRDRKYPNGSRPNRAAGTGYWKATGADKPIGHPKPVGIKKALVFYAGKAPKGDKSNWIMHEYRLADVDRSVRKKNSLRLDDWVLCRIYNKKGTIEKFQPSSDVVVSRKMESSEIEDRKPEILKSGGGCLLPPVPPPQAKAAVKKDYMYFDPSDSIPKLHTDSSCSEHVVSPEFASEVQSEPKWKEWEKSLEFPFNYVDATLNNSNSFTTQFQGNNQMMSPLQDMFMYWPNKPF

SEQ ID NO: 7104 - protein, 175 aa, Glycine max
  misc_feature (1)..(175): Ceres Seq. ID no. 15170405
MHEYRLADVDRSVRKKNSLRLDDWVLCRIYNKKGTIEKFQPSSDVVVSRKMESSEIEDRKPEILKSGGGCLLPPVPPPQAKAAVKKDYMYFDPSDSIPKLHTDSSCSEHVVSPEFASEVQSEPKWKEWEKSLEFPFNYVDATLNNSNSFTTQFQGNNQMMSPLQDMFMYWPNKPF

SEQ ID NO: 7105 - DNA, 1326 bp, Glycine max
  misc_feature (1)..(1326): Ceres Seq. ID no. 15170406
gtgagtttttattttcattcattttcaggtttagagagaccctaacacacttagcgtgatcaagatcaacaatggcggaaaacccttccgaaacggtgttgtccagttcccaacctcctcctcctcctccttcttcttcttcttcttcttctcagaaatcgccccaagattcgccgcaggtccctgcattgtcgaattttatgccctttccgagtggatattattatcaaatgattcctggtatgtaccctgcgctagttccagggttgactttgccgcaacatgaggagcatgggaaccgcggagctggcatatatgctgttcccgttaacccgtatgacagacaagttactggacttccatacaacacactgattccgctgacttaccgcacacccaccagcaggccaagttctgaagctactgttgccagtgaaaatcagggacaagcaggacagcaacctcaacagcagcagcctgcacctcaaagacaagttgttgttaggagatttcaaattgcatttcaaattgatttgttgcttatgttgaagctggcagctgtgatctttttgtttaaccaagatggatcaaggcagaggcttattgtccttgtgttctttgctgctcttgtatatttgtaccaaactggagctttgacaccgattataagatggctttcacgaggtatgcagagagcagcagcacctcctcatccaccaagacctgcagccagggctgaaaatgttcctgctcccaggccggagggtgacaatgctgctccagcagagggtcaacctgaagccgagaatgggaaccagcccgctaatgatgcagaccaggcagtcgagaatgaaaatgttgcagaacatggcaatgtcaatggtggtaatcagtggtggggcattgtgaaggagatccagatgattgtctttggatttatcacttcccttctccccgggttccacaaccatatggattgaactatattttgtagcttacaaggtttgtggatctgatatatggtctatatgggaccatgcctgagacatgggacggggtgttctgaaataaaaatgtatagcatcagaagttccaagcgtcataactaatacatacatagttaggtgcaactataatccagcggaagatatggtgcaactatagggtgccggttttgtatcattacttggattgttgataaaacactttttttttggattccagagcccaggtttctacatagcaggggctttagattattttaaaaaaaaaaaaaaaaaaaaaaaaaaaaaaaaaaaaaaaaaaaaaaaaaaaaaaaaaaaaaag

SEQ ID NO: 7106 - protein, 302 aa, Glycine max
  misc_feature (1)..(302): Ceres Seq. ID no. 15170407
MAENPSETVLSSSQPPPPPPSSSSSSSQKSPQDSPQVPALSNFMPFPSGYYYQMIPGMYPALVPGLTLPQHEEHGNRGAGIYAVPVNPYDRQVTGLPYNTLIPLTYRTPTSRPSSEATVASENQGQAGQQPQQQQPAPQRQVVVRRFQIAFQIDLLLMLKLAAVIFLFNQDGSRQRLIVLVFFAALVYLYQTGALTPIIRWLSRGMQRAAAPPHPPRPAARAENVPAPRPEGDNAAPAEGQPEAENGNQPANDADQAVENENVAEHGNVNGGNQWWGIVKEIQMIVFGFITSLLPGFHNHMD

SEQ ID NO: 7107 - protein, 259 aa, Glycine max
  misc_feature (1)..(259): Ceres Seq. ID no. 15170408
MPFPSGYYYQMIPGMYPALVPGLTLPQHEEHGNRGAGIYAVPVNPYDRQVTGLPYNTLIPLTYRTPTSRPSSEATVASENQGQAGQQPQQQQPAPQRQVVVRRFQIAFQIDLLLMLKLAAVIFLFNQDGSRQRLIVLVFFAALVYLYQTGALTPIIRWLSRGMQRAAAPPHPPRPAARAENVPAPRPEGDNAAPAEGQPEAENGNQPANDADQAVENENVAEHGNVNGGNQWWGIVKEIQMIVFGFITSLLPGFHNHMD

SEQ ID NO: 7108 - protein, 249 aa, Glycine max
  misc_feature (1)..(249): Ceres Seq. ID no. 15170409
MIPGMYPALVPGLTLPQHEEHGNRGAGIYAVPVNPYDRQVTGLPYNTLIPLTYRTPTSRPSSEATVASENQGQAGQQPQQQQPAPQRQVVVRRFQIAFQIDLLLMLKLAAVIFLFNQDGSRQRLIVLVFFAALVYLYQTGALTPIIRWLSRGMQRAAAPPHPPRPAARAENVPAPRPEGDNAAPAEGQPEAENGNQPANDADQAVENENVAEHGNVNGGNQWWGIVKEIQMIVFGFITSLLPGFHNHMD

SEQ ID NO: 7109 - DNA, 1157 bp, Glycine max
  misc_feature (1)..(1157): Ceres Seq. ID no. 15170410
agcgtatgtcaaggcaattcgagcagcccaaaagtttatctatattgagaaccaatactttcttggctcgtcatataattgggattcttacaaagaccttggtgcaaacaacttaattccaatggaaattgcattaaaaatagccaataaaatcaaacaacatgagagattttctgtgtatattgtcattcctatgtggcctgaaggtgtacctacaagtacagctactcagaggattctcttttggcagttcaaaacaatgcaaatgatgtatgaaacaatttacaaggccctacaggaggctgggcttgacaataagtatgaaccacaggactacttgaatttcttttgccttggcaatcgtgagatacctgacaatgaaaatgttttaaatgatgtaaaaactactggagaaaacaagcctcaggcactcactaaaaagaaccggagattcatgatttatgttcattcaaaaggaatgatagtggatgatgaatatgtgttactggggtctgcaaacataaaccagcgatccatggaaggcaccagagatacagagatagcaatgggggcatatcagcctaatcatacttgggcaaagaagcaatctaaacctcacggacaggtgcatggttatagaatgtcactatggagcgaacatataggagccgtggaagaatgttttgaggaaccagagagccttgaatgtgtaagacggataaggtcattgagtgagtttaactggagacaatatgcagcagaagaggtaactgaaatgaaaagtcatctattaaaatatccgcttgaagttgattcaaagggcaaagtgaagcctctttttggctgtgaggcattcccagacgttggtgggaacataagtggcactttcacactactcaaagaaaatctcaccatctgatcatttacgtgagttctctaactcagtgaatactatagcagattttagtagcttatttacaatatttagattcttttggaaaagaaaagaaaaggagtataaagatttgaacttgtaacctgctttgaagtactagtttactcaatgtcttatttaagatttaaggtagtcttaaataccagctttactattttttagtggaataaaaaaaaaaaaaaaaaaaaaaaaaaaaaaaaag

SEQ ID NO: 7110 - protein, 305 aa, Glycine max
  misc_feature (1)..(305): Ceres Seq. ID no. 15170411
AYVKAIRAAQKFIYIENQYFLGSSYNWDSYKDLGANNLIPMEIALKIANKIKQHERFSVYIVIPMWPEGVPTSTATQRILFWQFKTMQMMYETIYKALQEAGLDNKYEPQDYLNFFCLGNREIPDNENVLNDVKTTGENKPQALTKKNRRFMIYVHSKGMIVDDEYVLLGSANINQRSMEGTRDTEIAMGAYQPNHTWAKKQSKPHGQVHGYRMSLWSEHIGAVEECFEEPESLECVRRIRSLSEFNWRQYAAEEVTEMKSHLLKYPLEVDSKGKVKPLFGCEAFPDVGGNISGTFTLLKENLTI

SEQ ID NO: 7111 - protein, 265 aa, Glycine max
  misc_feature (1)..(265): Ceres Seq. ID no. 15170412
MEIALKIANKIKQHERFSVYIVIPMWPEGVPTSTATQRILFWQFKTMQMMYETIYKALQEAGLDNKYEPQDYLNFFCLGNREIPDNENVLNDVKTTGENKPQALTKKNRRFMIYVHSKGMIVDDEYVLLGSANINQRSMEGTRDTEIAMGAYQPNHTWAKKQSKPHGQVHGYRMSLWSEHIGAVEECFEEPESLECVRRIRSLSEFNWRQYAAEEVTEMKSHLLKYPLEVDSKGKVKPLFGCEAFPDVGGNISGTFTLLKENLTI

SEQ ID NO: 7112 - protein, 241 aa, Glycine max
  misc_feature (1)..(241): Ceres Seq. ID no. 15170413
MWPEGVPTSTATQRILFWQFKTMQMMYETIYKALQEAGLDNKYEPQDYLNFFCLGNREIPDNENVLNDVKTTGENKPQALTKKNRRFMIYVHSKGMIVDDEYVLLGSANINQRSMEGTRDTEIAMGAYQPNHTWAKKQSKPHGQVHGYRMSLWSEHIGAVEECFEEPESLECVRRIRSLSEFNWRQYAAEEVTEMKSHLLKYPLEVDSKGKVKPLFGCEAFPDVGGNISGTFTLLKENLTI

SEQ ID NO: 7113 - DNA, 1696 bp, Glycine max
  misc_feature (1)..(1696): Ceres Seq. ID no. 15170442
aaattcggcttcagcatctctcatcctctctctacttctcaaagaaagacgcacgcagcgttctaaaaccctaattgggtatatgcaaagagggctttgtagcatgtgcttaaggtatgttttaaacattgcttgtttaattgtcatggtggcattgtgatgcaaaatgtgtgtgagctcatactgagaaggagctcatctgctaagtccatttgaagaggatgtatggaagggcatcatcaggtcttgataggtttaagaaggctcagaccttggaaccattctctgttgctgtcaacgcttcttccagaaatggtgcccaaccctctagtaaagtagttggccattcatctgctttgcctccacaggctcaggcttcttccaaccaatcccaacaacatgcatttcagaagactgtaggagtggaggcagccccgttgttggggcagaatcagcaggtgactcaggttgggggagggcagtcgacgtggcagccgccggattgggcgatcgagccaaggtcaggtgttttttacctggaggttttgaaggatggccaggtgctagaccggattaatctggacagacgaaggaatatctttgggaggcaaatccagacttgtgattttgtgcttgatcatcagtctgtctctcgccaacatgctgctgttattcctcacaagaatgggagcatatatgtaattgatttgggatctgcacatggtacatttgttgcaaatgagcggttgaccaaggatttgccagttgagcttgaagtgggacaatcattgcgatttgctgcatcaacaagagcatacatattaagaaagaatgatgcagctcttttccctcggcctccaccacctacagagattaatttcccaccgcctcctgacccatctgatgaagaagctgttgtagcttataatacgctactgaatcgttatggcatcaacaaggctgatttagtgtccaaatctggtgagtctggtagttcggtaagtggcaaaaataaagattaccaaactgaaagaccatctaagagaattaggaaaacaagagtttccttcagggatcaagttgggggagagttagttgaggttgttggaatttcagatggtgcagatgtagaaacagaacctggtccagttggtgttaaagaaggaagtctagtcggtaaatatgaatctcttgtacagattactgtaataccaaaggggaaagagcagtcctctgtcaaggaggcagattcatccccaaaaggtgtgactgataaactacaagaagtattgaaaaagatcaaaaccccagtcaaaactgggatttatgatgacctatatggagaatcgttatctgtcaaagttggatcttcctgggcatattcacctgcactcagtactggtgaacgatctccagataaggaggatggtgcggggagcggaaagtcacctgttgatggagatgatgatgatttatttgggtgactattcaacttatgcagactgggttgtgagataaatttgtagtagttctgtatgagtttaacatcatagggagttgaaaacatgcaaatggagttaattgttccaacgaatccataattgttgatgttttcctctgcatgcccccaccccccttacactaaaagacagcaggttcatggttaaacgatgtgttatccttgtatggacccatt

SEQ ID NO: 7114 - protein, 420 aa, Glycine max
  misc_feature (1)..(420): Ceres Seq. ID no. 15170443
MYGRASSGLDRFKKAQTLEPFSVAVNASSRNGAQPSSKVVGHSSALPPQAQASSNQSQQHAFQKTVGVEAAPLLGQNQQVTQVGGGQSTWQPPDWAIEPRSGVFYLEVLKDGQVLDRINLDRRRNIFGRQIQTCDFVLDHQSVSRQHAAVIPHKNGSIYVIDLGSAHGTFVANERLTKDLPVELEVGQSLRFAASTRAYILRKNDAALFPRPPPPTEINFPPPPDPSDEEAVVAYNTLLNRYGINKADLVSKSGESGSSVSGKNKDYQTERPSKRIRKTRVSFRDQVGGELVEVVGISDGADVETEPGPVGVKEGSLVGKYESLVQITVIPKGKEQSSVKEADSSPKGVTDKLQEVLKKIKTPVKTGIYDDLYGESLSVKVGSSWAYSPALSTGERSPDKEDGAGSGKSPVDGDDDDLFG

SEQ ID NO: 7115 - DNA, 804 bp, Glycine max
  misc_feature (1)..(804): Ceres Seq. ID no. 15170444
actaacacaacaatattggttaaaaatctccactcattcattttgatatctctctctcttttaaatcaaaactccaaaaaagaactatggaacgtaactccctcttaacggttgcattgctctgcattgtcgtcgccggtgtcggtggccagtctcctgcctcctctccaactagctctcccgccgctccttctgctccaactacttcccctgccaaccctcccgccgctactccttcctctcccatggctaaaacgcctgcttcttcacccgtggaagcacctaagtctccggctcctgtagtatcctctccaccgccgacaccagttcccgagagctctccaccgtctccttcacccaaggcttccgctccggtgagctctccaccggctccaacaccagaagcagttactcctcctgctccagtagccgctccagccgctgatgtaccggctccggctccaaaaaagcataagaagtccaagaagcatcaagcaccggccccggctcctgaacttgacagtccacctgcaccaccgacagaagctcccggccctagctccgaagacgcaagctctcccggtccagccacatccgccgacgatcagagcggagcagagagcacaagggtgttgcggaatgtagcggtgggcgcggctgcaaccgcctgggccgttctcgttatggccttttaagttatttgtatttattttttcgcccttagttctttagttttgttcttttaactctacgattgtctctttcttttttcacatttgagtaatgagtattatttcattgatt

SEQ ID NO: 7116 - protein, 202 aa, Glycine max
  misc_feature (1)..(202): Ceres Seq. ID no. 15170445
MERNSLLTVALLCIVVAGVGGQSPASSPTSSPAAPSAPTTSPANPPAATPSSPMAKTPASSPVEAPKSPAPVVSSPPPTPVPESSPPSPSPKASAPVSSPPAPTPEAVTPPAPVAAPAADVPAPAPKKHKKSKKHQAPAPAPELDSPPAPPTEAPGPSSEDASSPGPATSADDQSGAESTRVLRNVAVGAAATAWAVLVMAF

SEQ ID NO: 7117 - protein, 149 aa, Glycine max
  misc_feature (1)..(149): Ceres Seq. ID no. 15170446
MAKTPASSPVEAPKSPAPVVSSPPPTPVPESSPPSPSPKASAPVSSPPAPTPEAVTPPAPVAAPAADVPAPAPKKHKKSKKHQAPAPAPELDSPPAPPTEAPGPSSEDASSPGPATSADDQSGAESTRVLRNVAVGAAATAWAVLVMAF

SEQ ID NO: 7118 - DNA, 1192 bp, Glycine max
  misc_feature (1)..(1192): Ceres Seq. ID no. 15170458
atgaagtatcggatatcttaataaataaacaaataaaaaaagtatcggatatctcaaaggtttatccttcagtgaagagaaatggcagctgaggcaaattttgatagcaaaagcagcaggtggtctttgcaggggatgacagctctcgttaccggtggttccaaaggaatcggatatgctatcgtggaggagttggcacaacttggagccactgtacacacttgcgctcgcaacgaagctgaactcaataaatccttaaatgaatggaacacaaaaggatacagagtaactggttcggtctgtgacgtggcgtctcgtgcagaaagacaagacctcatagctagagtctcaaatgagtttaatggcaaactcaatatccttgtaaacaatgtgggaacaaacatacagaaagagaccctggatttcacagaggaagatttcacatttctggtgaatacgaatcttgaatcttgtttccacctaagccagcttgcacatcctctcctaaaagcttcagaagctgcaaacatcattctcatatcctccattgctggtgtggtagcttcaaatatagtatccgttgtgtatggtgcaacaaaaggagcaatgaaccaaatgacaaaacatttggcatgtgaatgggccaaagacaatataaggactaattgcgttgcaccagggccaattagaacccctcttggtgacaagcactttaaagaggaaaaacttaataatagtctgattgcgcgaacccctcttggacggattggagaggcagaggaggtttcttcgttggtggcattcctctgcttacctgcagcatcttacataacaggacaaaccatttgtgttgatggcggcttcaccgtgaacggtctctacataagctaggcttattgtgacagtttcaatgttttgtttagtctgttacactctacttgtattagtttctgtttaagttgtggagagtggagaccctatatctgtttttaaggacgtgataataacagtactcagtgataagtttgtttttcttgttttgatttagtcacatgtcccatgattctaggagcagtataatcgtgggcagtttatcctatttcccgttggttgtaaggctttcagtaataataataataatagccatgtttgcttttcaattcaatgcaaatgctcctcagttcactagtac

SEQ ID NO: 7119 - protein, 269 aa, Glycine max
  misc_feature (1)..(269): Ceres Seq. ID no. 15170459
MAAEANFDSKSSRWSLQGMTALVTGGSKGIGYAIVEELAQLGATVHTCARNEAELNKSLNEWNTKGYRVTGSVCDVASRAERQDLIARVSNEFNGKLNILVNNVGTNIQKETLDFTEEDFTFLVNTNLESCFHLSQLAHPLLKASEAANIILISSIAGVVASNIVSVVYGATKGAMNQMTKHLACEWAKDNIRTNCVAPGPIRTPLGDKHFKEEKLNNSLIARTPLGRIGEAEEVSSLVAFLCLPAASYITGQTICVDGGFTVNGLYIS

SEQ ID NO: 7120 - protein, 251 aa, Glycine max
  misc_feature (1)..(251): Ceres Seq. ID no. 15170460
MTALVTGGSKGIGYAIVEELAQLGATVHTCARNEAELNKSLNEWNTKGYRVTGSVCDVASRAERQDLIARVSNEFNGKLNILVNNVGTNIQKETLDFTEEDFTFLVNTNLESCFHLSQLAHPLLKASEAANIILISSIAGVVASNIVSVVYGATKGAMNQMTKHLACEWAKDNIRTNCVAPGPIRTPLGDKHFKEEKLNNSLIARTPLGRIGEAEEVSSLVAFLCLPAASYITGQTICVDGGFTVNGLYIS

SEQ ID NO: 7121 - DNA, 1191 bp, Glycine max
  misc_feature (1)..(1191): Ceres Seq. ID no. 15170465
atatatttctaactaattgtgcttatccttattgagagaaaaaatggccaaatcaatcaaattctttgagttgaacacaggggccaagattccttctcttgggttagggacttggcaagctgaacctggtgttgtagctgaagctctcaccacagccattcaggttggatacaggcatattgactgtgctagtgcgtataagaatcaagcagagattggttctgctcttaagaagctttttgatgatggtgtggtgaagcgtgaggacttatggatcacttccaaactctggtgttcagatcatgcaccagaagatgtgccaaaagcattggataaaacattacaggaattgcaacttgactatcttgacctctatctgatccactggccagtccgcatgaaaagtggaacatttggattcaataaagaatatcttgagcaaccagacattcccaatacatggagagcaatggaggcactctatgactcagacaaggctagagccataggagtgagcaatttctcttcaaagaagcttcaagatttgttagatatagcaagagtggttcctgctgttaaccaagtggaattgcacccaggatggcagcagccaaagttgcgcgcattttgtgaatctaaagaaattcatctatctggatattctccactaggttcaccagcagctctcaaaagtgatattcttaagaatcctgttgtcacagagattgcagagagattggggaagacaccagcacaagttgcccttcgatggggcttgcaagcaggtcatagtgtgcttcctaagagcactaatgagtccagaatcaagggaaattttgatatctttgactggtctattcctcaagatttgatgaccaagatctctgaaattaagcaggaaaggctagttaaggccagtttttttgttcacgagacctatggtgcctataggagcattgaagacttctgggatggtgaactctgagcaatatgcatctttgagacgttgaaaaatacattgctcctagagcaaatttattctgccttatacccactagttgtagtgattcaagtgagattttgagaagtgttactattgatggtaacaccgaataagtagccaagagttatttttcatttaatgattgtatcttttattcaatataataaagtgagttgagtgaatttgac

SEQ ID NO: 7122 - protein, 313 aa, Glycine max
  misc_feature (1)..(313): Ceres Seq. ID no. 15170466
MAKSIKFFELNTGAKIPSLGLGTWQAEPGVVAEALTTAIQVGYRHIDCASAYKNQAEIGSALKKLFDDGVVKREDLWITSKLWCSDHAPEDVPKALDKTLQELQLDYLDLYLIHWPVRMKSGTFGFNKEYLEQPDIPNTWRAMEALYDSDKARAIGVSNFSSKKLQDLLDIARVVPAVNQVELHPGWQQPKLRAFCESKEIHLSGYSPLGSPAALKSDILKNPVVTEIAERLGKTPAQVALRWGLQAGHSVLPKSTNESRIKGNFDIFDWSIPQDLMTKISEIKQERLVKASFFVHETYGAYRSIEDFWDGEL

SEQ ID NO: 7123 - protein, 195 aa, Glycine max
  misc_feature (1)..(195): Ceres Seq. ID no. 15170467
MKSGTFGFNKEYLEQPDIPNTWRAMEALYDSDKARAIGVSNFSSKKLQDLLDIARVVPAVNQVELHPGWQQPKLRAFCESKEIHLSGYSPLGSPAALKSDILKNPVVTEIAERLGKTPAQVALRWGLQAGHSVLPKSTNESRIKGNFDIFDWSIPQDLMTKISEIKQERLVKASFFVHETYGAYRSIEDFWDGEL

SEQ ID NO: 7124 - protein, 171 aa, Glycine max
  misc_feature (1)..(171): Ceres Seq. ID no. 15170468
MEALYDSDKARAIGVSNFSSKKLQDLLDIARVVPAVNQVELHPGWQQPKLRAFCESKEIHLSGYSPLGSPAALKSDILKNPVVTEIAERLGKTPAQVALRWGLQAGHSVLPKSTNESRIKGNFDIFDWSIPQDLMTKISEIKQERLVKASFFVHETYGAYRSIEDFWDGEL

SEQ ID NO: 7125 - DNA, 783 bp, Glycine max
  misc_feature (1)..(783): Ceres Seq. ID no. 15170477
atatcaaacagccaaccaaaaccaaacatctctctctctctctctctctagctgctttcaatggcttccttgctcgattccgtcaccgttacccgcgtgttttctcttccgatcacttcctcgatttcacctgcttcaaaggttccgtcaatctctgcccggaggatttctcccgttccggaattcagaggtttgaaagcttcctggaggagttcggtgactcagtcagcgagtcttggtacgaatctcggatcccgattcgctcgtggtggtagaatcgtctgcgaggctcaggacaccactgccgccgccgtcgaagtaccaaacatctctgactcagaatggcaaacacaggttctcgagtcagatgtaccagtattggtcgagttttgggcaccgtggtgtggaccttgccgtatgattcaccccattgttgaccaactggccagggatttcgcaggcaagttcaaattctacaaaatcaacaccgacgagagcccaaacacagccaaccgttacgggatacgcagcgttcctaccgtgatcatattcaaagacggtgagaagaaagacagtatcatcggagctgtccctaaagagacgttggagaaaactatagaaagattcgtggtcgagtaactaaacaaaaacaaaatttcactctttattatcactcatgtcttctgcgttgtataattcttcttaaggtctcttttgactatttatgtttccatgcgtccactatgtattgtttagtattataaaaaaaaatgaataacgaac

SEQ ID NO: 7126 - protein, 192 aa, Glycine max
  misc_feature (1)..(192): Ceres Seq. ID no. 15170478
MASLLDSVTVTRVFSLPITSSISPASKVPSISARRISPVPEFRGLKASWRSSVTQSASLGTNLGSRFARGGRIVCEAQDTTAAAVEVPNISDSEWQTQVLESDVPVLVEFWAPWCGPCRMIHPIVDQLARDFAGKFKFYKINTDESPNTANRYGIRSVPTVIIFKDGEKKDSIIGAVPKETLEKTIERFVVE

SEQ ID NO: 7127 - DNA, 1564 bp, Glycine max
  misc_feature (1)..(1564): Ceres Seq. ID no. 15170483
cccaatcccctcctctccctctcccactccggcggcggcagcagcagcatcagcgcggaagagccaaggagccgaccatggcgacgatcgtcaacaccacggaggaggagccgatgctggcggtggtgcgctccacggcggagctcgcctgggccgacggaggcgccgaggtcgccgacccggaggtggcccgcctctgcgccgaggcgcagcagcacgtcctcgccggccgctggctcgacatggccaccctcatgctcgcctccgccgacctcctcctcctcgccccacgcctctccgacaaagatctcgagtgcaccctgaccgtcatctgcaacctcgtcaccaaggccggatccgaggacgaggcgctggagatcgccaagctcatctgcgccaagctcacccaccagccgggcgagaagcccacgctgcgcatcaaagtcctgttcagcctgtacaacctgcttccgagcctctccggcaaggcattggtctacaggaaggcgctcgagctcgccgccgccgggaaggccgccgccgactgcgtcgtgcccaccttcaagaacatcgatgcctttgtcgcctactggggcatcggcaagccggagcagagggacctgttccttgccgtcaccaggattctcaaggaccagaagggcatgaccaaggagtacttcaagtttctgaacaagtacctgcccacgttcgatggatcggctgatgacgccgacgcaatcggtgcggcaaaggaagaagctgctgcagcaatcattgagtttgtcaagtcatctgatctctatcagtgtgacctgctcgacatgccagctgttgcacagctcgagaaagatgagaagtatcagccagtttacgagctactgaagatattccttactcagaggcttgaatcctatttagcgtttcagactgctaactctacattgctgcaaggatatggactggttcatgaggagtgcataacaaaaatgcgcctgatgtccctgcttgatctgagcggccattgttctggggaaattccttactctgcaattacaaaagcccttgagatcaatgatgatgaggtggaatattggattgtgaaagcaatttcatccaagattttggattgcaaagttgaccagcttaatcaattggtcattgtcagccggcatactgcaagggtctttgggatgccacaatggcagagtctacgttcaaagcttggagtgtggaggggaaatatcgcaaatgctatcaacacaatccaagccaacaaggtgactgaagatggcgggcaggggatgcaaggattgatgatccgctgatcggaggaagtccctaaattgagattatagcctgagagattagacgagcaatccttttgtattagatatcttgtaatccgaaatacttctaccctgtgaccatgcttggctagatcctggttgcaatggcatgctaagcaatctcatgttgcatgaattttgtagacaaaagccatgcctgaagtcagcagttacttgttacagaatcgctattgttcatactgcatgcctgttttatc

SEQ ID NO: 7128 - protein, 440 aa, Glycine max
  misc_feature (1)..(440): Ceres Seq. ID no. 15170484
QSPPLPLPLRRRQQQHQRGRAKEPTMATIVNTTEEEPMLAVVRSTAELAWADGGAEVADPEVARLCAEAQQHVLAGRWLDMATLMLASADLLLLAPRLSDKDLECTLTVICNLVTKAGSEDEALEIAKLICAKLTHQPGEKPTLRIKVLFSLYNLLPSLSGKALVYRKALELAAAGKAAADCVVPTFKNIDAFVAYWGIGKPEQRDLFLAVTRILKDQKGMTKEYFKFLNKYLPTFDGSADDADAIGAAKEEAAAAIIEFVKSSDLYQCDLLDMPAVAQLEKDEKYQPVYELLKIFLTQRLESYLAFQTANSTLLQGYGLVHEECITKMRLMSLLDLSGHCSGEIPYSAITKALEINDDEVEYWIVKAISSKILDCKVDQLNQLVIVSRHTARVFGMPQWQSLRSKLGVWRGNIANAINTIQANKVTEDGGQGMQGLMIR

SEQ ID NO: 7129 - protein, 415 aa, Glycine max
  misc_feature (1)..(415): Ceres Seq. ID no. 15170485
MATIVNTTEEEPMLAVVRSTAELAWADGGAEVADPEVARLCAEAQQHVLAGRWLDMATLMLASADLLLLAPRLSDKDLECTLTVICNLVTKAGSEDEALEIAKLICAKLTHQPGEKPTLRIKVLFSLYNLLPSLSGKALVYRKALELAAAGKAAADCVVPTFKNIDAFVAYWGIGKPEQRDLFLAVTRILKDQKGMTKEYFKFLNKYLPTFDGSADDADAIGAAKEEAAAAIIEFVKSSDLYQCDLLDMPAVAQLEKDEKYQPVYELLKIFLTQRLESYLAFQTANSTLLQGYGLVHEECITKMRLMSLLDLSGHCSGEIPYSAITKALEINDDEVEYWIVKAISSKILDCKVDQLNQLVIVSRHTARVFGMPQWQSLRSKLGVWRGNIANAINTIQANKVTEDGGQGMQGLMIR

SEQ ID NO: 7130 - protein, 403 aa, Glycine max
  misc_feature (1)..(403): Ceres Seq. ID no. 15170486
MLAVVRSTAELAWADGGAEVADPEVARLCAEAQQHVLAGRWLDMATLMLASADLLLLAPRLSDKDLECTLTVICNLVTKAGSEDEALEIAKLICAKLTHQPGEKPTLRIKVLFSLYNLLPSLSGKALVYRKALELAAAGKAAADCVVPTFKNIDAFVAYWGIGKPEQRDLFLAVTRILKDQKGMTKEYFKFLNKYLPTFDGSADDADAIGAAKEEAAAAIIEFVKSSDLYQCDLLDMPAVAQLEKDEKYQPVYELLKIFLTQRLESYLAFQTANSTLLQGYGLVHEECITKMRLMSLLDLSGHCSGEIPYSAITKALEINDDEVEYWIVKAISSKILDCKVDQLNQLVIVSRHTARVFGMPQWQSLRSKLGVWRGNIANAINTIQANKVTEDGGQGMQGLMIR

SEQ ID NO: 7131 - DNA, 1598 bp, Glycine max
  misc_feature (1)..(1598): Ceres Seq. ID no. 15170497
taatttgtgactctctttcgtttctcatcagagacttacacagtccaatttccaaaccgaatcgagtttaaatttgaatttcattttcaacttccctgtgatgccttacacggtccgagagaacctctcgatcgggaacatcggcgacgcggcggagattctcgaaaacggcgccgctcagagcgtgacgcacatcctctccgtcctcagctccgcctctatctccttcttctccgaatggaaaaccactctctccatccccgccatggagatcaccaaagtccacgtggcggacgccgccgccaaatcggctctcccgccggagaagctcctctactcgctcgagtacgccggccgcgacctcaagctcgtgcgcatggccgtgcctctcagagacaccgagaaagatgacttgctcgattacttggaagtctgcatcgatttcattgatcgcggtcggaaggaaggttccgttctcgttcactgtttcgccggagtttccagaagcgcggcgattattacggcgtatttgatgagaaccgaacgtctatctgtagaagatgcccttgaatcgttgaggcagagctgtgaatttgtttgtcccaatgatggttttcttgagcagttgaaaatgtttgaggggatgggtttcaaggttgatcactccagccctatatacaagcgctttcgtctaaaaatactatatgaaaatcatttctcagggttgaggatagacagttccaaacttggtgcagatcctggcatgcctgttgaaatttcttcagaggcagaagaaactactaaagttgaaaataatcatagtcctacatatcgctgtaagaagtgccgacgacttgttgcattgcaagaacatgtcatagaccatgttcctggtgagggtgagagagcctttgagttccacaaacggagaggtggcaaccctttcaacaaatctgatgaatttgagtgttcatctgtatttattgagcctctacggtggatgaaagctgttgaggaaggtgcaatggagggaaagctgtcctgtgctcattgtgatgcccgtttgggatacttcaattggtcaggcatacaatgcagctgcggaagctggataactccagcttttcaactccacaaaagctggatagatgtgagtcccatgtaatcattgttgcgccattttatgcctaagggatgccactgccaaattctttgtcattgtttttggacttatattctgctcaaattctccaagctggtccactgccaacaatgaagttgtggaaggaaggaatggagtcttgctcttttgacatgctcaagttttccaggctgaactaatgcagttatatggaagggaggattattatagttttacactttttgtgcttcttccagaatgactttttggagctgtgattgtagattattactgctttctagtaaatggtgaagcatgagttaggattccaatattagggcttgttccctcgatgattctaccgtaagcaaccataatatttgtttcgtcaaaagaaaatgagtgttctccattgtaccttcttctattattctcaatatacaaatttttttcttac

SEQ ID NO: 7132 - protein, 354 aa, Glycine max
  misc_feature (1)..(354): Ceres Seq. ID no. 15170498
MPYTVRENLSIGNIGDAAEILENGAAQSVTHILSVLSSASISFFSEWKTTLSIPAMEITKVHVADAAAKSALPPEKLLYSLEYAGRDLKLVRMAVPLRDTEKDDLLDYLEVCIDFIDRGRKEGSVLVHCFAGVSRSAAIITAYLMRTERLSVEDALESLRQSCEFVCPNDGFLEQLKMFEGMGFKVDHSSPIYKRFRLKILYENHFSGLRIDSSKLGADPGMPVEISSEAEETTKVENNHSPTYRCKKCRRLVALQEHVIDHVPGEGERAFEFHKRRGGNPFNKSDEFECSSVFIEPLRWMKAVEEGAMEGKLSCAHCDARLGYFNWSGIQCSCGSWITPAFQLHKSWIDVSPM

SEQ ID NO: 7133 - protein, 299 aa, Glycine max
  misc_feature (1)..(299): Ceres Seq. ID no. 15170499
MEITKVHVADAAAKSALPPEKLLYSLEYAGRDLKLVRMAVPLRDTEKDDLLDYLEVCIDFIDRGRKEGSVLVHCFAGVSRSAAIITAYLMRTERLSVEDALESLRQSCEFVCPNDGFLEQLKMFEGMGFKVDHSSPIYKRFRLKILYENHFSGLRIDSSKLGADPGMPVEISSEAEETTKVENNHSPTYRCKKCRRLVALQEHVIDHVPGEGERAFEFHKRRGGNPFNKSDEFECSSVFIEPLRWMKAVEEGAMEGKLSCAHCDARLGYFNWSGIQCSCGSWITPAFQLHKSWIDVSPM

SEQ ID NO: 7134 - protein, 262 aa, Glycine max
  misc_feature (1)..(262): Ceres Seq. ID no. 15170500
MAVPLRDTEKDDLLDYLEVCIDFIDRGRKEGSVLVHCFAGVSRSAAIITAYLMRTERLSVEDALESLRQSCEFVCPNDGFLEQLKMFEGMGFKVDHSSPIYKRFRLKILYENHFSGLRIDSSKLGADPGMPVEISSEAEETTKVENNHSPTYRCKKCRRLVALQEHVIDHVPGEGERAFEFHKRRGGNPFNKSDEFECSSVFIEPLRWMKAVEEGAMEGKLSCAHCDARLGYFNWSGIQCSCGSWITPAFQLHKSWIDVSPM

SEQ ID NO: 7135 - DNA, 1550 bp, Glycine max
  misc_feature (1)..(1550): Ceres Seq. ID no. 15170509
tgatagaagacatggataaagaaattgttcgaagagaatcagcgacagagcctgcggaacagagcaggttatggtcccgtgaggatataaagaaagttttacaagaaaataagaggctcgtgaatttgacaagtttaattttggacgagtgtgatagtttaacagagatatcagatgtatcttgtctctcaaatttggaaattttgtcatttagagagcgtcggaatttatttagaattcaccattcagttggtttattggaaaagcttaaaatcttggatgctgaaggttgcccagagcttaagagttttccaccgttgaagttgacctctcttgaaagccttgatctttcgtattgttccaatctcgagagttttcctgaaatattaggaaagatggaaaatataacacgacttcacttgattggattttccataagaaaactcccaccttcatttcgaaatcttactcggcttaaagtgttatatgtgggaaccgaaactactccgttaatggactttgatgttgccaccctcatttcgaacatctgcatgatgtcagaactgtttgaaattgcagcaaacagtttgcaatggaggctatggcctgacgatgcttgtttgcaatggaggctatggcctgacgattttttgaaattgacctctcttctgaattcaagcattgaatttctttgtcacggcgacctgtcagatgagcttcttcggctatttctgtcatgttttgtaaatgtgataaatttagagctaaaagggagtaaattaacagttattcccgaatgcatcaaagaatgccgctttttatctacccctaaattgaatggttgcgatcgtcttcaagaaattagagggattcctccaaacttgaaaagattctctgcaatagcatgcccagacttgacttcctcaagcataagcatgttgctgaatcaggaactgcacgaggctggagacacctactttagtttgccaatagtaaagattccagagtggtttgagtgccagagtcgggaaccgtcaatttttttctggttccgtaacgaattcccagccataactgtttgcattgttgagtcacattttaaggaatattccaatgatctggttctcagcgtgatcattaataagaaacataaacataaacaaagagaaatattcgattcagtgatcctgatcctgatccttttagaaagagaaaaatttgtagttcagaggttggggttggggaaaaagcaaagattagtaggcagtgaagttgttgagacacaatttgtagagcagcaacaacatatgggtttttttctcacacgtgtagaactgggcactatcacttgtaatgtctcgctgctccggcaatcaataattggatgaaagagagaattcaagttcagcagtacgtggcatggtatcaacgctgacaaaagacaacactgtaagtagccctactgattcttgttgtctagtcaagtttggttttagatattctattttgttttggattcaataaaaatagatcgagcatttcaatctctt

SEQ ID NO: 7136 - protein, 461 aa, Glycine max
  misc_feature (1)..(461): Ceres Seq. ID no. 15170510
IEDMDKEIVRRESATEPAEQSRLWSREDIKKVLQENKRLVNLTSLILDECDSLTEISDVSCLSNLEILSFRERRNLFRIHHSVGLLEKLKILDAEGCPELKSFPPLKLTSLESLDLSYCSNLESFPEILGKMENITRLHLIGFSIRKLPPSFRNLTRLKVLYVGTETTPLMDFDVATLISNICMMSELFEIAANSLQWRLWPDDACLQWRLWPDDFLKLTSLLNSSIEFLCHGDLSDELLRLFLSCFVNVINLELKGSKLTVIPECIKECRFLSTPKLNGCDRLQEIRGIPPNLKRFSAIACPDLTSSSISMLLNQELHEAGDTYFSLPIVKIPEWFECQSREPSIFFWFRNEFPAITVCIVESHFKEYSNDLVLSVIINKKHKHKQREIFDSVILILILLEREKFVVQRLGLGKKQRLVGSEVVETQFVEQQQHMGFFLTRVELGTITCNVSLLRQSIIG

SEQ ID NO: 7137 - protein, 458 aa, Glycine max
  misc_feature (1)..(458): Ceres Seq. ID no. 15170511
MDKEIVRRESATEPAEQSRLWSREDIKKVLQENKRLVNLTSLILDECDSLTEISDVSCLSNLEILSFRERRNLFRIHHSVGLLEKLKILDAEGCPELKSFPPLKLTSLESLDLSYCSNLESFPEILGKMENITRLHLIGFSIRKLPPSFRNLTRLKVLYVGTETTPLMDFDVATLISNICMMSELFEIAANSLQWRLWPDDACLQWRLWPDDFLKLTSLLNSSIEFLCHGDLSDELLRLFLSCFVNVINLELKGSKLTVIPECIKECRFLSTPKLNGCDRLQEIRGIPPNLKRFSAIACPDLTSSSISMLLNQELHEAGDTYFSLPIVKIPEWFECQSREPSIFFWFRNEFPAITVCIVESHFKEYSNDLVLSVIINKKHKHKQREIFDSVILILILLEREKFVVQRLGLGKKQRLVGSEVVETQFVEQQQHMGFFLTRVELGTITCNVSLLRQSIIG

SEQ ID NO: 7138 - protein, 330 aa, Glycine max
  misc_feature (1)..(330): Ceres Seq. ID no. 15170512
MENITRLHLIGFSIRKLPPSFRNLTRLKVLYVGTETTPLMDFDVATLISNICMMSELFEIAANSLQWRLWPDDACLQWRLWPDDFLKLTSLLNSSIEFLCHGDLSDELLRLFLSCFVNVINLELKGSKLTVIPECIKECRFLSTPKLNGCDRLQEIRGIPPNLKRFSAIACPDLTSSSISMLLNQELHEAGDTYFSLPIVKIPEWFECQSREPSIFFWFRNEFPAITVCIVESHFKEYSNDLVLSVIINKKHKHKQREIFDSVILILILLEREKFVVQRLGLGKKQRLVGSEVVETQFVEQQQHMGFFLTRVELGTITCNVSLLRQSIIG

SEQ ID NO: 7139 - DNA, 1305 bp, Glycine max
  misc_feature (1)..(1305): Ceres Seq. ID no. 15170517
taaattccaaacaattccattcctcctttattactttgttttcaaccatctgccccaccttttcccctccctctcttcttgcttgcaccctcctacacaccatgtctcctttctcaaaccctctctttctttgtttctcacacacttcacatagtatataaatatgcatatatttttattcacatgatgacttgcacacgaaagacctttttctccaaagagcactcaccatctctagtttatgatatcttcatttctctctagctgttgcaaaggaagaacaagtcttatttgggaaccacattgaagaagaagtaagaaagaggaagtagtaccaaagcagaagaaaaacaagactgaagatggaaagaagtgtatattactatgtgctacttcttgtatttggtcatttcctttgttcaggttcaagtaggacacagaaggaagcagcaagacatatgaatgtactaaggcataatgaagagaaacaacatgaatttacagcctcaaagtccaccactcaaagggacatcaccacaccaatcactacaattcccaacttagttcccatcacttcaacaaatccaatcctgaatcctaattccaaccctgatacagtctctccagcctccacactcccaatcacaactcctaccatgccaaacaactctccagtgtcctcttcaggtgcaagctggtgcactgcaagcccaacatcctcacaaagagccttacaagtgggattggactatgcttgtggatatggtggcactgattgttctgcaattcaacctggtgggagctgctacttcccaaactctgtcagagaccatgcttcttatgccttcaataagtattatcagaagaatcctgttcctaatagctgcaattttggtggagctgctgtcatcactagcaccaatccaagtactggggcatgtcaatatgcatccactagtattagttcatcagtcttgaacacaacaaacacaagtggtgcaaatgtatttggttcagtacctgtgcccaagaacccctctgcctctgttgctgcagctgccacatcagctagatttgtacaattttgccttattctatggtcattagcaatgttggacaagaattatctataacaataatattgagagttagattttgcttggatttggtctttattttatttgggggatggggagaagggttgtgtactagaaaagcacataggtacaaaaccatcatcaatatgacatacatgatagaacactttgtagaaaagtagcaataatatgaagggtttcagtagat

SEQ ID NO: 7140 - protein, 256 aa, Glycine max
  misc_feature (1)..(256): Ceres Seq. ID no. 15170518
MERSVYYYVLLLVFGHFLCSGSSRTQKEAARHMNVLRHNEEKQHEFTASKSTTQRDITTPITTIPNLVPITSTNPILNPNSNPDTVSPASTLPITTPTMPNNSPVSSSGASWCTASPTSSQRALQVGLDYACGYGGTDCSAIQPGGSCYFPNSVRDHASYAFNKYYQKNPVPNSCNFGGAAVITSTNPSTGACQYASTSISSSVLNTTNTSGANVFGSVPVPKNPSASVAAAATSARFVQFCLILWSLAMLDKNYL

SEQ ID NO: 7141 - protein, 224 aa, Glycine max
  misc_feature (1)..(224): Ceres Seq. ID no. 15170519
MNVLRHNEEKQHEFTASKSTTQRDITTPITTIPNLVPITSTNPILNPNSNPDTVSPASTLPITTPTMPNNSPVSSSGASWCTASPTSSQRALQVGLDYACGYGGTDCSAIQPGGSCYFPNSVRDHASYAFNKYYQKNPVPNSCNFGGAAVITSTNPSTGACQYASTSISSSVLNTTNTSGANVFGSVPVPKNPSASVAAAATSARFVQFCLILWSLAMLDKNYL

SEQ ID NO: 7142 - protein, 158 aa, Glycine max
  misc_feature (1)..(158): Ceres Seq. ID no. 15170520
MPNNSPVSSSGASWCTASPTSSQRALQVGLDYACGYGGTDCSAIQPGGSCYFPNSVRDHASYAFNKYYQKNPVPNSCNFGGAAVITSTNPSTGACQYASTSISSSVLNTTNTSGANVFGSVPVPKNPSASVAAAATSARFVQFCLILWSLAMLDKNYL

SEQ ID NO: 7143 - DNA, 1773 bp, Glycine max
  misc_feature (1)..(1773): Ceres Seq. ID no. 15170532
agttcttcatctcttctttctctttctctctactcagttcttcatctcttctttctctctctctctctcccctcacaacacacattgagaaaaacaaccctcactccctagatggggccttccgagaacgagccacttgtaaattcccaatttttcagttgaattttaactgcaattggtagattacgatttcccctacctgaaaccctagccatttgtagatgactcacttgtaaattcgcaattttgttgctgaatttcagctgtgattggtagtttcattgcatcttcgcgaccaattttcgggagaaaatggcagaactcgatctgtccaagaaagtagccgataggtatctcaagcgtgaagtccttggtgagggtacatacggtgtcgtttacaaagccattgataccaagacagggcagacggttgcaattaagaagatccggcttggcaagcagaaagaaggggtcaattttacggctctcagagaaattaaactgcttaaagagctcaaagatccaaacattattgagttgattgatgcctttccacataaagggaatttgcatcttgtgtttgagttcatggagacggacctcgaagctgttatacgggacaggaatattgttctttcacctagtgatataaaatcttaccttcagatgacattaaaaggccttgctatttgccacaagaaatgggtgttgcatagggatatgaagccaaataacttgttgataggatccaacggacagctgaaacttgcagattttggtttagcacgggtatttggaagcccagatcgcaggttcactcatcaggtgtttgctcggtggtatagagcacctgagctattatttggcaccaagcagtatggtcctggggtagatgtttgggctgcagcttgtatatttgctgaatttcttcttcgtcgacccttcctgcagggttcaagtgatattgatcaattaggaaagatttttgcagcatttggaactccatctgcttctcagtggcctgatatgattttccttcctgattatgttgaatatcaacatgttcctgccccacctttgcgttctttatttccaatggctagtgacgatgccttagatttgttgtcaaagatgtttacttatgatccaaaggctagaatatctgtaccgcaggcattagagcacaggtacttctcatctgcgcctctgcccacagatcctgttaagctttcaagacctgctcctaagaaggaatctaaggtttcagatgtaatttcaaacgaaggtcctactgtcttgtcacctccaagaaagtccaggagagtaatgccagggcgtgatgggtctgaaggaaattctttgcaaggagataagtttgatgacagtgttgttagtgtcagacaggcagctggtgataatatgggaaagaatgagccagctccaatgtcactagatttttctctttttggattaaaacctccaaatagacctacaattaccagtgctgacagatcacatttaaaaagaaaattagatctagagttctagcagccagaatgaatattctatgatggttccatcagtaagagaggggtctgatgcatttgagaaaattctgtgaatcagcttcgcttgtatgccattccctatatttttctctctgcataaagttcccatgaatatgttgatgtttaaaggaagaagtatctgtgacagcagattagcatctcacttgaatagtagttcagagagctgaaagtaactatcatagac

SEQ ID NO: 7144 - protein, 411 aa, Glycine max
  misc_feature (1)..(411): Ceres Seq. ID no. 15170533
MAELDLSKKVADRYLKREVLGEGTYGVVYKAIDTKTGQTVAIKKIRLGKQKEGVNFTALREIKLLKELKDPNIIELIDAFPHKGNLHLVFEFMETDLEAVIRDRNIVLSPSDIKSYLQMTLKGLAICHKKWVLHRDMKPNNLLIGSNGQLKLADFGLARVFGSPDRRFTHQVFARWYRAPELLFGTKQYGPGVDVWAAACIFAEFLLRRPFLQGSSDIDQLGKIFAAFGTPSASQWPDMIFLPDYVEYQHVPAPPLRSLFPMASDDALDLLSKMFTYDPKARISVPQALEHRYFSSAPLPTDPVKLSRPAPKKESKVSDVISNEGPTVLSPPRKSRRVMPGRDGSEGNSLQGDKFDDSVVSVRQAAGDNMGKNEPAPMSLDFSLFGLKPPNRPTITSADRSHLKRKLDLEF

SEQ ID NO: 7145 - protein, 319 aa, Glycine max
  misc_feature (1)..(319): Ceres Seq. ID no. 15170534
METDLEAVIRDRNIVLSPSDIKSYLQMTLKGLAICHKKWVLHRDMKPNNLLIGSNGQLKLADFGLARVFGSPDRRFTHQVFARWYRAPELLFGTKQYGPGVDVWAAACIFAEFLLRRPFLQGSSDIDQLGKIFAAFGTPSASQWPDMIFLPDYVEYQHVPAPPLRSLFPMASDDALDLLSKMFTYDPKARISVPQALEHRYFSSAPLPTDPVKLSRPAPKKESKVSDVISNEGPTVLSPPRKSRRVMPGRDGSEGNSLQGDKFDDSVVSVRQAAGDNMGKNEPAPMSLDFSLFGLKPPNRPTITSADRSHLKRKLDLEF

SEQ ID NO: 7146 - protein, 293 aa, Glycine max
  misc_feature (1)..(293): Ceres Seq. ID no. 15170535
MTLKGLAICHKKWVLHRDMKPNNLLIGSNGQLKLADFGLARVFGSPDRRFTHQVFARWYRAPELLFGTKQYGPGVDVWAAACIFAEFLLRRPFLQGSSDIDQLGKIFAAFGTPSASQWPDMIFLPDYVEYQHVPAPPLRSLFPMASDDALDLLSKMFTYDPKARISVPQALEHRYFSSAPLPTDPVKLSRPAPKKESKVSDVISNEGPTVLSPPRKSRRVMPGRDGSEGNSLQGDKFDDSVVSVRQAAGDNMGKNEPAPMSLDFSLFGLKPPNRPTITSADRSHLKRKLDLEF

SEQ ID NO: 7147 - DNA, 1927 bp, Glycine max
  misc_feature (1)..(1927): Ceres Seq. ID no. 15170539
ttaggccacagagagctgtatcagaaactgactatatcctgaaatgctccattacaatgcaatcaaatggatcattggatctttgtgtctatccatatattggtctacatgggccagaaagttcttctgcctttctgataaacattcacgaacctattatttggcgccttcatgaaatgatccagcaggtgaagctcagtaggctgtatgattctaaaacaactgctgcatcagttgatccaataattcaaattggtgtccttaatatttcggaagttcgattcagagtgtctatggctatgtcaccaagtcaaagacccaggggtgtgcttgggttctgggcatccttaatgactgcattgggtaacacagaaaatatgcctgtcaggataaaccagaggtttaatgagaatgtatgcatgaggaagagttctatgattaccatggctatctcaaatgtccgaaaggatctactaggccaaccacttcagcttctctcaggagtcgatatattgggcaatgcaagtagcgcacttggacacatgagtaaaggtgtagctgcattgtctatggataaaaaatttattcaaagtcgacagagacaggaaaacaaaggtgtggaggatttgggtgatgttataagagagggaggtggagcattagctaaaggtttattcagaggggtgactggcattttaacaaagcctcttgaaggagcaaaatcttctggtgttgagggttttgttcagggtgttgggaagggaattattggtgccgctgcacaaccagtgagtggagttttggatcttctgtcaaaaacaaccgaaggtgctaatgctatgagaatgaaaattgcatctgctataacatctgatgaacaacttctcaggaggagactgcctcgtgttataggtggtgataatctgctaaaactatacgatgagtacaaagctcaaggacaggtcatactgcagttggcagaatcaggttcattttttggtcaggttgatctgttcaaggttcgcggaaagtttgccttatcagatgcttatgaagatcacttcatgcttccaaaagggaaaatcctcgtggtcacacatacaagagtcatactattgcaacaaccatccaatattattgctcagagaaagttcagccctgcaagggatccatgttcaataatgtgggatattctgtgggatgatcttggtactatggaactgactcatggcaaaaaagacaagccaaaagctcccccatcacagctcattttatatttgcaatctaggtcaatggatatgaaagaaaatcatcgcattataaaatgcatccgtgaaacccatcaagctcttcaaatttactcttcaattcagcatgcattgaacacttatggtccaggagtatcaaagggagttctgaaaaataaagtggcaaagccatattcaccccatgttgatgcccgtagtgttgacctatccccccaacagatgcctggatcagtccctctctcctcaacttttggaagcagtgcccgtgactaggactatacattgttcatcacattcaacatagtcaagtccctatctaaacagccctgtgctctattgaaattctaccgattagtccacctgatgacttccgttcaacccatgcagacagtcacatgagcccactcatatcaggactcagattgtaatgctggtttcaggaatgcaaccatatacctacccgaagataacggttacagttagttggagggaattggttcgaaatctatctattgctatgagtctcggagaaggcccatatctccaattttttcttagaatatcatataaatccaatacttcttgtataatattgagtgaaatagttttctttgtacatatacagaatcacacagctcatataggatcctacttgctct

SEQ ID NO: 7148 - protein, 512 aa, Glycine max
  misc_feature (1)..(512): Ceres Seq. ID no. 15170540
RPQRAVSETDYILKCSITMQSNGSLDLCVYPYIGLHGPESSSAFLINIHEPIIWRLHEMIQQVKLSRLYDSKTTAASVDPIIQIGVLNISEVRFRVSMAMSPSQRPRGVLGFWASLMTALGNTENMPVRINQRFNENVCMRKSSMITMAISNVRKDLLGQPLQLLSGVDILGNASSALGHMSKGVAALSMDKKFIQSRQRQENKGVEDLGDVIREGGGALAKGLFRGVTGILTKPLEGAKSSGVEGFVQGVGKGIIGAAAQPVSGVLDLLSKTTEGANAMRMKIASAITSDEQLLRRRLPRVIGGDNLLKLYDEYKAQGQVILQLAESGSFFGQVDLFKVRGKFALSDAYEDHFMLPKGKILVVTHTRVILLQQPSNIIAQRKFSPARDPCSIMWDILWDDLGTMELTHGKKDKPKAPPSQLILYLQSRSMDMKENHRIIKCIRETHQALQIYSSIQHALNTYGPGVSKGVLKNKVAKPYSPHVDARSVDLSPQQMPGSVPLSSTFGSSARD

SEQ ID NO: 7149 - protein, 494 aa, Glycine max
  misc_feature (1)..(494): Ceres Seq. ID no. 15170541
MQSNGSLDLCVYPYIGLHGPESSSAFLINIHEPIIWRLHEMIQQVKLSRLYDSKTTAASVDPIIQIGVLNISEVRFRVSMAMSPSQRPRGVLGFWASLMTALGNTENMPVRINQRFNENVCMRKSSMITMAISNVRKDLLGQPLQLLSGVDILGNASSALGHMSKGVAALSMDKKFIQSRQRQENKGVEDLGDVIREGGGALAKGLFRGVTGILTKPLEGAKSSGVEGFVQGVGKGIIGAAAQPVSGVLDLLSKTTEGANAMRMKIASAITSDEQLLRRRLPRVIGGDNLLKLYDEYKAQGQVILQLAESGSFFGQVDLFKVRGKFALSDAYEDHFMLPKGKILVVTHTRVILLQQPSNIIAQRKFSPARDPCSIMWDILWDDLGTMELTHGKKDKPKAPPSQLILYLQSRSMDMKENHRIIKCIRETHQALQIYSSIQHALNTYGPGVSKGVLKNKVAKPYSPHVDARSVDLSPQQMPGSVPLSSTFGSSARD

SEQ ID NO: 7150 - protein, 454 aa, Glycine max
  misc_feature (1)..(454): Ceres Seq. ID no. 15170542
MIQQVKLSRLYDSKTTAASVDPIIQIGVLNISEVRFRVSMAMSPSQRPRGVLGFWASLMTALGNTENMPVRINQRFNENVCMRKSSMITMAISNVRKDLLGQPLQLLSGVDILGNASSALGHMSKGVAALSMDKKFIQSRQRQENKGVEDLGDVIREGGGALAKGLFRGVTGILTKPLEGAKSSGVEGFVQGVGKGIIGAAAQPVSGVLDLLSKTTEGANAMRMKIASAITSDEQLLRRRLPRVIGGDNLLKLYDEYKAQGQVILQLAESGSFFGQVDLFKVRGKFALSDAYEDHFMLPKGKILVVTHTRVILLQQPSNIIAQRKFSPARDPCSIMWDILWDDLGTMELTHGKKDKPKAPPSQLILYLQSRSMDMKENHRIIKCIRETHQALQIYSSIQHALNTYGPGVSKGVLKNKVAKPYSPHVDARSVDLSPQQMPGSVPLSSTFGSSARD

SEQ ID NO: 7151 - DNA, 1457 bp, Glycine max
  misc_feature (1)..(1457): Ceres Seq. ID no. 15170555
aaaagatataagcctaagctaagtggagacgctgttgccatttctgctcattgagtgaaagttccattgggcgtggtttaatggaagggatgaagcagcttgcgtacaacactgcggtgaagctcattctggctgcactcgaacacaacttgctccctgactttgtcaccaggagatatggtcgcttcatggcggctaacatccttcgctctggctacaaatcatcctccgaacttcaactctccgatctccttcactttgcgcattctctacaacagatgcccatagcaatcgacactgatgagacaaattctcaactttatgagttgcctaccgctttcttcaagttggtgctcggaaacaaactcaatttcagctgttgctatttcccttctgcctctatgacactggatgatgctgaagaagcaatgttgaaactgtgctgcgagagatcaaatttgaaagatggtcatacagtacttgatttgggatgcggttggggatcactggttttgtacattgccaagaagtacactaactgcagggttacaggaatcagctattcgacaactcaaaagacttatattgaggagaagtgccgggatcttcagctgcaaaatttgaatattatagttgctgatattggcacatttgaaatggaggcttcttacgacagaatattttccatagaaatgtttgagcatatgaagaactataaagatcttctcaagaagatatccaaatggatgaaagaggatagccttttatttgttcatatcatgtgccacaaagcatttgcctaccactttgaggacaaaaatgaagatgactggattacaagatacttctttgctggagcaactatgccttctgcaaatctacttctttatttccaagatgatgttacagtcatcaaccattggctagtaaatgggaaacactccgcacagaccagtgaagaatggctcaaaagaatggaccagaaaatgacttacatcaagccaattatggaatcaacgtatggcaaggattcagctaccaagtggactgcctattggagagcattcttcatagttggagcagaaacttttgcatataataacggtgaagaatggatgattgcacacttccttttcaaaaagaaataaaataagaccaaacctaatcttttaatttggctatttaagaatggcgttaaaagaagctgctaaacgaggttgcacccttcaatgatgttgcataattttatcagttaacttgttttaattggttgcttgtctgtattttttcctgtctcaatcctttgtcttcggcccctaatgttatggtgtagccattccagtcttgttttatcttaaatttagggaaagtccaattcaaccctcagaacttgggtcgaagggtcatgcatgtgctccctggttcataaactttaaaatatgcacttagacccctct

SEQ ID NO: 7152 - protein, 355 aa, Glycine max
  misc_feature (1)..(355): Ceres Seq. ID no. 15170556
MEGMKQLAYNTAVKLILAALEHNLLPDFVTRRYGRFMAANILRSGYKSSSELQLSDLLHFAHSLQQMPIAIDTDETNSQLYELPTAFFKLVLGNKLNFSCCYFPSASMTLDDAEEAMLKLCCERSNLKDGHTVLDLGCGWGSLVLYIAKKYTNCRVTGISYSTTQKTYIEEKCRDLQLQNLNIIVADIGTFEMEASYDRIFSIEMFEHMKNYKDLLKKISKWMKEDSLLFVHIMCHKAFAYHFEDKNEDDWITRYFFAGATMPSANLLLYFQDDVTVINHWLVNGKHSAQTSEEWLKRMDQKMTYIKPIMESTYGKDSATKWTAYWRAFFIVGAETFAYNNGEEWMIAHFLFKKK

SEQ ID NO: 7153 - protein, 352 aa, Glycine max
  misc_feature (1)..(352): Ceres Seq. ID no. 15170557
MKQLAYNTAVKLILAALEHNLLPDFVTRRYGRFMAANILRSGYKSSSELQLSDLLHFAHSLQQMPIAIDTDETNSQLYELPTAFFKLVLGNKLNFSCCYFPSASMTLDDAEEAMLKLCCERSNLKDGHTVLDLGCGWGSLVLYIAKKYTNCRVTGISYSTTQKTYIEEKCRDLQLQNLNIIVADIGTFEMEASYDRIFSIEMFEHMKNYKDLLKKISKWMKEDSLLFVHIMCHKAFAYHFEDKNEDDWITRYFFAGATMPSANLLLYFQDDVTVINHWLVNGKHSAQTSEEWLKRMDQKMTYIKPIMESTYGKDSATKWTAYWRAFFIVGAETFAYNNGEEWMIAHFLFKKK

SEQ ID NO: 7154 - protein, 319 aa, Glycine max
  misc_feature (1)..(319): Ceres Seq. ID no. 15170558
MAANILRSGYKSSSELQLSDLLHFAHSLQQMPIAIDTDETNSQLYELPTAFFKLVLGNKLNFSCCYFPSASMTLDDAEEAMLKLCCERSNLKDGHTVLDLGCGWGSLVLYIAKKYTNCRVTGISYSTTQKTYIEEKCRDLQLQNLNIIVADIGTFEMEASYDRIFSIEMFEHMKNYKDLLKKISKWMKEDSLLFVHIMCHKAFAYHFEDKNEDDWITRYFFAGATMPSANLLLYFQDDVTVINHWLVNGKHSAQTSEEWLKRMDQKMTYIKPIMESTYGKDSATKWTAYWRAFFIVGAETFAYNNGEEWMIAHFLFKKK

SEQ ID NO: 7155 - DNA, 579 bp, Glycine max
  misc_feature (1)..(579): Ceres Seq. ID no. 15170567
acaatcacaacttggtaaaggtactccgtgcaagaaagatgaagctcgagttcgcaaatgtgctacttctgtgccttgtccttagctcttctttcttggaaatctcaatggctggttctcctttctgtgactcaaagtgcgcgcagaggtgtgccaaagctggggttcaggacagatgcttgaggttttgcgggatctgctgcgagaagtgcaactgtgtcccatctgggacttacggaaacaaggacgagtgcccttgctacagggacatgaagaactccaagggcaaggacaaatgcccttgaagaatatctaatttcatcatcacactccattccaataaactaccttgtattgtatcttcagccttccttttcagagtattgcattatgccacggatctatgtacctacccttcaacttaagtattccgtctagttaattagcatagctacccttcaacttatgtgttccgacctagttaattaattagcttattaattatttacgagagtaaaacatcgttttagttctgtcatcttagtctttgaagttatataaagaaattcaaattaaaat

SEQ ID NO: 7156 - protein, 100 aa, Glycine max
  misc_feature (1)..(100): Ceres Seq. ID no. 15170568
NHNLVKVLRARKMKLEFANVLLLCLVLSSSFLEISMAGSPFCDSKCAQRCAKAGVQDRCLRFCGICCEKCNCVPSGTYGNKDECPCYRDMKNSKGKDKCP

SEQ ID NO: 7157 - protein, 88 aa, Glycine max
  misc_feature (1)..(88): Ceres Seq. ID no. 15170569
MKLEFANVLLLCLVLSSSFLEISMAGSPFCDSKCAQRCAKAGVQDRCLRFCGICCEKCNCVPSGTYGNKDECPCYRDMKNSKGKDKCP

SEQ ID NO: 7158 - protein, 65 aa, Glycine max
  misc_feature (1)..(65): Ceres Seq. ID no. 15170570
MAGSPFCDSKCAQRCAKAGVQDRCLRFCGICCEKCNCVPSGTYGNKDECPCYRDMKNSKGKDKCP

SEQ ID NO: 7159 - DNA, 439 bp, Glycine max
  misc_feature (1)..(439): Ceres Seq. ID no. 15170576
gaggcatccaagcttaaagcaagcagatctaagctccaggcagcgtcgcgacagagtgagtgagtagcacgacaacaacaatggcttccctgaaggccgcgaagcccagcggagttgcggcgcagggcaaggagccggcgcccaagctcagcgagacggcgacgaagccgtcagccgcgaagagcggcggcgttaagaaggctgagcagaagccccgggaaaccaaaaggaaggtgaagagcagcaaaccggcggcggcggccaaaaagtgacgtacagtacgtgtggagtgtaatggagcttccatgcatgcatgagtggatccatgccatgttatgaatctagtccttcctttcttgtatcttccatgtgacgcggcgtgtgcgtcccttcatgtgtgatgatgccagatgaatactacaaataagacgttgtgact

SEQ ID NO: 7160 - protein, 63 aa, Glycine max
  misc_feature (1)..(63): Ceres Seq. ID no. 15170577
MASLKAAKPSGVAAQGKEPAPKLSETATKPSAAKSGGVKKAEQKPRETKRKVKSSKPAAAAKK

SEQ ID NO: 7161 - DNA, 1252 bp, Glycine max
  misc_feature (1)..(1252): Ceres Seq. ID no. 15170595
atgttcacaccaactaactacacatccgaatccatgaacaccaatctcataaggccttgtctctcgctctcgctctcgcgtcgctgctctattccgttcttcacgtgacatcacggcctcaagaaacgtcgtcgtattagagaaaggcgcgtaacgcatgaagagacaaatgttgcatgatctgattgagaatgcaggaggctgcgctgtcaccgatggaggattcgccacgcagctcgaaaagcatggagcctccatcaacgatcctctttggagcgccatctatttgatcaaagacccacatcttatcaaacaggttcacttggaatacttggaggctggtgctgatatattggttacttcatcataccaggctacacttcctggattttcatcgaagggtctatccattgaggaaggggaatcactactagagaagagtgtcaaattggcagttgaagcccgtgatggtttctggaattcagctataataaatcctgggaataaatacagaagagctttggttgcagcctccattggaagctacggatcttaccttgctgatggctcagaatacagtggctgctatggacctgatgtaaatttaaagaagttgaaggattttcatcgccgcagattgcaagttcttgttgaagctggtccagatttacttgcctttgagaccattccaaacaaacttgaagctcaggcttgtgtcgaattgcttgaagaagaaagtgtcaaaatcccatcttggatctgttttaccactgtagatggtgagaatgctccctcaggagagagtttcaaggactgccttgaagcattaaataagagtaacaaagtagatgctgttggtataaactgtgcacctccccatcttatggaaaatctcatttgcaaatttaagcagttaacaaagaaggccatcattgtttatcccaatagtggggaggtatgggatggtaaagccaagaaatggcttccatctaagtgttttcacgatgatgaatttggatttaatgcaacaaggtggcgtgatttgggagctaaaataataggaggttgttgccggactacaccctccaccattcaaattatttcaaatgctttaagagaaaaatcttgattgtgctagtagatgcaactttttttgacaaattgcaatatcttgtctagttattttctataatctatagtctaaatttaaattgtttaaaaaaaaaaaaaaaaaaaaaaaaaaaaaaaaaag

SEQ ID NO: 7162 - protein, 323 aa, Glycine max
  misc_feature (1)..(323): Ceres Seq. ID no. 15170596
MKRQMLHDLIENAGGCAVTDGGFATQLEKHGASINDPLWSAIYLIKDPHLIKQVHLEYLEAGADILVTSSYQATLPGFSSKGLSIEEGESLLEKSVKLAVEARDGFWNSAIINPGNKYRRALVAASIGSYGSYLADGSEYSGCYGPDVNLKKLKDFHRRRLQVLVEAGPDLLAFETIPNKLEAQACVELLEEESVKIPSWICFTTVDGENAPSGESFKDCLEALNKSNKVDAVGINCAPPHLMENLICKFKQLTKKAIIVYPNSGEVWDGKAKKWLPSKCFHDDEFGFNATRWRDLGAKIIGGCCRTTPSTIQIISNALREKS

SEQ ID NO: 7163 - protein, 319 aa, Glycine max
  misc_feature (1)..(319): Ceres Seq. ID no. 15170597
MLHDLIENAGGCAVTDGGFATQLEKHGASINDPLWSAIYLIKDPHLIKQVHLEYLEAGADILVTSSYQATLPGFSSKGLSIEEGESLLEKSVKLAVEARDGFWNSAIINPGNKYRRALVAASIGSYGSYLADGSEYSGCYGPDVNLKKLKDFHRRRLQVLVEAGPDLLAFETIPNKLEAQACVELLEEESVKIPSWICFTTVDGENAPSGESFKDCLEALNKSNKVDAVGINCAPPHLMENLICKFKQLTKKAIIVYPNSGEVWDGKAKKWLPSKCFHDDEFGFNATRWRDLGAKIIGGCCRTTPSTIQIISNALREKS

SEQ ID NO: 7164 - DNA, 664 bp, Glycine max
  misc_feature (1)..(664): Ceres Seq. ID no. 15170598
gaacatcctaatcgaaaaatcaatctatcaatcaaataatacacaccccgcaagccatagtgcacaaaactttcacaaaagaaattgaaaggtcaatatccacacctatcaatttctcactaaacttcaaattgcaattatgcaaaaccaacgaccctccggtatcatcaaccctaagtattgtgctccatataatgttgacctagcaattgtgagaaaagtcctaacattatctgatagctttaccgtcaccgatgtcaatggcaaaattgttttcaaccttaagggctctctgatgaccctccatgaccaccgtgtcttgcttggaccttaagaggggtggtcataggttcctcaagacagctgcttatggacactttggaagggatgatgcagacttcacctgggaagttgtgaagccactcaagtcagagaagcctcaagcttaagagtgttgttaagttaatcactcccttcagtggatgtcttgctgggtgtggatgaataatttgcgtgtttcatgactactactactactactccattcaatgtctaatgccatctcatcaatacctaaactgttcgtttttttttttctccctatactcacaatttattgtttggctatgcaatgttactgtgttgatgcaatggaaattttatc

SEQ ID NO: 7165 - protein, 64 aa, Glycine max
  misc_feature (1)..(64): Ceres Seq. ID no. 15170599
MQNQRPSGIINPKYCAPYNVDLAIVRKVLTLSDSFTVTDVNGKIVFNLKGSLMTLHDHRVLLGP

SEQ ID NO: 7166 - protein, 47 aa, Glycine max
  misc_feature (1)..(47): Ceres Seq. ID no. 15170600
MTTVSCLDLKRGGHRFLKTAAYGHFGRDDADFTWEVVKPLKSEKPQA

SEQ ID NO: 7167 - protein, 38 aa, Glycine max
  misc_feature (1)..(38): Ceres Seq. ID no. 15170601
MSNAISSIPKLFVFFFLPILTIYCLAMQCYCVDAMEIL

SEQ ID NO: 7168 - DNA, 1483 bp, Glycine max
  misc_feature (1)..(1483): Ceres Seq. ID no. 15170613
cttaaggcaaagcgtagtgctgctgagaaggaaaaacgtatcaggaaaaagcaggccaaacaaaagaaaaacaaccggaaaaataataaaggaaaaaatgaaagggttgacatgaaggaagtagctctagagggcagtccatcagatgatagaaaccctgatgatttgtcaagtcaagctgaagaagtgacctcaaatcctgacaatcccgacgaagcatctgatatctctgataacagagatgataattctgaggtgcttaatgttgatcttgaagaccgtgaatccagtcctgttaattgggaaacagatgcttcagaaactcgaggcattgttcctgaagttggtgatgtgcaaaatgagcaatcaggaaagagggcttcatttgttgatgatagctcgtctacttgttcatctgactcggttccttcagttatcttgaatgggtcaaatgcaggtggtgcgtggacaaatgtcaaatcctcatccaatagggggaacaaccggaggaataaggatactgatttgcgaacagggcatgcacatggtggatcaaatccagcacacaatggcagttatggatctagcaactcaaaggacataagacttgaagctggggatgacaaagttgtgtcacagaagaagcaaaatgcacagcggcatgttgatgttacgagcccctccaagttaagaatgacggagtcttccattccttctgtgagccctgttaagaagcaacctatcttctcccagcagccaaaatttccggcgatttattgatgaaagaagaagcaagctttgcaggttaattgaggatagactgagatggtccagtttcaatgcattctggctaggcatggatccaagtatgcggcggaacatgacaagggaaaagactgacaccatattgaaagttctagtgaaacattttttcatagaaaaggaagttacatcaaccttagtaatggactcgctgtataccggactgaaggctctggaatataagagcaagaaccaagtggggttgtccaaattaacagagacagatgctcgaagcacttctatggtgcttgttgagcaggatatgtttgtcttggcagatgatgtgttaattttgcttgaaagagctacattagacacactgccacaccaacaattgcctaccaaggatgaaaaagcttcacagaaccgcacaaaggaaagcagctcgggtgatgacttcaacaaagactctattgagcgcgatgacagacgacttatagagcttggctggaagacactagaattttttgccttggctcatatattcagtcgaattgaagtggcataccaagaggccgttgctttgaagcgccaagaagagctcatccgtgaagaagaagctgctgggcttgcagaaatcgaacttaaggcaaagcgtagtgctgctgagaaggaaaaacgtatcaggaaaaagcaggccaaacaaaagaaaaacaaccgg

SEQ ID NO: 7169 - protein, 259 aa, Glycine max
  misc_feature (1)..(259): Ceres Seq. ID no. 15170614
LKAKRSAAEKEKRIRKKQAKQKKNNRKNNKGKNERVDMKEVALEGSPSDDRNPDDLSSQAEEVTSNPDNPDEASDISDNRDDNSEVLNVDLEDRESSPVNWETDASETRGIVPEVGDVQNEQSGKRASFVDDSSSTCSSDSVPSVILNGSNAGGAWTNVKSSSNRGNNRRNKDTDLRTGHAHGGSNPAHNGSYGSSNSKDIRLEAGDDKVVSQKKQNAQRHVDVTSPSKLRMTESSIPSVSPVKKQPIFSQQPKFPAIY

SEQ ID NO: 7170 - protein, 222 aa, Glycine max
  misc_feature (1)..(222): Ceres Seq. ID no. 15170615
MKEVALEGSPSDDRNPDDLSSQAEEVTSNPDNPDEASDISDNRDDNSEVLNVDLEDRESSPVNWETDASETRGIVPEVGDVQNEQSGKRASFVDDSSSTCSSDSVPSVILNGSNAGGAWTNVKSSSNRGNNRRNKDTDLRTGHAHGGSNPAHNGSYGSSNSKDIRLEAGDDKVVSQKKQNAQRHVDVTSPSKLRMTESSIPSVSPVKKQPIFSQQPKFPAIY

SEQ ID NO: 7171 - protein, 209 aa, Glycine max
  misc_feature (1)..(209): Ceres Seq. ID no. 15170616
MDPSMRRNMTREKTDTILKVLVKHFFIEKEVTSTLVMDSLYTGLKALEYKSKNQVGLSKLTETDARSTSMVLVEQDMFVLADDVLILLERATLDTLPHQQLPTKDEKASQNRTKESSSGDDFNKDSIERDDRRLIELGWKTLEFFALAHIFSRIEVAYQEAVALKRQEELIREEEAAGLAEIELKAKRSAAEKEKRIRKKQAKQKKNNR

SEQ ID NO: 7172 - DNA, 1294 bp, Glycine max
  misc_feature (1)..(1294): Ceres Seq. ID no. 15170627
cataaccataaccgtctcagatagctttaggattttggtgtcaagattgtaggagcggccgtccgacctctgccaccacacgtgctgttggagctcgtggtgcaccctcacctcatggaaggagccatcctccccagcctgccaaacacgaggttagccgcccgcccatacatgcttagctgctcttggcgtcgccatgtagccttgcaacttgcagaaatctcatcgactgcggttgctagggtcgccgtcgtcaccggagggaacaaggggatcggcttcgaggtgtgccggcagcttgccagcggcggaattgccgtcgtcctgacggcccgggatgagatgaggggcggggaggccgtcgagaggctcaatgcgctggggctctctcatgtcgtcttccatcagctggagatcacggacgcttcgagcgccgctgcgctagctggttttctcaaggcccgcttcggcaagcttgatattctggtgaataatgccgcagttggtggggttgagtacggccaagagttcgataccaacgaggaaaagttcggtggcatggatttccaccagagagttgagtggatgctgaagaatgcccgggagcccatcgacagcgcgaagaacagcgtgaagacgaactactacggcacgaagcatgtaatcgaagccctgctgcctctgcttcaagcttcgtccgagggaagaatagtgaacgtctcctccaattatggactcctaagacatatcggcaacgaggaggtgaggcaggagctcaacgacgtcgacaacctgacagaggagaggttggacgagctgctggacaaattcatgaaagacttcgaggccggcgcgctggagccgcacgggtggcccacgaagttctccgcgtacaaggtggccaagaccgccatgaacgcctactcgaggatcctggcgaggaggcaccctgagctgcgcgtcaactgcgcgcacccaggcttcgtcaagaccgacatgagcatggggtccggggtcctgacgccggaggagggcgcacgcaacttggtgaaggtggcgctgctgcctgacggcgggccgaccggcgcgtatttcgccatgggcgaggaggcgctgttcgtgtgagatactgggaaccggatcctctaacattgtgaaggaaagtcagtgtgctacagtgtttgcctagtgtaaaataaagaaggaaagttaaggactgttagtagataattaataggttgtttactgtttactgtaagtataaataatttaaaattaattttatttcaccaac

SEQ ID NO: 7173 - protein, 336 aa, Glycine max
  misc_feature (1)..(336): Ceres Seq. ID no. 15170628
MEGAILPSLPNTRLAARPYMLSCSWRRHVALQLAEISSTAVARVAVVTGGNKGIGFEVCRQLASGGIAVVLTARDEMRGGEAVERLNALGLSHVVFHQLEITDASSAAALAGFLKARFGKLDILVNNAAVGGVEYGQEFDTNEEKFGGMDFHQRVEWMLKNAREPIDSAKNSVKTNYYGTKHVIEALLPLLQASSEGRIVNVSSNYGLLRHIGNEEVRQELNDVDNLTEERLDELLDKFMKDFEAGALEPHGWPTKFSAYKVAKTAMNAYSRILARRHPELRVNCAHPGFVKTDMSMGSGVLTPEEGARNLVKVALLPDGGPTGAYFAMGEEALFV

SEQ ID NO: 7174 - protein, 317 aa, Glycine max
  misc_feature (1)..(317): Ceres Seq. ID no. 15170629
MLSCSWRRHVALQLAEISSTAVARVAVVTGGNKGIGFEVCRQLASGGIAVVLTARDEMRGGEAVERLNALGLSHVVFHQLEITDASSAAALAGFLKARFGKLDILVNNAAVGGVEYGQEFDTNEEKFGGMDFHQRVEWMLKNAREPIDSAKNSVKTNYYGTKHVIEALLPLLQASSEGRIVNVSSNYGLLRHIGNEEVRQELNDVDNLTEERLDELLDKFMKDFEAGALEPHGWPTKFSAYKVAKTAMNAYSRILARRHPELRVNCAHPGFVKTDMSMGSGVLTPEEGARNLVKVALLPDGGPTGAYFAMGEEALFV

SEQ ID NO: 7175 - protein, 260 aa, Glycine max
  misc_feature (1)..(260): Ceres Seq. ID no. 15170630
MRGGEAVERLNALGLSHVVFHQLEITDASSAAALAGFLKARFGKLDILVNNAAVGGVEYGQEFDTNEEKFGGMDFHQRVEWMLKNAREPIDSAKNSVKTNYYGTKHVIEALLPLLQASSEGRIVNVSSNYGLLRHIGNEEVRQELNDVDNLTEERLDELLDKFMKDFEAGALEPHGWPTKFSAYKVAKTAMNAYSRILARRHPELRVNCAHPGFVKTDMSMGSGVLTPEEGARNLVKVALLPDGGPTGAYFAMGEEALFV

SEQ ID NO: 7176 - DNA, 1173 bp, Glycine max
  misc_feature (1)..(1173): Ceres Seq. ID no. 15170702
gtgacttttcattttgccatctccacgattttcggcaccttctccaccgccgctgcacccaaatgcgccttcgtcaatagcctttaccgctccagcttcagtttgttgattgaagacaacaacttccagcgaagcagcttgaatacagcttaggaaggtaattgtttaagcaattctaggaattttcacgtgctaacttatgaggatcaagaaggggactggatgatggttggagatgtgtcgtgggagatgttcttgaacagtgtgaagaggctgaagatcacaagagctgacagatgctagttaatttaataataaactgatggaggtttcaagcctacactgtccaaggttgaaatgaacgtagcatggcaacaaggaaatctgagaaaattctgccaagagaaaggaattcatgtgagtgcatggtcccctttgggagctaatggtgcttcatggggttctcttgctgtgatagatagtccagtcctaaaagacattgcaattgcaataggcaagagtgtggcacagatcctgaaaccgttctatgaactaatcaagagtgaaacaacgatgatgagaactgcttctcagaaatggggctacattcggatcatggctggtacaatctttggaggcatccttggattctatgtcatgcaccgccttgaaactaactacaaggaataaaatccaagatagtaaactaactctcaaagagcttgaaactacgcacaacaactatatgaaaagacaagaggagttagataatgatatgaggaagtgcaaggaagagttcaaagagtttgagaggattgcttgatgaggagaaggtcttagaagaaatcacagagagttccaaagcaaaatatgatgttgcaatatcaacagcatgccatggacttgattatattgtggtggaaacaactaatgtagctcaagcatgtgttgagttacttcgtagagagaatcttggtgtcgctactttcatgatattggtatttttttattttttatattaatcaacttgtttttgtctctaaatggctgtttaatattttgaatggcatgaattaaatatgttcacttttacttctggacccttggatttgtataactgtgactgagttcatgctctacgatatatttgctaatttaaggacatgttggtac

SEQ ID NO: 7177 - protein, 110 aa, Glycine max
  misc_feature (1)..(110): Ceres Seq. ID no. 15170703
MNVAWQQGNLRKFCQEKGIHVSAWSPLGANGASWGSLAVIDSPVLKDIAIAIGKSVAQILKPFYELIKSETTMMRTASQKWGYIRIMAGTIFGGILGFYVMHRLETNYKE

SEQ ID NO: 7178 - protein, 56 aa, Glycine max
  misc_feature (1)..(56): Ceres Seq. ID no. 15170704
MSCTALKLTTRNKIQDSKLTLKELETTHNNYMKRQEELDNDMRKCKEEFKEFERIA

SEQ ID NO: 7179 - DNA, 1423 bp, Glycine max
  misc_feature (1)..(1423): Ceres Seq. ID no. 15170741
agttaatgaagtgatagcccttgcagacagtggatttactagggatgaaatttgttcggaaccccaacaaaaagggatggttgcctcattggatactgaagaaaaatcaagtgaaacaatgggtagaaaattctctgaaccaaggcagcaacaagaaagtcctattttaaaaggaaaccttgactgtgttagggagtgttctacgtctgttgagggtaacttatcaagtccgggaacaagtaaaactggagagagaagacgggttaaagcagagaaaactataactttgcaagttcttagacaatattttgctggaagcctaaaagatgctgccaagaatattggtgtttgtactacaactttgaaaaggatctgccggcagcatgggataaagcgttggccttctcgaaagatcaaaaaggttggccactccttacaaaaacttcaacttgtcatcgactcggttcaaggtgcctctggtgcatttcaaatcaattccttctattcaaacttcccggatctagcttctccaaatttatcaggaactggcttcttctcaactttgaatcaaagtgataatccaaactcaacaagcacgcagcctgaacatggctcattgagcccagaaggtgcatcaaaatcaccctcttcgtcgagcagccagagttccatttcaagccattcctgctctagcatgtcagagctacaacagcagcacacaactaacattgccagtgacaaagatcctgccacggttggtgaatattctgctgatgttgtgttgaagttgatcagaaacgaggcaaagcttaaaagccttagtcaagatagagcaaagctcttgccaagatcactgagccaggaaacacttggtgaacacccgaaaactcagtatcaactgcctttattgaaaaccagtagcagcaaggtggattctcacagagtaaaagtcacatatggagatgagaaaacccggtttcggatgctgaaaaattgggtctatgaagatcttctgcaggaaattggtaggaaatttaatgtgagtgacatgagcaaatttgatgtcaaatacttggatgatgattgtgagtggatactactcacttgtgatgctgatttagaggagtgcattgatgtttgtcaatcttccgagagtggtaccatcaaacttagtctacaaccttctagtcatagtgtgagaagttttttagaatttagataacagattgattgtaaattataagatctttgtcatgtatgtgaagcagtcttagaaaaggcacaattatttttttgtgaaaaaaattattattttggcagaatgtaaggataaacttttgcttatccttgtgctccaagcaataagcaaattcagcttttgtttgattggtataatataataccatttgtgcaattgaattct

SEQ ID NO: 7180 - protein, 406 aa, Glycine max
  misc_feature (1)..(406): Ceres Seq. ID no. 15170742
VNEVIALADSGFTRDEICSEPQQKGMVASLDTEEKSSETMGRKFSEPRQQQESPILKGNLDCVRECSTSVEGNLSSPGTSKTGERRRVKAEKTITLQVLRQYFAGSLKDAAKNIGVCTTTLKRICRQHGIKRWPSRKIKKVGHSLQKLQLVIDSVQGASGAFQINSFYSNFPDLASPNLSGTGFFSTLNQSDNPNSTSTQPEHGSLSPEGASKSPSSSSSQSSISSHSCSSMSELQQQHTTNIASDKDPATVGEYSADVVLKLIRNEAKLKSLSQDRAKLLPRSLSQETLGEHPKTQYQLPLLKTSSSKVDSHRVKVTYGDEKTRFRMLKNWVYEDLLQEIGRKFNVSDMSKFDVKYLDDDCEWILLTCDADLEECIDVCQSSESGTIKLSLQPSSHSVRSFLEFR

SEQ ID NO: 7181 - protein, 381 aa, Glycine max
  misc_feature (1)..(381): Ceres Seq. ID no. 15170743
MVASLDTEEKSSETMGRKFSEPRQQQESPILKGNLDCVRECSTSVEGNLSSPGTSKTGERRRVKAEKTITLQVLRQYFAGSLKDAAKNIGVCTTTLKRICRQHGIKRWPSRKIKKVGHSLQKLQLVIDSVQGASGAFQINSFYSNFPDLASPNLSGTGFFSTLNQSDNPNSTSTQPEHGSLSPEGASKSPSSSSSQSSISSHSCSSMSELQQQHTTNIASDKDPATVGEYSADVVLKLIRNEAKLKSLSQDRAKLLPRSLSQETLGEHPKTQYQLPLLKTSSSKVDSHRVKVTYGDEKTRFRMLKNWVYEDLLQEIGRKFNVSDMSKFDVKYLDDDCEWILLTCDADLEECIDVCQSSESGTIKLSLQPSSHSVRSFLEFR

SEQ ID NO: 7182 - protein, 367 aa, Glycine max
  misc_feature (1)..(367): Ceres Seq. ID no. 15170744
MGRKFSEPRQQQESPILKGNLDCVRECSTSVEGNLSSPGTSKTGERRRVKAEKTITLQVLRQYFAGSLKDAAKNIGVCTTTLKRICRQHGIKRWPSRKIKKVGHSLQKLQLVIDSVQGASGAFQINSFYSNFPDLASPNLSGTGFFSTLNQSDNPNSTSTQPEHGSLSPEGASKSPSSSSSQSSISSHSCSSMSELQQQHTTNIASDKDPATVGEYSADVVLKLIRNEAKLKSLSQDRAKLLPRSLSQETLGEHPKTQYQLPLLKTSSSKVDSHRVKVTYGDEKTRFRMLKNWVYEDLLQEIGRKFNVSDMSKFDVKYLDDDCEWILLTCDADLEECIDVCQSSESGTIKLSLQPSSHSVRSFLEFR

SEQ ID NO: 7183 - DNA, 1328 bp, Glycine max
  misc_feature (1)..(1328): Ceres Seq. ID no. 15170745
gtcgtggtgcggtggtttgtggtgaaaatttgcataataatcttttgcagaaagcaagcaagaaagaaaaagggccatggaggccctgcacttgcaccgcgtgcttctcatgcctgtttcccaaaaaacctcaatctttttgcgcgccagtggcaccccattatccacacttgcaaggccaccattgcgttggagctctcaaacttgcagtgccagagcagggtggtttttgggtcttggagcagacagcaagaagaccaatttacctgataccgtcaaagccggtgaccccgttctgcacgagccagcccaggatgttgatcctaacgaaataaagtcggagagagtgcagaagattattgatgacatgatccaggtcatgagaaaggctcctggtgttggtcttgctgctccccagattggaattcctttgaggataattgttttggaagatacaaaagagtacattagttatgtctcaaaggaagaggctaaaactcaagatagaagaccttttgatcttttggtgatcctgaatcccaagctagagaagaagggcaagaggactgctctgttttttgaagggtgcttgagtgttgatgggttcagagcagtggtggagcgacaccttgacgttgaagttacaggtttggatcgttatggtgcaccaatcaaaataatcgcttctggctggcaggctcggattttacaacacgagtgtgatcacttggatggaactctgtatgttgataagatgctacctagaactttcagaactgtggacaacatggacctgcctcttgcccaggggtgccccaaacttggtcctcgctaaaattacactccagctgtttctgataaggcattcaatgcaggtatctaatgcattttagtgaacaattgacatttgtagatcctaaaatggaggccagattctttacattctagaaatagtctcaacttaagaaaaattaaatctccctcaattttcaatgccatcattttgccaagaattgccattgcactactcctgattaattcacttcatttaagtttcaatgttgtagcttatactcgaaaaaaaaaatcagagttgtggactatggagtctggatattgacagtgcctagtttttctgcccattgacaaaaaattgggtttgctgtcttcttgttatttggagcattgaggtggctacttaggcattagaaattcatgtaacttttgtcagctctaatgcaaacttataccaattgtgtgcagatcttggctatttcatccttcaatgatgagggagaattgtcgttctaataaatcagaatgatatg

SEQ ID NO: 7184 - protein, 252 aa, Glycine max
  misc_feature (1)..(252): Ceres Seq. ID no. 15170746
MEALHLHRVLLMPVSQKTSIFLRASGTPLSTLARPPLRWSSQTCSARAGWFLGLGADSKKTNLPDTVKAGDPVLHEPAQDVDPNEIKSERVQKIIDDMIQVMRKAPGVGLAAPQIGIPLRIIVLEDTKEYISYVSKEEAKTQDRRPFDLLVILNPKLEKKGKRTALFFEGCLSVDGFRAVVERHLDVEVTGLDRYGAPIKIIASGWQARILQHECDHLDGTLYVDKMLPRTFRTVDNMDLPLAQGCPKLGPR

SEQ ID NO: 7185 - protein, 241 aa, Glycine max
  misc_feature (1)..(241): Ceres Seq. ID no. 15170747
MPVSQKTSIFLRASGTPLSTLARPPLRWSSQTCSARAGWFLGLGADSKKTNLPDTVKAGDPVLHEPAQDVDPNEIKSERVQKIIDDMIQVMRKAPGVGLAAPQIGIPLRIIVLEDTKEYISYVSKEEAKTQDRRPFDLLVILNPKLEKKGKRTALFFEGCLSVDGFRAVVERHLDVEVTGLDRYGAPIKIIASGWQARILQHECDHLDGTLYVDKMLPRTFRTVDNMDLPLAQGCPKLGPR

SEQ ID NO: 7186 - protein, 155 aa, Glycine max
  misc_feature (1)..(155): Ceres Seq. ID no. 15170748
MIQVMRKAPGVGLAAPQIGIPLRIIVLEDTKEYISYVSKEEAKTQDRRPFDLLVILNPKLEKKGKRTALFFEGCLSVDGFRAVVERHLDVEVTGLDRYGAPIKIIASGWQARILQHECDHLDGTLYVDKMLPRTFRTVDNMDLPLAQGCPKLGPR

SEQ ID NO: 7187 - DNA, 1095 bp, Glycine max
  misc_feature (1)..(1095): Ceres Seq. ID no. 15170749
aaaattcccacacacaattgattgttgatttcattttcctctggcggaagccatttttcgatctgttggtgtgctttctggaaaggtggtggatggcaaaaaacaacaagtacgcctctattaacttcaaccacatctacgaaaaaaccaacaccaccaacccacacaacaagaatccttctctctcttcttcttccgcttcctattccgccgtctccgcccccaacaaaccccatggccgcatcctcgtcctaacccgacccactcccaaacccatcacgccctccaccccgcaaccgcaacagcaacaaccaccaccgccgaccccgatccagcacaaccacccccggtccgaaccaggatcggacgcgatctcgctccgacccctgggccgaaccggaaccggttcaccgctcttgtcgctccccgttgtttccagccccgacaaggacttgcccttgctctctcctcagccgcccaagacggacaagttcgtaccgccacaccttcggcccgggttcgttcccagggaggaggctcccccgcccgggcccgaacttcggcccaacggccggcccaagtcgggtggcggcccggacaggatgagaagggttgggccgggtggcgtctcggatgcgggggtcttgggccgcgggactcggcccagttccagtggatgaatggtggctatgaagttgaattcttttccgaggacgaagacaaacacattttgctacagagatgggttctctataccaattcagtgcatgtatcctttgtccctctggaactgacatcaattttcacatggcaaaagaaatcacagaagatgaaaactgaccaggtggcagattttcaccacctaacgtcccaatttatagcaaaatttgttgtgctcataggaggctttaacacccaagttcttctgttggtgtttggtcctcttcaaccacgtgccaatagagagtagaagaatctatatacatatttttaattcctagctaaactgttctgttgactgttctgaaagacataccctctgtactttgagcataagtttgagaggagatccaatcgtttttattgtcttattat

SEQ ID NO: 7188 - protein, 225 aa, Glycine max
  misc_feature (1)..(225): Ceres Seq. ID no. 15170750
NSHTQLIVDFIFLWRKPFFDLLVCFLERWWMAKNNKYASINFNHIYEKTNTTNPHNKNPSLSSSSASYSAVSAPNKPHGRILVLTRPTPKPITPSTPQPQQQQPPPPTPIQHNHPRSEPGSDAISLRPLGRTGTGSPLLSLPVVSSPDKDLPLLSPQPPKTDKFVPPHLRPGFVPREEAPPPGPELRPNGRPKSGGGPDRMRRVGPGGVSDAGVLGRGTRPSSSG

SEQ ID NO: 7189 - protein, 195 aa, Glycine max
  misc_feature (1)..(195): Ceres Seq. ID no. 15170751
MAKNNKYASINFNHIYEKTNTTNPHNKNPSLSSSSASYSAVSAPNKPHGRILVLTRPTPKPITPSTPQPQQQQPPPPTPIQHNHPRSEPGSDAISLRPLGRTGTGSPLLSLPVVSSPDKDLPLLSPQPPKTDKFVPPHLRPGFVPREEAPPPGPELRPNGRPKSGGGPDRMRRVGPGGVSDAGVLGRGTRPSSSG

SEQ ID NO: 7190 - DNA, 1507 bp, Glycine max
  misc_feature (1)..(1507): Ceres Seq. ID no. 15170752
aagcctattacgatgtcgtttttaagaaaaccggcagtattgccgttagcgacgcagccaaaaccctaatcagtgccaaacgatggaatcaccgtcaccaccttccccgttccgagaccttcttctccgtttatcgaccggaatcgcggagtctctggccaccgttccctacactccacaccaatcctccaacgtctccgtcaaagcctttctcgaacccctcctcgttcccaccgccaccgtcagagacttcgctctcgcgtgcgctctcatttcctcttccaccgccgtcgactcctccggcattctctcatggatccccagcaacctctcctctctcgcaacctcgtccttctccgacctctcccgcgcttacctcggaaatcgcgacctcgctgttccgccggagaagaggctcgtgctggaattgatgccagaggttttgccttttctgaaagagaggattaaggagagctcgattgatgtgtcggatgagaccgacgagttctccgcggcgacggcgagagtccccgttgggttcgccattctcgctgcttttcagtttagatggtttgttacgcaagttgattattctcatttgggcaagttgtgtggattggtgattccttgtgcactgactgctgttgatcattggtctccggtagttaagggacagggcatgattagccttatgcatgttggaaaaaatgtggatgctgctcagcttggtgggtatgtggatgtgattctggatgcctgctgccagaacacggcttctgatgatgagatatggcaccatgttgttgaggcatctgtactgcttgtgactcttactcagagaagtaatccacgtagtccatggtttgaaagaatgctaaatgagatgttaagtcacttggagcgccagcctagaaacaaagagcgccgcatcgcatggcttaaatctgctgattcactatttaatggagttggtatcatgcttttagctcacttcaggcgcattttcccattattttttcagtggatgcatgctgacgacaatgagactattattttggttctaaaatgtacatatgtaattttgagactgacgtggataaggaactcaccatttgttgcaaaattggtagataaacttgctcttgtgtataaggaggctgcattaagaacagctcgggaagagattagagcaaatatatgtcagatactgatcctacttcaagaaagcaaaggactgtattttaatgcagcctgggacaagcatcgatccgatccagacttgaccactcttgatttttcattaagtggaagaagtaatactaatactgtgccttcagaggattgtcctcagcagggtttagtacccgttcaatgataagttaattgcatttctgattatttcaatgtaccacaattttgagttgatataggttaatgtaattaaaaagtagaattgttggaacgagaataacaatatgcaaagtttgaatttgttttgtattctttg

SEQ ID NO: 7191 - protein, 430 aa, Glycine max
  misc_feature (1)..(430): Ceres Seq. ID no. 15170753
MESPSPPSPFRDLLLRLSTGIAESLATVPYTPHQSSNVSVKAFLEPLLVPTATVRDFALACALISSSTAVDSSGILSWIPSNLSSLATSSFSDLSRAYLGNRDLAVPPEKRLVLELMPEVLPFLKERIKESSIDVSDETDEFSAATARVPVGFAILAAFQFRWFVTQVDYSHLGKLCGLVIPCALTAVDHWSPVVKGQGMISLMHVGKNVDAAQLGGYVDVILDACCQNTASDDEIWHHVVEASVLLVTLTQRSNPRSPWFERMLNEMLSHLERQPRNKERRIAWLKSADSLFNGVGIMLLAHFRRIFPLFFQWMHADDNETIILVLKCTYVILRLTWIRNSPFVAKLVDKLALVYKEAALRTAREEIRANICQILILLQESKGLYFNAAWDKHRSDPDLTTLDFSLSGRSNTNTVPSEDCPQQGLVPVQ

SEQ ID NO: 7192 - protein, 314 aa, Glycine max
  misc_feature (1)..(314): Ceres Seq. ID no. 15170754
MPEVLPFLKERIKESSIDVSDETDEFSAATARVPVGFAILAAFQFRWFVTQVDYSHLGKLCGLVIPCALTAVDHWSPVVKGQGMISLMHVGKNVDAAQLGGYVDVILDACCQNTASDDEIWHHVVEASVLLVTLTQRSNPRSPWFERMLNEMLSHLERQPRNKERRIAWLKSADSLFNGVGIMLLAHFRRIFPLFFQWMHADDNETIILVLKCTYVILRLTWIRNSPFVAKLVDKLALVYKEAALRTAREEIRANICQILILLQESKGLYFNAAWDKHRSDPDLTTLDFSLSGRSNTNTVPSEDCPQQGLVPVQ

SEQ ID NO: 7193 - protein, 231 aa, Glycine max
  misc_feature (1)..(231): Ceres Seq. ID no. 15170755
MISLMHVGKNVDAAQLGGYVDVILDACCQNTASDDEIWHHVVEASVLLVTLTQRSNPRSPWFERMLNEMLSHLERQPRNKERRIAWLKSADSLFNGVGIMLLAHFRRIFPLFFQWMHADDNETIILVLKCTYVILRLTWIRNSPFVAKLVDKLALVYKEAALRTAREEIRANICQILILLQESKGLYFNAAWDKHRSDPDLTTLDFSLSGRSNTNTVPSEDCPQQGLVPVQ

SEQ ID NO: 7194 - DNA, 1710 bp, Glycine max
  misc_feature (1)..(1710): Ceres Seq. ID no. 15170768
gtttggattttgggtgaaaatgagataataatcgtgttggatcgagtcctccgtcttaccggtgtcaacgaggtggcggagaatggaaaacgccgacgttttcttgggcttacacgacttcctcgagcgcatgcggcaaccctccgccgctgaattcgtcaaagcaatcaaaagttttattgtttcgttttcaaacaatgctcctgatcccgatagggacagtgctgcggttcaagcgttcctcgcgaaaatggaagcggatttcagggctcatccactttgggctggttgctccgaagaggaacttgaaagtgccggtgaaggacttgagaagtatgttatgacaaagttatttgctcgtgtatttgcttcacttccagatgatgtaaaatttgatgaccaactttctgagaagatggctttgattcaacaatttattcgacctgaaaatttggatatcaagccagtatttcagaatgaatcatcatggttgcttgcacagaaagaattacagaagatcaacatgtacaaggcacccagggataaacttgtctgtattctgaattgttgcagggttattagcaacttgctacttaatgcttcggttgcttcgagagagaatcctccaggagctgatgaatttcttcctgtgcttatttatgtaaccataaaggcaaaccctccacaactgcactcaaatctactgtacatacagaggtttagacatcaatctcgattggttgcagaagcagcatattattttacaaacatgctctctgctgagtcattcatctcaaacatcgatgcaaaagccatttcaatggaggaagctgagtttgatggaaacatggaatttgctcgtgctatgctttcgggtatttcagctgatacacaagatcctggttcaccttatcaaaatgatggacagcatccaagagcagaacccactaagcacaaagctttgaatgataataatgaccctgcactacgaactccatcatctgttgcaaaatcagaaagcaagaaagtgacttttgcaaatgaatcattgatcacaaaagttccatcgctctcggatttggagaataaaggggcaagtatgattttaaaggaggataagttgaatgaagttttcggggagtttccatatttgtttgctagtgtaggtgacctaatggttggtgatgttgaagacctgctaaataattacaaacaacttgttttcaagtatgtctctctttccaaagggttaggaatctctcctacatctcttccaccatcgaattcccaaaataattctgaagaccatgctgaaaccacaatagattcttcagacaatggacctctagatgacaacagtaaatcagaagaatctattgatacaacagatgatagttcagataaagttacacttgaggagcaaaaaattgaatccgatctgccgaaggatgaccttgttgctcctgagggtgatcccccctcttaactaatcggagctatcttcaaccattttctccccgttttgtaccccattttttccacccgtttttcctgtaaaattatttttatgttgtccgttgtctggtagctacactcgttccttatgtttatagggatggctgtaccatgaccactatgcctcggtaacattgttcttgaatagattttagacctgcaaaaaatagaattttacatttgcttttgcgatgg

SEQ ID NO: 7195 - protein, 467 aa, Glycine max
  misc_feature (1)..(467): Ceres Seq. ID no. 15170769
MENADVFLGLHDFLERMRQPSAAEFVKAIKSFIVSFSNNAPDPDRDSAAVQAFLAKMEADFRAHPLWAGCSEEELESAGEGLEKYVMTKLFARVFASLPDDVKFDDQLSEKMALIQQFIRPENLDIKPVFQNESSWLLAQKELQKINMYKAPRDKLVCILNCCRVISNLLLNASVASRENPPGADEFLPVLIYVTIKANPPQLHSNLLYIQRFRHQSRLVAEAAYYFTNMLSAESFISNIDAKAISMEEAEFDGNMEFARAMLSGISADTQDPGSPYQNDGQHPRAEPTKHKALNDNNDPALRTPSSVAKSESKKVTFANESLITKVPSLSDLENKGASMILKEDKLNEVFGEFPYLFASVGDLMVGDVEDLLNNYKQLVFKYVSLSKGLGISPTSLPPSNSQNNSEDHAETTIDSSDNGPLDDNSKSEESIDTTDDSSDKVTLEEQKIESDLPKDDLVAPEGDPPS

SEQ ID NO: 7196 - protein, 451 aa, Glycine max
  misc_feature (1)..(451): Ceres Seq. ID no. 15170770
MRQPSAAEFVKAIKSFIVSFSNNAPDPDRDSAAVQAFLAKMEADFRAHPLWAGCSEEELESAGEGLEKYVMTKLFARVFASLPDDVKFDDQLSEKMALIQQFIRPENLDIKPVFQNESSWLLAQKELQKINMYKAPRDKLVCILNCCRVISNLLLNASVASRENPPGADEFLPVLIYVTIKANPPQLHSNLLYIQRFRHQSRLVAEAAYYFTNMLSAESFISNIDAKAISMEEAEFDGNMEFARAMLSGISADTQDPGSPYQNDGQHPRAEPTKHKALNDNNDPALRTPSSVAKSESKKVTFANESLITKVPSLSDLENKGASMILKEDKLNEVFGEFPYLFASVGDLMVGDVEDLLNNYKQLVFKYVSLSKGLGISPTSLPPSNSQNNSEDHAETTIDSSDNGPLDDNSKSEESIDTTDDSSDKVTLEEQKIESDLPKDDLVAPEGDPPS

SEQ ID NO: 7197 - protein, 411 aa, Glycine max
  misc_feature (1)..(411): Ceres Seq. ID no. 15170771
MEADFRAHPLWAGCSEEELESAGEGLEKYVMTKLFARVFASLPDDVKFDDQLSEKMALIQQFIRPENLDIKPVFQNESSWLLAQKELQKINMYKAPRDKLVCILNCCRVISNLLLNASVASRENPPGADEFLPVLIYVTIKANPPQLHSNLLYIQRFRHQSRLVAEAAYYFTNMLSAESFISNIDAKAISMEEAEFDGNMEFARAMLSGISADTQDPGSPYQNDGQHPRAEPTKHKALNDNNDPALRTPSSVAKSESKKVTFANESLITKVPSLSDLENKGASMILKEDKLNEVFGEFPYLFASVGDLMVGDVEDLLNNYKQLVFKYVSLSKGLGISPTSLPPSNSQNNSEDHAETTIDSSDNGPLDDNSKSEESIDTTDDSSDKVTLEEQKIESDLPKDDLVAPEGDPPS

SEQ ID NO: 7198 - DNA, 1319 bp, Glycine max
  misc_feature (1)..(1319): Ceres Seq. ID no. 15170784
ctactactaactcttgtttatcttagtgtgtcatcacactgtggacggttctgtgtcaaaacaaaccaacgattttgaaggtttgagacagcaacatgatgatgttgcggttagtctatgctcttatcttggggtttgtggctttgaattgcttgcaagtgtttgaagaatccaatgctcaacgcataccgcgagatgaagtgaaagcactacaagcaatatcggataaactagagaacgtgaattggaaagtcacagaacgttactgcatagaggatggaggcttcaatggcaagattaatatagacaatgacatcgtaaggaatgtcacatgcgattgcactttccaaaataaatcagtttgccatgttgataagatctttctgaagggtcaaaatatatcaggagttttccccagtgaatttggaaatctcacacaactgaaagaacttgatctcactcgcaactatctcagtggctcacttccaacaaatttttctcccaactccctggtcgttttgtcccttctgggaaaccgactaagtggacgaattcccacagaaatcggtgatattgctagtcttgaggaactggtcttagaatgtaatcaacttgaaggcccacttccacctagttttggaaatttgagcaagttgaagagactgcttctttctgcaaataattttacagggaccataccagaaacatatagcaaactaaagaatctcactgagtttaggatagatggaagcagtttatctggaccaatacccagtttcattgggaactggaccaatcttatcagactggatttgcagggaacaaatatggaaggcccgattcctcccactatatctcagttgaaacttttgactgaattgagaataactgatttgaatggtggaccaagtatgacatttcctgatctgaagaatttgacaaaattgaaacgactggaattgagaaattgcttaatcacgggttctattccaggttacattggagaaatggcaaacttggctactttagacctaagctttaacatgttgactggttcggtcccagattcaatacaaaaattggataacctagactacttgttcctaacaaataattctctaagcggaccaattcaggactggatactgagcttcaagaataatatagatctatcttacaacaattttacaaactcttctgcaactagctgtcagctcttggatgtgaacttggcttcaagccatttttcttcagcagtaacttcggcgtcaactttttgtttgaagagggaccttccttgtgcagaaaaaccccaatag

SEQ ID NO: 7199 - protein, 407 aa, Glycine max
  misc_feature (1)..(407): Ceres Seq. ID no. 15170785
MMMLRLVYALILGFVALNCLQVFEESNAQRIPRDEVKALQAISDKLENVNWKVTERYCIEDGGFNGKINIDNDIVRNVTCDCTFQNKSVCHVDKIFLKGQNISGVFPSEFGNLTQLKELDLTRNYLSGSLPTNFSPNSLVVLSLLGNRLSGRIPTEIGDIASLEELVLECNQLEGPLPPSFGNLSKLKRLLLSANNFTGTIPETYSKLKNLTEFRIDGSSLSGPIPSFIGNWTNLIRLDLQGTNMEGPIPPTISQLKLLTELRITDLNGGPSMTFPDLKNLTKLKRLELRNCLITGSIPGYIGEMANLATLDLSFNMLTGSVPDSIQKLDNLDYLFLTNNSLSGPIQDWILSFKNNIDLSYNNFTNSSATSCQLLDVNLASSHFSSAVTSASTFCLKRDLPCAEKPQ

SEQ ID NO: 7200 - protein, 406 aa, Glycine max
  misc_feature (1)..(406): Ceres Seq. ID no. 15170786
MMLRLVYALILGFVALNCLQVFEESNAQRIPRDEVKALQAISDKLENVNWKVTERYCIEDGGFNGKINIDNDIVRNVTCDCTFQNKSVCHVDKIFLKGQNISGVFPSEFGNLTQLKELDLTRNYLSGSLPTNFSPNSLVVLSLLGNRLSGRIPTEIGDIASLEELVLECNQLEGPLPPSFGNLSKLKRLLLSANNFTGTIPETYSKLKNLTEFRIDGSSLSGPIPSFIGNWTNLIRLDLQGTNMEGPIPPTISQLKLLTELRITDLNGGPSMTFPDLKNLTKLKRLELRNCLITGSIPGYIGEMANLATLDLSFNMLTGSVPDSIQKLDNLDYLFLTNNSLSGPIQDWILSFKNNIDLSYNNFTNSSATSCQLLDVNLASSHFSSAVTSASTFCLKRDLPCAEKPQ

SEQ ID NO: 7201 - protein, 405 aa, Glycine max
  misc_feature (1)..(405): Ceres Seq. ID no. 15170787
MLRLVYALILGFVALNCLQVFEESNAQRIPRDEVKALQAISDKLENVNWKVTERYCIEDGGFNGKINIDNDIVRNVTCDCTFQNKSVCHVDKIFLKGQNISGVFPSEFGNLTQLKELDLTRNYLSGSLPTNFSPNSLVVLSLLGNRLSGRIPTEIGDIASLEELVLECNQLEGPLPPSFGNLSKLKRLLLSANNFTGTIPETYSKLKNLTEFRIDGSSLSGPIPSFIGNWTNLIRLDLQGTNMEGPIPPTISQLKLLTELRITDLNGGPSMTFPDLKNLTKLKRLELRNCLITGSIPGYIGEMANLATLDLSFNMLTGSVPDSIQKLDNLDYLFLTNNSLSGPIQDWILSFKNNIDLSYNNFTNSSATSCQLLDVNLASSHFSSAVTSASTFCLKRDLPCAEKPQ

SEQ ID NO: 7202 - DNA, 1350 bp, Glycine max
  misc_feature (1)..(1350): Ceres Seq. ID no. 15170792
aatatctcaaaaaggaaaccgacaacacaaaggatttgcagaaagtgcagctacttagttccattttcatcctctctccattaactttcagtcaaaacaaaacaaaacctctttaggtgtgaaattccacgtgccaaaatcatctccgaggcaccaacatcggcagccacttatttctttatttattgaaggaatcagtatataaaacacctgctttctaacggtggcgcaccagaggggtttaggttcaggttcggggaagttcttcgcggcggagcaaggcggcgatgaggaagcggaagagagtactgaggtaggttctgttccgagccatgtggtgtcagcctctgcagcttcggcccaaaccaatcagtgggtgccgcggggaagtggttttcccatgatgtcacgttttatgcatgcgccttctcccgttctgtcttcttcgcatcctcatttgggagttggccacaagagagagcgtgaagatgacactggcgctggtgcgagtggaggtgttgctattgcagcagcttcttcacaaacgcaaacacaagagattgaaagtgctggcggcgacaggaggaggagatacaggggagtgaggcagaggccgtgggggaaatgggcggcagagattcgcgatcctcacaaagcggcgagagtgtggcttgggacattcgacactgccgaggctgcggccagagcctacgatgaagccgcattgaggttcagaggtaacagagcaaaacttaatttccccgaaaacgttgtaccggttccacctcctcctccggttcccgatttaccggcaagtgcggtagccggttccgattccatttccggttccggttcagtggtggcaggtttttcgccgacgctgatgcagggagcgccgtttcagggctcctctgcttttctgagagattattgggggtattctcagctgctgaggagtacaggggacttccatggactcgaccagtggttctttgattctcaaatggcagcgtttcaatcttcttcatcgtcgttgttgccatcgccgccgccgccgtcgttttcgccttcctctgcttcgtatcctctgttttcttccagccagcaaatggggattttccggccgccgggagagcagggtcatggcggagaagacggtggtagtgggtcagagttttcggagcttccaccttcgacgtggtcagataccagtggctatcctcctccaccacctggttgacatggaatacacatttttttctttattctattttttctctttctttggttaaagaaagaacaaggctttcttctgtttatttattttaatttatctgtttttgctttttt

SEQ ID NO: 7203 - protein, 279 aa, Glycine max
  misc_feature (1)..(279): Ceres Seq. ID no. 15170793
MMSRFMHAPSPVLSSSHPHLGVGHKREREDDTGAGASGGVAIAAASSQTQTQEIESAGGDRRRRYRGVRQRPWGKWAAEIRDPHKAARVWLGTFDTAEAAARAYDEAALRFRGNRAKLNFPENVVPVPPPPPVPDLPASAVAGSDSISGSGSVVAGFSPTLMQGAPFQGSSAFLRDYWGYSQLLRSTGDFHGLDQWFFDSQMAAFQSSSSSLLPSPPPPSFSPSSASYPLFSSSQQMGIFRPPGEQGHGGEDGGSGSEFSELPPSTWSDTSGYPPPPPG

SEQ ID NO: 7204 - protein, 278 aa, Glycine max
  misc_feature (1)..(278): Ceres Seq. ID no. 15170794
MSRFMHAPSPVLSSSHPHLGVGHKREREDDTGAGASGGVAIAAASSQTQTQEIESAGGDRRRRYRGVRQRPWGKWAAEIRDPHKAARVWLGTFDTAEAAARAYDEAALRFRGNRAKLNFPENVVPVPPPPPVPDLPASAVAGSDSISGSGSVVAGFSPTLMQGAPFQGSSAFLRDYWGYSQLLRSTGDFHGLDQWFFDSQMAAFQSSSSSLLPSPPPPSFSPSSASYPLFSSSQQMGIFRPPGEQGHGGEDGGSGSEFSELPPSTWSDTSGYPPPPPG

SEQ ID NO: 7205 - protein, 274 aa, Glycine max
  misc_feature (1)..(274): Ceres Seq. ID no. 15170795
MHAPSPVLSSSHPHLGVGHKREREDDTGAGASGGVAIAAASSQTQTQEIESAGGDRRRRYRGVRQRPWGKWAAEIRDPHKAARVWLGTFDTAEAAARAYDEAALRFRGNRAKLNFPENVVPVPPPPPVPDLPASAVAGSDSISGSGSVVAGFSPTLMQGAPFQGSSAFLRDYWGYSQLLRSTGDFHGLDQWFFDSQMAAFQSSSSSLLPSPPPPSFSPSSASYPLFSSSQQMGIFRPPGEQGHGGEDGGSGSEFSELPPSTWSDTSGYPPPPPG

SEQ ID NO: 7206 - DNA, 1526 bp, Glycine max
  misc_feature (1)..(1526): Ceres Seq. ID no. 15170804
acaaacaagagccaaaagccaacacacaacaaaactcaaacaaaaatgggacttcttcaacgtcccttgtgttgccacacacaacaaccacaatcccatcatcaccttcattccgagtcatcaacttcatcctccctctcttcacaaccaagcctcccttctgtcccctccctcaccccacaaaaaccgcatttcctcgaagaacaaccccaaaccacccaccacagactcatcaccgccgtcaagggccacacctcaccaatcttctccctcgccctccacggcaagtccctctatagcgcctcctccggcggcgaaataagagcatgcaatagaaatcccacatcggctaatgatataatcacattaaaatatataagtaatgtcaacaccaacactgttgtcgcgaccagcaacgcgccaatcaagtccctcatcgtatcccacgacaagttattcactgctcaccaagaccacaaaatccgtgtctggaaaacaacaaccgaccaacccggtaacaacaacaacaacaacccgaactactacaaatgcgtcgccacgcttcccaccctccacgaccgtatctccaaactcttctcctccaagaactacgtcgagattcgccgccacaagaagcgcacgtgggtgcatcacgtggacaccgtctccgccctcgcgctttcccgagacgggtccctcctctactccgcttcatgggaccgaacattcaagatctggcgaacctcggatttcaagtgtctggagtcagttaaaaacgcgcacgaggacgcaattaattccttagttttgtcgaataacggttttgtctacacaggttccgcggacactagaataaagatgtggaagaagttagagggagagaaaaagcattctctaataggaaccttggagaagcataaatccgctgttaacgctcttgctcttaactccgatggatcagtgttatattcaggtgcgtgtgataggtcaattttagtgtgggagagtgatcaaaatgaaaataataacaccatggtgttggtgggtgctttgagggggcacacaaaagcgatactgtgtttggtggtggtggcggatttggtgtgtagtggatctgctgataacagtgttagggtatggaggagaggtgctgagaagagttattcgtgtttggcggtgtttgaaggtcatcgacgacccgtgaagtgtttggctatggctgttgactccaacagtggtggtcctcgtgaggatgatcataatagtagctcttatctggtttacagtgcaggtttagattgtgagattaaagtgtggcaaatacgcgttccttcgctgtcgttgtgattctttttttgttactacaattttttgctcccttcattggatttgtaaataggatcagaattttttttgttattttgatgtgtaacttggcttctttttttcggtgtagtggtatttttactactaatttgactgaaaaaataaagaagatttggagatggattcataccaccaagttt

SEQ ID NO: 7207 - protein, 448 aa, Glycine max
  misc_feature (1)..(448): Ceres Seq. ID no. 15170805
TNKSQKPTHNKTQTKMGLLQRPLCCHTQQPQSHHHLHSESSTSSSLSSQPSLPSVPSLTPQKPHFLEEQPQTTHHRLITAVKGHTSPIFSLALHGKSLYSASSGGEIRACNRNPTSANDIITLKYISNVNTNTVVATSNAPIKSLIVSHDKLFTAHQDHKIRVWKTTTDQPGNNNNNNPNYYKCVATLPTLHDRISKLFSSKNYVEIRRHKKRTWVHHVDTVSALALSRDGSLLYSASWDRTFKIWRTSDFKCLESVKNAHEDAINSLVLSNNGFVYTGSADTRIKMWKKLEGEKKHSLIGTLEKHKSAVNALALNSDGSVLYSGACDRSILVWESDQNENNNTMVLVGALRGHTKAILCLVVVADLVCSGSADNSVRVWRRGAEKSYSCLAVFEGHRRPVKCLAMAVDSNSGGPREDDHNSSSYLVYSAGLDCEIKVWQIRVPSLSL

SEQ ID NO: 7208 - protein, 433 aa, Glycine max
  misc_feature (1)..(433): Ceres Seq. ID no. 15170806
MGLLQRPLCCHTQQPQSHHHLHSESSTSSSLSSQPSLPSVPSLTPQKPHFLEEQPQTTHHRLITAVKGHTSPIFSLALHGKSLYSASSGGEIRACNRNPTSANDIITLKYISNVNTNTVVATSNAPIKSLIVSHDKLFTAHQDHKIRVWKTTTDQPGNNNNNNPNYYKCVATLPTLHDRISKLFSSKNYVEIRRHKKRTWVHHVDTVSALALSRDGSLLYSASWDRTFKIWRTSDFKCLESVKNAHEDAINSLVLSNNGFVYTGSADTRIKMWKKLEGEKKHSLIGTLEKHKSAVNALALNSDGSVLYSGACDRSILVWESDQNENNNTMVLVGALRGHTKAILCLVVVADLVCSGSADNSVRVWRRGAEKSYSCLAVFEGHRRPVKCLAMAVDSNSGGPREDDHNSSSYLVYSAGLDCEIKVWQIRVPSLSL

SEQ ID NO: 7209 - DNA, 1720 bp, Glycine max
  misc_feature (1)..(1720): Ceres Seq. ID no. 15170811
ataaaatggaactgagttagggaagagagagaagaggaacactgacatggcttcttcactcagaatttcaagactcatctctcgctccttttcttctacctccttcttttcacgaggtgggaatggtttccttggttcaagacactgcaaatacagcacttcttctgccattgaagaagaacccgttaaaccatcagtgcaagtagaacacacccaactcttaattgatggaaaatttgtagatgctgcttctggtaaaacttttccaactttagatcctaggacaggtgaagtaattgctcatgttgctgagggtcactctgaggatgttgatcgagcagttgcagctgcacgaaaagcatttgatcatggaccatggcctaagatgacggcttatgaacggcaaaggatcttgttgcgcgcagctgatctgcttgagaagcataatgatgagcttgcagcacttgagacttgggataatggaaagccttatgaacaagctgctaagattgaagttccaatgcttgttcgcctgattcgatactatgctggttgggcagataagatccatggtctaacagttccagctgatggaccatatcatgtgcaaacattgcatgaaccaattggtgttgccggtcagatcattccttggaacttccctcttctcatgtttgcctggaaggttggaccggcattggcctgtggcaacaccattgttctcaaaacagctgagcagacaccgttatctgctttatatgcagcaaaactatttcatgaggctggacttcctgctggtgttttaaatgtagtatctggctttggtccaactgctggtgctgctcttgctagccacatggaagttgacaagcttgcttttactggttccactgatactgggaaagttgtccttgaactggcggctaaaagcaatcttaagcctgttactttggagcttggtgggaaatccccctttattgtgtgtgaagatgctgatgtagatcaggctgttgagctagcccattttgctttattctttaatcagggacaatgttgctgtgctgggtctcgaacatttgtacatgaaagtgtatacgatgagtttgttgagaaagcaaaggctcgtgctttgaagcgtgttgttggtgatccattcaaggggggaatagagcaaggtcctcagattgattcagatcaatttgagaaaatactgaggtacatcagatctggtgttgaaagtggggcaacccttgaaaccggaggagacaagcttggcaacaagggcttctacattcaacctacagtcttctcaaatgttaaggatggcatgctgattgcaagggatgagatctttggtccagtccaatccatattaaaattcaaggatcttggtgaggtagttcaaagagcaaataacacacgttacgggcttgcggccggagtgttcacaacgaacatggacactgcctacactttgacgcgggcactgagagttggaacagtgtggataaactgctttgacacatttgatgctgcaattccctttggagggtacaagatgagtggtcaaggcagagaaaaaggagagtatagtctcaaaaactacttgcaagtgaaggctgttgttaatcccctgaaaaacccagcatggctttgagcaaacactagccttctttggataatcaataactatcagtgcctcaatgataatgatgataag

SEQ ID NO: 7210 - protein, 536 aa, Glycine max
  misc_feature (1)..(536): Ceres Seq. ID no. 15170812
MASSLRISRLISRSFSSTSFFSRGGNGFLGSRHCKYSTSSAIEEEPVKPSVQVEHTQLLIDGKFVDAASGKTFPTLDPRTGEVIAHVAEGHSEDVDRAVAAARKAFDHGPWPKMTAYERQRILLRAADLLEKHNDELAALETWDNGKPYEQAAKIEVPMLVRLIRYYAGWADKIHGLTVPADGPYHVQTLHEPIGVAGQIIPWNFPLLMFAWKVGPALACGNTIVLKTAEQTPLSALYAAKLFHEAGLPAGVLNVVSGFGPTAGAALASHMEVDKLAFTGSTDTGKVVLELAAKSNLKPVTLELGGKSPFIVCEDADVDQAVELAHFALFFNQGQCCCAGSRTFVHESVYDEFVEKAKARALKRVVGDPFKGGIEQGPQIDSDQFEKILRYIRSGVESGATLETGGDKLGNKGFYIQPTVFSNVKDGMLIARDEIFGPVQSILKFKDLGEVVQRANNTRYGLAAGVFTTNMDTAYTLTRALRVGTVWINCFDTFDAAIPFGGYKMSGQGREKGEYSLKNYLQVKAVVNPLKNPAWL

SEQ ID NO: 7211 - protein, 423 aa, Glycine max
  misc_feature (1)..(423): Ceres Seq. ID no. 15170813
MTAYERQRILLRAADLLEKHNDELAALETWDNGKPYEQAAKIEVPMLVRLIRYYAGWADKIHGLTVPADGPYHVQTLHEPIGVAGQIIPWNFPLLMFAWKVGPALACGNTIVLKTAEQTPLSALYAAKLFHEAGLPAGVLNVVSGFGPTAGAALASHMEVDKLAFTGSTDTGKVVLELAAKSNLKPVTLELGGKSPFIVCEDADVDQAVELAHFALFFNQGQCCCAGSRTFVHESVYDEFVEKAKARALKRVVGDPFKGGIEQGPQIDSDQFEKILRYIRSGVESGATLETGGDKLGNKGFYIQPTVFSNVKDGMLIARDEIFGPVQSILKFKDLGEVVQRANNTRYGLAAGVFTTNMDTAYTLTRALRVGTVWINCFDTFDAAIPFGGYKMSGQGREKGEYSLKNYLQVKAVVNPLKNPAWL

SEQ ID NO: 7212 - protein, 378 aa, Glycine max
  misc_feature (1)..(378): Ceres Seq. ID no. 15170814
MLVRLIRYYAGWADKIHGLTVPADGPYHVQTLHEPIGVAGQIIPWNFPLLMFAWKVGPALACGNTIVLKTAEQTPLSALYAAKLFHEAGLPAGVLNVVSGFGPTAGAALASHMEVDKLAFTGSTDTGKVVLELAAKSNLKPVTLELGGKSPFIVCEDADVDQAVELAHFALFFNQGQCCCAGSRTFVHESVYDEFVEKAKARALKRVVGDPFKGGIEQGPQIDSDQFEKILRYIRSGVESGATLETGGDKLGNKGFYIQPTVFSNVKDGMLIARDEIFGPVQSILKFKDLGEVVQRANNTRYGLAAGVFTTNMDTAYTLTRALRVGTVWINCFDTFDAAIPFGGYKMSGQGREKGEYSLKNYLQVKAVVNPLKNPAWL

SEQ ID NO: 7213 - DNA, 1218 bp, Glycine max
  misc_feature (1)..(1218): Ceres Seq. ID no. 15170857
gaaagccattttccgatttctaagaaggaaccagtttttgttcccactttcctaagtttccttctcgctcccgtctctgaaatttcgagggtttcatcgttgctgaatcaacaattcggaaccagttagcaatgttcagattctggggatcacaagagcaacaatcacaggatggttcttcgcagtcacagtcgtggtatccgccgtcggtggtgagttcaccaacttcgtcgaggcctgttacaccgactgcatcttcttcttcattatcacagaggccttcgtctcatgttccaccttctgaagctgctgcagttattgccgttttgaaggacaagagtgttgatgagttgcggaagcttttatctgacaaagatgcgtatcaacagtttttgcattcacttgatcaggtcaagattcaaactaatctgaaagatgaactttgcaaggagaatttacagcttgcagaggaaaatcttcaaaaggaacctcgtatcatggaacttaggaatcaatgtagaataattcggacaaccgagttagctgctgctaaggagaaactaaatgagcttgagaagcagaaagaagacatgttgaaattgaattccgcagcatcccttctccaaaggattcaagagtctgtgaataagaccgacgaggaatctgaaaacttgcaccacaatctccttgacagagagattgaccttggtgcttttttgcaaaagtacaagaagctacgtaccacttaccacaggaagactctcgtacatcttgctgccaaaacatcaacagtatgagcactgacatgaaatattaagaaattaaaactggttttggcaagtatgtatttgatttttggttcattattgtcaatagttatcattggtcaaagatacttgccaccaaattacatagagtcacagtcgttgggatagaaccatctactacaaattagattgttcatatatgtgcagcctgagattgttcattgtggtgacattgtcgagtggtttcatgccacttggaatgaggtatggacttgcatttacttttctagtttgccatcggctatcttcaactttatttgtatgaactctgaagtgtgctgtagcttatgagatcatcatcgccgatataggatttactgttgtgttgtaaaatgtaaaaaatgctgactttcttttctttgggagcaactacaagtttttcagaacccag

SEQ ID NO: 7214 - protein, 221 aa, Glycine max
  misc_feature (1)..(221): Ceres Seq. ID no. 15170858
MFRFWGSQEQQSQDGSSQSQSWYPPSVVSSPTSSRPVTPTASSSSLSQRPSSHVPPSEAAAVIAVLKDKSVDELRKLLSDKDAYQQFLHSLDQVKIQTNLKDELCKENLQLAEENLQKEPRIMELRNQCRIIRTTELAAAKEKLNELEKQKEDMLKLNSAASLLQRIQESVNKTDEESENLHHNLLDREIDLGAFLQKYKKLRTTYHRKTLVHLAAKTSTV

SEQ ID NO: 7215 - DNA, 1285 bp, Glycine max
  misc_feature (1)..(1285): Ceres Seq. ID no. 15170866
gagagtcagtgtacgcagaagagtaaaatcgattggcgatgatggagttgaaagagattcagagactcgaaggccacaccgataaggtttggagcttggcctggaacccgaccaccggtcacgccggtatcccactcgtcttcgcttcttgcagcggcgacaaaaccgtccgaatctgggagcagaacctctcctctggcctctgggcctgcacggcggttctggatgaaacgcacactcgaactgttcgatcttgtgcttggtcaccgtcgggtaagctattggccactgcaagcttcgatgccaccactgccatttgggaaaatgttggtggtgattttgagtgtgtttctactttggagggacacgaaaatgaagtcaagtgtgtgtcttggaacgcggctgggacgttgcttgcaacttgtagtagagataagtctgtttggatatgggaagtgctgcctgggaatgagtttgagtgtgtgtcagtgctgcaaggacactcgcaggatgtgaaaatggtgaagtggcatcccacagaggatatcttgttttcatgtagctacgataatagtgttaaggtttgggcggatgaaggtgatagtgatgattggcagtgtgttcaaacgcttggggaacccaataacggtcatacttccactgtttgggccctctccttcaatgtgagtggtgacaaaatggttacgtgtagtgatgatcttacactgaaggtatgggaaacagaaagtgtagggacgcaatctggtggtggatttgcaccttggacacatctttgcactctttcagggtatcatgatcggacaatattctcagttcattggtcaagagaaggtatctttgccagtggagccgcagataatgctatacggctttttgtggatgacaatgaaagtcaggttggtggtcctctctacaagttgctgctgaagaaggagaaggcccatgacatggatataaattctgtgcagtggagccctggggagaagccggtactagcctctgcaagcgatgatgggacaatcaaggtgtgggagttgacatcatactagttttccacatttgctgtatgagtagcagatattttatactggaggagcctaatagaagtgctagatgtgcaggcatcctcatagctatttttcttttcttagttatatttactaaaattttacaacagacattgaatattatatttttttaggggagtcagtagtgtgactgtaaattgtaattactgtcacaactaaactttacatttttgctc

SEQ ID NO: 7216 - protein, 343 aa, Glycine max
  misc_feature (1)..(343): Ceres Seq. ID no. 15170867
MMELKEIQRLEGHTDKVWSLAWNPTTGHAGIPLVFASCSGDKTVRIWEQNLSSGLWACTAVLDETHTRTVRSCAWSPSGKLLATASFDATTAIWENVGGDFECVSTLEGHENEVKCVSWNAAGTLLATCSRDKSVWIWEVLPGNEFECVSVLQGHSQDVKMVKWHPTEDILFSCSYDNSVKVWADEGDSDDWQCVQTLGEPNNGHTSTVWALSFNVSGDKMVTCSDDLTLKVWETESVGTQSGGGFAPWTHLCTLSGYHDRTIFSVHWSREGIFASGAADNAIRLFVDDNESQVGGPLYKLLLKKEKAHDMDINSVQWSPGEKPVLASASDDGTIKVWELTSY

SEQ ID NO: 7217 - protein, 342 aa, Glycine max
  misc_feature (1)..(342): Ceres Seq. ID no. 15170868
MELKEIQRLEGHTDKVWSLAWNPTTGHAGIPLVFASCSGDKTVRIWEQNLSSGLWACTAVLDETHTRTVRSCAWSPSGKLLATASFDATTAIWENVGGDFECVSTLEGHENEVKCVSWNAAGTLLATCSRDKSVWIWEVLPGNEFECVSVLQGHSQDVKMVKWHPTEDILFSCSYDNSVKVWADEGDSDDWQCVQTLGEPNNGHTSTVWALSFNVSGDKMVTCSDDLTLKVWETESVGTQSGGGFAPWTHLCTLSGYHDRTIFSVHWSREGIFASGAADNAIRLFVDDNESQVGGPLYKLLLKKEKAHDMDINSVQWSPGEKPVLASASDDGTIKVWELTSY

SEQ ID NO: 7218 - protein, 183 aa, Glycine max
  misc_feature (1)..(183): Ceres Seq. ID no. 15170869
MVKWHPTEDILFSCSYDNSVKVWADEGDSDDWQCVQTLGEPNNGHTSTVWALSFNVSGDKMVTCSDDLTLKVWETESVGTQSGGGFAPWTHLCTLSGYHDRTIFSVHWSREGIFASGAADNAIRLFVDDNESQVGGPLYKLLLKKEKAHDMDINSVQWSPGEKPVLASASDDGTIKVWELTSY

SEQ ID NO: 7219 - DNA, 1730 bp, Glycine max
  misc_feature (1)..(1730): Ceres Seq. ID no. 15170897
acaaaaagctcctcagaacctatatggcaaggacctcatttttccaagcattggagctaatagagacgctcaaacaagcgcacctctcttctttccaaatgcaagcttctttaaaaagagtgatactaaaaagacactggactgtctcaaactgccaatgaataatctcagagaagacttttcagtgtcgtcttcaagcagatgcgactttgctaaccatcccaaggtcaaggaaaataactgtaaggagagattcaagaaaagcgaatgcatactggcccctccacaaaagagaaagcgctgtcagattcttaacgaattttcccaagaggactatttgagcccaaagcaccctcgagtcaaagctttacaaggaaatttgctcgatctcgcacgaaccgactctgaatccaggaaatcatcaaaatttgaggagtggcaaacacctcaaaagaagttccatgtcttttgggatcatcatgaaaatgaaaagcaagcaaaattatcagaaatgaagcatcatttgtttgaaagcgagtactccagactcaatagtgactataaaattcttgaagttctcggaagaggaagttttggcaaagtatatcgctgcatcaacagaattgacaagaacgaatacgcaatcaaagagacttttcgaagctttactggaaaaaacaaggtctatggcttgaacgaaacccaagctctcgcttctctcacagcatttgaggacaatacaaatgttgtcagatattttaattcatggatcgaagatgatagactttatcttgtgatggagttttgcccttcttctcttaaagaagaacgcaagcaaagaggaaagtttacagagactgctatcagaaaagcgcttcgagatgtttgtctcggccttgcttacctccatagacataacattgcacatttagatattaagccagaaaatattttaatttcaaaaactatgagatacaaaatcggagacatgggacaatcacgagttgtgaagcgagctggagatattgaagaaggtgattctcgttatgtcgcaccagagttgttaaactgtgatgactgtgaagacgaagttgacttgaaaaaatgtgatattttttcattaggcatgactgcatttgaattactcacagatcataactccccagcaaatggggatgaatggcatcagcttcgaaatggcagattagatcttttagaagcgattcctggtgtgtctcaacgattaaagatgctcatcagaaaaatgttgagcaagaatccatttgaaagaccatcggctcaagagcttttagctcatgatttgccaagtgagatggaaatcgaattaaaatgggaaaagatccaaaataggatcctccaagaaagaaagactgatttggaaaatcagttgaataaaagaaaaaagagaagaaactctgttgcttaattcaaattttgactttttgaatgctgcgccgctgttgaaattttgacctatccttacattattaaatgatattttacttttcatcgtttattattcagtgttaatatattattataagtttgagaaaaattttaaatatataatagaaattttgatgaattataccgactctctggtataatttcatctttatgtttattgttagcttgattgtatatctctaccttgctgatttgtagagtgcgtatatagagtataataatacccctccgttctttaaaac

SEQ ID NO: 7220 - protein, 481 aa, Glycine max
  misc_feature (1)..(481): Ceres Seq. ID no. 15170898
QKAPQNLYGKDLIFPSIGANRDAQTSAPLFFPNASFFKKSDTKKTLDCLKLPMNNLREDFSVSSSSRCDFANHPKVKENNCKERFKKSECILAPPQKRKRCQILNEFSQEDYLSPKHPRVKALQGNLLDLARTDSESRKSSKFEEWQTPQKKFHVFWDHHENEKQAKLSEMKHHLFESEYSRLNSDYKILEVLGRGSFGKVYRCINRIDKNEYAIKETFRSFTGKNKVYGLNETQALASLTAFEDNTNVVRYFNSWIEDDRLYLVMEFCPSSLKEERKQRGKFTETAIRKALRDVCLGLAYLHRHNIAHLDIKPENILISKTMRYKIGDMGQSRVVKRAGDIEEGDSRYVAPELLNCDDCEDEVDLKKCDIFSLGMTAFELLTDHNSPANGDEWHQLRNGRLDLLEAIPGVSQRLKMLIRKMLSKNPFERPSAQELLAHDLPSEMEIELKWEKIQNRILQERKTDLENQLNKRKKRRNSVA

SEQ ID NO: 7221 - protein, 429 aa, Glycine max
  misc_feature (1)..(429): Ceres Seq. ID no. 15170899
MNNLREDFSVSSSSRCDFANHPKVKENNCKERFKKSECILAPPQKRKRCQILNEFSQEDYLSPKHPRVKALQGNLLDLARTDSESRKSSKFEEWQTPQKKFHVFWDHHENEKQAKLSEMKHHLFESEYSRLNSDYKILEVLGRGSFGKVYRCINRIDKNEYAIKETFRSFTGKNKVYGLNETQALASLTAFEDNTNVVRYFNSWIEDDRLYLVMEFCPSSLKEERKQRGKFTETAIRKALRDVCLGLAYLHRHNIAHLDIKPENILISKTMRYKIGDMGQSRVVKRAGDIEEGDSRYVAPELLNCDDCEDEVDLKKCDIFSLGMTAFELLTDHNSPANGDEWHQLRNGRLDLLEAIPGVSQRLKMLIRKMLSKNPFERPSAQELLAHDLPSEMEIELKWEKIQNRILQERKTDLENQLNKRKKRRNSVA

SEQ ID NO: 7222 - protein, 311 aa, Glycine max
  misc_feature (1)..(311): Ceres Seq. ID no. 15170900
MKHHLFESEYSRLNSDYKILEVLGRGSFGKVYRCINRIDKNEYAIKETFRSFTGKNKVYGLNETQALASLTAFEDNTNVVRYFNSWIEDDRLYLVMEFCPSSLKEERKQRGKFTETAIRKALRDVCLGLAYLHRHNIAHLDIKPENILISKTMRYKIGDMGQSRVVKRAGDIEEGDSRYVAPELLNCDDCEDEVDLKKCDIFSLGMTAFELLTDHNSPANGDEWHQLRNGRLDLLEAIPGVSQRLKMLIRKMLSKNPFERPSAQELLAHDLPSEMEIELKWEKIQNRILQERKTDLENQLNKRKKRRNSVA

SEQ ID NO: 7223 - DNA, 1315 bp, Glycine max
  misc_feature (1)..(1315): Ceres Seq. ID no. 15170907
gaaaagctctaccgtgcagctttattaaggagccgttttgctgacaccatacttaaagctcaagagaaagcacttgaaaaggtttgttaagggggtaatgtgttgcattttttatttcctgcattaatagaacaggtctattgggttaaacactgacgtttgaaaaacataaaaaaaattcaagtttttagtatttttgtctcttcctcccacctatagagcagatctgtgactgctaaggtatatcatcaaatctagtaattaccaatttaccatcattgctgtctttcatgaaagctttcccaacattacaattttttaaataaaaaatctggtattttaacaacgtcttgatctcaggatgaaaagcgagatcctgaaaaacttaggattgagcgagaagatcttgaaaggcggcagaaagaagagaaagctcggttgcaggcggaggcaaaggctgcagaagaggctcagaggaaagctgaagcagaagctgcagctgaagccaaaaggaaaagggaactggaaagagaagcagcccgccaggctttgcaaaagatggagaaaactgttgatatcaatgagaacagtcaatttttggaagatctagaaatgcttagtgctgtacatgatgaacacctgccaagtttcaaagaagagacaagcacagatcaacctcaagatggattgggtgggatcaagctacagggaaatcccttggaacagctagggttgtacatgaaggatgaggatgaggaggaggatgaggaggaagaggatgaactgcctccgagtggtgctgtaggaccatcaaatgatgttgaagaaggagagattgattgatttgttccccttgattgttccattattttgaacggatatataaacggtatttctggggaacagttgctggacttagagatgctgcttttttgttgctacggggaacagttgctgaacaaataattacggtttgtatgtctgatgctggttcacacctaagtttgaagatgggatagcaaaaactagtggcaaacgagtgaagattggatttggttttggttctttctgattaattttggttttaacttgggaaatggtttctgaaaatgtggatagaaagctcgcagcccccatttattgaagaagggctttggtatcttggatggaaagtttgtatcaatcaggatatgtccaattttgcttgtaaagagggaactaatttgtaacgagttctaagtctgacctcaagtagttggcttctctgacaatgtaaaatattttagagccagggtaaaatcaattctttctattt

SEQ ID NO: 7224 - protein, 94 aa, Glycine max
  misc_feature (1)..(94): Ceres Seq. ID no. 15170908
MEKTVDINENSQFLEDLEMLSAVHDEHLPSFKEETSTDQPQDGLGGIKLQGNPLEQLGLYMKDEDEEEDEEEEDELPPSGAVGPSNDVEEGEID

SEQ ID NO: 7225 - protein, 82 aa, Glycine max
  misc_feature (1)..(82): Ceres Seq. ID no. 15170909
MKSEILKNLGLSEKILKGGRKKRKLGCRRRQRLQKRLRGKLKQKLQLKPKGKGNWKEKQPARLCKRWRKLLISMRTVNFWKI

SEQ ID NO: 7226 - protein, 76 aa, Glycine max
  misc_feature (1)..(76): Ceres Seq. ID no. 15170910
MLSAVHDEHLPSFKEETSTDQPQDGLGGIKLQGNPLEQLGLYMKDEDEEEDEEEEDELPPSGAVGPSNDVEEGEID

SEQ ID NO: 7227 - DNA, 1610 bp, Glycine max
  misc_feature (1)..(1610): Ceres Seq. ID no. 15170915
attttcatccaccatcatagatttcaagtttcctccttctaacaaacctttgcgtgtaagaccagctgcacatttagttgacaaaaattatctagccaaatacaaaaaagccattgacctcatgaaaaaactcccagctaacgatccacgcaatttcatgcaacaagcaaacgtgcactgcgcttattgcactggttcatatgaccaagttgggttccctggccttgagctccaagtgcacagctcttggctcttctttccctaccaccgatggttcctctatttctatgagagaattttggggagcttgatcaatgatccaacatttgcccttccattttggaactgggatgctcctaagggcatgcaacttccttccatttatgcagaccccaaatcacctctttatgaccctcttcgcaatgcgaatcaccaacctccaacacttgtggactttgacttcaatcttgacaatcctatttccaatggaagaatctccaccaacctcaccataatgtataggcaacttgtgtctaatggaaaaactcctactttgttccttggaaatccttatcgtgccggggatgcgcctgaccctggcggtggctcagtagagggcgttccacatggtccggttcatctatggacaggtgatataaatcaaccaaacattgagaacatgggggatttctattctgctgcaagagatcctattttctattctcaccattccaatgttgataggatgtggtctatatggaaaacacttggtgggaagagaagggatttcaccgactcagattggttggaatctgggctcctcttctacgatgagaataagaaccttgtgcgtgtgaaggtcaaggattgtcttgacacaagaaagctaggatatgtttaccaagatgttgaaaattcatggttaaaatctaagccttcaccgcgtaggtcgagggttcaaaaggtagcactaggaccacattttaatactggtgtagcacgtgctgctgagacttcgaggaatgttcagttcccattggtgttggattcagttgtgagcatagtggtgaagaggccaaaaaagtcgaggagcaagaaggagaaggaagaggaagaggaggttcttgtgattgaaggggttgagtatgacagcaacataccagtgaaatttgatgtgcttattaatgatgaagatgataagcagattcagccagaagattcggagtatgcaggaagctttgtgactgtgcctcattcgcataagcacaaaaataagaagattatcacttgtttgaggctgggactgacagatttgttggaagaattggaagcagaagatgatgatagtgttgtggtgacgttggttccgaggtatgggaaagggcgtgtccaaattggaggcatcaagatagatcttgttgcagattaaaaaatatttatatacttcgactgtttaacctcataataatatatatatatatatatatatatatatatatatatatatatatatatataatgtagtttcttggatttgtgtttgcttttatatgaaaaatgtagtttttgttatgtattttccatgagaatcataagaatgtcgcaaattg

SEQ ID NO: 7228 - protein, 475 aa, Glycine max
  misc_feature (1)..(475): Ceres Seq. ID no. 15170916
FSSTIIDFKFPPSNKPLRVRPAAHLVDKNYLAKYKKAIDLMKKLPANDPRNFMQQANVHCAYCTGSYDQVGFPGLELQVHSSWLFFPYHRWFLYFYERILGSLINDPTFALPFWNWDAPKGMQLPSIYADPKSPLYDPLRNANHQPPTLVDFDFNLDNPISNGRISTNLTIMYRQLVSNGKTPTLFLGNPYRAGDAPDPGGGSVEGVPHGPVHLWTGDINQPNIENMGDFYSAARDPIFYSHHSNVDRMWSIWKTLGGKRRDFTDSDWLESGLLFYDENKNLVRVKVKDCLDTRKLGYVYQDVENSWLKSKPSPRRSRVQKVALGPHFNTGVARAAETSRNVQFPLVLDSVVSIVVKRPKKSRSKKEKEEEEEVLVIEGVEYDSNIPVKFDVLINDEDDKQIQPEDSEYAGSFVTVPHSHKHKNKKIITCLRLGLTDLLEELEAEDDDSVVVTLVPRYGKGRVQIGGIKIDLVAD

SEQ ID NO: 7229 - protein, 435 aa, Glycine max
  misc_feature (1)..(435): Ceres Seq. ID no. 15170917
MKKLPANDPRNFMQQANVHCAYCTGSYDQVGFPGLELQVHSSWLFFPYHRWFLYFYERILGSLINDPTFALPFWNWDAPKGMQLPSIYADPKSPLYDPLRNANHQPPTLVDFDFNLDNPISNGRISTNLTIMYRQLVSNGKTPTLFLGNPYRAGDAPDPGGGSVEGVPHGPVHLWTGDINQPNIENMGDFYSAARDPIFYSHHSNVDRMWSIWKTLGGKRRDFTDSDWLESGLLFYDENKNLVRVKVKDCLDTRKLGYVYQDVENSWLKSKPSPRRSRVQKVALGPHFNTGVARAAETSRNVQFPLVLDSVVSIVVKRPKKSRSKKEKEEEEEVLVIEGVEYDSNIPVKFDVLINDEDDKQIQPEDSEYAGSFVTVPHSHKHKNKKIITCLRLGLTDLLEELEAEDDDSVVVTLVPRYGKGRVQIGGIKIDLVAD

SEQ ID NO: 7230 - protein, 423 aa, Glycine max
  misc_feature (1)..(423): Ceres Seq. ID no. 15170918
MQQANVHCAYCTGSYDQVGFPGLELQVHSSWLFFPYHRWFLYFYERILGSLINDPTFALPFWNWDAPKGMQLPSIYADPKSPLYDPLRNANHQPPTLVDFDFNLDNPISNGRISTNLTIMYRQLVSNGKTPTLFLGNPYRAGDAPDPGGGSVEGVPHGPVHLWTGDINQPNIENMGDFYSAARDPIFYSHHSNVDRMWSIWKTLGGKRRDFTDSDWLESGLLFYDENKNLVRVKVKDCLDTRKLGYVYQDVENSWLKSKPSPRRSRVQKVALGPHFNTGVARAAETSRNVQFPLVLDSVVSIVVKRPKKSRSKKEKEEEEEVLVIEGVEYDSNIPVKFDVLINDEDDKQIQPEDSEYAGSFVTVPHSHKHKNKKIITCLRLGLTDLLEELEAEDDDSVVVTLVPRYGKGRVQIGGIKIDLVAD

SEQ ID NO: 7231 - DNA, 1248 bp, Glycine max
  misc_feature (1)..(1248): Ceres Seq. ID no. 15170919
tttcttcagggcctgttgatgctcgtgtcagtgcaaactcaacaatggtaggtgttggtatgtgcatggaaggaatagaacagaaccctattgtttatgagttgatgtctgaaatggcatttcgtgataagaaagttaaagtttcggaatggatcaagagttattgccatagacgatatggtaaagttattcatcaagtcgagtctgcttgggagattctttatcatacaatttacaattgtaccgatggaattgctgaccataatcatgatttcattgtaatgtttcctgactggaatccatccacaaattctgtaactggcacatccaacaaccagaagatatacctgttgccacctggaaatagaaggtacttatttcaggaaacactatctgatatgccacaggcacatttgtggtacccctctgacgatgtaattaaggcattacaactattcctagctggtgggaagaatcttgctggaagtctcacatataggtatgacctggttgacttgacacggcaagtattatcaaaattggcaaaccaggtataccacaaggcagttacttcttatcagaagaagaatattgaagctttgcaatttcacagcaataagtttcttcaactgataaaagatattgatgtactgcttgcttcggatgataactttcttcttggaacttggcttgagagtgctaagaaactggcagtgaatccaagtgagataaagcagtatgaatggaatgctaggacgcaagtgacaatgtggtttgataccaatgaaactactcagagcaagctccatgattatgctaacaagttttggagtgggcttctggaaagctactatctccctcgagcttcaacctattttagtcatttgacagaaagcttgagacaaaatgacaagttcaagctgattgagtggagaaaacaatggatttcacagtcaaacaaatggcaggaaggtaatgagctctacccagtaaaggccaaaggagatgctctgaccatctctcaagctctctatgaaaagtattttcaaaataagttgataaaccattaaactggagaatatgagtgcacagaactatttacattgttccatattcttcatacaaaagtaatattgagccccctaccatattgggctggttgtgttgtgttcttgtgatacttgcaattattttcccaatgcttgacagtagttgacattatctcagcaattgagctttcagataaag

SEQ ID NO: 7232 - protein, 355 aa, Glycine max
  misc_feature (1)..(355): Ceres Seq. ID no. 15170920
SSGPVDARVSANSTMVGVGMCMEGIEQNPIVYELMSEMAFRDKKVKVSEWIKSYCHRRYGKVIHQVESAWEILYHTIYNCTDGIADHNHDFIVMFPDWNPSTNSVTGTSNNQKIYLLPPGNRRYLFQETLSDMPQAHLWYPSDDVIKALQLFLAGGKNLAGSLTYRYDLVDLTRQVLSKLANQVYHKAVTSYQKKNIEALQFHSNKFLQLIKDIDVLLASDDNFLLGTWLESAKKLAVNPSEIKQYEWNARTQVTMWFDTNETTQSKLHDYANKFWSGLLESYYLPRASTYFSHLTESLRQNDKFKLIEWRKQWISQSNKWQEGNELYPVKAKGDALTISQALYEKYFQNKLINH

SEQ ID NO: 7233 - protein, 341 aa, Glycine max
  misc_feature (1)..(341): Ceres Seq. ID no. 15170921
MVGVGMCMEGIEQNPIVYELMSEMAFRDKKVKVSEWIKSYCHRRYGKVIHQVESAWEILYHTIYNCTDGIADHNHDFIVMFPDWNPSTNSVTGTSNNQKIYLLPPGNRRYLFQETLSDMPQAHLWYPSDDVIKALQLFLAGGKNLAGSLTYRYDLVDLTRQVLSKLANQVYHKAVTSYQKKNIEALQFHSNKFLQLIKDIDVLLASDDNFLLGTWLESAKKLAVNPSEIKQYEWNARTQVTMWFDTNETTQSKLHDYANKFWSGLLESYYLPRASTYFSHLTESLRQNDKFKLIEWRKQWISQSNKWQEGNELYPVKAKGDALTISQALYEKYFQNKLINH

SEQ ID NO: 7234 - protein, 336 aa, Glycine max
  misc_feature (1)..(336): Ceres Seq. ID no. 15170922
MCMEGIEQNPIVYELMSEMAFRDKKVKVSEWIKSYCHRRYGKVIHQVESAWEILYHTIYNCTDGIADHNHDFIVMFPDWNPSTNSVTGTSNNQKIYLLPPGNRRYLFQETLSDMPQAHLWYPSDDVIKALQLFLAGGKNLAGSLTYRYDLVDLTRQVLSKLANQVYHKAVTSYQKKNIEALQFHSNKFLQLIKDIDVLLASDDNFLLGTWLESAKKLAVNPSEIKQYEWNARTQVTMWFDTNETTQSKLHDYANKFWSGLLESYYLPRASTYFSHLTESLRQNDKFKLIEWRKQWISQSNKWQEGNELYPVKAKGDALTISQALYEKYFQNKLINH

SEQ ID NO: 7235 - DNA, 1231 bp, Glycine max
  misc_feature (1)..(1231): Ceres Seq. ID no. 15170923
tgaagaggatgtggaagtcgaaaatattgaaaggccagttgacctatacaaggctattttctccgatgattcagatgatgaaggggaagaccctagcaataggagagtagagaatcaagaaaagaaagctgaagtagctaatacagcattgagccgtttgattgctggtgattttcttgaatcattgggcaaggaactaggaattgaggttcctcctgatatgccttaccctacgcaaaagtccaggaatgttgcacatcagaaagacattgttagtgaagatgcaagaaccgacatcctaaagagtgaaaacaacagtgtgatgtccttaaatcatgatttgccatatgatcagcagcacattgctcatgattgtgaaccatcaaaaggtgacaccattgatggaaatatgcttgagagcggtaataacaaaaccaagggaaccaccagccaagacaatgacagcagttcagaagaagaaaggagccaaaaacgatctaatagggaaaaatatgatgagtctaggaaagataaaacccctgtaacacgtggccgggattatagcagcagttcttcattagaagaggaaaggagccgaaaacggtccagacatcaacggcataagaggcatgatgcaggaagtcattcatccagtgatgatgacagaagagatagacacagttcaaggtcaaaagggagaaggaaaggttcttcccgagaaaaaagcaggagtgaaaaacactcaaaacgtcacaagcacagaaagcatgaatctccaaatagatcctctcgttatagcaatgagaaagacagttcacattccagaaaagagaaaaggcggagggaatgagcgagagacttgtttcctttgttttcaagaacattttggaattatgttgggggatcgctgttgtatacttgtattaaaagatgttactaagttttgggtttgtgatactgaggtgctccctatggatttcatttgctccgattgaaactcaagcctcttgcataggttgctttcttcactggtttgaagtaatgctgcttaattcaatccccccagcttatcctttcttggctgtaaagaaatggaattggtacctgattatctagactaaatattagggagccctttgtgaaaaaaagaaaagaaaaactaattaggaagttgaggtatagtgctcagtcccaaggtttactgtgatgcattttataactttttaatgtc

SEQ ID NO: 7236 - protein, 282 aa, Glycine max
  misc_feature (1)..(282): Ceres Seq. ID no. 15170924
EEDVEVENIERPVDLYKAIFSDDSDDEGEDPSNRRVENQEKKAEVANTALSRLIAGDFLESLGKELGIEVPPDMPYPTQKSRNVAHQKDIVSEDARTDILKSENNSVMSLNHDLPYDQQHIAHDCEPSKGDTIDGNMLESGNNKTKGTTSQDNDSSSEEERSQKRSNREKYDESRKDKTPVTRGRDYSSSSSLEEERSRKRSRHQRHKRHDAGSHSSSDDDRRDRHSSRSKGRRKGSSREKSRSEKHSKRHKHRKHESPNRSSRYSNEKDSSHSRKEKRRRE

SEQ ID NO: 7237 - protein, 209 aa, Glycine max
  misc_feature (1)..(209): Ceres Seq. ID no. 15170925
MPYPTQKSRNVAHQKDIVSEDARTDILKSENNSVMSLNHDLPYDQQHIAHDCEPSKGDTIDGNMLESGNNKTKGTTSQDNDSSSEEERSQKRSNREKYDESRKDKTPVTRGRDYSSSSSLEEERSRKRSRHQRHKRHDAGSHSSSDDDRRDRHSSRSKGRRKGSSREKSRSEKHSKRHKHRKHESPNRSSRYSNEKDSSHSRKEKRRRE

SEQ ID NO: 7238 - protein, 175 aa, Glycine max
  misc_feature (1)..(175): Ceres Seq. ID no. 15170926
MSLNHDLPYDQQHIAHDCEPSKGDTIDGNMLESGNNKTKGTTSQDNDSSSEEERSQKRSNREKYDESRKDKTPVTRGRDYSSSSSLEEERSRKRSRHQRHKRHDAGSHSSSDDDRRDRHSSRSKGRRKGSSREKSRSEKHSKRHKHRKHESPNRSSRYSNEKDSSHSRKEKRRRE

SEQ ID NO: 7239 - DNA, 1248 bp, Glycine max
  misc_feature (1)..(1248): Ceres Seq. ID no. 15170931
agatgaccaagatgctgaatattttggaggactacatgaactatagaaaatataggtattttagacttgatggatcatctactattcaggaccgcagagacatggtcagagactttcagcataggagtgatatttttgtgttcttactgagtacaagagctggtggattgggtatcaacttgacagctgctgacacagtcatattttatgagagcgattggaatccaacattggatctacaggcaatggacagagctcatcgtttgggtcagacaaaagatgttactgtttaccgacttatatgtaaagagacagttgaagagaagattcttcttagagctagtcagaaaagtactgtgcagaaccttgtcatgactggtggttctgtcggtggagatcttttagctcctgaggatgttgtatcattgcttctagatgatgttcaattggaacagaaattaaaggaaatccctcttcaggtaaaggataagcaaaagaaaaaacaacctatgaggggtattcgggtaaatgaagacggtgatgcatcgatggaagatctaacaagctctgtagcccagggtacatcagataatgatctttccatggatccagagggttcaaagtctagtaataaaaagagaaaagctgcctcagataagccaacttcaaggccaaagaactctcaaaagatgagtgaatttagtactatgcctatggacggtgaactggatgatcttgatccagtgggtcagaaacccaagagacccaagaggataaagaagaatgtgaatgaaaagtttgaagatgcttttacttggactgctagcttggtcccagagcagtcccagtttccacctccacgagattttagtgtcgggggttctaaagcagaatcaggccaagacaactgaagacatagtgattcttgaccattacaaaaactttggagttactattctcagccctgtggattgacatttttgtggagactgctaaattggctctctggttgatcaacagtttctagttccctatttcttggctctgactgcaaatagtggcttcaaagttgagtcaaaacaggagaagctgtatatcctaggttgtatatggtagtccttaatgatagatattagattctcctctcttccacagttgggggactttgtagtttgtacagattgagccatccttacttgagttgattttttgtgccacaagcaatatttataacaaatgatgattaat

SEQ ID NO: 7240 - protein, 302 aa, Glycine max
  misc_feature (1)..(302): Ceres Seq. ID no. 15170932
MTKMLNILEDYMNYRKYRYFRLDGSSTIQDRRDMVRDFQHRSDIFVFLLSTRAGGLGINLTAADTVIFYESDWNPTLDLQAMDRAHRLGQTKDVTVYRLICKETVEEKILLRASQKSTVQNLVMTGGSVGGDLLAPEDVVSLLLDDVQLEQKLKEIPLQVKDKQKKKQPMRGIRVNEDGDASMEDLTSSVAQGTSDNDLSMDPEGSKSSNKKRKAASDKPTSRPKNSQKMSEFSTMPMDGELDDLDPVGQKPKRPKRIKKNVNEKFEDAFTWTASLVPEQSQFPPPRDFSVGGSKAESGQDN

SEQ ID NO: 7241 - protein, 299 aa, Glycine max
  misc_feature (1)..(299): Ceres Seq. ID no. 15170933
MLNILEDYMNYRKYRYFRLDGSSTIQDRRDMVRDFQHRSDIFVFLLSTRAGGLGINLTAADTVIFYESDWNPTLDLQAMDRAHRLGQTKDVTVYRLICKETVEEKILLRASQKSTVQNLVMTGGSVGGDLLAPEDVVSLLLDDVQLEQKLKEIPLQVKDKQKKKQPMRGIRVNEDGDASMEDLTSSVAQGTSDNDLSMDPEGSKSSNKKRKAASDKPTSRPKNSQKMSEFSTMPMDGELDDLDPVGQKPKRPKRIKKNVNEKFEDAFTWTASLVPEQSQFPPPRDFSVGGSKAESGQDN

SEQ ID NO: 7242 - protein, 291 aa, Glycine max
  misc_feature (1)..(291): Ceres Seq. ID no. 15170934
MNYRKYRYFRLDGSSTIQDRRDMVRDFQHRSDIFVFLLSTRAGGLGINLTAADTVIFYESDWNPTLDLQAMDRAHRLGQTKDVTVYRLICKETVEEKILLRASQKSTVQNLVMTGGSVGGDLLAPEDVVSLLLDDVQLEQKLKEIPLQVKDKQKKKQPMRGIRVNEDGDASMEDLTSSVAQGTSDNDLSMDPEGSKSSNKKRKAASDKPTSRPKNSQKMSEFSTMPMDGELDDLDPVGQKPKRPKRIKKNVNEKFEDAFTWTASLVPEQSQFPPPRDFSVGGSKAESGQDN

SEQ ID NO: 7243 - DNA, 1384 bp, Glycine max
  misc_feature (1)..(1384): Ceres Seq. ID no. 15170945
agcagctcccattccaacagattctagaagcacttagttgctcaacgataatcttaattgaagaagccaattcgtttattcttcttctgctttggaacatggctgataatattgttacctccagcaattcttctacggcctcgctgaaccctactcggataatctgtcacgtatgtcagaagcagttttcccagtacacgtgtcctcgatgcaattcgcgatactgttccctccaatgttacaaatcccatagtctccgttgcactgaatccttcatgaaagaaaatgtagttcagcaacttcaccaaatgcagcctgatgaacaaactaaaaataagatgttggacatactgaaaagatttcattcacaagaggaaatggatgaggattgacaggaaatcagctttgacgatttatcacttgaagaaaagaaacggtttcacatagcaattgcttatggggaactgagcaagatgatcaaaccatgggatccatggtggtcaaagccttctgcaagaaacatctgtctcagtaaggaaggaactcagcttgttcaacctattccagatcaggaattgctagatgatgatattggaagtgatgaattcagcaaagttcctcttggacctgaaactccacttcctcctctaagcaggcttagttccaaggagccatcaccccttttaacagttcacctagtcgatattctgtatagctattgcttcactcttcgtctctacaatggagattggaggtcagatgccttagggtcagtcatggttgtattgagtgtgtcctcggtgttgggtcaaggtgcacagccggagacagtactagaagccctttctcattgcttggagcaggtatgctgtccagcttacagacacattggaggattgcaatttggtttgggtgtcattgatgatgtgatcagtctgcttggtttgggaactcctgcattggtttgtgcccttcgtgatatgcattggtgcattcaagaaggcgaaaaggaggccaaatcagaaaggccaagaaagtcccagagaggtgggactagaagtgccattaagctggctgaaaggaagatatatttcatcatgtgttgggttcatgagcagccagaggaagtctggtcttccttagcagccattgtaagagcagaaaagacatcagccatggaatttcaacagatcaatagatctgaagatttgaacaataagacagaggccaaaggcaaaagtttaatccaggagatttaatgatttacgtagactgctaccccttacggttgtagtggactacgaggggtccgggagttcttgcagtggcaagaaagttaagtttcaaactagtttgggttgataatctatctacatttctttcg

SEQ ID NO: 7244 - protein, 261 aa, Glycine max
  misc_feature (1)..(261): Ceres Seq. ID no. 15170946
MIKPWDPWWSKPSARNICLSKEGTQLVQPIPDQELLDDDIGSDEFSKVPLGPETPLPPLSRLSSKEPSPLLTVHLVDILYSYCFTLRLYNGDWRSDALGSVMVVLSVSSVLGQGAQPETVLEALSHCLEQVCCPAYRHIGGLQFGLGVIDDVISLLGLGTPALVCALRDMHWCIQEGEKEAKSERPRKSQRGGTRSAIKLAERKIYFIMCWVHEQPEEVWSSLAAIVRAEKTSAMEFQQINRSEDLNNKTEAKGKSLIQEI

SEQ ID NO: 7245 - protein, 160 aa, Glycine max
  misc_feature (1)..(160): Ceres Seq. ID no. 15170947
MVVLSVSSVLGQGAQPETVLEALSHCLEQVCCPAYRHIGGLQFGLGVIDDVISLLGLGTPALVCALRDMHWCIQEGEKEAKSERPRKSQRGGTRSAIKLAERKIYFIMCWVHEQPEEVWSSLAAIVRAEKTSAMEFQQINRSEDLNNKTEAKGKSLIQEI

SEQ ID NO: 7246 - DNA, 1115 bp, Glycine max
  misc_feature (1)..(1115): Ceres Seq. ID no. 15170948
agaaatagctgtcaagaggctctcaaagaattcgagccaaggactacaagagttcaaaaatgaagttatgcatattgcaaagcttcagcacaggaatttagtgaggctactggggtactgcattcaagcagaagaaagactgcttgtttatgaatttatggccaacaaaagcttggattccttcatatttgatgaaaacaagagcatgttactagattggccaaggcggtcgctaattatcaatggggttgctcggggtcttctttatcttcatcaagattcaaggcatagaatagttcacagagatctcaaagccgggaatgttttgttagatagtgaaatgaacccaaagatctcggactttggactggctagaagctttggaggaaacgaaatcgaagcaactacaaagcatgtagttggaacctatggctatctgcctccagagtatataattgatggagcttattcaacaaagtcagatgttttcagcttcggtgtgttgatattggagatagtgagtgggaagagaaataaagggttctgtcatcaagataatcttctggcacatgtatggaggctatttactgaaggcaaatgctctgaaatagttgatgcaacaataatagactcactcaatttacctgaagtgctaagaacaattcacgtgggactactgtgtgtgcaactaagtccagacgacaggccgaacatgtcatctgtggttctcatgctgagcagtgaatctgaactgcctcagccaaacttgcctggattctttacaagtacaagtatggctggcgatagttcttcatcaagcagttataaacaatacacaaataatgacatgacagtaagcataatgtctgctagataggttgcatttcaaacttaatcttggagtggtgtaatacctgattgtggataagtatcgggtaaagcaattgcttttcatatgtgtatttctgagatcagatgcaagttattacagtaaatatttcaaattgagtttaataggcatgctgtgtcagtttttccactatcaaccaataaaaaatcatttttgatttgactttttaagataattacaataaaaatcaacaaatctatcaaag

SEQ ID NO: 7247 - protein, 291 aa, Glycine max
  misc_feature (1)..(291): Ceres Seq. ID no. 15170949
EIAVKRLSKNSSQGLQEFKNEVMHIAKLQHRNLVRLLGYCIQAEERLLVYEFMANKSLDSFIFDENKSMLLDWPRRSLIINGVARGLLYLHQDSRHRIVHRDLKAGNVLLDSEMNPKISDFGLARSFGGNEIEATTKHVVGTYGYLPPEYIIDGAYSTKSDVFSFGVLILEIVSGKRNKGFCHQDNLLAHVWRLFTEGKCSEIVDATIIDSLNLPEVLRTIHVGLLCVQLSPDDRPNMSSVVLMLSSESELPQPNLPGFFTSTSMAGDSSSSSSYKQYTNNDMTVSIMSAR

SEQ ID NO: 7248 - protein, 269 aa, Glycine max
  misc_feature (1)..(269): Ceres Seq. ID no. 15170950
MHIAKLQHRNLVRLLGYCIQAEERLLVYEFMANKSLDSFIFDENKSMLLDWPRRSLIINGVARGLLYLHQDSRHRIVHRDLKAGNVLLDSEMNPKISDFGLARSFGGNEIEATTKHVVGTYGYLPPEYIIDGAYSTKSDVFSFGVLILEIVSGKRNKGFCHQDNLLAHVWRLFTEGKCSEIVDATIIDSLNLPEVLRTIHVGLLCVQLSPDDRPNMSSVVLMLSSESELPQPNLPGFFTSTSMAGDSSSSSSYKQYTNNDMTVSIMSAR

SEQ ID NO: 7249 - protein, 239 aa, Glycine max
  misc_feature (1)..(239): Ceres Seq. ID no. 15170951
MANKSLDSFIFDENKSMLLDWPRRSLIINGVARGLLYLHQDSRHRIVHRDLKAGNVLLDSEMNPKISDFGLARSFGGNEIEATTKHVVGTYGYLPPEYIIDGAYSTKSDVFSFGVLILEIVSGKRNKGFCHQDNLLAHVWRLFTEGKCSEIVDATIIDSLNLPEVLRTIHVGLLCVQLSPDDRPNMSSVVLMLSSESELPQPNLPGFFTSTSMAGDSSSSSSYKQYTNNDMTVSIMSAR

SEQ ID NO: 7250 - DNA, 1422 bp, Glycine max
  misc_feature (1)..(1422): Ceres Seq. ID no. 15170968
acttctcagttctcactctcactccgtagaaagaaccctagaatcagaattctccgtctatgttgcagaagcagctacctccccccattgaggcctcttccgatgaagagcaacgaccttcctccaagcaacacacagaagaaggagtttcctcttcagaagaagcttcttcccaagaagaagacgacgacgaccaacctcccacccttcctctcgcttccgcaaacccccacccgaaaccgtcgtcctccgactccgacaccgacttcgagcccaccaaagtaaaacccaagcccacggaccaggcccagaagccccagccctcacccgcgccgcccaaatggggatccaagcgccctgcccagaacaacgcccctgccactgacccgaaacgcgcgaagaagaaattgaccaattcttcttccgccgctgccgcccacgagacggaggagaagtccggtggcggccaagcgaagttgtctcagagactcttcagcaaggaagacgaactcgccattcttaagggcatggctgagttcatttcgaagacgggccaagacccttacaagtacgccgatgccttccaaaatttcgttaagaattcgctccgcgtggaggcttcgagcaaccagatcaaggagaagatccgacggctgaagaagaagtttgaaactaaagcacagagagcgaagaaatgggaggaccctgagttctccaaatttcacgaccggactgtgtttgaattatcaaagaaggtttggggagaaggagccaatgggctggtggagaagccaaaacctaataatggaaaaagaaaaactgccaagactccaaagaaggatgctactagcaggaatgtagtagcaaaatctgaaactacaacactactggagtcgatggagttggaggagtgtgggaatgtaaatttgctttaccgcgaagtatctggtttcaaagaactgaatgaggatgagatgaagaggggattggcgttaattggagaatctaagaggaaagagttggagggcaagtggaggaaattgcgacttgctgagatggaactggttgcgaatcgctcactacttattggggagcagattaagttgatatttgaagcacttcagtaatccaacaactagggtttattgtgttaggtatcactttttgccttttcggtactgcctgccatatgtattgtggatcattgtaattttgtgtctatggtattgatatagtcttttttattaagtaggcagtgttgtttagttgttggccttgtgaaaatgtgccgcatagtcgtccatttcaggttctctttttcaattaagatgtgccatcattaactccagaaaatgccgaaattaaacacttaccattttgtgtagatatatgatggacacatcatggttatgtgtacgtttc

SEQ ID NO: 7251 - protein, 355 aa, Glycine max
  misc_feature (1)..(355): Ceres Seq. ID no. 15170969
MLQKQLPPPIEASSDEEQRPSSKQHTEEGVSSSEEASSQEEDDDDQPPTLPLASANPHPKPSSSDSDTDFEPTKVKPKPTDQAQKPQPSPAPPKWGSKRPAQNNAPATDPKRAKKKLTNSSSAAAAHETEEKSGGGQAKLSQRLFSKEDELAILKGMAEFISKTGQDPYKYADAFQNFVKNSLRVEASSNQIKEKIRRLKKKFETKAQRAKKWEDPEFSKFHDRTVFELSKKVWGEGANGLVEKPKPNNGKRKTAKTPKKDATSRNVVAKSETTTLLESMELEECGNVNLLYREVSGFKELNEDEMKRGLALIGESKRKELEGKWRKLRLAEMELVANRSLLIGEQIKLIFEALQ

SEQ ID NO: 7252 - protein, 199 aa, Glycine max
  misc_feature (1)..(199): Ceres Seq. ID no. 15170970
MAEFISKTGQDPYKYADAFQNFVKNSLRVEASSNQIKEKIRRLKKKFETKAQRAKKWEDPEFSKFHDRTVFELSKKVWGEGANGLVEKPKPNNGKRKTAKTPKKDATSRNVVAKSETTTLLESMELEECGNVNLLYREVSGFKELNEDEMKRGLALIGESKRKELEGKWRKLRLAEMELVANRSLLIGEQIKLIFEALQ

SEQ ID NO: 7253 - DNA, 1500 bp, Glycine max
  misc_feature (1)..(1500): Ceres Seq. ID no. 15170971
aaaacttttggaattgcgacttaaatctaggatctttattccaaaaggaagagcaatgatgggatgtctagatgaaactagaaccctagaatatggtcaagtatttgttcagttctctaacaataggctgcagaatctatctgatgattttttttcatatgatttgccaaagaattatatggttaaaggtaaggtagttgtagcaaaaaacccctgcttgcacccaggtgatgtgcgtgttttacaagctgtggatgtgccagatttgtaccacatggtggactgtgttgttttccctcaaaaaggaccaagacctcatccaaatgagtgttcgggaagtgatctggatggagatatctactttgtttgttgggaccatgaattgattccttctcgcccaattgatccaatggactatactgctcctgcaactgtggaattggatcatgatgtgatgatcgaggaggttgaggagtattttgccaattacatagtcaatgacagtctgggaataattgccaatgcacacactgtctttgcagataaagaacatttgaaagcaatgtctgatcaatgtgttaagcttgcaaggttgttttcaacagcagttgactttcctaaaactggtgttccagctgttatacctcctgaacttcatgtcaaagaatatcctgacttcatggagaagcctgacaaacccacatacaaatcgcataacgtgataggaaagctctttagggaagtgaaagaaatatcaacaagtgccggctcaattacatccttcacaaagttggttgcgagagactcttacgaccatgaaatggaagttgatggcttcatggattatgttgatgatgctttctatcacaaaaccaattatgactacaagttgggaaatctgatggactactatgggatcaaaactgaagctgaaatcctcggtgggaatattatgaaaatgtcaaaatctttcaacaaaaggagggatgcagaagcaatcaatatggctgtgaggtccctaaggaaagaggccagggcctggttcaatgaaaacagcagtggtgatgtagattcagggagtagtgatgtgtatgcaaaagcttctgcttggtaccatgttacttatcatccaagttactggggttgctataatgaaggcatgaatagggatcattatctaagtttctcatggtgtgtttaccctcttcttgtccaaatcaagaaagagaaactcagcattagaaggtcctctttggaatacagtttcagtgggttgcgtttgagttgacaactttggactttgcactccctattttccagttggatttctgagccaggcagcttgtttatatttttatagtaactatgcatgtatgttctatggtaatgtcgctatataacatgtatgagtgaatatatacatattctatcaaggaatgagggtgtgcacttccattcccttgctttttttaaaattatatataaatattttgaatgtgt

SEQ ID NO: 7254 - protein, 428 aa, Glycine max
  misc_feature (1)..(428): Ceres Seq. ID no. 15170972
KLLELRLKSRIFIPKGRAMMGCLDETRTLEYGQVFVQFSNNRLQNLSDDFFSYDLPKNYMVKGKVVVAKNPCLHPGDVRVLQAVDVPDLYHMVDCVVFPQKGPRPHPNECSGSDLDGDIYFVCWDHELIPSRPIDPMDYTAPATVELDHDVMIEEVEEYFANYIVNDSLGIIANAHTVFADKEHLKAMSDQCVKLARLFSTAVDFPKTGVPAVIPPELHVKEYPDFMEKPDKPTYKSHNVIGKLFREVKEISTSAGSITSFTKLVARDSYDHEMEVDGFMDYVDDAFYHKTNYDYKLGNLMDYYGIKTEAEILGGNIMKMSKSFNKRRDAEAINMAVRSLRKEARAWFNENSSGDVDSGSSDVYAKASAWYHVTYHPSYWGCYNEGMNRDHYLSFSWCVYPLLVQIKKEKLSIRRSSLEYSFSGLRLS

SEQ ID NO: 7255 - protein, 410 aa, Glycine max
  misc_feature (1)..(410): Ceres Seq. ID no. 15170973
MMGCLDETRTLEYGQVFVQFSNNRLQNLSDDFFSYDLPKNYMVKGKVVVAKNPCLHPGDVRVLQAVDVPDLYHMVDCVVFPQKGPRPHPNECSGSDLDGDIYFVCWDHELIPSRPIDPMDYTAPATVELDHDVMIEEVEEYFANYIVNDSLGIIANAHTVFADKEHLKAMSDQCVKLARLFSTAVDFPKTGVPAVIPPELHVKEYPDFMEKPDKPTYKSHNVIGKLFREVKEISTSAGSITSFTKLVARDSYDHEMEVDGFMDYVDDAFYHKTNYDYKLGNLMDYYGIKTEAEILGGNIMKMSKSFNKRRDAEAINMAVRSLRKEARAWFNENSSGDVDSGSSDVYAKASAWYHVTYHPSYWGCYNEGMNRDHYLSFSWCVYPLLVQIKKEKLSIRRSSLEYSFSGLRLS

SEQ ID NO: 7256 - protein, 409 aa, Glycine max
  misc_feature (1)..(409): Ceres Seq. ID no. 15170974
MGCLDETRTLEYGQVFVQFSNNRLQNLSDDFFSYDLPKNYMVKGKVVVAKNPCLHPGDVRVLQAVDVPDLYHMVDCVVFPQKGPRPHPNECSGSDLDGDIYFVCWDHELIPSRPIDPMDYTAPATVELDHDVMIEEVEEYFANYIVNDSLGIIANAHTVFADKEHLKAMSDQCVKLARLFSTAVDFPKTGVPAVIPPELHVKEYPDFMEKPDKPTYKSHNVIGKLFREVKEISTSAGSITSFTKLVARDSYDHEMEVDGFMDYVDDAFYHKTNYDYKLGNLMDYYGIKTEAEILGGNIMKMSKSFNKRRDAEAINMAVRSLRKEARAWFNENSSGDVDSGSSDVYAKASAWYHVTYHPSYWGCYNEGMNRDHYLSFSWCVYPLLVQIKKEKLSIRRSSLEYSFSGLRLS

SEQ ID NO: 7257 - DNA, 1377 bp, Glycine max
  misc_feature (1)..(1377): Ceres Seq. ID no. 15170994
agtgcaggcttcagtcatgccaggctttgggagcctcttacctcaaagattaaagcaattagctcaaacaataacaggttctgctggcaaaaatcttggccttgataactcagtttttggcagagttaaagaagtcagattatcttctttcttgaagaatacactacatgcttcctcaccttctcctgctcctgctccatctccacagttaattgatcactctgagccatcaacttcaccacatcgtgctagtccttacactccaatatcaccagcagctgctgaacaacctccttgtttcgattgtgaagtaccctcacctgcaccttctatggtgcctgcgcatcctccagatccctgtctatatagtggcttccttcatcatccaatcccttcgccaaaatcttattctaaaccatcctttccccctgattattcacctgctgctgcccctacctcaaattctgctagccacaccagtgaggaagcttctgatccgtctcgtgaagccgaggtgtcccatggatccaagcttcggcagggtgaagagacgtctaataaactggtgtctcatctacttgctccatcctctttatcttcagcgagtggtgatttccgtggggaaatgttgctaatgggattttgtatggtattaatttcatttgtttttctcaatgataccacattttgatgatatggagatgttgcctgctgaaggatcctggagacatgcgaggactactacaacagcctaatgacgtgctttgcaagttttgtttagataatggaaggaagaaacttccgtccaattttaatttgccttaattttacttcaagtatgcaaccgaccaccatgtaaagctccggtgggtaaagggtcaaagccagaaagttggcaggcctctcatctagtactacatatttctatgaagcatgaaattgatcccaaaggggtcaactaacaaacatcatgatcgagagcaaaattggctttcagatgtcagaagaaccatcccttgtattcgatcaagtgtatgatatgcaaagaaatgtgggttctttgagcatctgaatctgtaaaacaaccatagtaatatctagcaaaaagataaattagtcacacttgtatagctctatgctcccccccttctccctacttttgaaagaaaataagaattcaaattcatccatgaagaaacgcgtgttctttgtagtctagacagatcttttactctggaaaaaagtggtcaaaggaaaacatatagagaaaagtgaatgttaactacatgtgttagagtttcttgggactagcaagtgtcaagataaagaaaaataataagagggttcggaacagatgttctgcccagatttctgttt

SEQ ID NO: 7258 - protein, 229 aa, Glycine max
  misc_feature (1)..(229): Ceres Seq. ID no. 15170995
VQASVMPGFGSLLPQRLKQLAQTITGSAGKNLGLDNSVFGRVKEVRLSSFLKNTLHASSPSPAPAPSPQLIDHSEPSTSPHRASPYTPISPAAAEQPPCFDCEVPSPAPSMVPAHPPDPCLYSGFLHHPIPSPKSYSKPSFPPDYSPAAAPTSNSASHTSEEASDPSREAEVSHGSKLRQGEETSNKLVSHLLAPSSLSSASGDFRGEMLLMGFCMVLISFVFLNDTTF

SEQ ID NO: 7259 - protein, 224 aa, Glycine max
  misc_feature (1)..(224): Ceres Seq. ID no. 15170996
MPGFGSLLPQRLKQLAQTITGSAGKNLGLDNSVFGRVKEVRLSSFLKNTLHASSPSPAPAPSPQLIDHSEPSTSPHRASPYTPISPAAAEQPPCFDCEVPSPAPSMVPAHPPDPCLYSGFLHHPIPSPKSYSKPSFPPDYSPAAAPTSNSASHTSEEASDPSREAEVSHGSKLRQGEETSNKLVSHLLAPSSLSSASGDFRGEMLLMGFCMVLISFVFLNDTTF

SEQ ID NO: 7260 - protein, 119 aa, Glycine max
  misc_feature (1)..(119): Ceres Seq. ID no. 15170997
MVPAHPPDPCLYSGFLHHPIPSPKSYSKPSFPPDYSPAAAPTSNSASHTSEEASDPSREAEVSHGSKLRQGEETSNKLVSHLLAPSSLSSASGDFRGEMLLMGFCMVLISFVFLNDTTF

SEQ ID NO: 7261 - DNA, 1747 bp, Glycine max
  misc_feature (1)..(1747): Ceres Seq. ID no. 15171005
aataaggctttcacatgtcagatgtgtgaactcagtgtcaatgaggttgatactgtacttctctgtgatgcttgtgaaaagggatttcacttgaagtgcctgcagccatcagtcttgagaggaattcataatagagttgattggcattgtatgaggtgcttgagtttaagtggtggaaagcctttgcctccaaaatatggtcgtgtcatgagatcctcaaacacaccgccaaaattgccctctaatacaggtggcgttcaaccatgttctgagaagaaagtagagaatatcgatccaaaggtcatcccacagacgttagcaacaaatgggagctctgttccaactgtttccggtggccatcacaatgttgagttgccatccgaatcaaagataccagataccaaagatatgcaagggactggcatttcatccaccattgaagctattgataagaagcctgatccaaagaactctatgaaatctcttagtgcagcttatagtccttccccttgcttgctaggtgaaaattctgctcaacaaataaattctaaggttttgactggtagagagacttcggaatctgagtctcttcctaaattatctgagctagctaagtgtgaaaatttgcaatcatcacaagattttcaagttgaacatacaatgtcacaagacaatgctgaagtatcatcagataaacatgttgacagtaatatgatgaataaccaacagaaggaatctcatggagaagaaaatttagtttatgatataaagcgtgatgaccaagatgctgcacttgaaaattctgttggaacttctggaactaatactgatggtagacagcactctgcattatcttcagatagttcacatgctgtagaatggattggtgatgtagtacaacttgtagatgagaaaaagtattaccaatcttgctgtgttgatggagtaacatataggctgcagggtcatgctcttttccccaccggccatgggaaactaactccttctaaactccagtctatgtgggaagattgcaaaactgggttaaagtgggttaaggtgacaaactgctactttcctgatgatttgcctgggaatattggtcatccgtgtatatctgaagtcaacgaggtttatgaatctaatagtgatagaactgaaatggctagctctattcgagggccatgtgaagtcctcccatctgataaatttaaacaagagaatgacaggcgatgtcagttacgaaatgaggaaagttctagagtgcagcccattttcctatgcaggtggttttatgatgaattcaagaagttatttcaacctgtaatcagttgattatgtcttgaacttatatgttttgtggttcctacatggtgccatttttgtggtatttggtggggcttcgaacaggatatttcttggatgggtaattaagcatgcattaagattcaattgagacccattataaggcacattgcagaagcattgcctcctcgtacagagtgttttatcatttcagcatgaattgcttttggtgtaaaatatgtaactgaatctgtggactgcttagtttagctttcgctttggtagttctttttctgatagatattcattctgtataattcttttttgggcattaggctctttaggcccaataattacattattatctttgaattagatcagtgtagttcccttagtttgctgaattgtaagatacttcatttgtacaaaagccatttcttct

SEQ ID NO: 7262 - protein, 444 aa, Glycine max
  misc_feature (1)..(444): Ceres Seq. ID no. 15171006
NKAFTCQMCELSVNEVDTVLLCDACEKGFHLKCLQPSVLRGIHNRVDWHCMRCLSLSGGKPLPPKYGRVMRSSNTPPKLPSNTGGVQPCSEKKVENIDPKVIPQTLATNGSSVPTVSGGHHNVELPSESKIPDTKDMQGTGISSTIEAIDKKPDPKNSMKSLSAAYSPSPCLLGENSAQQINSKVLTGRETSESESLPKLSELAKCENLQSSQDFQVEHTMSQDNAEVSSDKHVDSNMMNNQQKESHGEENLVYDIKRDDQDAALENSVGTSGTNTDGRQHSALSSDSSHAVEWIGDVVQLVDEKKYYQSCCVDGVTYRLQGHALFPTGHGKLTPSKLQSMWEDCKTGLKWVKVTNCYFPDDLPGNIGHPCISEVNEVYESNSDRTEMASSIRGPCEVLPSDKFKQENDRRCQLRNEESSRVQPIFLCRWFYDEFKKLFQPVIS

SEQ ID NO: 7263 - protein, 437 aa, Glycine max
  misc_feature (1)..(437): Ceres Seq. ID no. 15171007
MCELSVNEVDTVLLCDACEKGFHLKCLQPSVLRGIHNRVDWHCMRCLSLSGGKPLPPKYGRVMRSSNTPPKLPSNTGGVQPCSEKKVENIDPKVIPQTLATNGSSVPTVSGGHHNVELPSESKIPDTKDMQGTGISSTIEAIDKKPDPKNSMKSLSAAYSPSPCLLGENSAQQINSKVLTGRETSESESLPKLSELAKCENLQSSQDFQVEHTMSQDNAEVSSDKHVDSNMMNNQQKESHGEENLVYDIKRDDQDAALENSVGTSGTNTDGRQHSALSSDSSHAVEWIGDVVQLVDEKKYYQSCCVDGVTYRLQGHALFPTGHGKLTPSKLQSMWEDCKTGLKWVKVTNCYFPDDLPGNIGHPCISEVNEVYESNSDRTEMASSIRGPCEVLPSDKFKQENDRRCQLRNEESSRVQPIFLCRWFYDEFKKLFQPVIS

SEQ ID NO: 7264 - protein, 394 aa, Glycine max
  misc_feature (1)..(394): Ceres Seq. ID no. 15171008
MRCLSLSGGKPLPPKYGRVMRSSNTPPKLPSNTGGVQPCSEKKVENIDPKVIPQTLATNGSSVPTVSGGHHNVELPSESKIPDTKDMQGTGISSTIEAIDKKPDPKNSMKSLSAAYSPSPCLLGENSAQQINSKVLTGRETSESESLPKLSELAKCENLQSSQDFQVEHTMSQDNAEVSSDKHVDSNMMNNQQKESHGEENLVYDIKRDDQDAALENSVGTSGTNTDGRQHSALSSDSSHAVEWIGDVVQLVDEKKYYQSCCVDGVTYRLQGHALFPTGHGKLTPSKLQSMWEDCKTGLKWVKVTNCYFPDDLPGNIGHPCISEVNEVYESNSDRTEMASSIRGPCEVLPSDKFKQENDRRCQLRNEESSRVQPIFLCRWFYDEFKKLFQPVIS

SEQ ID NO: 7265 - DNA, 1699 bp, Glycine max
  misc_feature (1)..(1699): Ceres Seq. ID no. 15171012
gcacatttgggaacaagccttacagtgatgtgtccctctaaagacatttttaaggaagcaactaaacagatggactctgaggatggactaggagaggattggttatctgagtattcaggtgatgaggactatgaccctgaagaaaatgacttcacaagcagcagcctggatagtggtgaagaaagtatatctgatcagtccaattgttcaggaagtccgctttattctccaaacgatgatattccaggctttatatcagcagatttcactgatgcggaaggattctaccacaccaattcaaatttaggaattgattctgatgatgatgatgttgccgagatgcttacctaccaaaggccaaagagagaggaaatgtttggaaagctgactgagaatgaaaagcagagtgaagatgaagattggggtactaataataggagaaagaaaagaagagtggattcagctggtgttggagttaagtctgccgagggttccttagatgtaaaatcgaatgagaaagcccaaccgcagaggagaaaactcttcagaattccacctgaggcagttcaggtactgcgcaaatcttttgctgaaagtgagcttccatcccgggaggtgaaagagaatctctcaacagaattgggtatttcttttgaaaagattgacaagtggttcaaaaatacaaggtgtgctgctctcagagatcggaaggctgaaggaaatagtcgtgttgctggtcccagcaaaagatcgaaacagagtgcagggaaatctggaagtttaggcaagattgattcagtggacaattcatatcttcttcccatgcctgaaatcatcagtgtacctacacatccacaagggattcctgagaggaagcccgaatcaactagtagaactgtgaggaggcgggtacacgataaaggagctcccttgtgtccgcccgcgcccgccgaagtcaaggagagcacatcacctacaaccaagcctggcttgaatcctagccatgtagctgatcgcatcatcaacaccgagcatagagctgcttctcgggaggatccagtggccttctcggatgaccctttcttcgatgcgatcctatcatatcccaccatcaacaccaacgacagagctgtttctcgggaggatccggtggccttctcggacgatcctttcctggacgtgatgctagcaaaccgtgacatctataccgaggagagagccgcttctcacgaggacgtgaggcggccttccagcgaccagcctttcttggatgtgatccagaacgtgtgcgggctcgagcataggctgcagagactcaagggggacatgctatcatcagcagcagcaccaggcggcgctggaaccgcggagcgtgacttgcagaaccaactagtggttctcgtgccgactgccgagctgaaggacaaatcacagcctagcatctgaaattctgatactccatttgcgcgttgtcgataggagttattaaaacatatagaagaaatagtgtagagaaggagaagaaaagaaaagtagtggctccagtctagggttctagcggacaaggggcctcaacagtggtcgttactgtgtgtcacattaaagtgcgtcgtcggtgttactagtatacaagggcagttgttactggtcttaatgggtttgagttatataccgtttggggttcaaaatgttttggatc

SEQ ID NO: 7266 - protein, 481 aa, Glycine max
  misc_feature (1)..(481): Ceres Seq. ID no. 15171013
AHLGTSLTVMCPSKDIFKEATKQMDSEDGLGEDWLSEYSGDEDYDPEENDFTSSSLDSGEESISDQSNCSGSPLYSPNDDIPGFISADFTDAEGFYHTNSNLGIDSDDDDVAEMLTYQRPKREEMFGKLTENEKQSEDEDWGTNNRRKKRRVDSAGVGVKSAEGSLDVKSNEKAQPQRRKLFRIPPEAVQVLRKSFAESELPSREVKENLSTELGISFEKIDKWFKNTRCAALRDRKAEGNSRVAGPSKRSKQSAGKSGSLGKIDSVDNSYLLPMPEIISVPTHPQGIPERKPESTSRTVRRRVHDKGAPLCPPAPAEVKESTSPTTKPGLNPSHVADRIINTEHRAASREDPVAFSDDPFFDAILSYPTINTNDRAVSREDPVAFSDDPFLDVMLANRDIYTEERAASHEDVRRPSSDQPFLDVIQNVCGLEHRLQRLKGDMLSSAAAPGGAGTAERDLQNQLVVLVPTAELKDKSQPSI

SEQ ID NO: 7267 - protein, 472 aa, Glycine max
  misc_feature (1)..(472): Ceres Seq. ID no. 15171014
MCPSKDIFKEATKQMDSEDGLGEDWLSEYSGDEDYDPEENDFTSSSLDSGEESISDQSNCSGSPLYSPNDDIPGFISADFTDAEGFYHTNSNLGIDSDDDDVAEMLTYQRPKREEMFGKLTENEKQSEDEDWGTNNRRKKRRVDSAGVGVKSAEGSLDVKSNEKAQPQRRKLFRIPPEAVQVLRKSFAESELPSREVKENLSTELGISFEKIDKWFKNTRCAALRDRKAEGNSRVAGPSKRSKQSAGKSGSLGKIDSVDNSYLLPMPEIISVPTHPQGIPERKPESTSRTVRRRVHDKGAPLCPPAPAEVKESTSPTTKPGLNPSHVADRIINTEHRAASREDPVAFSDDPFFDAILSYPTINTNDRAVSREDPVAFSDDPFLDVMLANRDIYTEERAASHEDVRRPSSDQPFLDVIQNVCGLEHRLQRLKGDMLSSAAAPGGAGTAERDLQNQLVVLVPTAELKDKSQPSI

SEQ ID NO: 7268 - protein, 458 aa, Glycine max
  misc_feature (1)..(458): Ceres Seq. ID no. 15171015
MDSEDGLGEDWLSEYSGDEDYDPEENDFTSSSLDSGEESISDQSNCSGSPLYSPNDDIPGFISADFTDAEGFYHTNSNLGIDSDDDDVAEMLTYQRPKREEMFGKLTENEKQSEDEDWGTNNRRKKRRVDSAGVGVKSAEGSLDVKSNEKAQPQRRKLFRIPPEAVQVLRKSFAESELPSREVKENLSTELGISFEKIDKWFKNTRCAALRDRKAEGNSRVAGPSKRSKQSAGKSGSLGKIDSVDNSYLLPMPEIISVPTHPQGIPERKPESTSRTVRRRVHDKGAPLCPPAPAEVKESTSPTTKPGLNPSHVADRIINTEHRAASREDPVAFSDDPFFDAILSYPTINTNDRAVSREDPVAFSDDPFLDVMLANRDIYTEERAASHEDVRRPSSDQPFLDVIQNVCGLEHRLQRLKGDMLSSAAAPGGAGTAERDLQNQLVVLVPTAELKDKSQPSI

SEQ ID NO: 7269 - DNA, 1258 bp, Glycine max
  misc_feature (1)..(1258): Ceres Seq. ID no. 15171036
aatatttaaagagcagtttccagctcattttgctgaggtaattgatgctctaccagttcaagaatacatgcatcccctctgcggtcttctgaatttagctgcaaatttgccacatgggagtgcaaaacatgacattgggccatatgtctacatttcttatggctctgctgacaaagaaactgattcagtgacaaagctctgctatgactcatatgatgtggttaatattatgacacataccacagatgcccccctctctacagaacaacttacaaaaataagaaaactgctaaaaaagcacaaaactctgtgttaaatggagactattgctactgaggagccacgggaacagaaattgaatggaatggcattattgcatggtccagaaacagagcgaaaaggctcatggagtatggtcgaagaaggaatgaactttttcaggagagtcaatagaacatcttgcatctcaactgaagctaaaaaagtttctagtcagagcatggacagcaatggagaatgtgatttcatttctgattctgattctggatccactttacttctccttgggactgttcaaactgctgaattgtcaaagcacaataatcctagaaatccctttgaaagctcaaaaagacataaaaaaaagtttactgagcatttgggtgcccagtgggatgtctttcgcagacaagatgttccaaagctcatcgaataccttaaaagacattatgctgaattttcttatacccatgactatgacaagaagatggttcatccaattctagatcagagcatttttcttgacagtactcacaaaaagagactaaaggaggaatttaagattgaaccatggacttttcagcaacatgttggacaagctgtcatcattcctgctggatgtccataccagatgaggaattctaagtctagcgttcatgcggtattggaatttgtgtcccctgaaaatgttactgagggtatccagttgattgatgaggtccgactattgcctgaagaccataaagcaaaagcagacctgctggaggtaaagaaaatggcgcttcatagcatgaatacagcaattaaagaagtacgtcagcttacaagcaaaacatgattgcaccagctaaagtatacttaaatgcctctgaggctctagagatctaatgtgtcaacctgacttccatatcttcattctgtatatagattcatgctcggacaaattaatatctagtaaggtagttattaaattgattag

SEQ ID NO: 7270 - protein, 266 aa, Glycine max
  misc_feature (1)..(266): Ceres Seq. ID no. 15171037
METIATEEPREQKLNGMALLHGPETERKGSWSMVEEGMNFFRRVNRTSCISTEAKKVSSQSMDSNGECDFISDSDSGSTLLLLGTVQTAELSKHNNPRNPFESSKRHKKKFTEHLGAQWDVFRRQDVPKLIEYLKRHYAEFSYTHDYDKKMVHPILDQSIFLDSTHKKRLKEEFKIEPWTFQQHVGQAVIIPAGCPYQMRNSKSSVHAVLEFVSPENVTEGIQLIDEVRLLPEDHKAKADLLEVKKMALHSMNTAIKEVRQLTSKT

SEQ ID NO: 7271 - protein, 250 aa, Glycine max
  misc_feature (1)..(250): Ceres Seq. ID no. 15171038
MALLHGPETERKGSWSMVEEGMNFFRRVNRTSCISTEAKKVSSQSMDSNGECDFISDSDSGSTLLLLGTVQTAELSKHNNPRNPFESSKRHKKKFTEHLGAQWDVFRRQDVPKLIEYLKRHYAEFSYTHDYDKKMVHPILDQSIFLDSTHKKRLKEEFKIEPWTFQQHVGQAVIIPAGCPYQMRNSKSSVHAVLEFVSPENVTEGIQLIDEVRLLPEDHKAKADLLEVKKMALHSMNTAIKEVRQLTSKT

SEQ ID NO: 7272 - protein, 234 aa, Glycine max
  misc_feature (1)..(234): Ceres Seq. ID no. 15171039
MVEEGMNFFRRVNRTSCISTEAKKVSSQSMDSNGECDFISDSDSGSTLLLLGTVQTAELSKHNNPRNPFESSKRHKKKFTEHLGAQWDVFRRQDVPKLIEYLKRHYAEFSYTHDYDKKMVHPILDQSIFLDSTHKKRLKEEFKIEPWTFQQHVGQAVIIPAGCPYQMRNSKSSVHAVLEFVSPENVTEGIQLIDEVRLLPEDHKAKADLLEVKKMALHSMNTAIKEVRQLTSKT

SEQ ID NO: 7273 - DNA, 1351 bp, Glycine max
  misc_feature (1)..(1351): Ceres Seq. ID no. 15171068
atgatgtccatttgtggtgattctggtctaagggacatatcttcacctggaaaaagtggcagcatcttctttctttctcaagatgatagattcgtgataaagacactgaaaaaatatgaactaaaggttatgctcaatatgcttcctaaatactatcatcatgtaggaagttatgagaatactcttattacaaaattctttggtctccatcgaataacactaagaggtggtaaaaaggttcgctttgtggtcatgggaaatatgttctgcacagaacttcatattcaccgtcgttatgatctgaaggggtctactcaaggaagatatacagacaaagataaaattaatagcaatacaacattgaaagatcttgatctaaaatatgaatttcatatggataaaaaattacgagaatccctattcaaacaaatttctctagactgcatgttcttggagtctcagcacataattgattacagccttctgttgggattacattttagagctccggagaatctaaaggccttagtggaacctcccagactaccgcagcctcaacatggcttaccctctgaagatgatgcacaaaaacaaggggagcagttgattattcctaaaggcttgttattagttgctcatgaacctagctttgtcaacactgcacctggaccccacattagaggaaatacattgagggcatactccataggtgacaagcaagttgatcttttacttcctggtactgcaaggtatcgtctataacattattctgattgtttccttttcaatattcattaatctagcacctttgcaagtatcttctttggtcctagacagttgcatgtaccaattattgtgcattttgtttctttcactgtacttcatgtcactttctttaaataacagtcctaagcaaaaatcattttttttattgtgttccattgtaataacacatgtcataatatgagatggagtgttactcaggttgagagtgcaattaggagtaaacatgccagctcaagcaacacgcaaacttcaggaggataaggtggaagaatcagaagtagagctttttgaggtttatgatgtggtcctatacatgggcataattgatatattgcaagaatacacagtgaaaaagaaacttgagcatgcctgcaaatcactgcaatatgaccctatgactatttcagtggtggaaccaaagacatatgctgaacgtttcatcaatttcatggagaaaaaagttttccctgagccagagacttcttgaatatgtatattttatgtttccttgttggtttaatacttctttgtaatcaattgttcttaaggaagagtattttgtttt

SEQ ID NO: 7274 - protein, 253 aa, Glycine max
  misc_feature (1)..(253): Ceres Seq. ID no. 15171069
MMSICGDSGLRDISSPGKSGSIFFLSQDDRFVIKTLKKYELKVMLNMLPKYYHHVGSYENTLITKFFGLHRITLRGGKKVRFVVMGNMFCTELHIHRRYDLKGSTQGRYTDKDKINSNTTLKDLDLKYEFHMDKKLRESLFKQISLDCMFLESQHIIDYSLLLGLHFRAPENLKALVEPPRLPQPQHGLPSEDDAQKQGEQLIIPKGLLLVAHEPSFVNTAPGPHIRGNTLRAYSIGDKQVDLLLPGTARYRL

SEQ ID NO: 7275 - protein, 252 aa, Glycine max
  misc_feature (1)..(252): Ceres Seq. ID no. 15171070
MSICGDSGLRDISSPGKSGSIFFLSQDDRFVIKTLKKYELKVMLNMLPKYYHHVGSYENTLITKFFGLHRITLRGGKKVRFVVMGNMFCTELHIHRRYDLKGSTQGRYTDKDKINSNTTLKDLDLKYEFHMDKKLRESLFKQISLDCMFLESQHIIDYSLLLGLHFRAPENLKALVEPPRLPQPQHGLPSEDDAQKQGEQLIIPKGLLLVAHEPSFVNTAPGPHIRGNTLRAYSIGDKQVDLLLPGTARYRL

SEQ ID NO: 7276 - protein, 210 aa, Glycine max
  misc_feature (1)..(210): Ceres Seq. ID no. 15171071
MLNMLPKYYHHVGSYENTLITKFFGLHRITLRGGKKVRFVVMGNMFCTELHIHRRYDLKGSTQGRYTDKDKINSNTTLKDLDLKYEFHMDKKLRESLFKQISLDCMFLESQHIIDYSLLLGLHFRAPENLKALVEPPRLPQPQHGLPSEDDAQKQGEQLIIPKGLLLVAHEPSFVNTAPGPHIRGNTLRAYSIGDKQVDLLLPGTARYRL

SEQ ID NO: 7277 - DNA, 1334 bp, Glycine max
  misc_feature (1)..(1334): Ceres Seq. ID no. 15171088
gggtaatgctttcggaacatgtgctgatttaactatacttcatattgccagcttggatacacaaaaaaacaagaagagagacatttccgaggagtgattacattagaggaatgcaatattgacgagattcctgatgatgatgaagcctccacaaagaattccaaggataaaaagtccaacggacctgattctggaaaagcatcaaaccttattttcaagataacaagcaaggtcccatacaagactgttatgaaatctgaaagtgcagttttgttaaaggctgagagtatggcagataaggttgagtggatcaacaagttaagaagtgttgcacaggctaaaggaggtcaagccattggtgaacctagttttcctatgcggcaaagcctttctgatgggtctcttgatacgatggccaggaaacctgcagatccagaggaggagctcagatggatgtctcaagaagtccgtggttatgttgaagctgttcttaacagccttgcagctaatgttccaaaagcagttgttctttgccaagtagagaaagccaaagaagacatgctgaaccagctatacagttccgtcagcgctcaaagctctgcaaaaattgaggagctgctccaggaagaccacaatgtcaagaacaaaagggagcgagttcagaaacagtctgcccttctttcaaaactcactaggcagcttggtgtccatgacaatagagcggctgcagcatccagttggtctgatagagggagtgcagcagaaagcagcccaagaagctctggaccctcatcaggtgatgattggaggtctgcatttgattctgctgccaatggtccaagcaacctgacgtctaggtatggttctggtggtcatagtagacgctacagtgacccatcccaaaatggtgatgtgagctcaggctcaaattccaacagtcgtcggacgccaactcggttgcccccggctcccccacaatctggttcaagatattagatgaagctacatatggttttaatcaaaattatgcactcatcggatggacgctttcagttttttctacttatatcgagactgtccctcctccttttagactttagtcggaatgttatagttttgtagataacgaaagtattgctatcgcattcatcttaaggtcatacgcagtctgcgtcctattttattcccttactgggtatgtgggggcattgttgggtgagatgattttgtgtcttcccaacattctttttctttacaaatgtaattgttttgtatgcaatgtgattatcagcatttacataaatgcgcattaatcgcgactgccttttgttttc

SEQ ID NO: 7278 - protein, 248 aa, Glycine max
  misc_feature (1)..(248): Ceres Seq. ID no. 15171089
MKSESAVLLKAESMADKVEWINKLRSVAQAKGGQAIGEPSFPMRQSLSDGSLDTMARKPADPEEELRWMSQEVRGYVEAVLNSLAANVPKAVVLCQVEKAKEDMLNQLYSSVSAQSSAKIEELLQEDHNVKNKRERVQKQSALLSKLTRQLGVHDNRAAAASSWSDRGSAAESSPRSSGPSSGDDWRSAFDSAANGPSNLTSRYGSGGHSRRYSDPSQNGDVSSGSNSNSRRTPTRLPPAPPQSGSRY

SEQ ID NO: 7279 - protein, 235 aa, Glycine max
  misc_feature (1)..(235): Ceres Seq. ID no. 15171090
MADKVEWINKLRSVAQAKGGQAIGEPSFPMRQSLSDGSLDTMARKPADPEEELRWMSQEVRGYVEAVLNSLAANVPKAVVLCQVEKAKEDMLNQLYSSVSAQSSAKIEELLQEDHNVKNKRERVQKQSALLSKLTRQLGVHDNRAAAASSWSDRGSAAESSPRSSGPSSGDDWRSAFDSAANGPSNLTSRYGSGGHSRRYSDPSQNGDVSSGSNSNSRRTPTRLPPAPPQSGSRY

SEQ ID NO: 7280 - protein, 206 aa, Glycine max
  misc_feature (1)..(206): Ceres Seq. ID no. 15171091
MRQSLSDGSLDTMARKPADPEEELRWMSQEVRGYVEAVLNSLAANVPKAVVLCQVEKAKEDMLNQLYSSVSAQSSAKIEELLQEDHNVKNKRERVQKQSALLSKLTRQLGVHDNRAAAASSWSDRGSAAESSPRSSGPSSGDDWRSAFDSAANGPSNLTSRYGSGGHSRRYSDPSQNGDVSSGSNSNSRRTPTRLPPAPPQSGSRY

SEQ ID NO: 7281 - DNA, 1510 bp, Glycine max
  misc_feature (1)..(1510): Ceres Seq. ID no. 15171096
gatattgaagtatgagtacttttcttttactacactgccatggccgctgccagcctggtgtccctttgggtcctcttctccggcgttgctttgtttcctggaagttgctcgccgcagcatcataacattcttaaacttaaaatgatctcccccttcactcataacctttcaacctccaaaatcattgactcccatctccatatctgggcttctcctcaagaggcttcggaattcccttatgctcccggacaagagccccctgtaccaggaaatcttcattttttgctccagaatatggaggaggcaggagtagatggcgttctcattgtgcagccaatatttcataaatttgatcatagttatgtcacaagtgctttgaagaaatacccgaccaaatttgttggttgttgccttgctaatccaactgatgatggaagtggactgaagcagtttgaagatcttgtcttaaaggatggttatcgtgctgttcgattcaacccagaattgtggccagctggggaaaagatgacaaataaagttgggaaggcaattttccaaagggctggagaactgaatgtaccagtgggattcttgtgcatgaaggtatttttttttatttgcttgtatatataaaagaactatcttgtaaagtttcttctcctcccaatagaaccttaggttgtcaaaatatttctatgtgccgcctatggtattgctacccttctacacagtaaggggcatatttttttatgcatgaagttaatgaaaaaaagaattactgagtcgagtgatttcaggggattggtctatatatgtctgagattgagcagttgtgcacagaatttccatcaacagttgtattgattgatcacttgggcttcatcaaaccaccattgtaagctatattatatcattgtttcaaaggtaaagaaatgcacctttatatgagcattgtattgcaggaatgaagaagaaggtcttgtcttttctcagcttttgaatctatctagattcccaaaagtatatgtgaaatttagttctctttttcaagtgtcaagagagaagtttccttatctggatttggctcctcttttgtcccaagttgtcgctagctttggtgctaaccgtgttatgtggggcagtgattttccatatgctgctgctgaatgtggctacaaagaagccaaagaagcagtgcttcttattgccaaccagatctctttgcctccgtctgatttagagtggatcatggggagaactgttgcacaactcttcccaaaccaatggactgatgctaagcaaggttttcatagagagcgggagtgatgtctctcagattgagtcttataaagcactttcacatgttgtattcttaaattatatgttgaatgtaacatgtaaaattgtctctgcactgatgacatttgttcttgtctttggtaaattcgtacaccaatatttttgttggttgccctgctgttctaggtgaataaccagcattgaataagcg

SEQ ID NO: 7282 - protein, 197 aa, Glycine max
  misc_feature (1)..(197): Ceres Seq. ID no. 15171097
MAAASLVSLWVLFSGVALFPGSCSPQHHNILKLKMISPFTHNLSTSKIIDSHLHIWASPQEASEFPYAPGQEPPVPGNLHFLLQNMEEAGVDGVLIVQPIFHKFDHSYVTSALKKYPTKFVGCCLANPTDDGSGLKQFEDLVLKDGYRAVRFNPELWPAGEKMTNKVGKAIFQRAGELNVPVGFLCMKVFFFICLYI

SEQ ID NO: 7283 - protein, 163 aa, Glycine max
  misc_feature (1)..(163): Ceres Seq. ID no. 15171098
MISPFTHNLSTSKIIDSHLHIWASPQEASEFPYAPGQEPPVPGNLHFLLQNMEEAGVDGVLIVQPIFHKFDHSYVTSALKKYPTKFVGCCLANPTDDGSGLKQFEDLVLKDGYRAVRFNPELWPAGEKMTNKVGKAIFQRAGELNVPVGFLCMKVFFFICLYI

SEQ ID NO: 7284 - protein, 112 aa, Glycine max
  misc_feature (1)..(112): Ceres Seq. ID no. 15171099
MEEAGVDGVLIVQPIFHKFDHSYVTSALKKYPTKFVGCCLANPTDDGSGLKQFEDLVLKDGYRAVRFNPELWPAGEKMTNKVGKAIFQRAGELNVPVGFLCMKVFFFICLYI

SEQ ID NO: 7285 - DNA, 1288 bp, Glycine max
  misc_feature (1)..(1288): Ceres Seq. ID no. 15171141
agaggaagagaagagaaagaggagcacataataaccctcaaactccatttcactcacagaaaaatagagatatagagagagaaagtgctgcagaatacacacatacacaccacttcttcaagagagagaggtgtgtgaaggaaaataagaactgaaagaaaaattgttttgcaaaggaagatatgaaactttgcaaatttaacaactgagaaagaagatctgtgatttctctctctctttttgttgttgttgttgtttgcagagaaaatcacacaaacgcacacacacacacacacacacacacacacccttcttcgtgtctgaatttttatcattgacaattttttcacaaagggttgttgtctcttcagagagacacagatcttgaggttggaggcaaaatccttcacacactttggtggttatggaaacagaagagaggaaccagaaagattgcaaggcttcggagccagagtttttcttgcagtgggggaacaggaagaggctgagatgtgtgagggtgaaggaccctcggatttcagcgaggctcaacggtggaatcagaaggaaacttggttctgcaatggagcatcatcgctctggcctcactgtgccagaaaaagaacatcatcaccatcatcatcatcaacaacttaatcgccttacaaggaattccgacggggcgattctccggtcatcggccggcgagacaaggaaatcggcgtcgccggagaaggaggaccggtactacacgacgcggggttcggcggaggagaacggcaaggtcaccggcggcgaaggcatcaacggcgaagaacgagccctagtttggcccaagctctacatcactctctcaagcaaggagaaagaggaagattttctggccatgaagggttgcaagcttcctcagcgacccaaaaagagggccaaaatcattcaaagaagcttacttagaccaagagggttgaaggctatgggaagcatggaaagtgattctgaatgaatgatatgatggaaagaaagaaaaaaaaatcaattgagcggatccacaagaagggggaagaaggaagcccttttaagaagcatgaagaagaaatgttttggagatggtgatgatgatgatgatgttgtttgaattgatgaatggtgaagataatgatgattcaagttttttttatatttgtgtggcatgtatgttgccccctcaatgtttttttgtaaacgagtaagattcgatccgatccaatccatttcaattaattaagaaaaaatattttctcatcttcac

SEQ ID NO: 7286 - protein, 192 aa, Glycine max
  misc_feature (1)..(192): Ceres Seq. ID no. 15171142
METEERNQKDCKASEPEFFLQWGNRKRLRCVRVKDPRISARLNGGIRRKLGSAMEHHRSGLTVPEKEHHHHHHHQQLNRLTRNSDGAILRSSAGETRKSASPEKEDRYYTTRGSAEENGKVTGGEGINGEERALVWPKLYITLSSKEKEEDFLAMKGCKLPQRPKKRAKIIQRSLLRPRGLKAMGSMESDSE

SEQ ID NO: 7287 - protein, 139 aa, Glycine max
  misc_feature (1)..(139): Ceres Seq. ID no. 15171143
MEHHRSGLTVPEKEHHHHHHHQQLNRLTRNSDGAILRSSAGETRKSASPEKEDRYYTTRGSAEENGKVTGGEGINGEERALVWPKLYITLSSKEKEEDFLAMKGCKLPQRPKKRAKIIQRSLLRPRGLKAMGSMESDSE

SEQ ID NO: 7288 - DNA, 1389 bp, Glycine max
  misc_feature (1)..(1389): Ceres Seq. ID no. 15171144
attagggattccctccctcctccgcctcttgtcactcacacagaaaagaccgttgaatttcaaacctcagccatgcccgctctcagaaagcgaaatcgattgtcggagttcgatgccatatccaaccacgacacacctcatgaacagaagaagaatatgtctgagtacgagctgtcgagagagcagagaatccgcgaaaaccgcgagagaatgggaaagctgggaatcttggacctttccctcactctcaagctcaacaacaaaaacaaaagatcctattcctctcacaaaccccaaacccctccttctcttccaaactcctccgtccccgttcgccgctcttccaggttgcagaatgtgactcctgttagttactccgaagttcccccaaagaaagacgagtttaagaaaaatggaagggtggtcattgaacaaggtgccaagccagaggtgtactctgaagaacacgagaagctgttgggaaacaccgacaagccctggacgctcttcgtcgatggtgttggcaaagatgggaaacgaatttatgactccgtccatggcaaaacttgccatcagtgcaggcaaaagactcttggttatcggacaagttgtagccaatgcaacatggtccaggggcagttttgtggagattgcttgtatatgagatatggggagcatgtactcgaagccttgcagaatccaacttggctatgccctgtttgtcgtggaatttgcaactgtagcttatgtcgtcaagcaaaaggatgggccccaactggcactctatataaaaagatatcaacattgggttacaaatcagttgcacactaccttattcaaacccggcgctcagaaatagatgtgaagaaaaatgcagatccttccaacccagtttcagcaaaaaggtcgctacccttctctgatgtggacaagtctcttgaggttaacgagaatcatctggaatcattgaagcctctagctgaatctgaaggtgatgatgctgaggtttcagcaaagagattgcttttctctgataagcaaaatcagcttgaaaaagttgagtgttcagataccccaaaacctcttcagcttgaaaaaaatgagtgttcaggtaccaagaagccacttgcttcttcctccaaacctagctctgacagcattgctggaagacttaggtccaggcttaaaaaaccatgagacttttttttatctttttcttagtctaacctgggatacatgtgcttactttccaagaaacacattatgaattgggataactggagttggtaatttggcatttgtcatagtaacggtaatatatgctttctcttttaattaccaaccggatttggtaatttggtataaaatcctttttgtcatagtaatggt

SEQ ID NO: 7289 - protein, 398 aa, Glycine max
  misc_feature (1)..(398): Ceres Seq. ID no. 15171145
IRDSLPPPPLVTHTEKTVEFQTSAMPALRKRNRLSEFDAISNHDTPHEQKKNMSEYELSREQRIRENRERMGKLGILDLSLTLKLNNKNKRSYSSHKPQTPPSLPNSSVPVRRSSRLQNVTPVSYSEVPPKKDEFKKNGRVVIEQGAKPEVYSEEHEKLLGNTDKPWTLFVDGVGKDGKRIYDSVHGKTCHQCRQKTLGYRTSCSQCNMVQGQFCGDCLYMRYGEHVLEALQNPTWLCPVCRGICNCSLCRQAKGWAPTGTLYKKISTLGYKSVAHYLIQTRRSEIDVKKNADPSNPVSAKRSLPFSDVDKSLEVNENHLESLKPLAESEGDDAEVSAKRLLFSDKQNQLEKVECSDTPKPLQLEKNECSGTKKPLASSSKPSSDSIAGRLRSRLKKP

SEQ ID NO: 7290 - protein, 374 aa, Glycine max
  misc_feature (1)..(374): Ceres Seq. ID no. 15171146
MPALRKRNRLSEFDAISNHDTPHEQKKNMSEYELSREQRIRENRERMGKLGILDLSLTLKLNNKNKRSYSSHKPQTPPSLPNSSVPVRRSSRLQNVTPVSYSEVPPKKDEFKKNGRVVIEQGAKPEVYSEEHEKLLGNTDKPWTLFVDGVGKDGKRIYDSVHGKTCHQCRQKTLGYRTSCSQCNMVQGQFCGDCLYMRYGEHVLEALQNPTWLCPVCRGICNCSLCRQAKGWAPTGTLYKKISTLGYKSVAHYLIQTRRSEIDVKKNADPSNPVSAKRSLPFSDVDKSLEVNENHLESLKPLAESEGDDAEVSAKRLLFSDKQNQLEKVECSDTPKPLQLEKNECSGTKKPLASSSKPSSDSIAGRLRSRLKKP

SEQ ID NO: 7291 - protein, 346 aa, Glycine max
  misc_feature (1)..(346): Ceres Seq. ID no. 15171147
MSEYELSREQRIRENRERMGKLGILDLSLTLKLNNKNKRSYSSHKPQTPPSLPNSSVPVRRSSRLQNVTPVSYSEVPPKKDEFKKNGRVVIEQGAKPEVYSEEHEKLLGNTDKPWTLFVDGVGKDGKRIYDSVHGKTCHQCRQKTLGYRTSCSQCNMVQGQFCGDCLYMRYGEHVLEALQNPTWLCPVCRGICNCSLCRQAKGWAPTGTLYKKISTLGYKSVAHYLIQTRRSEIDVKKNADPSNPVSAKRSLPFSDVDKSLEVNENHLESLKPLAESEGDDAEVSAKRLLFSDKQNQLEKVECSDTPKPLQLEKNECSGTKKPLASSSKPSSDSIAGRLRSRLKKP

SEQ ID NO: 7292 - DNA, 554 bp, Glycine max
  misc_feature (1)..(554): Ceres Seq. ID no. 15171171
aatattcctatcctcttttccaaatttccatggcttctgcggatgttgaataccgatgctttgttggtgggctcgcttgggccactgacaactacgatctggagaaagccttctctcagtacggtgacgtcgttgaatcgaagattatcaacgatcgtgagactggaagatccaggggatttggatttgttaccttcgcctccgaggattcaatgagggatgcgatcgaagggatgaacggtcagaaccttgatggacgcaacatcactgtgaacgaagctcagtcccgcggaagccgcggtggaggcggtggcggttacggaagtggcggtggatacaaccgcagtggtggtgctggaggatacggtggccgtcgggaaggtgcatataaccgtaacggtggtggttatggcggtgacagagaccatcgttacggaccttacggggacggtggatcacgctactctcgtggtggtggtgatggaagctggagaaattagggcttaatgttgtagattagtgtttattgctatgtttgtgttccgtaattttag

SEQ ID NO: 7293 - protein, 165 aa, Glycine max
  misc_feature (1)..(165): Ceres Seq. ID no. 15171172
YSYPLFQISMASADVEYRCFVGGLAWATDNYDLEKAFSQYGDVVESKIINDRETGRSRGFGFVTFASEDSMRDAIEGMNGQNLDGRNITVNEAQSRGSRGGGGGGYGSGGGYNRSGGAGGYGGRREGAYNRNGGGYGGDRDHRYGPYGDGGSRYSRGGGDGSWRN

SEQ ID NO: 7294 - protein, 156 aa, Glycine max
  misc_feature (1)..(156): Ceres Seq. ID no. 15171173
MASADVEYRCFVGGLAWATDNYDLEKAFSQYGDVVESKIINDRETGRSRGFGFVTFASEDSMRDAIEGMNGQNLDGRNITVNEAQSRGSRGGGGGGYGSGGGYNRSGGAGGYGGRREGAYNRNGGGYGGDRDHRYGPYGDGGSRYSRGGGDGSWRN

SEQ ID NO: 7295 - protein, 95 aa, Glycine max
  misc_feature (1)..(95): Ceres Seq. ID no. 15171174
MRDAIEGMNGQNLDGRNITVNEAQSRGSRGGGGGGYGSGGGYNRSGGAGGYGGRREGAYNRNGGGYGGDRDHRYGPYGDGGSRYSRGGGDGSWRN

SEQ ID NO: 7296 - DNA, 1228 bp, Glycine max
  misc_feature (1)..(1228): Ceres Seq. ID no. 15171175
atgtgggagtaacagcagaagcaaaacaaaacatcatagacagacacaacattatctttcaactgttgctctgcctctgcacagagaatggtgtgggaggggaaacagacatgatctatctgtgttcacagcaccactgtttccctgcctcacacccttatctagaagaacaagaatcagcacatacacccgccacaacgccatagtcatcatcacttagaagaacttcacaatttttattttggttgtgtcgagtgtttttagctgacacaacctgaaagcttttgtctttattccgaaatttgtggcaatctttgcggtttagcttctggggtgttggggtggaagtaaagtttgtcactttgagatctaggtggggctgatatgcagaaacaacggcaatgagcaaattggcttggatatggcgagtcttgctcttgaaaccgaggatgtaatctcagatatatacctttcactgggacttaaggaatcagacaaaggagtaggagttcctcgagttttatctcttctctcttcacttcttgagagatcagttcagagaaacgaaacgctattggaggcaaagcacgtaaaagatgtagttacagtatttcacggtttaagagctcctactctgagcgttcgaaagtacattgatcgtatcttcaagtactcaggttgcagcccatcatgctttgtcgtggcacacatatatgtggacagattcattcaacacacagaaatcaaattgacttcacttaatgtgcaccggcttctgataacaagcatcatgctagcagcaaagtttatagatgacgcattctacaacaatgcttactatgcaaaagttggaggagtgagcacgtctgaattaaacaggttggagatgagctttctatttggcatagattttaggcttcagtttagtgtagacacgtttggaagatattgtaggcaattggagaaagaagctgcagaagtagtccaaattgaaaggccaatgcaggcttgtcgaattaaagaaagttggtcaaacaaagatgatcctacctgtgcttccacaattgcaagataaaaatgtggcaacaccattgtagcaatatattgctgtcccacaattaaccgagacaaaatgaatttgaagtatttcaaagtaaaaaaaaaaaaagagagagagagagaatagattgttctatacttgccactggaaattcaaccattttttacg

SEQ ID NO: 7297 - protein, 217 aa, Glycine max
  misc_feature (1)..(217): Ceres Seq. ID no. 15171176
MASLALETEDVISDIYLSLGLKESDKGVGVPRVLSLLSSLLERSVQRNETLLEAKHVKDVVTVFHGLRAPTLSVRKYIDRIFKYSGCSPSCFVVAHIYVDRFIQHTEIKLTSLNVHRLLITSIMLAAKFIDDAFYNNAYYAKVGGVSTSELNRLEMSFLFGIDFRLQFSVDTFGRYCRQLEKEAAEVVQIERPMQACRIKESWSNKDDPTCASTIAR

SEQ ID NO: 7298 - DNA, 1454 bp, Glycine max
  misc_feature (1)..(1454): Ceres Seq. ID no. 15171197
ttctttctctctctttttctgtttttttttttgttcctctctctagattttatttgttgttcttcttctttatgagccctaacttggggacccatcgtcgtcgtcgtctttagccatgtcgctgaggaaggtcttccgctcccgcaagttctccagatcgttcaaggaggtgctgccggcggagggcgccgcaattgtcggcggcgaggacggggtcgccggcgccggtgaggagtcgtcgaatgggaataatggttggtccaacatgcttccagagatcctcggcgagatcgtgcggcgcgtggatgccgccgaggaacagtggccgaaccgccagaacgtcgtcgcatgcgcgtgcgtctgcaagcgttggcgtgacatcacgcgcgaggtcgtgcgcgtgccctcccacaccgggaaaataaccttccctgcgtgccttaagcagccaggaccacgtgacgttccccaccaatgtcttataaagcggaacaagaaaacttcaactttttatttatatcttgcccttacaccatcattcacagataaagggaagtttctgctagcagctaggagatataggtgtggtactcataccgagtatataatttcacttgatgctgatgatttatcccaaggaagcaatgcttatgttggaaagctaagctcggattttcttggcaccaacttcacaatttatgacagccagccaccccatagtggtgcaaaaccatcaagtggcagggccagccgtcggtttgccagcaagcagataagcccacaagttcctgcaggtaactttgaggtggggcaggtctcctacaagttcaaccttttgaaatcaagagggccaaggagaatggtttgctcattgaagtgtcccgtgactcctgtcgtctcaccatcggttgaaagttcagatagcacgccggtcaatggccataagattcccgataaagaacaagttgcatctggctacacaatcttgaagaataaagctccaaggtggcatgagcatttgcaatgttggtgcttgaatttccatggccgtgtgacagtggcctcggtgaagaactttcagctggttgcaacagtggaccaaagccaaccaggagggaaaggagatgaggaaacagttctcctccagtttggtaaagtaggggatgatacttttaccatggattatagacagcccttgtctgctttccaggcttttgccatttgcttaactagctttggcactaaacttgcttgtgagtaatataattttggtgtcactgcttatttattccgtggatgaatgtttaagtgaatagttattttattttttttactcggctttgagtcaacaatttgattgcaggaagcttcttgttgtaaatgtgttatatcatcaaataggacatgacatcttccataaatcaaatatattgccctattcaagcggttggtcc

SEQ ID NO: 7299 - protein, 381 aa, Glycine max
  misc_feature (1)..(381): Ceres Seq. ID no. 15171198
MSLRKVFRSRKFSRSFKEVLPAEGAAIVGGEDGVAGAGEESSNGNNGWSNMLPEILGEIVRRVDAAEEQWPNRQNVVACACVCKRWRDITREVVRVPSHTGKITFPACLKQPGPRDVPHQCLIKRNKKTSTFYLYLALTPSFTDKGKFLLAARRYRCGTHTEYIISLDADDLSQGSNAYVGKLSSDFLGTNFTIYDSQPPHSGAKPSSGRASRRFASKQISPQVPAGNFEVGQVSYKFNLLKSRGPRRMVCSLKCPVTPVVSPSVESSDSTPVNGHKIPDKEQVASGYTILKNKAPRWHEHLQCWCLNFHGRVTVASVKNFQLVATVDQSQPGGKGDEETVLLQFGKVGDDTFTMDYRQPLSAFQAFAICLTSFGTKLACE

SEQ ID NO: 7300 - protein, 331 aa, Glycine max
  misc_feature (1)..(331): Ceres Seq. ID no. 15171199
MLPEILGEIVRRVDAAEEQWPNRQNVVACACVCKRWRDITREVVRVPSHTGKITFPACLKQPGPRDVPHQCLIKRNKKTSTFYLYLALTPSFTDKGKFLLAARRYRCGTHTEYIISLDADDLSQGSNAYVGKLSSDFLGTNFTIYDSQPPHSGAKPSSGRASRRFASKQISPQVPAGNFEVGQVSYKFNLLKSRGPRRMVCSLKCPVTPVVSPSVESSDSTPVNGHKIPDKEQVASGYTILKNKAPRWHEHLQCWCLNFHGRVTVASVKNFQLVATVDQSQPGGKGDEETVLLQFGKVGDDTFTMDYRQPLSAFQAFAICLTSFGTKLACE

SEQ ID NO: 7301 - DNA, 1695 bp, Glycine max
  misc_feature (1)..(1695): Ceres Seq. ID no. 15171224
accatattcttgaacctcacacacatgtacagtagcatggctgcaaccaacgaagcagaagaagcagcaggaggcaaaagggtccaatacccactggactcttcctcctacaagctcctgaacgagatcggcgaaggcgtgagcgccgtcgtctacaaagccctctgcatccccatgaactccgccgccgtcgcaatcaaatccatcgacctcgaccgctcccggcccgacttagacgacgtccgtcgcgaggccaaaaccctatccctcctttcccaccccaacatcctcaaagcacactgttccttcaccgtggaccgccgcctctgggtggtgatgccgttcatggccgcaggatcacttcaatccatcatttctcattcccaccccaacggcttaacggagccctgcatcgccgtggttctcagagacacgctcaacgcactctcctacctccacggccagggccatctccacagagacattaaagccggtaacatcctcgtagacaccaatgggcaagtgaagctcgctgatttcggtgtctccgcttccatatacgagtccaccaccaccacgtcttcttcttcgtctctcaagttcaccgatgttgccggcacgccctattggatggctcctgaggtgattcactcacacacgggttacagtttcaaggctgatatatggtcctttgggataaccgcgttggagcttgcgcatggaaggcctcccctctcgcaccttccaccttccaagtccatgatgctcaagatcaccaagaggtttcgtttctccgatgatttcgatgacaagtataggaaggggaatgggaagaagttctctaaggcgttcaaggacatggtggcttcttgtctcgaccaagatccttccaagagacctactgctgataagttgctcaaacaccctttctttaagaactgtaagggaaccgattttctggtgaagaatgtgctgcaagggttgcccagtgtggagaaaaggtacagggagagcaagggtaatttgcatgaagatgatgatgatggtgatgatgatgatgatgatccctccatgcaggtgaagcagagaaggataagtgggtggaacttcaatcaagacggcttggaacttgaccctgtgtttccaaacgatgttaaagaggttcggtttggaggagaaacggttatccaacaagctgcaggaatggaaaaagtgaacaacaacagtagcagtagggaagggatgttggcgactctgaatgtattgaaagggagcctggagcaagagctgtggcaagtgaagtttctggtgaatacgatacaaggagatcatcacgacactcaagttcctgaggagcaggagatttctaggctgagggctcaattggaaaatgagaggatgaagaacttgcagttggagttgcagcttcagacctccaagctccaccagaaatctgattccaactaaaatctgattccaacgatcatacatctaccatatgtagaggaattctgtgtactttctgctcctgtaccacttatattatgtgtgtcaacgtcaatgtttgtatttttaattgaaagattaaatttctgttgtacggattaatgttacacttaccataattttttataatttgtcttttatctttttcttatcatactcatcttattcaaaacttttggcttatttcct

SEQ ID NO: 7302 - protein, 488 aa, Glycine max
  misc_feature (1)..(488): Ceres Seq. ID no. 15171225
TIFLNLTHMYSSMAATNEAEEAAGGKRVQYPLDSSSYKLLNEIGEGVSAVVYKALCIPMNSAAVAIKSIDLDRSRPDLDDVRREAKTLSLLSHPNILKAHCSFTVDRRLWVVMPFMAAGSLQSIISHSHPNGLTEPCIAVVLRDTLNALSYLHGQGHLHRDIKAGNILVDTNGQVKLADFGVSASIYESTTTTSSSSSLKFTDVAGTPYWMAPEVIHSHTGYSFKADIWSFGITALELAHGRPPLSHLPPSKSMMLKITKRFRFSDDFDDKYRKGNGKKFSKAFKDMVASCLDQDPSKRPTADKLLKHPFFKNCKGTDFLVKNVLQGLPSVEKRYRESKGNLHEDDDDGDDDDDDPSMQVKQRRISGWNFNQDGLELDPVFPNDVKEVRFGGETVIQQAAGMEKVNNNSSSREGMLATLNVLKGSLEQELWQVKFLVNTIQGDHHDTQVPEEQEISRLRAQLENERMKNLQLELQLQTSKLHQKSDSN

SEQ ID NO: 7303 - protein, 480 aa, Glycine max
  misc_feature (1)..(480): Ceres Seq. ID no. 15171226
MYSSMAATNEAEEAAGGKRVQYPLDSSSYKLLNEIGEGVSAVVYKALCIPMNSAAVAIKSIDLDRSRPDLDDVRREAKTLSLLSHPNILKAHCSFTVDRRLWVVMPFMAAGSLQSIISHSHPNGLTEPCIAVVLRDTLNALSYLHGQGHLHRDIKAGNILVDTNGQVKLADFGVSASIYESTTTTSSSSSLKFTDVAGTPYWMAPEVIHSHTGYSFKADIWSFGITALELAHGRPPLSHLPPSKSMMLKITKRFRFSDDFDDKYRKGNGKKFSKAFKDMVASCLDQDPSKRPTADKLLKHPFFKNCKGTDFLVKNVLQGLPSVEKRYRESKGNLHEDDDDGDDDDDDPSMQVKQRRISGWNFNQDGLELDPVFPNDVKEVRFGGETVIQQAAGMEKVNNNSSSREGMLATLNVLKGSLEQELWQVKFLVNTIQGDHHDTQVPEEQEISRLRAQLENERMKNLQLELQLQTSKLHQKSDSN

SEQ ID NO: 7304 - protein, 476 aa, Glycine max
  misc_feature (1)..(476): Ceres Seq. ID no. 15171227
MAATNEAEEAAGGKRVQYPLDSSSYKLLNEIGEGVSAVVYKALCIPMNSAAVAIKSIDLDRSRPDLDDVRREAKTLSLLSHPNILKAHCSFTVDRRLWVVMPFMAAGSLQSIISHSHPNGLTEPCIAVVLRDTLNALSYLHGQGHLHRDIKAGNILVDTNGQVKLADFGVSASIYESTTTTSSSSSLKFTDVAGTPYWMAPEVIHSHTGYSFKADIWSFGITALELAHGRPPLSHLPPSKSMMLKITKRFRFSDDFDDKYRKGNGKKFSKAFKDMVASCLDQDPSKRPTADKLLKHPFFKNCKGTDFLVKNVLQGLPSVEKRYRESKGNLHEDDDDGDDDDDDPSMQVKQRRISGWNFNQDGLELDPVFPNDVKEVRFGGETVIQQAAGMEKVNNNSSSREGMLATLNVLKGSLEQELWQVKFLVNTIQGDHHDTQVPEEQEISRLRAQLENERMKNLQLELQLQTSKLHQKSDSN

SEQ ID NO: 7305 - DNA, 1587 bp, Glycine max
  misc_feature (1)..(1587): Ceres Seq. ID no. 15171245
aaaacttttgtcactgaaggtgtcttggagccaattgtagcagttggtaacatcaaacacatattcagacaatgaggcttgtcgtctcagctctttgtgttcttgtgttattctcttgtgcagttgcttatgatcctttggatccaaacggaaacgtaacaatcaaatgggatgtaatgtcttggacaccagatggctatgtggctgtggtaacaatgcacaacttccaaatgtttcggcacatcatgaatcctggatggaccttgggatggacatgggcaaagaaagaagtcatttggtccatgataggagctcaaaccacagaacaaggagattgctctaagttcaaaggcaacatacctcattgctgcaagaaaattcccacagttgtggaccttctccctggtgtaccttacaaccagcaattctcaaactgctgcaagggtggagtagtggcagcatggggccaagatccttcacaagctatctcttccttccaagtgagtgtaggccaagctggtacctcaaacaagacagttaaacttcccaagaacttcactctctttgctccaggaccaggctacacttgtggccctgcaaagattgttccttccaccaattttcttacgcctgacaagcgccgcaagactcaagcactaatgacatggaatgttacctgcacatactcacagtttctggcaagaaagaacccaagttgttgtgtatctttgtcatccttttacaatgaaaccattaccccttgtccctcttgtgcatgtggctgccagaacaagaagcattgtgtcaagggaaactccaaaattctcagcatggtgggggttcacactccaaagaaagacaatgaaccattgctgcagtgcactcatcacatgtgtccaatcagggtccactggcatgtgaagactaactataaggactattggcgagtcaaggttgccataacaaacttcaattacagaatgaatcactccctttggtctcttgctgttcagcatccaaatctcaacaatctcacacaagttttcagtttcaattacaagccacttcttccctatggatccataaatgatactggcatgttctatggcatgaagtacttcaatgatcttctaatggaagctggaccaactgggaatgttcaatcagagttgcttcttcagaaggacaaggatgcattcacattcaagcagggttgggcatttcctcgcaaggtttactttaatggtgatgaatgcatgctgccaccacctgacacctacccttttctccctaactctgctcctgcaagcctacttaacttccctgcgttcatgttgttattgttcttcttgcttgcagtttggtgaattggtgcatattgtgtcagaattttgtgaaatttttgaaaccatgtataccttcttaatggtaacgtgacaataggcatgaatactcaaattctttggaaacactaagccaaatctcatggctgtgttttatctgacatgtgagcaccaaaggggatgctaatatgtaaatctcaacagtgattttgtctgaatcatagattgatgatgctattactcc

SEQ ID NO: 7306 - protein, 431 aa, Glycine max
  misc_feature (1)..(431): Ceres Seq. ID no. 15171246
MRLVVSALCVLVLFSCAVAYDPLDPNGNVTIKWDVMSWTPDGYVAVVTMHNFQMFRHIMNPGWTLGWTWAKKEVIWSMIGAQTTEQGDCSKFKGNIPHCCKKIPTVVDLLPGVPYNQQFSNCCKGGVVAAWGQDPSQAISSFQVSVGQAGTSNKTVKLPKNFTLFAPGPGYTCGPAKIVPSTNFLTPDKRRKTQALMTWNVTCTYSQFLARKNPSCCVSLSSFYNETITPCPSCACGCQNKKHCVKGNSKILSMVGVHTPKKDNEPLLQCTHHMCPIRVHWHVKTNYKDYWRVKVAITNFNYRMNHSLWSLAVQHPNLNNLTQVFSFNYKPLLPYGSINDTGMFYGMKYFNDLLMEAGPTGNVQSELLLQKDKDAFTFKQGWAFPRKVYFNGDECMLPPPDTYPFLPNSAPASLLNFPAFMLLLFFLLAVW

SEQ ID NO: 7307 - protein, 396 aa, Glycine max
  misc_feature (1)..(396): Ceres Seq. ID no. 15171247
MSWTPDGYVAVVTMHNFQMFRHIMNPGWTLGWTWAKKEVIWSMIGAQTTEQGDCSKFKGNIPHCCKKIPTVVDLLPGVPYNQQFSNCCKGGVVAAWGQDPSQAISSFQVSVGQAGTSNKTVKLPKNFTLFAPGPGYTCGPAKIVPSTNFLTPDKRRKTQALMTWNVTCTYSQFLARKNPSCCVSLSSFYNETITPCPSCACGCQNKKHCVKGNSKILSMVGVHTPKKDNEPLLQCTHHMCPIRVHWHVKTNYKDYWRVKVAITNFNYRMNHSLWSLAVQHPNLNNLTQVFSFNYKPLLPYGSINDTGMFYGMKYFNDLLMEAGPTGNVQSELLLQKDKDAFTFKQGWAFPRKVYFNGDECMLPPPDTYPFLPNSAPASLLNFPAFMLLLFFLLAVW

SEQ ID NO: 7308 - protein, 383 aa, Glycine max
  misc_feature (1)..(383): Ceres Seq. ID no. 15171248
MHNFQMFRHIMNPGWTLGWTWAKKEVIWSMIGAQTTEQGDCSKFKGNIPHCCKKIPTVVDLLPGVPYNQQFSNCCKGGVVAAWGQDPSQAISSFQVSVGQAGTSNKTVKLPKNFTLFAPGPGYTCGPAKIVPSTNFLTPDKRRKTQALMTWNVTCTYSQFLARKNPSCCVSLSSFYNETITPCPSCACGCQNKKHCVKGNSKILSMVGVHTPKKDNEPLLQCTHHMCPIRVHWHVKTNYKDYWRVKVAITNFNYRMNHSLWSLAVQHPNLNNLTQVFSFNYKPLLPYGSINDTGMFYGMKYFNDLLMEAGPTGNVQSELLLQKDKDAFTFKQGWAFPRKVYFNGDECMLPPPDTYPFLPNSAPASLLNFPAFMLLLFFLLAVW

SEQ ID NO: 7309 - DNA, 1439 bp, Glycine max
  misc_feature (1)..(1439): Ceres Seq. ID no. 15171257
ggtaactctttcaactcggccgtgcaagttttattggcagcgctggaaccatcttctcctctcttcacctacgtttttctttttctctttctctttctcttactctcttcaacactttctcaaatcccttccttcttcgctcttgtcttctctttcaggtgcaccttccagttaagcaggagttggataattgttggacatagatgaaatagtgattgttatgtctggactgattgaaggacttcctgacgctgttgcaatcaggtgccttgcatgggttcccttctacctccacccaaagttagagcttgtctctcgtgcttggcgagcagttgttcgtggccctgaactatttaaagctcgacaggagcttggttcatcggaggatctgttgtgtgtctgtgcttttgagccagagaacttatggcagctgtatgaccctcagcgagacctctggataactcttcctgttctaccctcaagaatcaggcacctttcacattttggtgccgtctccactgctggaaagttgtttgtgattggtggtggaagtgatgctgttgatcctttgacgggtgaccaagatggttgttttgcaacaaatgaagtctggtcgtatgacccagtagtacggcagtggtccccccgtgcggcaatgctcgtcccccgttctatgtttgcatgctgtgttatgaatggaaaaatagttgtggctgggggcttcactagctgcagaaagtcaatatctcaagcagaaatatatgatcccgagaaagatgtttggattccaatgcctgatcttcatcgcacccataactcagcctgttcgggagtagtgattggaggaaaggtgcatgtcctgcacaaggatatgtcaacagtgcaagttttagacaatgcaggtcagtggacggtagaggaatatgggtggctccatggtcaaatggcagttatcagggatgccctttatgtgataagccatggattaatcatcaagcaagacaaaaaaatgaggaaggtagttggttcagcttctgaatttcgaaggagaattggatttgcaatgattggtttaggtgatgaattatatgtgattggaggtgtcattggccctgacaggtggaattgggacatcaagccactgtctgatgttgatgttcttacacttgcgagcgagagaccgacgtggcgccaggcagctccaatgacaaggtgtggtggtactattcttggttgtacacagctgagaatttaggctttcactttctaggcttatgtgatatgtgtgctccaactaaggaatgtgaattccttcaacaggagacgaagaattaggttgttcaatggcttctttgagttgttgtatgtaagccataatatttgtccttgttgttttgttgactattatgtggtaataagataaggtaatgttttcaagc

SEQ ID NO: 7310 - protein, 344 aa, Glycine max
  misc_feature (1)..(344): Ceres Seq. ID no. 15171258
MSGLIEGLPDAVAIRCLAWVPFYLHPKLELVSRAWRAVVRGPELFKARQELGSSEDLLCVCAFEPENLWQLYDPQRDLWITLPVLPSRIRHLSHFGAVSTAGKLFVIGGGSDAVDPLTGDQDGCFATNEVWSYDPVVRQWSPRAAMLVPRSMFACCVMNGKIVVAGGFTSCRKSISQAEIYDPEKDVWIPMPDLHRTHNSACSGVVIGGKVHVLHKDMSTVQVLDNAGQWTVEEYGWLHGQMAVIRDALYVISHGLIIKQDKKMRKVVGSASEFRRRIGFAMIGLGDELYVIGGVIGPDRWNWDIKPLSDVDVLTLASERPTWRQAAPMTRCGGTILGCTQLRI

SEQ ID NO: 7311 - protein, 199 aa, Glycine max
  misc_feature (1)..(199): Ceres Seq. ID no. 15171259
MLVPRSMFACCVMNGKIVVAGGFTSCRKSISQAEIYDPEKDVWIPMPDLHRTHNSACSGVVIGGKVHVLHKDMSTVQVLDNAGQWTVEEYGWLHGQMAVIRDALYVISHGLIIKQDKKMRKVVGSASEFRRRIGFAMIGLGDELYVIGGVIGPDRWNWDIKPLSDVDVLTLASERPTWRQAAPMTRCGGTILGCTQLRI

SEQ ID NO: 7312 - protein, 193 aa, Glycine max
  misc_feature (1)..(193): Ceres Seq. ID no. 15171260
MFACCVMNGKIVVAGGFTSCRKSISQAEIYDPEKDVWIPMPDLHRTHNSACSGVVIGGKVHVLHKDMSTVQVLDNAGQWTVEEYGWLHGQMAVIRDALYVISHGLIIKQDKKMRKVVGSASEFRRRIGFAMIGLGDELYVIGGVIGPDRWNWDIKPLSDVDVLTLASERPTWRQAAPMTRCGGTILGCTQLRI

SEQ ID NO: 7313 - DNA, 1577 bp, Glycine max
  misc_feature (1)..(1577): Ceres Seq. ID no. 15171275
aactactgtacagagttcatatcaatctcatcatattatatagagcaccaacttatcttcaaaactcattcataactaaaatccttccattccttccttccacaaaccctatcctattaccagacaaacctcattttcaggctttttctgttactctgcaccataccacttcactcatcacaattcacaaacccatagagaaaggaaaagctttttttttatttttttatctgggtcaccctacacaaccttgctgaatggaaaactgtgtcttccaccaccaccaccatcaccttaggagcatgatcactcttccacaaccatcttcactgaaaccgaacttgagagtgtgccccaaagttatgagggtgagagcgagcgcgggaaggaggcactgcgagttcagcagccagaacgcgccccttgagccacggtccctggcggggaagtttctgagcggcgtgttgcagaaccgccgccagctgttccacgtgcttgccaaggaagagttgaagatgctgagtgatgacagagactctgctattgctcgcatgcgtctcagtcaccactctgatgaagccttgcttcacaggaggattgcacaagtgaaagagaatgagtctatgattgctatagaagatgttatgtatttgctgattttatacaagttttccgagatcagggttcatttggttccaaagctttctagttgcatatacaatggaaggctagaaatattgccctctaaggactgggatctagagtctattcacagcatggaggttttggatatcataaggaaacacgtcagtaccgtgacaggtttgagatcaaatcctagtgtaagggagagttgggaaacgactcctattcgacaattctggcttgcccgagtctatgtcgcctccatattatatggctactttttgaagtcagtttcattgaggtacaacctagagcgaagtctgtctttgtctgaccatgatcttcatcatggtcacaagaccggcccttcatttcaggacatgtatcgttccgggccaaaagacgtgatgcttggcaacaagagtgacatacgatctgtgtggcatggtttaatcgggcaggaagaggaaatcgaggatttaacatgttatgttacgggctttcaccctggatcatttgagagatgtgccaaactgagatccaaggaagctgtgcatttggtagagagtcatagtaatgcactttttggagatgggaaatctggtttgtctcagcatgatgatgttattgtaacttcattttctagtctgaggaggctagtcttggaagctgttgcttttggatctttcctgtgggagacagaagattacattgacaatgtatataagcttaaagatcaagtggttgagtgaaggaacatgttggtaaatgaatttccacactgttgggctaattctcattgtatataaagttagttagatttaggctaattttattttgtataggatgcattacctctaaataatgtaggttggttagctaagaaagaatggagatagagattttacatagtgacaaagaatgtccttatg

SEQ ID NO: 7314 - protein, 379 aa, Glycine max
  misc_feature (1)..(379): Ceres Seq. ID no. 15171276
MENCVFHHHHHHLRSMITLPQPSSLKPNLRVCPKVMRVRASAGRRHCEFSSQNAPLEPRSLAGKFLSGVLQNRRQLFHVLAKEELKMLSDDRDSAIARMRLSHHSDEALLHRRIAQVKENESMIAIEDVMYLLILYKFSEIRVHLVPKLSSCIYNGRLEILPSKDWDLESIHSMEVLDIIRKHVSTVTGLRSNPSVRESWETTPIRQFWLARVYVASILYGYFLKSVSLRYNLERSLSLSDHDLHHGHKTGPSFQDMYRSGPKDVMLGNKSDIRSVWHGLIGQEEEIEDLTCYVTGFHPGSFERCAKLRSKEAVHLVESHSNALFGDGKSGLSQHDDVIVTSFSSLRRLVLEAVAFGSFLWETEDYIDNVYKLKDQVVE

SEQ ID NO: 7315 - protein, 364 aa, Glycine max
  misc_feature (1)..(364): Ceres Seq. ID no. 15171277
MITLPQPSSLKPNLRVCPKVMRVRASAGRRHCEFSSQNAPLEPRSLAGKFLSGVLQNRRQLFHVLAKEELKMLSDDRDSAIARMRLSHHSDEALLHRRIAQVKENESMIAIEDVMYLLILYKFSEIRVHLVPKLSSCIYNGRLEILPSKDWDLESIHSMEVLDIIRKHVSTVTGLRSNPSVRESWETTPIRQFWLARVYVASILYGYFLKSVSLRYNLERSLSLSDHDLHHGHKTGPSFQDMYRSGPKDVMLGNKSDIRSVWHGLIGQEEEIEDLTCYVTGFHPGSFERCAKLRSKEAVHLVESHSNALFGDGKSGLSQHDDVIVTSFSSLRRLVLEAVAFGSFLWETEDYIDNVYKLKDQVVE

SEQ ID NO: 7316 - protein, 344 aa, Glycine max
  misc_feature (1)..(344): Ceres Seq. ID no. 15171278
MRVRASAGRRHCEFSSQNAPLEPRSLAGKFLSGVLQNRRQLFHVLAKEELKMLSDDRDSAIARMRLSHHSDEALLHRRIAQVKENESMIAIEDVMYLLILYKFSEIRVHLVPKLSSCIYNGRLEILPSKDWDLESIHSMEVLDIIRKHVSTVTGLRSNPSVRESWETTPIRQFWLARVYVASILYGYFLKSVSLRYNLERSLSLSDHDLHHGHKTGPSFQDMYRSGPKDVMLGNKSDIRSVWHGLIGQEEEIEDLTCYVTGFHPGSFERCAKLRSKEAVHLVESHSNALFGDGKSGLSQHDDVIVTSFSSLRRLVLEAVAFGSFLWETEDYIDNVYKLKDQVVE

SEQ ID NO: 7317 - DNA, 1822 bp, Glycine max
  misc_feature (1)..(1822): Ceres Seq. ID no. 15171286
gtaacatcttagtcgtcctatacatagagaagaagtagtacgtagtagatgctttcgaaaccctactctaacaaaaaccaagacatttagtttcatcaccactgttgagaaacttggagaagattttcaccaatggatccctgtcccttcgtgcgtctcatggtagactctttagctctcaaccttccctccgccaccaaaccgccacctgtctccggcgtccacccttccactaccccatgcttctgccaaatccgcatcaccaatttcccctctcaaaccgcgcttcttccactctcttcttcctcctccggcgacgccaaccccgaagccgcaacctccgccccgggcttccacctcgactccagcgcgctccgtcgcctctccgccaaacctctcaccctccgcctcgccgtctactccggcagcaccgcccgcgcctgcggcatctcctccgccaaactcctcggccgcctcaacctcaccctcgacctctccgccgcgctctcccgccccaacaccttccactccggctggctcaacctgagaaagaacagaaccggcttcgaaccggagcacaagcctgcgcctcgggttcacattgtggtccggtccgaaccggacccgcggttcgtgttccagttcggtggcgaaccggagtgtagcccggtggttttccagattcaggagaataatatcagacagcctgtctttagttgcaagttcagtgcggatcgtaactctagatccaggtgtctaccctcagattttgccaacaaccccagtagatggaggagaaccttgaagggtattagagagcgtcatgggagggagagaaagggttggatgataatgatccatgatctctctggctcacccgttgcagctgcctccatgataaccccatttgtcccttcccctggttcagacagagtatcaagatcaaacccaggtgcatggctcattcttcgcaccaacaatggtgcctctgtgagtagctggaagccatggggccgtctcgaagcgtggcgagaacgaggccctgtcgatggcttgggctacaagtttgagctcgtcactgagaatggacctgccaatgggataccaattgctgaggccacaatgaatgtgaaaaagggtggccagttctgcattgactacaaagtgatgagggattctggattgggttcaaggttgaaaggaaaagggtttgtgatgggttccacagtggaaggtgaaggcaaagttagcaagcctgttgtgcaagttggtgcacagcatgtgacatgcatggctgatgctgctttgttcattgcactttctgctgccattgatcttagcatggatgcatgcaagctcttctcgcataaactaaggaaagagctttgccatgaagaacaacaagtttcctttccctaaaaacctgctagaagaattgaattgttgtccttagttaaattacaagttagttatcatctgctgcagtgatagccaatgcgttcctagcttgatggatagtgggaactctggtttgagcatagagacagacttgcaattaattatcaagtctttgcagctgctatggcggattcagttttgtgaatgttgtcaggaaattaatcagagttgctagttttgttgattctacctttttctggttggattttctaaacagcagaaattagaggggtgattttagcagcattttttgtactgaacatgtacagagtacagacaaaccacaggcaaatgtatgtttatatatttttatttttttatatatttattaattttttttatgtcttacttgattttatgtctt

SEQ ID NO: 7318 - protein, 428 aa, Glycine max
  misc_feature (1)..(428): Ceres Seq. ID no. 15171287
MDPCPFVRLMVDSLALNLPSATKPPPVSGVHPSTTPCFCQIRITNFPSQTALLPLSSSSSGDANPEAATSAPGFHLDSSALRRLSAKPLTLRLAVYSGSTARACGISSAKLLGRLNLTLDLSAALSRPNTFHSGWLNLRKNRTGFEPEHKPAPRVHIVVRSEPDPRFVFQFGGEPECSPVVFQIQENNIRQPVFSCKFSADRNSRSRCLPSDFANNPSRWRRTLKGIRERHGRERKGWMIMIHDLSGSPVAAASMITPFVPSPGSDRVSRSNPGAWLILRTNNGASVSSWKPWGRLEAWRERGPVDGLGYKFELVTENGPANGIPIAEATMNVKKGGQFCIDYKVMRDSGLGSRLKGKGFVMGSTVEGEGKVSKPVVQVGAQHVTCMADAALFIALSAAIDLSMDACKLFSHKLRKELCHEEQQVSFP

SEQ ID NO: 7319 - protein, 419 aa, Glycine max
  misc_feature (1)..(419): Ceres Seq. ID no. 15171288
MVDSLALNLPSATKPPPVSGVHPSTTPCFCQIRITNFPSQTALLPLSSSSSGDANPEAATSAPGFHLDSSALRRLSAKPLTLRLAVYSGSTARACGISSAKLLGRLNLTLDLSAALSRPNTFHSGWLNLRKNRTGFEPEHKPAPRVHIVVRSEPDPRFVFQFGGEPECSPVVFQIQENNIRQPVFSCKFSADRNSRSRCLPSDFANNPSRWRRTLKGIRERHGRERKGWMIMIHDLSGSPVAAASMITPFVPSPGSDRVSRSNPGAWLILRTNNGASVSSWKPWGRLEAWRERGPVDGLGYKFELVTENGPANGIPIAEATMNVKKGGQFCIDYKVMRDSGLGSRLKGKGFVMGSTVEGEGKVSKPVVQVGAQHVTCMADAALFIALSAAIDLSMDACKLFSHKLRKELCHEEQQVSFP

SEQ ID NO: 7320 - DNA, 1416 bp, Glycine max
  misc_feature (1)..(1416): Ceres Seq. ID no. 15171289
ccaatgctccaccgcaataactcagccacagccacaacacacaaacacaaacccttcgttcctctctcgttcccttcttcaattcgatcaaacacagaatagtacttttttattatgatggccgtggcccgaaaggaaatggaccggatcaagggcccgtggagcccggaggaggacgaggctcttcagaagctcgtggagcggcatgggcccagaaactggtccctcatcagcaggtccattccgggccggtctgggaaatcgtgcaggctccgatggtgcaaccagctgtcgccacaggtcgagcaccgggccttcacgccggaagaggacgagaccataattagggcccatgctcggttcggtaacaagtgggccaccatagcccgcctcctctcgggccgcaccgataacgccatcaagaatcactggaactcaacgcttaaacgcaagtgcgcgtccttcatgaccgccgatgaagccgccgccggcggcttcagcccgaggccgctcaagcgatcgttcagcgccggcacggcggtgcctcctccaggaagcccctcaggatccgacgtgagcgagtccagcgctgctcccggcgtggtctctgtctctgtctctccttcacaagtgtttcgccccgtgccggttcggccggttgtcgaaacggcgtcgtcgcaagacgacgccgatgccgacgccgaggatgctggacctactacctcgctgtcgctgtctcttcccggggtggagtcatcggaaatctctaatcgcacctcgacggttccggtgatgccggtgcacaccgtggctgcggcggctccggttccgttaccggcgccggaggttggattaggagcgttgaatttgaatgcggagtttatggcggtgatgcatgagatgataaggaaggaggtgaggagttacatggagcagcagaatgggatgatgtgttttcagggtatggaaatgatggaagggtttaggaacgtgtcggtgaagagaattgggattagcagggtggattcgtaattattattattattattattattatgacctaattagtgttttcacaaaatgaggtttatgaagaactatgatcaagggaagagaaaaaaaaaaaaggaagctgttttcctttttttattttatttttagggaataataatattggttagtgtacagtgggaacgggacgagagaagccaagagtagtagcctggaatggaatgatggaaagtgaaatttcatggcaaatttgaaatttctttggcttgtttctgagcctctttggatgatcctgtgcttcaggtttatttagtttggaaaaaaacataaatgaggggttagatgcgaaaaaagaaagagaggggttggatttaaaaatgaatggaatatcctcaaattttcaag

SEQ ID NO: 7321 - protein, 305 aa, Glycine max
  misc_feature (1)..(305): Ceres Seq. ID no. 15171290
MMAVARKEMDRIKGPWSPEEDEALQKLVERHGPRNWSLISRSIPGRSGKSCRLRWCNQLSPQVEHRAFTPEEDETIIRAHARFGNKWATIARLLSGRTDNAIKNHWNSTLKRKCASFMTADEAAAGGFSPRPLKRSFSAGTAVPPPGSPSGSDVSESSAAPGVVSVSVSPSQVFRPVPVRPVVETASSQDDADADAEDAGPTTSLSLSLPGVESSEISNRTSTVPVMPVHTVAAAAPVPLPAPEVGLGALNLNAEFMAVMHEMIRKEVRSYMEQQNGMMCFQGMEMMEGFRNVSVKRIGISRVDS

SEQ ID NO: 7322 - protein, 304 aa, Glycine max
  misc_feature (1)..(304): Ceres Seq. ID no. 15171291
MAVARKEMDRIKGPWSPEEDEALQKLVERHGPRNWSLISRSIPGRSGKSCRLRWCNQLSPQVEHRAFTPEEDETIIRAHARFGNKWATIARLLSGRTDNAIKNHWNSTLKRKCASFMTADEAAAGGFSPRPLKRSFSAGTAVPPPGSPSGSDVSESSAAPGVVSVSVSPSQVFRPVPVRPVVETASSQDDADADAEDAGPTTSLSLSLPGVESSEISNRTSTVPVMPVHTVAAAAPVPLPAPEVGLGALNLNAEFMAVMHEMIRKEVRSYMEQQNGMMCFQGMEMMEGFRNVSVKRIGISRVDS

SEQ ID NO: 7323 - protein, 297 aa, Glycine max
  misc_feature (1)..(297): Ceres Seq. ID no. 15171292
MDRIKGPWSPEEDEALQKLVERHGPRNWSLISRSIPGRSGKSCRLRWCNQLSPQVEHRAFTPEEDETIIRAHARFGNKWATIARLLSGRTDNAIKNHWNSTLKRKCASFMTADEAAAGGFSPRPLKRSFSAGTAVPPPGSPSGSDVSESSAAPGVVSVSVSPSQVFRPVPVRPVVETASSQDDADADAEDAGPTTSLSLSLPGVESSEISNRTSTVPVMPVHTVAAAAPVPLPAPEVGLGALNLNAEFMAVMHEMIRKEVRSYMEQQNGMMCFQGMEMMEGFRNVSVKRIGISRVDS

SEQ ID NO: 7324 - DNA, 1502 bp, Glycine max
  misc_feature (1)..(1502): Ceres Seq. ID no. 15171293
acatgatgtaacagacttacatgccttgtgactctttcatttttctccataccttttcttgttccttctgagcttaatcgtattcctcacttcggctgcttggcaatccaagccaaaagcagatcctgcagacgtcataagaaaatcttatgaagaaggatatgataactaatgttaccgagtatgaggcaattgcaaaggaaaaattgccaaagatggtttatgacttctatgcatcaggggctgaggatcagtggactttgaaagagaaccgaaatgcgttctcaaggattctgttccagccgcgtattcttattgatgtaagcaagatagacttgactacaactgtaatgggcttcaaaatatcaatgcctatcatgattgctccaacagccatgcaaaagatggctcaccctgaaggagaattagctactgctagagcagcatcagcagctggcacaatcatgacactatcctcaactgcgacttccagtgtcgaggaggttgcttcaacaggtcccggcattcgtttttttcaactttatgtgttaaaagacagaaatgtggttgctcaggttgtgagaagagctgaaaaagcaggtttcaaggcaattacccttactgtggacagtccaattcttggtcgtagggaggctgatatcaaaaacagatttacattgccaccaaacctggttttgaagaattttgaagggttggatcttggaaagctgaacaagactagtgactcttttgctgcctcttatgctgctgaactatacgatcggtcactcaactggaaggatatcaaatggattcaaacaatcacttctttgcctattttattaaagggtgtacttactcctgaagatacaatgatagccatacaagctggagctgctggaatcattgtttccaatcacggagctcgccaacttgactatgtccctgcaactattatggctttggaagaggtggttaaagctacacaaggaagaattccagtttttctggatggcggaattcgccgagggacagatgtttttaaagcactagctcttggagcagccggtgtattcattggtagacctgtggtgttctcattggcagctgatggtgaggctggtgtgagaaaagtacttcaaatgcttcgtgatgagtttgaattaactatggcactaagtggttgtcgttcactcaaggagataactcgtgaccatgttctcacagagtgggatcgtccaagattttctcccaagttataatatggcaggactccaccttcttctatattctaaaataggagggattttagaataacctttgttcttatttcatgctttagtagaaatcttatgagtgaggcgttagtcatccattagtaattgctacttctttattcactgtacaaaataagtttttacttgaactcatttcattgcacttggtgcgatttggtaaactctagaaacatgatagcctataaaatgtacttttttcttgac

SEQ ID NO: 7325 - protein, 370 aa, Glycine max
  misc_feature (1)..(370): Ceres Seq. ID no. 15171294
MKKDMITNVTEYEAIAKEKLPKMVYDFYASGAEDQWTLKENRNAFSRILFQPRILIDVSKIDLTTTVMGFKISMPIMIAPTAMQKMAHPEGELATARAASAAGTIMTLSSTATSSVEEVASTGPGIRFFQLYVLKDRNVVAQVVRRAEKAGFKAITLTVDSPILGRREADIKNRFTLPPNLVLKNFEGLDLGKLNKTSDSFAASYAAELYDRSLNWKDIKWIQTITSLPILLKGVLTPEDTMIAIQAGAAGIIVSNHGARQLDYVPATIMALEEVVKATQGRIPVFLDGGIRRGTDVFKALALGAAGVFIGRPVVFSLAADGEAGVRKVLQMLRDEFELTMALSGCRSLKEITRDHVLTEWDRPRFSPKL

SEQ ID NO: 7326 - protein, 366 aa, Glycine max
  misc_feature (1)..(366): Ceres Seq. ID no. 15171295
MITNVTEYEAIAKEKLPKMVYDFYASGAEDQWTLKENRNAFSRILFQPRILIDVSKIDLTTTVMGFKISMPIMIAPTAMQKMAHPEGELATARAASAAGTIMTLSSTATSSVEEVASTGPGIRFFQLYVLKDRNVVAQVVRRAEKAGFKAITLTVDSPILGRREADIKNRFTLPPNLVLKNFEGLDLGKLNKTSDSFAASYAAELYDRSLNWKDIKWIQTITSLPILLKGVLTPEDTMIAIQAGAAGIIVSNHGARQLDYVPATIMALEEVVKATQGRIPVFLDGGIRRGTDVFKALALGAAGVFIGRPVVFSLAADGEAGVRKVLQMLRDEFELTMALSGCRSLKEITRDHVLTEWDRPRFSPKL

SEQ ID NO: 7327 - protein, 348 aa, Glycine max
  misc_feature (1)..(348): Ceres Seq. ID no. 15171296
MVYDFYASGAEDQWTLKENRNAFSRILFQPRILIDVSKIDLTTTVMGFKISMPIMIAPTAMQKMAHPEGELATARAASAAGTIMTLSSTATSSVEEVASTGPGIRFFQLYVLKDRNVVAQVVRRAEKAGFKAITLTVDSPILGRREADIKNRFTLPPNLVLKNFEGLDLGKLNKTSDSFAASYAAELYDRSLNWKDIKWIQTITSLPILLKGVLTPEDTMIAIQAGAAGIIVSNHGARQLDYVPATIMALEEVVKATQGRIPVFLDGGIRRGTDVFKALALGAAGVFIGRPVVFSLAADGEAGVRKVLQMLRDEFELTMALSGCRSLKEITRDHVLTEWDRPRFSPKL

SEQ ID NO: 7328 - DNA, 1676 bp, Glycine max
  misc_feature (1)..(1676): Ceres Seq. ID no. 15171297
ttcaaccttctcttctccccattgtgcacagttcacacctaacacaaacccacttcctctcttttccggcggcttttccggccaccatgctcctccgcctccaccacccaacctccctcgcctagatctactcagatcacaatcccaaatctctcaaatccggcgtcgtcgttttagctcaccttatataaaaaaagcagaaaggatgtcgtttcctctataattcgcttactcgcgctgtgtgctgtgtttctttctaacattcgtgttcgcgtgtgtgcgtttctttttttgttcctttgttcttttcggagcttctttgatttttccggcgagaagaggatgacgtccgtcgcgaggcagccaacgtggaaggagcgggagaacaacaagaggcgagagaggaggaggagagccatcgcggcgaagatcttctccggcctgcgaatgtacggcaactacaagctccccaaacactgcgacaacaacgaagttctcaaggctctctgcaacgaagccggctggaccgtagaagccgatggcaccacctatcgcaagggatgcaagcctcctgttgaacgcatggacatagtaggtggttctgcagcagcaagcccatgctcatcttaccatccaagtccctgtgcttcctacaaccctagtccaggctcttcttgcttaccgagccctcgcgcatccccctttcctccaaacccaaatgctgatggcaattctctcattccatggctcaaaaacctttcatcaggatcatcatcggcatcctcttccaagcttccgcagctgtacattccgaatggctccatcagtgctccagtcactcctccaatcagctctccatcatcccgaaagccccagatcagagctgattgggaggatcagtccaattgtccgacagcgtggggcggactggcatacacctttgtgccctcttcaactcctccaagccccggccgccaggttgccgaaacagattggttttccaagatcaggattcctcagggaggactagcaccaacttctccaaccttcagcctggtctcttccaacccatttggcctcaaggaagatgctatggttggcagcggttcccggatgtggacgacaccaggggcaagtggaacatgttctccagccgtagctgcaggctccgaaaacacttctgacattccaatggctgaagcagtttcagatgaatttgcctttggaagcagctcatcaggtttagtgaatgcctggaaaggagagaggatccatgaagcttcttttggaacagatgatcttgagctcactcttgggagctccaagaccaggttgctccataagtgaatagtcaatggtcccttcaacaacatgaactttgactctgtttattctgtagaaaggctagaggagggaattaagatgagcagcaagtagttgttcttattacataccagaaaaaaaaaatagcagtttattttattcttttattttctcttagtttttattggttcctaagttatatatacagctttagctaggtgtcgggtggttttcaaccctttcatttggtcaatgttgttaaaacctttattactctgggaaagatcatcatatacctgtatggattggcttggtttgatattgaaaggaaaaaattactcgatttcaactgt

SEQ ID NO: 7329 - protein, 334 aa, Glycine max
  misc_feature (1)..(334): Ceres Seq. ID no. 15171298
MTSVARQPTWKERENNKRRERRRRAIAAKIFSGLRMYGNYKLPKHCDNNEVLKALCNEAGWTVEADGTTYRKGCKPPVERMDIVGGSAAASPCSSYHPSPCASYNPSPGSSCLPSPRASPFPPNPNADGNSLIPWLKNLSSGSSSASSSKLPQLYIPNGSISAPVTPPISSPSSRKPQIRADWEDQSNCPTAWGGLAYTFVPSSTPPSPGRQVAETDWFSKIRIPQGGLAPTSPTFSLVSSNPFGLKEDAMVGSGSRMWTTPGASGTCSPAVAAGSENTSDIPMAEAVSDEFAFGSSSSGLVNAWKGERIHEASFGTDDLELTLGSSKTRLLHK

SEQ ID NO: 7330 - protein, 299 aa, Glycine max
  misc_feature (1)..(299): Ceres Seq. ID no. 15171299
MYGNYKLPKHCDNNEVLKALCNEAGWTVEADGTTYRKGCKPPVERMDIVGGSAAASPCSSYHPSPCASYNPSPGSSCLPSPRASPFPPNPNADGNSLIPWLKNLSSGSSSASSSKLPQLYIPNGSISAPVTPPISSPSSRKPQIRADWEDQSNCPTAWGGLAYTFVPSSTPPSPGRQVAETDWFSKIRIPQGGLAPTSPTFSLVSSNPFGLKEDAMVGSGSRMWTTPGASGTCSPAVAAGSENTSDIPMAEAVSDEFAFGSSSSGLVNAWKGERIHEASFGTDDLELTLGSSKTRLLHK

SEQ ID NO: 7331 - protein, 254 aa, Glycine max
  misc_feature (1)..(254): Ceres Seq. ID no. 15171300
MDIVGGSAAASPCSSYHPSPCASYNPSPGSSCLPSPRASPFPPNPNADGNSLIPWLKNLSSGSSSASSSKLPQLYIPNGSISAPVTPPISSPSSRKPQIRADWEDQSNCPTAWGGLAYTFVPSSTPPSPGRQVAETDWFSKIRIPQGGLAPTSPTFSLVSSNPFGLKEDAMVGSGSRMWTTPGASGTCSPAVAAGSENTSDIPMAEAVSDEFAFGSSSSGLVNAWKGERIHEASFGTDDLELTLGSSKTRLLHK

SEQ ID NO: 7332 - DNA, 1672 bp, Glycine max
  misc_feature (1)..(1672): Ceres Seq. ID no. 15171337
tgcttgaaagcatcttgcatgcaccaatgtcattctttgacacaactccctctggcagaattttgagtcgtgtatctactgatatactttgggttgatatctcaattccaatgttggtgaacttcgtcatggttgcttacttctcagtaaccagcatcctcattgtaacatgccaaaatgcttgggaaacggtcttcctcttaatcccactgttctggctgaataactggtatcggaaatattaccttgcatcttctcgggaattgactcgccttgattccatcaccaaagctcctgtgattcaccatttttcagaaaccattgctggtgttatgaccatacgcggcttcagaaagcagaacgcattttgtcaagaaaatattgacaaagtgaatgctagtctgagaatggatttccacaacaacggtgctaatgaatggcttggttttcgcttggactatatgggagtgattttcctttgctttgccactatttttatgatctttctgccaagtgctattattaagccagaatatgttggtttgtctttgtcctatggcctggctctcagtagtctcttggcatttaccataagcatgacttgttctgttgagaacaaaatggtttcagttgagagaataaagcagttctccagccttccctcagaagctccatggaaaattgctgacaaaactcctcctcagaattggcccagtcaaggcattattgagttaaccaatttgcaggttcggtatcgaccaaatactcctctggttttcaagggaatctctctcaccattgaagcaggagaaaagattggtgttgttggtcgtacaggaagtgggaaatcaaccctcattcaggtgttatttaggttgattgagccttcagctgggaaaataactgttgatggaatcaacatttgcaccctgggccttcatgatgtgaggtctagatttggaattattcctcaagagcctgtcctctttcaaggaacagtacgaagcaacattgacccccttggactgtattcagaggaagaaatttggaagagtcttgagcgctgccaattgaaagatgtggtggctgcaaagccagagaaacttgaggctccagtggttgatggtggagacaattggagtgtggggcaaagacagcttctttgcttgggaaggatcatgctaaaaagcagcaaaatattgttcatggatgaggcaacagcatccgttgattcgcaaactgacgctgtgatacaaaagatcatccgtgaggactttgcggatcgtacaattatcagcattgctcatagaataccaacagtcatggattgtgacagggttttagtcattgatgcaggctatgcaaaggaatatgacaagccatcgcgtttgctagaaaggcattcactttttggagcattggttaaggagtactctaatagatcagctgaactagaggcttagattctaacaaggacccagttgatgcactcagtttccatccaacacacagcaccaaagtcaaaagacatgagtcgatgggtctattgagagatcaatatttttgagcattagttttgatgttttactctttcagtagtttaataattagactaggacaataggaaggaaattttaaaattttttactaataaaaaatcaagtttggctgt

SEQ ID NO: 7333 - protein, 486 aa, Glycine max
  misc_feature (1)..(486): Ceres Seq. ID no. 15171338
LESILHAPMSFFDTTPSGRILSRVSTDILWVDISIPMLVNFVMVAYFSVTSILIVTCQNAWETVFLLIPLFWLNNWYRKYYLASSRELTRLDSITKAPVIHHFSETIAGVMTIRGFRKQNAFCQENIDKVNASLRMDFHNNGANEWLGFRLDYMGVIFLCFATIFMIFLPSAIIKPEYVGLSLSYGLALSSLLAFTISMTCSVENKMVSVERIKQFSSLPSEAPWKIADKTPPQNWPSQGIIELTNLQVRYRPNTPLVFKGISLTIEAGEKIGVVGRTGSGKSTLIQVLFRLIEPSAGKITVDGINICTLGLHDVRSRFGIIPQEPVLFQGTVRSNIDPLGLYSEEEIWKSLERCQLKDVVAAKPEKLEAPVVDGGDNWSVGQRQLLCLGRIMLKSSKILFMDEATASVDSQTDAVIQKIIREDFADRTIISIAHRIPTVMDCDRVLVIDAGYAKEYDKPSRLLERHSLFGALVKEYSNRSAELEA

SEQ ID NO: 7334 - protein, 478 aa, Glycine max
  misc_feature (1)..(478): Ceres Seq. ID no. 15171339
MSFFDTTPSGRILSRVSTDILWVDISIPMLVNFVMVAYFSVTSILIVTCQNAWETVFLLIPLFWLNNWYRKYYLASSRELTRLDSITKAPVIHHFSETIAGVMTIRGFRKQNAFCQENIDKVNASLRMDFHNNGANEWLGFRLDYMGVIFLCFATIFMIFLPSAIIKPEYVGLSLSYGLALSSLLAFTISMTCSVENKMVSVERIKQFSSLPSEAPWKIADKTPPQNWPSQGIIELTNLQVRYRPNTPLVFKGISLTIEAGEKIGVVGRTGSGKSTLIQVLFRLIEPSAGKITVDGINICTLGLHDVRSRFGIIPQEPVLFQGTVRSNIDPLGLYSEEEIWKSLERCQLKDVVAAKPEKLEAPVVDGGDNWSVGQRQLLCLGRIMLKSSKILFMDEATASVDSQTDAVIQKIIREDFADRTIISIAHRIPTVMDCDRVLVIDAGYAKEYDKPSRLLERHSLFGALVKEYSNRSAELEA

SEQ ID NO: 7335 - protein, 450 aa, Glycine max
  misc_feature (1)..(450): Ceres Seq. ID no. 15171340
MLVNFVMVAYFSVTSILIVTCQNAWETVFLLIPLFWLNNWYRKYYLASSRELTRLDSITKAPVIHHFSETIAGVMTIRGFRKQNAFCQENIDKVNASLRMDFHNNGANEWLGFRLDYMGVIFLCFATIFMIFLPSAIIKPEYVGLSLSYGLALSSLLAFTISMTCSVENKMVSVERIKQFSSLPSEAPWKIADKTPPQNWPSQGIIELTNLQVRYRPNTPLVFKGISLTIEAGEKIGVVGRTGSGKSTLIQVLFRLIEPSAGKITVDGINICTLGLHDVRSRFGIIPQEPVLFQGTVRSNIDPLGLYSEEEIWKSLERCQLKDVVAAKPEKLEAPVVDGGDNWSVGQRQLLCLGRIMLKSSKILFMDEATASVDSQTDAVIQKIIREDFADRTIISIAHRIPTVMDCDRVLVIDAGYAKEYDKPSRLLERHSLFGALVKEYSNRSAELEA

SEQ ID NO: 7336 - DNA, 1546 bp, Glycine max
  misc_feature (1)..(1546): Ceres Seq. ID no. 15171355
agcattaacatgtacattgagtattccccttcccaatctcaaacggcaaaggtgccacatacatttcctgcttctcacctgatatttttccaatttgtttaatcttcctttcttttctctacccattttcttcttcttcttctcccctccttttttccttcttctaccagcttctagaacaaggatgtgcccatttcctgcttacttgaatctcaaacacaaaactgaatctttgacaacaatttcaagattttcccaccaacccaccacagcaaagcacctggtcgcttcaaagatctgatttttagttctttggggtggggtttctaccgtttttccttccaccattggcacctgcagcagaaccaaattttgaacaaccagaatggtcaacactttatggtcactttgtgtggtttaaacttgttggattcttggtgggtttagtttaatttttgactgaacgaatgagatcttgatgagggttggaaccagtttccttgcactgctctcactgttgccactgcttctttctcttcaattttcaagtgctcagcttccagctgacactgacaacatctcatcacgcacccttgatgccattctccaagattgcgcctttaaggcatttttgaggccaaaaactggggtaccctatgatggcaaagtgcccagaagcctaaatgggattagagtttcagcaatgaggctcaggagtggtagtttgaggacaagaggtgttgaaagctataaagagtttcagatcccaattggggtttttgaacagccttatgtagagaggctggtttttgtgtaccataacttaggcaattggtctgagaagttttatcctttgcctggttacatatatttggctcctgttttaggtctaatgtcatatagtggtgccaatttgtctgattctgagttgcctgaattggacataagagcttctgataagccaattttgatcaagttccctcatgtggaatcagcaccattagggtcagtgccaacgtgtgtgtactttgatctacatggttcagtgcaatttgacatcctattacatgggaatgtttgttcaactttccaacaagggcacttctctattgttgtggagtctaatgccccttccccagcacctgctgctgttgctgttgctgctgatgttgggagaagtggtagtgggaggaacaattccatggtgtggataattgttgcatctttggttggtggatgcttcttgttgattatgttgagtttattggttgctaaagtgaggagaaccagacaagggatgaagatccagcaattggaatgggcagctgagagcaatgaaactttgcagattgcatctattgggggcaccaaagcaccattggcaatagggactcgcacaagaccaaccattgaaaatgattacataccttagatttgagggattcttgtaggaccaatttttttcttttttttttcttcttgcttggtattgtaatttttgtgttcatacttgataatgagttaaaaaaaaattctttccttgtcc

SEQ ID NO: 7337 - protein, 317 aa, Glycine max
  misc_feature (1)..(317): Ceres Seq. ID no. 15171356
MRVGTSFLALLSLLPLLLSLQFSSAQLPADTDNISSRTLDAILQDCAFKAFLRPKTGVPYDGKVPRSLNGIRVSAMRLRSGSLRTRGVESYKEFQIPIGVFEQPYVERLVFVYHNLGNWSEKFYPLPGYIYLAPVLGLMSYSGANLSDSELPELDIRASDKPILIKFPHVESAPLGSVPTCVYFDLHGSVQFDILLHGNVCSTFQQGHFSIVVESNAPSPAPAAVAVAADVGRSGSGRNNSMVWIIVASLVGGCFLLIMLSLLVAKVRRTRQGMKIQQLEWAAESNETLQIASIGGTKAPLAIGTRTRPTIENDYIP

SEQ ID NO: 7338 - protein, 242 aa, Glycine max
  misc_feature (1)..(242): Ceres Seq. ID no. 15171357
MRLRSGSLRTRGVESYKEFQIPIGVFEQPYVERLVFVYHNLGNWSEKFYPLPGYIYLAPVLGLMSYSGANLSDSELPELDIRASDKPILIKFPHVESAPLGSVPTCVYFDLHGSVQFDILLHGNVCSTFQQGHFSIVVESNAPSPAPAAVAVAADVGRSGSGRNNSMVWIIVASLVGGCFLLIMLSLLVAKVRRTRQGMKIQQLEWAAESNETLQIASIGGTKAPLAIGTRTRPTIENDYIP

SEQ ID NO: 7339 - protein, 179 aa, Glycine max
  misc_feature (1)..(179): Ceres Seq. ID no. 15171358
MSYSGANLSDSELPELDIRASDKPILIKFPHVESAPLGSVPTCVYFDLHGSVQFDILLHGNVCSTFQQGHFSIVVESNAPSPAPAAVAVAADVGRSGSGRNNSMVWIIVASLVGGCFLLIMLSLLVAKVRRTRQGMKIQQLEWAAESNETLQIASIGGTKAPLAIGTRTRPTIENDYIP

SEQ ID NO: 7340 - DNA, 1223 bp, Glycine max
  misc_feature (1)..(1223): Ceres Seq. ID no. 15171370
actccttcctcttcctctctctcgtccattttagttgtaagactaagatctcatcttagattccattttgtctcttcattgcccccaaaataactttattttctctgaattattgcctacagcaactttgaataattctccttcgtatcaagtcttcctcatcttcaccacctttttatatttatgtgtctaagaacataaactaaaaaaccaaggcgagtgaaagaaaaaaaatgtcaggtgtgtctctagcagtgtctggtccaccagcagcaacagtggctgaagcagcaggtacaaagcctaaacgaagaacagaacaggcaccaatgggtggcatgatgggttcactgcgcgtgatagaacttcagctggtggccttcatcttggtgttctcagcaagtggcctcgtcccactccttgatctagtgttccctgcattcgcctctgcatacatcttggcactttcacaattcgcatttccatcggcgtcttcgtcggggactgagatcttcaaagggagcagattgttccgaatgtatgttgtttttggcaccaccgtggggctgttcttgccgctggcttacgtgcttggtgggtttgcaagaggggatgagcatgcagtgcgttctgccaccccgcacttgttcttgctatcgtttcagatactcactgagaacattattggtggtttgtctctgttttcgccacccgtgagggcgttggtgccaatcatctacacaattcggaggatctttgtggatattgattggattcatgatgtctggctcaacaagactttgcctgtcaatgccaaatttcaggacttggcatggtattggttcggaaagggtctggcagtggccaatctggcttatttctccattaatctatttgggttcttgatacccaggttccttccaagagcttttgagaggtatttccaagagaagggagagatctataccaagtcagcagaggataaaagatctgtggttgtcaacagaacccaattatcagaaaagaagacagattaagagctatagccaattttgacttcacttgcaattttaaacactttcagcattttttttccttagaaaatagtaatgaatgtgtatgatgatatgtgagcctggacttaaaaatctggctctccgttacattatgaaactatatatggcttttggataaattttatgtatcatacaggttaattcaat

SEQ ID NO: 7341 - protein, 267 aa, Glycine max
  misc_feature (1)..(267): Ceres Seq. ID no. 15171371
MSGVSLAVSGPPAATVAEAAGTKPKRRTEQAPMGGMMGSLRVIELQLVAFILVFSASGLVPLLDLVFPAFASAYILALSQFAFPSASSSGTEIFKGSRLFRMYVVFGTTVGLFLPLAYVLGGFARGDEHAVRSATPHLFLLSFQILTENIIGGLSLFSPPVRALVPIIYTIRRIFVDIDWIHDVWLNKTLPVNAKFQDLAWYWFGKGLAVANLAYFSINLFGFLIPRFLPRAFERYFQEKGEIYTKSAEDKRSVVVNRTQLSEKKTD

SEQ ID NO: 7342 - protein, 235 aa, Glycine max
  misc_feature (1)..(235): Ceres Seq. ID no. 15171372
MGGMMGSLRVIELQLVAFILVFSASGLVPLLDLVFPAFASAYILALSQFAFPSASSSGTEIFKGSRLFRMYVVFGTTVGLFLPLAYVLGGFARGDEHAVRSATPHLFLLSFQILTENIIGGLSLFSPPVRALVPIIYTIRRIFVDIDWIHDVWLNKTLPVNAKFQDLAWYWFGKGLAVANLAYFSINLFGFLIPRFLPRAFERYFQEKGEIYTKSAEDKRSVVVNRTQLSEKKTD

SEQ ID NO: 7343 - protein, 232 aa, Glycine max
  misc_feature (1)..(232): Ceres Seq. ID no. 15171373
MMGSLRVIELQLVAFILVFSASGLVPLLDLVFPAFASAYILALSQFAFPSASSSGTEIFKGSRLFRMYVVFGTTVGLFLPLAYVLGGFARGDEHAVRSATPHLFLLSFQILTENIIGGLSLFSPPVRALVPIIYTIRRIFVDIDWIHDVWLNKTLPVNAKFQDLAWYWFGKGLAVANLAYFSINLFGFLIPRFLPRAFERYFQEKGEIYTKSAEDKRSVVVNRTQLSEKKTD

SEQ ID NO: 7344 - DNA, 1332 bp, Glycine max
  misc_feature (1)..(1332): Ceres Seq. ID no. 15171378
aacattgttttcaattgtagaacctgaaaggaaggatatggtcattgtaaggtcactctcaatattattttcccttcccattgcttacactctctcttcttgtaatttaaatcaaaccttccaccccaattctcccccagagctcagaatcttcagctctacttcttcttccagaaaacaaagagatattcattcaaaaatcacctatctcatccctctcttgacccctccaacatgaagaacactaacagcaacacaaaactaatccttctccacccatatatccagaaacaaggaagctcaaaccgcttatggcttctagccttcatatccttcttcaccttagttttccttgccacactcatttacacaagagacacaacctcatctaccactaccactacctcttccacccctttatctagtttcaccaacacccttttatcatccactgtaataaacaccctcctccactatgcctcaaaatccaacgacacctttcacatgccccactcagacctcaaaaccatctccgacatgctccgaaagtgtccctcgccatgcaacttcctcgtcttcggcctcacccacgagaccctcctttggaaagccctcaaccacaacggaagaaccgtcttcatcgacgaaaaccggtactacgccgcgtatttcgaagaaaaacaccccgaaatcgatgcttacgacgtggcatacacgactaaaaggagtgagttgaaggagctgatagcttcggcgaaagaacaagtaggaaatgaatgcaggccagtgcagaatcttctgttttctgagtgcaagttgggtctcaatgaccttccgaaccatgtttatgaagtggattgggatgtgatattggtggatggaccgaggggggattggccggacgctcccggaagaatgtcgccgatcttcaccgccggcgttcttgcccggagcaaaaagggtgggaacccgaagacgcatgtgtttgtgcatgacttctcggggaaagtggagaaggtttctgggaatgagtttctgtgcaaggaaaatttggtggaggctactcatagtttgggacactatgtgctggaaaaaatggacgagagtagcgttcagtattgtaagaatcactcatcaggattcgcttcttcttcgtcttagttggtgtctttaatgttgctctctatatatatcgaccatctgggtatttatatagttgcactgtttacttctggagcttgtaaaagataattctttctttctttcttctttttctcgtttttcgttttctggcactgaagattgtaatttcttcaagaaggtcatgcttcc

SEQ ID NO: 7345 - protein, 308 aa, Glycine max
  misc_feature (1)..(308): Ceres Seq. ID no. 15171379
MKNTNSNTKLILLHPYIQKQGSSNRLWLLAFISFFTLVFLATLIYTRDTTSSTTTTTSSTPLSSFTNTLLSSTVINTLLHYASKSNDTFHMPHSDLKTISDMLRKCPSPCNFLVFGLTHETLLWKALNHNGRTVFIDENRYYAAYFEEKHPEIDAYDVAYTTKRSELKELIASAKEQVGNECRPVQNLLFSECKLGLNDLPNHVYEVDWDVILVDGPRGDWPDAPGRMSPIFTAGVLARSKKGGNPKTHVFVHDFSGKVEKVSGNEFLCKENLVEATHSLGHYVLEKMDESSVQYCKNHSSGFASSSS

SEQ ID NO: 7346 - protein, 218 aa, Glycine max
  misc_feature (1)..(218): Ceres Seq. ID no. 15171380
MPHSDLKTISDMLRKCPSPCNFLVFGLTHETLLWKALNHNGRTVFIDENRYYAAYFEEKHPEIDAYDVAYTTKRSELKELIASAKEQVGNECRPVQNLLFSECKLGLNDLPNHVYEVDWDVILVDGPRGDWPDAPGRMSPIFTAGVLARSKKGGNPKTHVFVHDFSGKVEKVSGNEFLCKENLVEATHSLGHYVLEKMDESSVQYCKNHSSGFASSSS

SEQ ID NO: 7347 - protein, 207 aa, Glycine max
  misc_feature (1)..(207): Ceres Seq. ID no. 15171381
MLRKCPSPCNFLVFGLTHETLLWKALNHNGRTVFIDENRYYAAYFEEKHPEIDAYDVAYTTKRSELKELIASAKEQVGNECRPVQNLLFSECKLGLNDLPNHVYEVDWDVILVDGPRGDWPDAPGRMSPIFTAGVLARSKKGGNPKTHVFVHDFSGKVEKVSGNEFLCKENLVEATHSLGHYVLEKMDESSVQYCKNHSSGFASSSS

SEQ ID NO: 7348 - DNA, 1497 bp, Glycine max
  misc_feature (1)..(1497): Ceres Seq. ID no. 15171394
gagtttgagtttgaagtgggagttggtgctgtggtttcctatgttgaggaggttgtgatgcagatgtctgttggtcagtacgcttatttctctacaaacttactttctactgagttgatttttgctgcttcagctggtgattcagtcaaaatgctgtcctcgttaatatctaaaaaatgttgtatggaatatgaaataagtttgatcagagttgcagaacctcctgaggaaagaatggagcaggctcttttcagccctccactttcaaagcaacgagtggaatttgcagtgcaacaaattctagaatcccatgcttctactttggtatacaaaatattttcatctttggttaatctgaattgtaaatttgatgttctctttcatcccagattgattttggatgtggttctggaagccttttggaagcattgttaaattatccaacatctttaaagaaaatggctggtgtagatatttcacagaagggtcttagccgtgctgcaaaggttcttaactcaaaattagtcacaaattcagatgctggtgggcacttgacaagcatcaaatcagtaattctttatgaaggttcaattacaaattttggctctcagttgcatggatttgatatcggtacttgtttagaggtgattgaacatatggatgaagatcaagcttgtctatttggggatgtggcattaagtttttttcgtccaaggattctcattgtttcaacgccaaattttgaatacaatgtagtactccagaagtcgagtcctccaacccaagaacaagaggaatcagacgagaaaaccctcttacaatcatgtaaatttcgtaatcatgatcacaaatttgagtggaccagagagcagttcacacaatgggcatctgacttagctgctcggcacaattacaatgtggagtttggtggggtcggtggttctgctgatgttgaacccggctatgcttcacagattgctgtgtttaaaagggattggaaacttgaagatgatgtactaaagcatgctgatgaacaccattatagtataatatgggaatggaatagtaaaaaagaataaattctttgaaactattcagtgagactcgtagagttcttttaggtaatcggattgctggtgcttttgaaatcagacaagcaaagatagataggatgctaggagaaaagagctagagaattgagaggcttaggcagggcactgattagagaaaaaggaaatagtttttttttttggtcagccagaaaaggaaatagttgataatagtattttgtcattcgttgcatttctcaatattattagcatattgcatctacattataggttcaataaagaatatatgatttaaaattaactttgaaagagtatattatgttaagcaaatggtaggttcgcattttttgactgaataggtacgcattttatgtagctattattatgaataatttaatatttattactagtcacacttcctttaatc

SEQ ID NO: 7349 - protein, 206 aa, Glycine max
  misc_feature (1)..(206): Ceres Seq. ID no. 15171395
MAGVDISQKGLSRAAKVLNSKLVTNSDAGGHLTSIKSVILYEGSITNFGSQLHGFDIGTCLEVIEHMDEDQACLFGDVALSFFRPRILIVSTPNFEYNVVLQKSSPPTQEQEESDEKTLLQSCKFRNHDHKFEWTREQFTQWASDLAARHNYNVEFGGVGGSADVEPGYASQIAVFKRDWKLEDDVLKHADEHHYSIIWEWNSKKE

SEQ ID NO: 7350 - protein, 144 aa, Glycine max
  misc_feature (1)..(144): Ceres Seq. ID no. 15171396
EFEFEVGVGAVVSYVEEVVMQMSVGQYAYFSTNLLSTELIFAASAGDSVKMLSSLISKKCCMEYEISLIRVAEPPEERMEQALFSPPLSKQRVEFAVQQILESHASTLVYKIFSSLVNLNCKFDVLFHPRLILDVVLEAFWKHC

SEQ ID NO: 7351 - protein, 140 aa, Glycine max
  misc_feature (1)..(140): Ceres Seq. ID no. 15171397
MDEDQACLFGDVALSFFRPRILIVSTPNFEYNVVLQKSSPPTQEQEESDEKTLLQSCKFRNHDHKFEWTREQFTQWASDLAARHNYNVEFGGVGGSADVEPGYASQIAVFKRDWKLEDDVLKHADEHHYSIIWEWNSKKE

SEQ ID NO: 7352 - DNA, 1591 bp, Glycine max
  misc_feature (1)..(1591): Ceres Seq. ID no. 15171414
gaagatcctctgctattattacttcatacttctcgatggatgagagtaaaacagttcacatagctgtagttcccagcgcaggcttcagccacctgatcccaatcctcgagttctccaagcgcttagtgaacctccaccctcacttgcatgtcacatgcataatccccacacatggtccacccccaagtgcctcaaaatccatccttgaaacccttccctcccaaaacatcacctccactttcctccccccagttgacctgcctcaagaccttgacacagtttcccaaatccaactcacagtcaccctctccctccctctcatccaccaaaccctcaagtccctctcttccaccacaccctctcttgtggcacttgtggttgacacttttgctgctgaggtacttgactttgccaaagagttcaacctcttggcctatgtgtacttccccttggcagccaccactgtttccttgcacttccacatgctcaagttggatgaggagacatcatgtgagtatagggacttggatggccctattgagatgaaagggtgcgtgcctttccatggtaaggatctttactccccagctcaagataggtctagcagggcttataaaatgatgctgcaaaggataaaaaggttcttttttgttgatggggtttttgtgaatagcttcttggagatggagagtggtgtcataagggcattggagaaaggtgggaggtggaaatacaagtaccctcctgtgtatgctgttggaccaattgtgcaaagtggggtagggttcggcggtggtggtggtagtaatgggttggagtgtgttgaatggttggatagacagaaagattgttctgttttgtttgtttgttttgggagtggggggacattgtcacaggaacagatggatgagttggctttgggtttggaattgagtggtcataggtttttgtgggtattgaggccaccaagtagtgtggctaatgctgcttatcttggtggtgctaatgatgatggtgttgaccctttgaagtttttgccatctgggttcttggagaggaccaaggggcagggcttggttgtgcctttgtgggcaccccaggttcaggtgcttggtcacaggtcagttggggggttcttgagtcactgtgggtggaattcgacgctcgagagtgtgctgcagggtgtgcctctgatcgcgtggcccctgtttgcagagcagaggatgaacgcaattctgctttgtgaggggctcaaagtgggactgtggcctagagtgaatgaaaatggcttggtggaaagaggggagatcgctaaggttataaagtgtctgatgggtggggaagaagggggcgaattgcgccgaagaatgacggaattgaaagaggctgccactaatgcaatcaaagaaaacgggtcttctacgaaggcccttgctcaggcagtactcaagtggaaaaaattggcataggaaaacatgttttatagaaagattttgtcaggatctttgtttttgaattctgcttcgcaatgattgtcaatcctcttgtgaaaccttggcacaagtgggtaataaatgtgattttctgatct

SEQ ID NO: 7353 - protein, 488 aa, Glycine max
  misc_feature (1)..(488): Ceres Seq. ID no. 15171415
RSSAIITSYFSMDESKTVHIAVVPSAGFSHLIPILEFSKRLVNLHPHLHVTCIIPTHGPPPSASKSILETLPSQNITSTFLPPVDLPQDLDTVSQIQLTVTLSLPLIHQTLKSLSSTTPSLVALVVDTFAAEVLDFAKEFNLLAYVYFPLAATTVSLHFHMLKLDEETSCEYRDLDGPIEMKGCVPFHGKDLYSPAQDRSSRAYKMMLQRIKRFFFVDGVFVNSFLEMESGVIRALEKGGRWKYKYPPVYAVGPIVQSGVGFGGGGGSNGLECVEWLDRQKDCSVLFVCFGSGGTLSQEQMDELALGLELSGHRFLWVLRPPSSVANAAYLGGANDDGVDPLKFLPSGFLERTKGQGLVVPLWAPQVQVLGHRSVGGFLSHCGWNSTLESVLQGVPLIAWPLFAEQRMNAILLCEGLKVGLWPRVNENGLVERGEIAKVIKCLMGGEEGGELRRRMTELKEAATNAIKENGSSTKALAQAVLKWKKLA

SEQ ID NO: 7354 - protein, 477 aa, Glycine max
  misc_feature (1)..(477): Ceres Seq. ID no. 15171416
MDESKTVHIAVVPSAGFSHLIPILEFSKRLVNLHPHLHVTCIIPTHGPPPSASKSILETLPSQNITSTFLPPVDLPQDLDTVSQIQLTVTLSLPLIHQTLKSLSSTTPSLVALVVDTFAAEVLDFAKEFNLLAYVYFPLAATTVSLHFHMLKLDEETSCEYRDLDGPIEMKGCVPFHGKDLYSPAQDRSSRAYKMMLQRIKRFFFVDGVFVNSFLEMESGVIRALEKGGRWKYKYPPVYAVGPIVQSGVGFGGGGGSNGLECVEWLDRQKDCSVLFVCFGSGGTLSQEQMDELALGLELSGHRFLWVLRPPSSVANAAYLGGANDDGVDPLKFLPSGFLERTKGQGLVVPLWAPQVQVLGHRSVGGFLSHCGWNSTLESVLQGVPLIAWPLFAEQRMNAILLCEGLKVGLWPRVNENGLVERGEIAKVIKCLMGGEEGGELRRRMTELKEAATNAIKENGSSTKALAQAVLKWKKLA

SEQ ID NO: 7355 - protein, 328 aa, Glycine max
  misc_feature (1)..(328): Ceres Seq. ID no. 15171417
MLKLDEETSCEYRDLDGPIEMKGCVPFHGKDLYSPAQDRSSRAYKMMLQRIKRFFFVDGVFVNSFLEMESGVIRALEKGGRWKYKYPPVYAVGPIVQSGVGFGGGGGSNGLECVEWLDRQKDCSVLFVCFGSGGTLSQEQMDELALGLELSGHRFLWVLRPPSSVANAAYLGGANDDGVDPLKFLPSGFLERTKGQGLVVPLWAPQVQVLGHRSVGGFLSHCGWNSTLESVLQGVPLIAWPLFAEQRMNAILLCEGLKVGLWPRVNENGLVERGEIAKVIKCLMGGEEGGELRRRMTELKEAATNAIKENGSSTKALAQAVLKWKKLA

SEQ ID NO: 7356 - DNA, 1854 bp, Glycine max
  misc_feature (1)..(1854): Ceres Seq. ID no. 15171438
agtttccattttccaatcaaagtctcttattcctctttgtattaattttttcctcttctcccttttcattttccggtggcaattcaaatcgcactctttgcgtttgtgctgatccactgtgaatgaaaaaaacaaaactaagagagagaagagagaaaaattacaacaacattattatttattgtaactaattagctaattaattggttattaaaaattataaggccatgtttggcgaaaccgttccgcgaccacagttcatgcaatcggagccgagaatgtcgacgacggaggcgctcaccgacgacgagttcacgatgcaaagcagtagcacggcgtcaccgatgagcccttactactacgagcagggaaggttaagcggcgaaggctcgccaatgacgatgtcaccgtggaaccagacaacgaactccccattctccaaacctcaatggtctcaagaacaaaacagcgtcccgcaaaacgcgctcgtaggttctcttgtccgagaagagggacacatctattcgcttgctgcttccggcgatcttctgtacaccggttccgacagcaagaatattcgtgtctggaagaacctcgaggaatattccgggttcaaatccaacagtggtttggtgaaaaccataatattgtctggtcagaagatcttcaccggtcaccaagacggcaaaatccgcgtctggaaggtctcccctaagaaccctagcttacacaaacgtgccggcacgttgccaacgcttaaagacatcttcaagagctcaattaagcccagcaactacgtcgaggttcgacgacacaaaacggcgttatggatcagacactccgatgccgtttcgtgtttgagcctttcagcagacaaaacgtatttatactccgcatcgtgggacaggacaatcaaggtgtggaggatttcagactccaaatgcttggaatcaatccacgcccacgacgacgcggtgaacgccgtcgtgtgcggggacgggggcgtgatgttttccggctcggcggacggcaccgtcaaggtgtggcggcgggagccgcgagggaaaggcctgaagcacgccccggtgaagactctgctgaagcaggagtgcgcggtgacggcgctggcgatggacgcggcggggggatcgatggtgtactgcggcgcctccgacggactggtgaacttttgggaaagcgacaagaattacgcgcacggtggggttttgaagggccacaagctcgcggtgctgtgcctcaccgcagcggggacgttagtgttcagcggttccgcggataagaccatatgcgtgtggaaacgcgagggtttgattcacacgtgcatgtcggttctcacgggccacgacggtccggtgaagtgcctcgccgtggaggaggaccgcaaagccgccgcgaaaggtgaccgggaacggctttggagtttgtacagtgggagtttggataagtcggtgaagatttggagtgtttccgaatcaatgaataatgataataataataacaatagtaatgatcaggtgaggcaccaccgcatggcatctgatgcggactcgttgccttctgtatcagatagtagtttctcttcgggcaggaccaatgggaggaactgagaatgggccacgtgtctttatgagatgattgagcatttgtgtttttttttttttttttttttgtgattgattgattgattgtgagagattgtggtcgaagatgtttatgaaatttgatgtaatataatgtaatttgtgtatgaatgaacggatgaagtagttaaagaaatgactatatatatggttaatggttttcttgaatagaaatatcagattttgatgaatt

SEQ ID NO: 7357 - protein, 466 aa, Glycine max
  misc_feature (1)..(466): Ceres Seq. ID no. 15171439
MFGETVPRPQFMQSEPRMSTTEALTDDEFTMQSSSTASPMSPYYYEQGRLSGEGSPMTMSPWNQTTNSPFSKPQWSQEQNSVPQNALVGSLVREEGHIYSLAASGDLLYTGSDSKNIRVWKNLEEYSGFKSNSGLVKTIILSGQKIFTGHQDGKIRVWKVSPKNPSLHKRAGTLPTLKDIFKSSIKPSNYVEVRRHKTALWIRHSDAVSCLSLSADKTYLYSASWDRTIKVWRISDSKCLESIHAHDDAVNAVVCGDGGVMFSGSADGTVKVWRREPRGKGLKHAPVKTLLKQECAVTALAMDAAGGSMVYCGASDGLVNFWESDKNYAHGGVLKGHKLAVLCLTAAGTLVFSGSADKTICVWKREGLIHTCMSVLTGHDGPVKCLAVEEDRKAAAKGDRERLWSLYSGSLDKSVKIWSVSESMNNDNNNNNSNDQVRHHRMASDADSLPSVSDSSFSSGRTNGRN

SEQ ID NO: 7358 - protein, 455 aa, Glycine max
  misc_feature (1)..(455): Ceres Seq. ID no. 15171440
MQSEPRMSTTEALTDDEFTMQSSSTASPMSPYYYEQGRLSGEGSPMTMSPWNQTTNSPFSKPQWSQEQNSVPQNALVGSLVREEGHIYSLAASGDLLYTGSDSKNIRVWKNLEEYSGFKSNSGLVKTIILSGQKIFTGHQDGKIRVWKVSPKNPSLHKRAGTLPTLKDIFKSSIKPSNYVEVRRHKTALWIRHSDAVSCLSLSADKTYLYSASWDRTIKVWRISDSKCLESIHAHDDAVNAVVCGDGGVMFSGSADGTVKVWRREPRGKGLKHAPVKTLLKQECAVTALAMDAAGGSMVYCGASDGLVNFWESDKNYAHGGVLKGHKLAVLCLTAAGTLVFSGSADKTICVWKREGLIHTCMSVLTGHDGPVKCLAVEEDRKAAAKGDRERLWSLYSGSLDKSVKIWSVSESMNNDNNNNNSNDQVRHHRMASDADSLPSVSDSSFSSGRTNGRN

SEQ ID NO: 7359 - protein, 449 aa, Glycine max
  misc_feature (1)..(449): Ceres Seq. ID no. 15171441
MSTTEALTDDEFTMQSSSTASPMSPYYYEQGRLSGEGSPMTMSPWNQTTNSPFSKPQWSQEQNSVPQNALVGSLVREEGHIYSLAASGDLLYTGSDSKNIRVWKNLEEYSGFKSNSGLVKTIILSGQKIFTGHQDGKIRVWKVSPKNPSLHKRAGTLPTLKDIFKSSIKPSNYVEVRRHKTALWIRHSDAVSCLSLSADKTYLYSASWDRTIKVWRISDSKCLESIHAHDDAVNAVVCGDGGVMFSGSADGTVKVWRREPRGKGLKHAPVKTLLKQECAVTALAMDAAGGSMVYCGASDGLVNFWESDKNYAHGGVLKGHKLAVLCLTAAGTLVFSGSADKTICVWKREGLIHTCMSVLTGHDGPVKCLAVEEDRKAAAKGDRERLWSLYSGSLDKSVKIWSVSESMNNDNNNNNSNDQVRHHRMASDADSLPSVSDSSFSSGRTNGRN

SEQ ID NO: 7360 - DNA, 1714 bp, Glycine max
  misc_feature (1)..(1714): Ceres Seq. ID no. 15171442
gaatgaatagggagtgttggcgaagtagatctgaaaggtgaagaatttgagtaggtaaaacccaaagttttcaactttgaatcaaagggtcatcaaatgctttaacgttttggttttttctgccttccgacactctaagaaaatgccgcacccttctttccacaagcttcttctaccctccactgtccaacccaaccaacaactgaggcttccggataattttatgaggaaatatgggggtgaactctctccaattgttaccctctctgttcctgatggtagtgtctggcatgtaggattgaaaaaagcagacaacaagtattgtttccttgatggttggaaagagtttgttcaacgctattccattggtgttggatacttgttggtattcagatacgaaggaaagtcatctttcaatgtccatatttttaatttggctacttctgagataaactatcaatcagtcacacgaagcagtaatgaagggcttcacttcacaaattgtcttaaattttttgaagaaatggaaggtgaagattccattgaaatctcggattcatcaccctcccacctttcacccagttcattgcaaaatcaagctcttgctggatcagtagataaaatgatgcccggaaagagttataatacacctccagcattgcagaatctgttcaatggatctaaacttaatagcataaactggggagaaggtggtaatgcccattcttcaagaagtgccaattcactagataatcgattgaccagagacataggacttcagtttaatgcagtcgagtttaaaagatctactgaagaattgaaattgcgtgcttccatcgaggaaaggatgaaaaaaactacaagaaagaagcgaaaatcagatggccaggaaccctctgctgggcacgaagaggaggtagaaatgcgctttagattttatgaaagtgcttctgcaagaaaaagaactgtgacagctgaagaaagagagagggtcatcaacgaagcaaaagcatttgaaccatctaatcctttctgtcgagttgtcctgcggccctcatatttatataggggatgcataatgtatctgccatcatgctttgcagagaagcatttgaatggagtttcagggtttattaaacttcagatctctaatggtagacagtggccggttcgctgcctttataaaggaggtagagccaagttaagccaggggtggtttgaattttcattagagaacaatttaggggaaggtgatgtctgtgtgtttgagctgcttagaatgaaagaagtagtgctgcaagttaccatctttcatgttaccgaggatgtgggactgttgagccctcctttgcagcataaccaaaacatgacctcagctaaactgttaagcactcccttgcagcaacacctcacttcaactaaaatggttagaaattagcagcaggttcattctcgatagctcaactgtatcaaaataaccccttgcttctgtgtggaacttagatgctttttctgtccaaaatttcagggtgacttgagtggaacatagttatagtttttataccttttctttcccttttgacttgggttgtaaatagattgttcaatctagctgattaggaaccgagtcaatgcttgtcctattgtgtatcttggttttaattttttttttttttctgtttgaagataaattatatagcttcttctgcctgac

SEQ ID NO: 7361 - protein, 431 aa, Glycine max
  misc_feature (1)..(431): Ceres Seq. ID no. 15171443
MPHPSFHKLLLPSTVQPNQQLRLPDNFMRKYGGELSPIVTLSVPDGSVWHVGLKKADNKYCFLDGWKEFVQRYSIGVGYLLVFRYEGKSSFNVHIFNLATSEINYQSVTRSSNEGLHFTNCLKFFEEMEGEDSIEISDSSPSHLSPSSLQNQALAGSVDKMMPGKSYNTPPALQNLFNGSKLNSINWGEGGNAHSSRSANSLDNRLTRDIGLQFNAVEFKRSTEELKLRASIEERMKKTTRKKRKSDGQEPSAGHEEEVEMRFRFYESASARKRTVTAEERERVINEAKAFEPSNPFCRVVLRPSYLYRGCIMYLPSCFAEKHLNGVSGFIKLQISNGRQWPVRCLYKGGRAKLSQGWFEFSLENNLGEGDVCVFELLRMKEVVLQVTIFHVTEDVGLLSPPLQHNQNMTSAKLLSTPLQQHLTSTKMVRN

SEQ ID NO: 7362 - protein, 404 aa, Glycine max
  misc_feature (1)..(404): Ceres Seq. ID no. 15171444
MRKYGGELSPIVTLSVPDGSVWHVGLKKADNKYCFLDGWKEFVQRYSIGVGYLLVFRYEGKSSFNVHIFNLATSEINYQSVTRSSNEGLHFTNCLKFFEEMEGEDSIEISDSSPSHLSPSSLQNQALAGSVDKMMPGKSYNTPPALQNLFNGSKLNSINWGEGGNAHSSRSANSLDNRLTRDIGLQFNAVEFKRSTEELKLRASIEERMKKTTRKKRKSDGQEPSAGHEEEVEMRFRFYESASARKRTVTAEERERVINEAKAFEPSNPFCRVVLRPSYLYRGCIMYLPSCFAEKHLNGVSGFIKLQISNGRQWPVRCLYKGGRAKLSQGWFEFSLENNLGEGDVCVFELLRMKEVVLQVTIFHVTEDVGLLSPPLQHNQNMTSAKLLSTPLQQHLTSTKMVRN

SEQ ID NO: 7363 - protein, 304 aa, Glycine max
  misc_feature (1)..(304): Ceres Seq. ID no. 15171445
MEGEDSIEISDSSPSHLSPSSLQNQALAGSVDKMMPGKSYNTPPALQNLFNGSKLNSINWGEGGNAHSSRSANSLDNRLTRDIGLQFNAVEFKRSTEELKLRASIEERMKKTTRKKRKSDGQEPSAGHEEEVEMRFRFYESASARKRTVTAEERERVINEAKAFEPSNPFCRVVLRPSYLYRGCIMYLPSCFAEKHLNGVSGFIKLQISNGRQWPVRCLYKGGRAKLSQGWFEFSLENNLGEGDVCVFELLRMKEVVLQVTIFHVTEDVGLLSPPLQHNQNMTSAKLLSTPLQQHLTSTKMVRN

SEQ ID NO: 7364 - DNA, 1137 bp, Glycine max
  misc_feature (1)..(1137): Ceres Seq. ID no. 15171460
gactcttcttccttcctaggatgctgctcatggcctctaccctccctttcccaacactttccattcttcctcacaaggcacactgcaaatcaacaccaaaacttcatccacttcctcacatctcttcaagattgaatgttgtttcaaaagatcctcccatattattagatcaatcttgcaatgttctaaaaaatgcctctctttccctcacatcaatcacactcccctttttattggaacaaaaggatgtggcacttgctgttgaaggggaatttgggatattggaaggaagaacatttgctctcatacaccccattgtgatggcttctttgttcttgtacaccttgtgggcaggatatttggggtggcagtggaggagagtgaggactattcagaatgagattaatgagttaaagaaacaagtgaagcctaccccagtcaccccagaagaagtgccaccaccatcagaaattgagctcaaaattcagcaacttactgaggagaggaaagagctgctaaaagggtcttacaaggataggcattataatgcaggatccatacttctaggatttggggtgcttgaggctgttggtggaggattgaacacttggattaggacagggaagctattcccaggcccacatttgtttggaggagcagctattgcagtgttgtgggcactttcagcagcattggtaccatcaatgcagagagggagtgaaacagcaagaagtcttcacattgctttgaatacattaaacgtgctgctatttgtgtcacagcttcccactggatttgacattttattgaaagtgtttgagttcacaaactggccttgaatgatgtttcccttagatgtactccaatttgcaacaccaaaatcaccccaatttcatagtttaagatcacactttttctttttcttgaataaggtgtagaagtgtgtttaattaaaagtgaaggagacgaatataaatgtcattgtaattaattgggtagttgtagagtagtgaaatcagattccaaaagtaacttcgggatttatggcaatgtaaatcgtttttattttcctcggtgacatgacagtggacccatcagccaatgttgtctatcttaatctgatactctctttacaag

SEQ ID NO: 7365 - protein, 278 aa, Glycine max
  misc_feature (1)..(278): Ceres Seq. ID no. 15171461
LFFLPRMLLMASTLPFPTLSILPHKAHCKSTPKLHPLPHISSRLNVVSKDPPILLDQSCNVLKNASLSLTSITLPFLLEQKDVALAVEGEFGILEGRTFALIHPIVMASLFLYTLWAGYLGWQWRRVRTIQNEINELKKQVKPTPVTPEEVPPPSEIELKIQQLTEERKELLKGSYKDRHYNAGSILLGFGVLEAVGGGLNTWIRTGKLFPGPHLFGGAAIAVLWALSAALVPSMQRGSETARSLHIALNTLNVLLFVSQLPTGFDILLKVFEFTNWP

SEQ ID NO: 7366 - protein, 272 aa, Glycine max
  misc_feature (1)..(272): Ceres Seq. ID no. 15171462
MLLMASTLPFPTLSILPHKAHCKSTPKLHPLPHISSRLNVVSKDPPILLDQSCNVLKNASLSLTSITLPFLLEQKDVALAVEGEFGILEGRTFALIHPIVMASLFLYTLWAGYLGWQWRRVRTIQNEINELKKQVKPTPVTPEEVPPPSEIELKIQQLTEERKELLKGSYKDRHYNAGSILLGFGVLEAVGGGLNTWIRTGKLFPGPHLFGGAAIAVLWALSAALVPSMQRGSETARSLHIALNTLNVLLFVSQLPTGFDILLKVFEFTNWP

SEQ ID NO: 7367 - protein, 269 aa, Glycine max
  misc_feature (1)..(269): Ceres Seq. ID no. 15171463
MASTLPFPTLSILPHKAHCKSTPKLHPLPHISSRLNVVSKDPPILLDQSCNVLKNASLSLTSITLPFLLEQKDVALAVEGEFGILEGRTFALIHPIVMASLFLYTLWAGYLGWQWRRVRTIQNEINELKKQVKPTPVTPEEVPPPSEIELKIQQLTEERKELLKGSYKDRHYNAGSILLGFGVLEAVGGGLNTWIRTGKLFPGPHLFGGAAIAVLWALSAALVPSMQRGSETARSLHIALNTLNVLLFVSQLPTGFDILLKVFEFTNWP

SEQ ID NO: 7368 - DNA, 1694 bp, Glycine max
  misc_feature (1)..(1694): Ceres Seq. ID no. 15171476
agagttaagagagccatatatcatggggtactatttggtattcgttggtgtgttcttgtggtgtgccatggctagtcacattaatggactagccatgatggatggaaagttaatgagttcctcggcaaataattatgactatggagatgctcttggcaaagccatcttgttttttgaaggacaacgctcggggaacttgcccgccacccaaagagtgaagtggaggggagactccgctctctctgatggcaaacttcaaaacgtggatttgattggaggatattacgatgctggagataacgtcaagtttggatggccaatggcatttacaactagcttattgagttgggctgctgtagagtacgagagtgagatatcttcggtgaaccagcttggttacctccacagtgctattcattggggcgcagactttatactgagagcccacacttccccaaccaccctctatacacaggtgggagatgggaacgctgatcacaattgttgggagcgcccggaagacatggatacagcaagggcagtgtacaagatagatgctaattccccgggaactgaagccgcagctgagtctgctgctgctcttgctgctgcttcaattgtcttcaagaaaatagatgccaattattcctccacgctattaagcaagtcaaaatcactgtttgattttgcagacaagtataggggttcttactcgggttcttgtccattctattgctcgtactcaggttaccaggatgaactgttatgggctgcttcttggctatataaggcgagtggagaaagcaagtacttgagttactccataggcaaccaaggttggagtcaggcggtgtctgaattcagctgggataacaaatatgttggagctcagacattactaacggaggaattctatggtgggaagaaagacttggccaagtttaagagtgacgttgaatcatttatatgttcagtgatgccagcaagtagctctctacagattaaaacaactcctggtgggcttctatttactagagacagcagtaatttgcaatatgccacgagctcaaccatggtgctattcattttctctaaaatcctaaacagaaatcacattgatagaatacattgtggttctgcgcttttcaccccgtctcagattagagcctttgcaaaaacacaggtggactacatactaggaagcaatccgatgaagatgtcttacatggtgggatttggcagtaaatacccaaagcaattacatcacagaggctcatccatcccttcaatcaatgttcatccgaccaaggtgggttgcaatgatggtctctcagtttattacaattctgctaatccaaatccaaatactcatgtgggtgcgattgttggaggccccgattcaaatgaccgattcagtgatgcaagatctgactattcccacagcgaacctaccacctacatgaatgctgctttcgtggcttcagtgtctgctttgcttggcaaaacgaccgatcgaaaccaaattcaggactctgcagtttccccatatcgatgctagggaaactaatgaagttaattaatgtaacataatcaccgattatatatgtgtcagtggtactagttatttaccctgccatatattgaaactccacttttatgggctggtataataaaatcatacgtactgttttacc

SEQ ID NO: 7369 - protein, 518 aa, Glycine max
  misc_feature (1)..(518): Ceres Seq. ID no. 15171477
ELREPYIMGYYLVFVGVFLWCAMASHINGLAMMDGKLMSSSANNYDYGDALGKAILFFEGQRSGNLPATQRVKWRGDSALSDGKLQNVDLIGGYYDAGDNVKFGWPMAFTTSLLSWAAVEYESEISSVNQLGYLHSAIHWGADFILRAHTSPTTLYTQVGDGNADHNCWERPEDMDTARAVYKIDANSPGTEAAAESAAALAAASIVFKKIDANYSSTLLSKSKSLFDFADKYRGSYSGSCPFYCSYSGYQDELLWAASWLYKASGESKYLSYSIGNQGWSQAVSEFSWDNKYVGAQTLLTEEFYGGKKDLAKFKSDVESFICSVMPASSSLQIKTTPGGLLFTRDSSNLQYATSSTMVLFIFSKILNRNHIDRIHCGSALFTPSQIRAFAKTQVDYILGSNPMKMSYMVGFGSKYPKQLHHRGSSIPSINVHPTKVGCNDGLSVYYNSANPNPNTHVGAIVGGPDSNDRFSDARSDYSHSEPTTYMNAAFVASVSALLGKTTDRNQIQDSAVSPYRC

SEQ ID NO: 7370 - protein, 511 aa, Glycine max
  misc_feature (1)..(511): Ceres Seq. ID no. 15171478
MGYYLVFVGVFLWCAMASHINGLAMMDGKLMSSSANNYDYGDALGKAILFFEGQRSGNLPATQRVKWRGDSALSDGKLQNVDLIGGYYDAGDNVKFGWPMAFTTSLLSWAAVEYESEISSVNQLGYLHSAIHWGADFILRAHTSPTTLYTQVGDGNADHNCWERPEDMDTARAVYKIDANSPGTEAAAESAAALAAASIVFKKIDANYSSTLLSKSKSLFDFADKYRGSYSGSCPFYCSYSGYQDELLWAASWLYKASGESKYLSYSIGNQGWSQAVSEFSWDNKYVGAQTLLTEEFYGGKKDLAKFKSDVESFICSVMPASSSLQIKTTPGGLLFTRDSSNLQYATSSTMVLFIFSKILNRNHIDRIHCGSALFTPSQIRAFAKTQVDYILGSNPMKMSYMVGFGSKYPKQLHHRGSSIPSINVHPTKVGCNDGLSVYYNSANPNPNTHVGAIVGGPDSNDRFSDARSDYSHSEPTTYMNAAFVASVSALLGKTTDRNQIQDSAVSPYRC

SEQ ID NO: 7371 - protein, 496 aa, Glycine max
  misc_feature (1)..(496): Ceres Seq. ID no. 15171479
MASHINGLAMMDGKLMSSSANNYDYGDALGKAILFFEGQRSGNLPATQRVKWRGDSALSDGKLQNVDLIGGYYDAGDNVKFGWPMAFTTSLLSWAAVEYESEISSVNQLGYLHSAIHWGADFILRAHTSPTTLYTQVGDGNADHNCWERPEDMDTARAVYKIDANSPGTEAAAESAAALAAASIVFKKIDANYSSTLLSKSKSLFDFADKYRGSYSGSCPFYCSYSGYQDELLWAASWLYKASGESKYLSYSIGNQGWSQAVSEFSWDNKYVGAQTLLTEEFYGGKKDLAKFKSDVESFICSVMPASSSLQIKTTPGGLLFTRDSSNLQYATSSTMVLFIFSKILNRNHIDRIHCGSALFTPSQIRAFAKTQVDYILGSNPMKMSYMVGFGSKYPKQLHHRGSSIPSINVHPTKVGCNDGLSVYYNSANPNPNTHVGAIVGGPDSNDRFSDARSDYSHSEPTTYMNAAFVASVSALLGKTTDRNQIQDSAVSPYRC

SEQ ID NO: 7372 - DNA, 1260 bp, Glycine max
  misc_feature (1)..(1260): Ceres Seq. ID no. 15171501
aaaccttcatgctgagtttcttatttgttgcgtggcaacgcaatgatgatgatgatgatggggttggtgtcttccagagttgtgttcttgtttgttgtttcgattttcgtgatttgggctcaggtggtggatttagcagaaggtggtgctgttcgaaattacattagttgggaagatttgcaggtgaatgaacaaaggttggccgtgaagtcgtcccataaccaggttcgagttataactgttaaccagaatggtgggggacattccaaaactgttcaaggtgctgtgaatatggttcctgataataacagacaaagggtcaaaattttcatttttccaggaatttacagagaaaaagtgcgtgtgcctgtgaccaagccttatgtatcatttatagggaaaagaaatcgaacagcaagtcctataattacttggaacagtaaatcatctgacaaaggcccaaatggcacagcattgggcacctatgcttcagcaacagtgggagtggactcagattatttctgtgcaactgggatcacttttgagaactcagtgattgcatcggctggtggaaaagggatgcaaggagtggcactgagggtaagcagtccaaaagcaatgttctatcgagtgaggattaagggaacacaggacactctcttggacagcacaggaaatcattacttcttaaagtgtcgcatcataggaaaagttgattttatctgtggcagcgcaaaatcactctatgagaagtgtcgtcttcagtcaatagctgagaactatggagcaatagcagcacatcatagggattcaccaacagacgacacaggtttttcttttgtaagttgcagtattagaggatctggcagtgtgtaccttggcagagcatgggggaactactcaagaattatatactccaaatgtaatatggatggcattattaatcctcaagggtggtcagactggaatcattcacataggaagaagactgcagtgtttgctgagtatcaatgcaagggaagaggagcagatagaagacatagggtgccttggtcaaaatcattcagctatccggaagcaagtcctttcctttacaagagcttcatagatggagaccagtggctcagactgtagcattatgatgcaccgattacatgacaattattcattattaatttatatgcttgtttattactatgttacatatcccccaaacgatcattttgatgcttactctttatcttgcaagggatgtttttt

SEQ ID NO: 7373 - protein, 363 aa, Glycine max
  misc_feature (1)..(363): Ceres Seq. ID no. 15171502
MMMMMMGLVSSRVVFLFVVSIFVIWAQVVDLAEGGAVRNYISWEDLQVNEQRLAVKSSHNQVRVITVNQNGGGHSKTVQGAVNMVPDNNRQRVKIFIFPGIYREKVRVPVTKPYVSFIGKRNRTASPIITWNSKSSDKGPNGTALGTYASATVGVDSDYFCATGITFENSVIASAGGKGMQGVALRVSSPKAMFYRVRIKGTQDTLLDSTGNHYFLKCRIIGKVDFICGSAKSLYEKCRLQSIAENYGAIAAHHRDSPTDDTGFSFVSCSIRGSGSVYLGRAWGNYSRIIYSKCNMDGIINPQGWSDWNHSHRKKTAVFAEYQCKGRGADRRHRVPWSKSFSYPEASPFLYKSFIDGDQWLRL

SEQ ID NO: 7374 - protein, 362 aa, Glycine max
  misc_feature (1)..(362): Ceres Seq. ID no. 15171503
MMMMMGLVSSRVVFLFVVSIFVIWAQVVDLAEGGAVRNYISWEDLQVNEQRLAVKSSHNQVRVITVNQNGGGHSKTVQGAVNMVPDNNRQRVKIFIFPGIYREKVRVPVTKPYVSFIGKRNRTASPIITWNSKSSDKGPNGTALGTYASATVGVDSDYFCATGITFENSVIASAGGKGMQGVALRVSSPKAMFYRVRIKGTQDTLLDSTGNHYFLKCRIIGKVDFICGSAKSLYEKCRLQSIAENYGAIAAHHRDSPTDDTGFSFVSCSIRGSGSVYLGRAWGNYSRIIYSKCNMDGIINPQGWSDWNHSHRKKTAVFAEYQCKGRGADRRHRVPWSKSFSYPEASPFLYKSFIDGDQWLRL

SEQ ID NO: 7375 - protein, 361 aa, Glycine max
  misc_feature (1)..(361): Ceres Seq. ID no. 15171504
MMMMGLVSSRVVFLFVVSIFVIWAQVVDLAEGGAVRNYISWEDLQVNEQRLAVKSSHNQVRVITVNQNGGGHSKTVQGAVNMVPDNNRQRVKIFIFPGIYREKVRVPVTKPYVSFIGKRNRTASPIITWNSKSSDKGPNGTALGTYASATVGVDSDYFCATGITFENSVIASAGGKGMQGVALRVSSPKAMFYRVRIKGTQDTLLDSTGNHYFLKCRIIGKVDFICGSAKSLYEKCRLQSIAENYGAIAAHHRDSPTDDTGFSFVSCSIRGSGSVYLGRAWGNYSRIIYSKCNMDGIINPQGWSDWNHSHRKKTAVFAEYQCKGRGADRRHRVPWSKSFSYPEASPFLYKSFIDGDQWLRL

SEQ ID NO: 7376 - DNA, 1375 bp, Glycine max
  misc_feature (1)..(1375): Ceres Seq. ID no. 15171508
acatgccaactattccaaagtcattacttcaccctctcatcgtatcaaaagagtgttttacttcaaggttcttggcaaaatcacctgtatctctaagtgtgtaatacaattagtcatctctgtccaattgttttctgtttttagaacctagcacttcaattcttaagctgagaacatataagatagagtaatcaatcatgccatttggtttggtctcactctcggcctggaacaagcgccgtagaagcaaatctcaagatcatacagatccctgggtttacaaacctgcacagctttggcaacttgaagatcaaacaccacgacctacaaaaaggctacatggatcatctgtttacacactcaaggagatggaggaggcaacatgttcattcagtgatgagaatctgcttggaaaaggaggatttggcaaagtctatcggggcactttgcggtcaggagaggttgtagcaatcaagaaaatggagttgccagcaattaaagcagctgagggggaacgcgagtttcgagtcgaagttgacatcttgagcagacttgaccacccaaatcttgtttctttgataggctactgtgctgatggaaagcatagattcctagtatatgaatatatgcgtaaagggaacctgcaggatcatttgaatggaattggggaaagaaacatggattggcctcgaagactccaagtggcactgggagctgcaaaaggacttgcttatctccattcaagttctgatgttggaattcctattgttcatagggatttcaaatcgaccaatattctcttagacgataactttgaagcaaagatatctgattttggactcgcgaagttaatgccagaagggcaagagacacatgtgactgccagagtgcttggtacctttggctattttgatcccgagtatacatcgactgggaaactcactctacagagtgatgtttatgcttttggtgttgttcttttggagcttttgactggacgtcgagctgtagatctaaaccaaggtcccaacgatcaaaaccttgtactacaggtgaggcacatactgcatgaccgcaagaagcttcgtaaggtgatagatccagagatggctcgaaattcttacaccattcagtctatagtcatgtttgccaatctggcatcaagatgcgttcgtactgagagtaatgaaagaccttcaatcgtagaatgtataaaagaactcctaatgattatctatacaaattcaaaaggcttgggaatggttatgcatagtttgagaatgatctagtgaaatcacaagtttagacattggaattatgatgatttcttgatgagaataaaaagtgaactccaaaagtgatcagtacaaagcac

SEQ ID NO: 7377 - protein, 363 aa, Glycine max
  misc_feature (1)..(363): Ceres Seq. ID no. 15171509
MPFGLVSLSAWNKRRRSKSQDHTDPWVYKPAQLWQLEDQTPRPTKRLHGSSVYTLKEMEEATCSFSDENLLGKGGFGKVYRGTLRSGEVVAIKKMELPAIKAAEGEREFRVEVDILSRLDHPNLVSLIGYCADGKHRFLVYEYMRKGNLQDHLNGIGERNMDWPRRLQVALGAAKGLAYLHSSSDVGIPIVHRDFKSTNILLDDNFEAKISDFGLAKLMPEGQETHVTARVLGTFGYFDPEYTSTGKLTLQSDVYAFGVVLLELLTGRRAVDLNQGPNDQNLVLQVRHILHDRKKLRKVIDPEMARNSYTIQSIVMFANLASRCVRTESNERPSIVECIKELLMIIYTNSKGLGMVMHSLRMI

SEQ ID NO: 7378 - protein, 306 aa, Glycine max
  misc_feature (1)..(306): Ceres Seq. ID no. 15171510
MEEATCSFSDENLLGKGGFGKVYRGTLRSGEVVAIKKMELPAIKAAEGEREFRVEVDILSRLDHPNLVSLIGYCADGKHRFLVYEYMRKGNLQDHLNGIGERNMDWPRRLQVALGAAKGLAYLHSSSDVGIPIVHRDFKSTNILLDDNFEAKISDFGLAKLMPEGQETHVTARVLGTFGYFDPEYTSTGKLTLQSDVYAFGVVLLELLTGRRAVDLNQGPNDQNLVLQVRHILHDRKKLRKVIDPEMARNSYTIQSIVMFANLASRCVRTESNERPSIVECIKELLMIIYTNSKGLGMVMHSLRMI

SEQ ID NO: 7379 - protein, 269 aa, Glycine max
  misc_feature (1)..(269): Ceres Seq. ID no. 15171511
MELPAIKAAEGEREFRVEVDILSRLDHPNLVSLIGYCADGKHRFLVYEYMRKGNLQDHLNGIGERNMDWPRRLQVALGAAKGLAYLHSSSDVGIPIVHRDFKSTNILLDDNFEAKISDFGLAKLMPEGQETHVTARVLGTFGYFDPEYTSTGKLTLQSDVYAFGVVLLELLTGRRAVDLNQGPNDQNLVLQVRHILHDRKKLRKVIDPEMARNSYTIQSIVMFANLASRCVRTESNERPSIVECIKELLMIIYTNSKGLGMVMHSLRMI

SEQ ID NO: 7380 - DNA, 1194 bp, Glycine max
  misc_feature (1)..(1194): Ceres Seq. ID no. 15171516
tttaaaacttccaagcttacatttaatcagaataccttgcctgggtgggttatggctgttgcttggctgatatatcttgtatggttgtggatcacttttaaggaaccttctcgtgaagctgaagaggatcactccccacatcaatcaaatgatgaagtaaacaatgcacttgataaaggcttaaaacaaccattactgattagttcagagaataaggtagatgaagatgctgaccaagattgtgatgatagtgaagaagcaccagaggaatctcgccagccagtgaattcaattagaatggcatacagactccttacaccttctgtaaaggttcaattaataatatatttcatgctcaaatatgtaatggagattttgctatcggaatctagtgtcattacaacatactacttcaactggtcaacaagcacagttgcagtttttcttgcttgccttggcttgacagttcttcctgtaaacattgttgttggaagctatataagcaacatgttccaggacaggcaaattctgttggcatcagaaattatggttctcataggcgttctactgagtttccaagtaatcattccatattctgagccacaatacatctgttcgggtctccttttatttgtttctgccgaagtacttgaaggtgtcaacttgtcactgctttcgcgagtaatgtcatcgaggctttctcgtggaacctacaacggtggacttttgtctacggaggcagggacacttgctagggtggttgctgatgcaactattacccttgccgggtatgttcgtcagagtatgctccttaatgtgaccctccttccttcactcttcatctgtgtaacttccatccttgcaacatgttttacgtacaattctttatattgatttgtctgaggctgagattgagatgaaaagaggagaatgctcttcagcaaaacctcagtctcttcaccacttggctctgtattctttcctacattcaatattttttatcattgaagttttcaatggctccatatagttggaaaagtagctaggctcaacatgtaggtaggccaaatgtgtatttctttatggtatggattcctcttttgtcattatcattttgctgtagagatgggttactttgttgtcttttgttaatagatccagaatgtatgaacgaaatgaaatgcttattattag

SEQ ID NO: 7381 - protein, 297 aa, Glycine max
  misc_feature (1)..(297): Ceres Seq. ID no. 15171517
FKTSKLTFNQNTLPGWVMAVAWLIYLVWLWITFKEPSREAEEDHSPHQSNDEVNNALDKGLKQPLLISSENKVDEDADQDCDDSEEAPEESRQPVNSIRMAYRLLTPSVKVQLIIYFMLKYVMEILLSESSVITTYYFNWSTSTVAVFLACLGLTVLPVNIVVGSYISNMFQDRQILLASEIMVLIGVLLSFQVIIPYSEPQYICSGLLLFVSAEVLEGVNLSLLSRVMSSRLSRGTYNGGLLSTEAGTLARVVADATITLAGYVRQSMLLNVTLLPSLFICVTSILATCFTYNSLY

SEQ ID NO: 7382 - protein, 280 aa, Glycine max
  misc_feature (1)..(280): Ceres Seq. ID no. 15171518
MAVAWLIYLVWLWITFKEPSREAEEDHSPHQSNDEVNNALDKGLKQPLLISSENKVDEDADQDCDDSEEAPEESRQPVNSIRMAYRLLTPSVKVQLIIYFMLKYVMEILLSESSVITTYYFNWSTSTVAVFLACLGLTVLPVNIVVGSYISNMFQDRQILLASEIMVLIGVLLSFQVIIPYSEPQYICSGLLLFVSAEVLEGVNLSLLSRVMSSRLSRGTYNGGLLSTEAGTLARVVADATITLAGYVRQSMLLNVTLLPSLFICVTSILATCFTYNSLY

SEQ ID NO: 7383 - protein, 198 aa, Glycine max
  misc_feature (1)..(198): Ceres Seq. ID no. 15171519
MAYRLLTPSVKVQLIIYFMLKYVMEILLSESSVITTYYFNWSTSTVAVFLACLGLTVLPVNIVVGSYISNMFQDRQILLASEIMVLIGVLLSFQVIIPYSEPQYICSGLLLFVSAEVLEGVNLSLLSRVMSSRLSRGTYNGGLLSTEAGTLARVVADATITLAGYVRQSMLLNVTLLPSLFICVTSILATCFTYNSLY

SEQ ID NO: 7384 - DNA, 1560 bp, Glycine max
  misc_feature (1)..(1560): Ceres Seq. ID no. 15171528
aactctcaactaaccacccccaccatggaggcgcctctgttattatcggagaagagaactggatcgattgaagaagagagtggaaaatggagctcgtatcagtatgtgggtggaaccggttctgtgaggccaacttcttcattggctggaactgaggtgagtgtggatgaaattcgatctgctgctgctgcttctggttactatcccccttcccttcatggagccttggttggttcacctgagcctgatcctacagagcaagctcttgtttatcagggtggatatggaggagattatggtggacccacaccccaattccagaggaaaatcttggatgaagtggagatacgagagttgctcattgatcatgttggtcatcgttgctgttggggtagtcgtcctgctcgaacatggaggattcatgcagtggaagactgtaatgtatatgtaggaactctggatacatttatagaggaaagagaaatcataagagagacagaaccataccttggtggcagtattgacggaaaggataatggacctgaacttggtatttgggaattggatctaagatctcagttccctgttctatttgaaccctataaagaagtgcgggaaaagattccccattctgaagttatagaaaagtgcacagtttgtgcaggacggggaagtacagtctgtgctacatgcaatgcagaccaagaacctggattttataaggaaaatcagatgactcagtgtgcaacttgttatggaaggggtttaatcgctcataaagatggttctgacactgtatgtgtgaaatgtaatggcaagggaaagattccttgtgtaacatgtggatctcgtggactaattcagtgtgcaacatgtaatggaagtggttctcttctagcacgcaatctggccattattcgatggaagacactttcaactcggaaagtaaatgcaacaagtggagcagcatcagtaccggatgaagttttccatagatccaaaggggttcaattgtgcaacactcaagcataccaatgcactccagcctttttgctgattcttattttctcaacaaattctcttctgatgtcattgcagaaagagctcaagtgcctgccactgcaagggtcatatgtgaaaggcatgcaatctcagttgtgccagtaactcgtgtcaccatggctcatcgtcgacaatccttcagtttctacattatagaatatggcagagaggtgtatttgaaggattattaccctgctagatattgttggggcctgtgtccttgtttggagtggttgaagttgtaatgttgaaactgttcttcctggcagcattgggcagttgtaaaggtttcatctacacatttgtgagttctgtgtttgttcagtttgataataacaccagcagatttcagggtttgagggctgagcagatgaactttatgatatgaggaaataggttatgcattgataatgtaaaataattttacactgtcattcaattactaatcactatgtattgtaagtttgttaacttttacgataactattttaaaagtct

SEQ ID NO: 7385 - protein, 388 aa, Glycine max
  misc_feature (1)..(388): Ceres Seq. ID no. 15171529
NSQLTTPTMEAPLLLSEKRTGSIEEESGKWSSYQYVGGTGSVRPTSSLAGTEVSVDEIRSAAAASGYYPPSLHGALVGSPEPDPTEQALVYQGGYGGDYGGPTPQFQRKILDEVEIRELLIDHVGHRCCWGSRPARTWRIHAVEDCNVYVGTLDTFIEEREIIRETEPYLGGSIDGKDNGPELGIWELDLRSQFPVLFEPYKEVREKIPHSEVIEKCTVCAGRGSTVCATCNADQEPGFYKENQMTQCATCYGRGLIAHKDGSDTVCVKCNGKGKIPCVTCGSRGLIQCATCNGSGSLLARNLAIIRWKTLSTRKVNATSGAASVPDEVFHRSKGVQLCNTQAYQCTPAFLLILIFSTNSLLMSLQKELKCLPLQGSYVKGMQSQLCQ

SEQ ID NO: 7386 - protein, 380 aa, Glycine max
  misc_feature (1)..(380): Ceres Seq. ID no. 15171530
MEAPLLLSEKRTGSIEEESGKWSSYQYVGGTGSVRPTSSLAGTEVSVDEIRSAAAASGYYPPSLHGALVGSPEPDPTEQALVYQGGYGGDYGGPTPQFQRKILDEVEIRELLIDHVGHRCCWGSRPARTWRIHAVEDCNVYVGTLDTFIEEREIIRETEPYLGGSIDGKDNGPELGIWELDLRSQFPVLFEPYKEVREKIPHSEVIEKCTVCAGRGSTVCATCNADQEPGFYKENQMTQCATCYGRGLIAHKDGSDTVCVKCNGKGKIPCVTCGSRGLIQCATCNGSGSLLARNLAIIRWKTLSTRKVNATSGAASVPDEVFHRSKGVQLCNTQAYQCTPAFLLILIFSTNSLLMSLQKELKCLPLQGSYVKGMQSQLCQ

SEQ ID NO: 7387 - DNA, 1343 bp, Glycine max
  misc_feature (1)..(1343): Ceres Seq. ID no. 15171556
atcacccttttggcagttaccaattcaactaccgcatcacatttacaaataaaactcaaaatccaaacaccaccgccacacaccaccttgtctattgattatcatatttattgtgagccttaactctagtattactactacttccacctttcatcatcactctttcagtccaatggggtggtctttctcaatttccgttttgctgtttcttacctttctcattcagatacatggaagaggctttgcagagaattatggttgtaatttgttccaaggaagttgggtttatgatgaatcataccctctttatgcaacctcacagtgtccctttatagagaaagaatttgattgtcaaaacaatggcagaccggataagttctatctcaaatatagatggcagccagcaggctgcaacttaacaagattcaacggtgaagatttcttaagaagacatagagggaggagtctcatgtttgtgggggattctttgagtttgaatcaatggcaatcactcacttgcatgcttcacatagctgtgccactagccccttacaacttagtgaggaatggagatctctccattttcacgtttccgacctatggtgttaaggtgatgttctcacgcaatgcatttcttgtggacatagttagtgagagtattggtcgagtactgaaactagattcaattcaagctggccaaacgtggaaaggaatagatatattgatatttgactcttggcattggtggcttcacacaggaagaaaacaaccatgggatttgattcaagtaggaaatcgtactgttagagacatgaatcgcttggttgcatacgagatagcgctgaatacatgggccaaatggattgattataatattgaccctaccagaacaagggttttattccaaggagtgtctccagatcatcaaaatccagcgcaatggggtgagccaagagcaaacttttgtgcagggcaaactaagccaatatcgggattaaggtatcctggaggaccaaacccagcagaggtggtattagagaaagtgctaaaggccatgcaaaagcctgtgtatttgctggacattacaaccctatcccagctaaggatagatggccacccttctgtttatggacatggtgggcatttggacatggattgcagccactggtgccttgctggtgttcctgatacttggaatgagcttctatatgttagtctctttcaaaattaagatcctattcttattgttattgctgattataaataaaatgtgtcccaagaaaatatatatctcaaattaattcagacaataaaatacagcaagatatgtataggtctatcat

SEQ ID NO: 7388 - protein, 352 aa, Glycine max
  misc_feature (1)..(352): Ceres Seq. ID no. 15171557
MGWSFSISVLLFLTFLIQIHGRGFAENYGCNLFQGSWVYDESYPLYATSQCPFIEKEFDCQNNGRPDKFYLKYRWQPAGCNLTRFNGEDFLRRHRGRSLMFVGDSLSLNQWQSLTCMLHIAVPLAPYNLVRNGDLSIFTFPTYGVKVMFSRNAFLVDIVSESIGRVLKLDSIQAGQTWKGIDILIFDSWHWWLHTGRKQPWDLIQVGNRTVRDMNRLVAYEIALNTWAKWIDYNIDPTRTRVLFQGVSPDHQNPAQWGEPRANFCAGQTKPISGLRYPGGPNPAEVVLEKVLKAMQKPVYLLDITTLSQLRIDGHPSVYGHGGHLDMDCSHWCLAGVPDTWNELLYVSLFQN

SEQ ID NO: 7389 - protein, 253 aa, Glycine max
  misc_feature (1)..(253): Ceres Seq. ID no. 15171558
MFVGDSLSLNQWQSLTCMLHIAVPLAPYNLVRNGDLSIFTFPTYGVKVMFSRNAFLVDIVSESIGRVLKLDSIQAGQTWKGIDILIFDSWHWWLHTGRKQPWDLIQVGNRTVRDMNRLVAYEIALNTWAKWIDYNIDPTRTRVLFQGVSPDHQNPAQWGEPRANFCAGQTKPISGLRYPGGPNPAEVVLEKVLKAMQKPVYLLDITTLSQLRIDGHPSVYGHGGHLDMDCSHWCLAGVPDTWNELLYVSLFQN

SEQ ID NO: 7390 - protein, 236 aa, Glycine max
  misc_feature (1)..(236): Ceres Seq. ID no. 15171559
MLHIAVPLAPYNLVRNGDLSIFTFPTYGVKVMFSRNAFLVDIVSESIGRVLKLDSIQAGQTWKGIDILIFDSWHWWLHTGRKQPWDLIQVGNRTVRDMNRLVAYEIALNTWAKWIDYNIDPTRTRVLFQGVSPDHQNPAQWGEPRANFCAGQTKPISGLRYPGGPNPAEVVLEKVLKAMQKPVYLLDITTLSQLRIDGHPSVYGHGGHLDMDCSHWCLAGVPDTWNELLYVSLFQN

SEQ ID NO: 7391 - DNA, 1364 bp, Glycine max
  misc_feature (1)..(1364): Ceres Seq. ID no. 15171564
aagaaggaatccatgatctagcctactggctttcaacaacatcaacacttctgttttatctacaatgtacaatgaaggccagcaatacaactaaggcagtgtcacgtaatcgaaactcgcccgcctctttgtttggcaaaatggcacaaggtttacgttcatcttcaatgggcttggggatttcaagtggctacagtggaatggtggacaagacaaatggtcaatctaaagtagaagccaagtacccggcaattctgtttaagcaacatttaactgcatatgttgagaagatatatggaatgatccgtgatagtttaaagaaagagattagccccttcttaaatctgtgtatacaggcaccaagatccataaggactagatcaataagagggtcatccagaaacatccattcaaatattgttgcaaaacaacaggcattgcatatgtactggaaaggcattgtggacaagctagatactgccttgcgtatattgtctgataactatgttcctcccatcataacaaggaagatatttagtcaggttttctcattcatgaatgtccagctctttaatagtttgttgcttcgccgtgagtgttgttcctttagcaatggagaatatttgaaggcaggtttgcatgagttggaactatggtgtcttaaagcaacagaccagtttgctggatcatcttgggatgagctcaaacacatacgccaggctgtgggctttctggttttgcatcaaaagacccaaaaatctttggaggagatcacaaatgagctctgcccggtgttaagtattccacaaatatatcgtataggaactatgttctgggatgacaagtatggagcacatggattatctgcagaagtcattagcagaatgagagtgattatgacagaagactcaataaacatacacaacagctcattccttctagaggtggattccagcataccattcttaatggaggagatgttccggtcaatgagtgacatccgcctatcagacatggatgtggatccaccaccaatcctcaggcaaagatctgacttccaattcttgttgcaacaaatggatagtgactctcagtgagctagtgaaagtttggtgctgatattagttatagtttctgatttgtattgatttaatttgggtttggtgtggagagagtaattgagtggtgaggtgaagaattgtaattagtttatttattctaattttttacatttgtttttgggaagatcccaattttgttggttattcttgtaaggcttcttgtcaaggaatgccacagcgaattttgccattgttgtatgaagttacttcaaaaagtaatgaaatgaaggaaagtttggcttt

SEQ ID NO: 7392 - protein, 364 aa, Glycine max
  misc_feature (1)..(364): Ceres Seq. ID no. 15171565
EGIHDLAYWLSTTSTLLFYLQCTMKASNTTKAVSRNRNSPASLFGKMAQGLRSSSMGLGISSGYSGMVDKTNGQSKVEAKYPAILFKQHLTAYVEKIYGMIRDSLKKEISPFLNLCIQAPRSIRTRSIRGSSRNIHSNIVAKQQALHMYWKGIVDKLDTALRILSDNYVPPIITRKIFSQVFSFMNVQLFNSLLLRRECCSFSNGEYLKAGLHELELWCLKATDQFAGSSWDELKHIRQAVGFLVLHQKTQKSLEEITNELCPVLSIPQIYRIGTMFWDDKYGAHGLSAEVISRMRVIMTEDSINIHNSSFLLEVDSSIPFLMEEMFRSMSDIRLSDMDVDPPPILRQRSDFQFLLQQMDSDSQ

SEQ ID NO: 7393 - protein, 341 aa, Glycine max
  misc_feature (1)..(341): Ceres Seq. ID no. 15171566
MKASNTTKAVSRNRNSPASLFGKMAQGLRSSSMGLGISSGYSGMVDKTNGQSKVEAKYPAILFKQHLTAYVEKIYGMIRDSLKKEISPFLNLCIQAPRSIRTRSIRGSSRNIHSNIVAKQQALHMYWKGIVDKLDTALRILSDNYVPPIITRKIFSQVFSFMNVQLFNSLLLRRECCSFSNGEYLKAGLHELELWCLKATDQFAGSSWDELKHIRQAVGFLVLHQKTQKSLEEITNELCPVLSIPQIYRIGTMFWDDKYGAHGLSAEVISRMRVIMTEDSINIHNSSFLLEVDSSIPFLMEEMFRSMSDIRLSDMDVDPPPILRQRSDFQFLLQQMDSDSQ

SEQ ID NO: 7394 - protein, 318 aa, Glycine max
  misc_feature (1)..(318): Ceres Seq. ID no. 15171567
MAQGLRSSSMGLGISSGYSGMVDKTNGQSKVEAKYPAILFKQHLTAYVEKIYGMIRDSLKKEISPFLNLCIQAPRSIRTRSIRGSSRNIHSNIVAKQQALHMYWKGIVDKLDTALRILSDNYVPPIITRKIFSQVFSFMNVQLFNSLLLRRECCSFSNGEYLKAGLHELELWCLKATDQFAGSSWDELKHIRQAVGFLVLHQKTQKSLEEITNELCPVLSIPQIYRIGTMFWDDKYGAHGLSAEVISRMRVIMTEDSINIHNSSFLLEVDSSIPFLMEEMFRSMSDIRLSDMDVDPPPILRQRSDFQFLLQQMDSDSQ

SEQ ID NO: 7395 - DNA, 1372 bp, Glycine max
  misc_feature (1)..(1372): Ceres Seq. ID no. 15171606
aaaaaaaaaaaaattttaacctcaccctctttacccacaccctctctctctctctctctgtcacgcacagagaaaaactcagacacccacgttcacacttcgcacacaccatctctcactgttctttcttcttcctctttttcttttttttttttcttttctcttaatggaatgatggaacacaacatcatcgtcaacaacaacgtgatcgcaccgtttgtcataaaaacctacaatatggtgaacgatcccaccaccgataaactcatcacgtggggcccagccaacaacagcttcatcgtcctcgatcccctcgacttctcccactccctcctccctactttcttcaagcacaacaacttctccagcttcgttcgccaactcaacacctatggtttcagaaaggtggatccggatcggtgggagttcgcgaacgagtggttcctgcgaggacaaaagcacttattgaggaacatcgtgcggaagaagcacggtggagctgggaggaccaattccaattcgcattattcgcatcccttgaagctggaggagttggacgacgaggctatggtgatggagatagcgaggttgaaggaggagcaaaaagcgttggaggaagagcttcatgaaatgaacaagaggttagagacaacagaaaaacgaccacaacaaatgatggcttttctgtgtaaggttgtcgaggacccgcagattctttctcggattctccgagaaagagaaaagaaacacctgggagagaaaaagcgacgcctcattccgcctccgccgccgacggcagcgacgtcgtcgtcgtcgtcctccggcatcaagacagagttcgaagaagacgaaggtaattataatatcaagtcttcgtcgccggagacagggttggaaatcgacaacaatagtaacaatatttgttcgccgccgccgctggggtgttggggtgaacagggttgttatgggtacaattgcgcctccgtgccggcacctttgacggtggtagcgccggcgtttccgacgatgggaggagggtatttgaggcgtggggggttttggggggaaatggcggcggaggggaatgcggtgccgccttatccgttttcgttgttggaagggggcttttagatttagttttaggttatgaaatgaatgaattattactgccacaaaatttcatcttggattttctgtcgtattgaaagttctatccttttttgtgcgttgattctgtgtaaagaaaaaaggttgggaaaaagagtaaaaaggtagtgggaaaattgttagatatttatagttgtgttcggtttcaggttttttttttcataaatattgtttttaaataaatgctttgcggatggtgtagacc

SEQ ID NO: 7396 - protein, 376 aa, Glycine max
  misc_feature (1)..(376): Ceres Seq. ID no. 15171607
KKKKILTSPSLPTPSLSLSLSRTEKNSDTHVHTSHTPSLTVLSSSSFSFFFFFSLNGMMEHNIIVNNNVIAPFVIKTYNMVNDPTTDKLITWGPANNSFIVLDPLDFSHSLLPTFFKHNNFSSFVRQLNTYGFRKVDPDRWEFANEWFLRGQKHLLRNIVRKKHGGAGRTNSNSHYSHPLKLEELDDEAMVMEIARLKEEQKALEEELHEMNKRLETTEKRPQQMMAFLCKVVEDPQILSRILREREKKHLGEKKRRLIPPPPPTAATSSSSSSGIKTEFEEDEGNYNIKSSSPETGLEIDNNSNNICSPPPLGCWGEQGCYGYNCASVPAPLTVVAPAFPTMGGGYLRRGGFWGEMAAEGNAVPPYPFSLLEGGF

SEQ ID NO: 7397 - protein, 319 aa, Glycine max
  misc_feature (1)..(319): Ceres Seq. ID no. 15171608
MMEHNIIVNNNVIAPFVIKTYNMVNDPTTDKLITWGPANNSFIVLDPLDFSHSLLPTFFKHNNFSSFVRQLNTYGFRKVDPDRWEFANEWFLRGQKHLLRNIVRKKHGGAGRTNSNSHYSHPLKLEELDDEAMVMEIARLKEEQKALEEELHEMNKRLETTEKRPQQMMAFLCKVVEDPQILSRILREREKKHLGEKKRRLIPPPPPTAATSSSSSSGIKTEFEEDEGNYNIKSSSPETGLEIDNNSNNICSPPPLGCWGEQGCYGYNCASVPAPLTVVAPAFPTMGGGYLRRGGFWGEMAAEGNAVPPYPFSLLEGGF

SEQ ID NO: 7398 - protein, 318 aa, Glycine max
  misc_feature (1)..(318): Ceres Seq. ID no. 15171609
MEHNIIVNNNVIAPFVIKTYNMVNDPTTDKLITWGPANNSFIVLDPLDFSHSLLPTFFKHNNFSSFVRQLNTYGFRKVDPDRWEFANEWFLRGQKHLLRNIVRKKHGGAGRTNSNSHYSHPLKLEELDDEAMVMEIARLKEEQKALEEELHEMNKRLETTEKRPQQMMAFLCKVVEDPQILSRILREREKKHLGEKKRRLIPPPPPTAATSSSSSSGIKTEFEEDEGNYNIKSSSPETGLEIDNNSNNICSPPPLGCWGEQGCYGYNCASVPAPLTVVAPAFPTMGGGYLRRGGFWGEMAAEGNAVPPYPFSLLEGGF

SEQ ID NO: 7399 - DNA, 2036 bp, Glycine max
  misc_feature (1)..(2036): Ceres Seq. ID no. 15171610
agataatgagtttaccatcgtgagccactcagcctgtgtttggtgggagggattattcagcttccctttttccttccctccacccaaccagagttagacaccgaaaatggctttcaaactgaaatcactacctctcctttgctctcttcactccccttcccgccaaaaccctaattcaacactctcaaaccatcacttttctcgtcgcttcttcgcaccttccattcctcccaccctgtgcctatccggcgcagcctcagcgtccacctttcatcgccatcgcttcttcgtaaccgctcgaagccaagacgaagaccagatcactgaggctcttgaacaagaagaagagaaagacaacgaagaaatatcgaggcagggtgagaaaaaggaactcgcgaagcaaggcacatgggatcagataaaggaaattgtgatgttcacaggaccagcaactggactttggatatgtggaccacttatgagtctcatcgatactgcagttattggtcagagaagttcaattgagcttgctgctttaggtcctgctacagttgtttgtgattacatgtgctacgtgttcatgtttctatcaattgctacttccaatatggttgctactgcccttgccaaacaggacaaagaagaagtacaacatcacatatctgtattgctttttgttgggttatcttgtggcattgcgatgcttttgttcacaaggctatttggtgctgctataataactgctttcactggaccaaagaatgtacacgtagtacctgcagctagcaattatgtaaagattcgaggcttggcatcacctgctttacttgttggatgggtagctcagagtgcaagtcttggtatgaaagattccttgggacccttgaaagctttagctgctgctacagttataaatgtcgctggttgtgtacttttgtgcacctatttaggttatggaattgtaggggctgcgtgggctacaatggtttcacaagttgttgcttcttacatgatgattcaaaatctaaatatgaagggatataatgcacttgccttctccattccttcagggaaggaacttctgacgatatttgggcttgctgctcctgtttttataacattgatgtcaaaggtggctttttacgcactacttatatattttgctacatcaatgggtacacatacaatggctgctcatcaagtcatggtccaaacctatttaatgtgtaccgtatggggtgaacctctctcccaaacctctcaatcatttatgcctgaattgatatgtggagtaaatcggagtttgtcaaaggcccgaatgcttctaaggtctctcgtgataattggagctatacttggattgttgttagggattattggaacatcggttccttggttatttcccaatatttttacacctgatcggatggtcatccaggagatgcataaggtgctgattccatactttatagccctggctgtaacaccccctactgtcagccttgagggaacgttgctggctggacgggatctgaaatttataagtttgtcaatgagtggatgcttttgtgtgggttcactagtattatgggctttgagtagtagatacggtttgcttggctgctggttttccctcgcattatttcaatgggctcggttttcaatggccctccagcgccttctttctcccaaaggcatcttatactcggaagatacagaacagtataagctgctaaagctaaggactgcctagtttgatgaagtcatcacaccagttacaaggatagaagtatgttttaataaaaaaaaaaagaggatagtagtatgttggaccatctcagcttatgggttaagcgagttaagaccaggacaaccggctaaaaagtgagccatcgtttttataatttgtttagtccgcgagctgggttggctcataggttggagttcactttgatacttatatgtgtatgattgctataataattagcatgaaaaattaattcagattcttaattatattgggcgcaatttatatt

SEQ ID NO: 7400 - protein, 548 aa, Glycine max
  misc_feature (1)..(548): Ceres Seq. ID no. 15171611
MAFKLKSLPLLCSLHSPSRQNPNSTLSNHHFSRRFFAPSIPPTLCLSGAASASTFHRHRFFVTARSQDEDQITEALEQEEEKDNEEISRQGEKKELAKQGTWDQIKEIVMFTGPATGLWICGPLMSLIDTAVIGQRSSIELAALGPATVVCDYMCYVFMFLSIATSNMVATALAKQDKEEVQHHISVLLFVGLSCGIAMLLFTRLFGAAIITAFTGPKNVHVVPAASNYVKIRGLASPALLVGWVAQSASLGMKDSLGPLKALAAATVINVAGCVLLCTYLGYGIVGAAWATMVSQVVASYMMIQNLNMKGYNALAFSIPSGKELLTIFGLAAPVFITLMSKVAFYALLIYFATSMGTHTMAAHQVMVQTYLMCTVWGEPLSQTSQSFMPELICGVNRSLSKARMLLRSLVIIGAILGLLLGIIGTSVPWLFPNIFTPDRMVIQEMHKVLIPYFIALAVTPPTVSLEGTLLAGRDLKFISLSMSGCFCVGSLVLWALSSRYGLLGCWFSLALFQWARFSMALQRLLSPKGILYSEDTEQYKLLKLRTA

SEQ ID NO: 7401 - protein, 439 aa, Glycine max
  misc_feature (1)..(439): Ceres Seq. ID no. 15171612
MFTGPATGLWICGPLMSLIDTAVIGQRSSIELAALGPATVVCDYMCYVFMFLSIATSNMVATALAKQDKEEVQHHISVLLFVGLSCGIAMLLFTRLFGAAIITAFTGPKNVHVVPAASNYVKIRGLASPALLVGWVAQSASLGMKDSLGPLKALAAATVINVAGCVLLCTYLGYGIVGAAWATMVSQVVASYMMIQNLNMKGYNALAFSIPSGKELLTIFGLAAPVFITLMSKVAFYALLIYFATSMGTHTMAAHQVMVQTYLMCTVWGEPLSQTSQSFMPELICGVNRSLSKARMLLRSLVIIGAILGLLLGIIGTSVPWLFPNIFTPDRMVIQEMHKVLIPYFIALAVTPPTVSLEGTLLAGRDLKFISLSMSGCFCVGSLVLWALSSRYGLLGCWFSLALFQWARFSMALQRLLSPKGILYSEDTEQYKLLKLRTA

SEQ ID NO: 7402 - protein, 424 aa, Glycine max
  misc_feature (1)..(424): Ceres Seq. ID no. 15171613
MSLIDTAVIGQRSSIELAALGPATVVCDYMCYVFMFLSIATSNMVATALAKQDKEEVQHHISVLLFVGLSCGIAMLLFTRLFGAAIITAFTGPKNVHVVPAASNYVKIRGLASPALLVGWVAQSASLGMKDSLGPLKALAAATVINVAGCVLLCTYLGYGIVGAAWATMVSQVVASYMMIQNLNMKGYNALAFSIPSGKELLTIFGLAAPVFITLMSKVAFYALLIYFATSMGTHTMAAHQVMVQTYLMCTVWGEPLSQTSQSFMPELICGVNRSLSKARMLLRSLVIIGAILGLLLGIIGTSVPWLFPNIFTPDRMVIQEMHKVLIPYFIALAVTPPTVSLEGTLLAGRDLKFISLSMSGCFCVGSLVLWALSSRYGLLGCWFSLALFQWARFSMALQRLLSPKGILYSEDTEQYKLLKLRTA

SEQ ID NO: 7403 - DNA, 1590 bp, Glycine max
  misc_feature (1)..(1590): Ceres Seq. ID no. 15171614
aattcaatcattagtttcatttcataattcccatctcatggccatctcaaacaataatcatcatgctcttctacttgcttcaccaggaatgggtcacataatccctgccctagaacttgccaagcgtttagtcactcacaaaatcatttccaaactcaccttcttttgtggttcaatcaaaacctctactccatcaaaagctgagacacaaattctccaatcagccataaaggaaaaccttttcgatctaattcaactcccccccattgatctcaccatccatgttagtcctcgtgacaccttagaaaccaaaatagcaattataatgcatgaaatcccactactttttgtgtccacaatatccagcatgaacctcaacccaaccatgatcatcactgacttcttcttcagccaagttatacctctagccaaaaacctaaacctacccacatttgcttttgcaccaaccaatgcatggctcgtcgcacttggtcttcacacccccactttggataaagaaatagaaggagaatatatcaatgaaagcaaaccgatctcaatcccaggttgcaaatccattcacccccttgatatgtttggtatgttgcgtgacaggacacaaaggatctaccatgaatatgttggcgcgtgtgaaggggcagcacttgctgatgggatctttgtgaacacgtttcatgagttggagccaaagacacttgaagcacttggtagtggacacattattaccaaggtgcccgtgtacccggttgggcctattgtaagggatcaaagaagccctaatggtagcaatgaggggaaaataggtgatgtttttgggtggctggacaaacaagaagaagagtcagtggtgtatgtgtcacttgggagtggatacacaatgtcatttgaggaaattaaagagatggctttggggttggagctgagtggaaaaaaatttgtttggtctgtgcgcccacctgccaccaaatctggcactggcaactatctcacagcaggtgaggaaggagaaaccagaactatccttgggtctaataatgaaccatcaaactcttttcctgatgagttctaccgcatacaaaccaatggaattgtgatcacagattgggcaccacaattggatattttgaagcacccatcttttggtggttttgtgtctcattgtgggtggaactcattaatggagagtgtttcatgtggggtgccaataattggattgcctctttatgcagagcaaatgatgaatgctgcgatgctaatggaggaagttggcaatgcaattcgagtagaggtgtcaccatctaccaacatggttggaagggaggagttatcaaaagcaataaggaagataatggataaggatgacaaagaagggtgtgtaatgagggaaagggctaaagagcttaagcacatagcagaaagagcttggtttcatgatggtccttcttatttagcactttcaaaaatcactcactcaaatagggtgtgataactcatttatggtggttaaaataagtactcactttggtacaagaaaattctattctagaataaacaatcattattattgtc

SEQ ID NO: 7404 - protein, 501 aa, Glycine max
  misc_feature (1)..(501): Ceres Seq. ID no. 15171615
IQSLVSFHNSHLMAISNNNHHALLLASPGMGHIIPALELAKRLVTHKIISKLTFFCGSIKTSTPSKAETQILQSAIKENLFDLIQLPPIDLTIHVSPRDTLETKIAIIMHEIPLLFVSTISSMNLNPTMIITDFFFSQVIPLAKNLNLPTFAFAPTNAWLVALGLHTPTLDKEIEGEYINESKPISIPGCKSIHPLDMFGMLRDRTQRIYHEYVGACEGAALADGIFVNTFHELEPKTLEALGSGHIITKVPVYPVGPIVRDQRSPNGSNEGKIGDVFGWLDKQEEESVVYVSLGSGYTMSFEEIKEMALGLELSGKKFVWSVRPPATKSGTGNYLTAGEEGETRTILGSNNEPSNSFPDEFYRIQTNGIVITDWAPQLDILKHPSFGGFVSHCGWNSLMESVSCGVPIIGLPLYAEQMMNAAMLMEEVGNAIRVEVSPSTNMVGREELSKAIRKIMDKDDKEGCVMRERAKELKHIAERAWFHDGPSYLALSKITHSNRV

SEQ ID NO: 7405 - protein, 489 aa, Glycine max
  misc_feature (1)..(489): Ceres Seq. ID no. 15171616
MAISNNNHHALLLASPGMGHIIPALELAKRLVTHKIISKLTFFCGSIKTSTPSKAETQILQSAIKENLFDLIQLPPIDLTIHVSPRDTLETKIAIIMHEIPLLFVSTISSMNLNPTMIITDFFFSQVIPLAKNLNLPTFAFAPTNAWLVALGLHTPTLDKEIEGEYINESKPISIPGCKSIHPLDMFGMLRDRTQRIYHEYVGACEGAALADGIFVNTFHELEPKTLEALGSGHIITKVPVYPVGPIVRDQRSPNGSNEGKIGDVFGWLDKQEEESVVYVSLGSGYTMSFEEIKEMALGLELSGKKFVWSVRPPATKSGTGNYLTAGEEGETRTILGSNNEPSNSFPDEFYRIQTNGIVITDWAPQLDILKHPSFGGFVSHCGWNSLMESVSCGVPIIGLPLYAEQMMNAAMLMEEVGNAIRVEVSPSTNMVGREELSKAIRKIMDKDDKEGCVMRERAKELKHIAERAWFHDGPSYLALSKITHSNRV

SEQ ID NO: 7406 - protein, 472 aa, Glycine max
  misc_feature (1)..(472): Ceres Seq. ID no. 15171617
MGHIIPALELAKRLVTHKIISKLTFFCGSIKTSTPSKAETQILQSAIKENLFDLIQLPPIDLTIHVSPRDTLETKIAIIMHEIPLLFVSTISSMNLNPTMIITDFFFSQVIPLAKNLNLPTFAFAPTNAWLVALGLHTPTLDKEIEGEYINESKPISIPGCKSIHPLDMFGMLRDRTQRIYHEYVGACEGAALADGIFVNTFHELEPKTLEALGSGHIITKVPVYPVGPIVRDQRSPNGSNEGKIGDVFGWLDKQEEESVVYVSLGSGYTMSFEEIKEMALGLELSGKKFVWSVRPPATKSGTGNYLTAGEEGETRTILGSNNEPSNSFPDEFYRIQTNGIVITDWAPQLDILKHPSFGGFVSHCGWNSLMESVSCGVPIIGLPLYAEQMMNAAMLMEEVGNAIRVEVSPSTNMVGREELSKAIRKIMDKDDKEGCVMRERAKELKHIAERAWFHDGPSYLALSKITHSNRV

SEQ ID NO: 7407 - DNA, 1605 bp, Glycine max
  misc_feature (1)..(1605): Ceres Seq. ID no. 15171618
actcatttccacatctctgacagaaaatggagaactatcagtacccggcgtcgtaccctgactccggcgagtcgtcgccgcgctcccgcgagatcgacttcgagaacccgccgccgtgggacgagcagcagaaccaaaactacaaggccaagttcatgtgcagctacggcggcaagatccagccccgcacccacgacaaccagctctcctacgtcggcggcgacaccaagatcctcgccgtcgaccgctccgtcaagttccccgccttcctctccaagctcgccgccgtctgcgactccgccccgcaggacctcaccttcaagtaccagctccccggtgaggacctcgacgccctcatctccgtcaccaacgacgacgacctcgaacacatgatgcacgagtacgacagactctatcgccctaacctaaaacctgttagaatgagactcttcctcttcacgctctctagttcaaatcctaattcctctttctcctccgaacgcgaccatttcgtcgaggctcttaattcgggtccgattccttctcaacccgacccgatcaaaaccccgcccgttacgccttctaatgttgactatctcttcggtctcgataaagccgttgctcctcctccaaatcttcctccgaacttcgcagcggttaaattccacgatccggtgccggagcctgtcgcgccgccggtagagtatcaatcgagaggctccgatcgggttgttggatcggatccgaatgtgaatccgattgaaattcagagacagttgcagcaggagatggagcgattgcagattgcggagaatgaatatcgtagaaggagtgaggatggatttgcagccggttatgctgctgctgctgctgccggaggggattattatatgcagaaggtgcaggagaaggttccgccgcagaatgcggcggcgtactggtcggagaagcagttttccggggagggatatcagacgacggtgacgacggctccaggaggaggtgaccagccgatgtatgttatggcgccgccggggacgttctaccacgcgccagtggtgcggcctccggcggcggcgcaggggtactacgccgtgcagaggatgggttccgagggctaccgcgagcagcaggcggtttacggcggcgtggcgccgtcgaaagcggcgttttcttcggcggggatggctaaggggacggcgtattcggagggatatggtggcggcgtggtgaggcctgcgggggtgccggataatgcggcgtacgcgcaggtggcgtatgatagcgcgagtgggaggcaggtttactatactgcgcagggagggatggtgcacgcgccgccgccgccgcagtaccaaggggttccgcctcaggaatttaggccgggtggggtttcggtggggcaagatggtaaggtggttaacaaggttaaccaaggttctgcgtgattaagattgtgattatgttaattctgaaacaaataatacactaaatatgttttgcgtttttttttttttctcttcatggtttatatatatacactaaatattacgagtattgtttgctaataatttatgggtagtgcttaaacttccttctgtctgc

SEQ ID NO: 7408 - protein, 473 aa, Glycine max
  misc_feature (1)..(473): Ceres Seq. ID no. 15171619
MENYQYPASYPDSGESSPRSREIDFENPPPWDEQQNQNYKAKFMCSYGGKIQPRTHDNQLSYVGGDTKILAVDRSVKFPAFLSKLAAVCDSAPQDLTFKYQLPGEDLDALISVTNDDDLEHMMHEYDRLYRPNLKPVRMRLFLFTLSSSNPNSSFSSERDHFVEALNSGPIPSQPDPIKTPPVTPSNVDYLFGLDKAVAPPPNLPPNFAAVKFHDPVPEPVAPPVEYQSRGSDRVVGSDPNVNPIEIQRQLQQEMERLQIAENEYRRRSEDGFAAGYAAAAAAGGDYYMQKVQEKVPPQNAAAYWSEKQFSGEGYQTTVTTAPGGGDQPMYVMAPPGTFYHAPVVRPPAAAQGYYAVQRMGSEGYREQQAVYGGVAPSKAAFSSAGMAKGTAYSEGYGGGVVRPAGVPDNAAYAQVAYDSASGRQVYYTAQGGMVHAPPPPQYQGVPPQEFRPGGVSVGQDGKVVNKVNQGSA

SEQ ID NO: 7409 - protein, 430 aa, Glycine max
  misc_feature (1)..(430): Ceres Seq. ID no. 15171620
MCSYGGKIQPRTHDNQLSYVGGDTKILAVDRSVKFPAFLSKLAAVCDSAPQDLTFKYQLPGEDLDALISVTNDDDLEHMMHEYDRLYRPNLKPVRMRLFLFTLSSSNPNSSFSSERDHFVEALNSGPIPSQPDPIKTPPVTPSNVDYLFGLDKAVAPPPNLPPNFAAVKFHDPVPEPVAPPVEYQSRGSDRVVGSDPNVNPIEIQRQLQQEMERLQIAENEYRRRSEDGFAAGYAAAAAAGGDYYMQKVQEKVPPQNAAAYWSEKQFSGEGYQTTVTTAPGGGDQPMYVMAPPGTFYHAPVVRPPAAAQGYYAVQRMGSEGYREQQAVYGGVAPSKAAFSSAGMAKGTAYSEGYGGGVVRPAGVPDNAAYAQVAYDSASGRQVYYTAQGGMVHAPPPPQYQGVPPQEFRPGGVSVGQDGKVVNKVNQGSA

SEQ ID NO: 7410 - protein, 352 aa, Glycine max
  misc_feature (1)..(352): Ceres Seq. ID no. 15171621
MMHEYDRLYRPNLKPVRMRLFLFTLSSSNPNSSFSSERDHFVEALNSGPIPSQPDPIKTPPVTPSNVDYLFGLDKAVAPPPNLPPNFAAVKFHDPVPEPVAPPVEYQSRGSDRVVGSDPNVNPIEIQRQLQQEMERLQIAENEYRRRSEDGFAAGYAAAAAAGGDYYMQKVQEKVPPQNAAAYWSEKQFSGEGYQTTVTTAPGGGDQPMYVMAPPGTFYHAPVVRPPAAAQGYYAVQRMGSEGYREQQAVYGGVAPSKAAFSSAGMAKGTAYSEGYGGGVVRPAGVPDNAAYAQVAYDSASGRQVYYTAQGGMVHAPPPPQYQGVPPQEFRPGGVSVGQDGKVVNKVNQGSA

SEQ ID NO: 7411 - DNA, 1657 bp, Glycine max
  misc_feature (1)..(1657): Ceres Seq. ID no. 15171622
atcatggcatcgtcaccaaccttctccaaagtctctctgctcttgttggtgtcactttctttctcctatgcaacttctggcttcaaccatgagcatgcttacccaccacaatcacaagcagagatgctcacaagaaaccttaacctattcccaaaggacccagttaacattattaaaggtgattttgatagttttgtaccaggaaagatagtggagaagaagttctcgcttcttggtcattctgggccttctattcaacaccttggtcaccatgctggccactattcccttcctcattccaaagctgcaagaatgttctactttttctttgaatcacggaacaataaggatgatcctgtagtgatatggttgactggaggaccagggtgtggaagtgaattagctttgttttatgagaatggtccttttcatattgccaataacttgtctcttacatggaatgattacggctgggaccaggcatcaaatattttatttgttgaccaacccactgggacagggtttagttactcttctgatgatagtgacattcgtcatgatgaagccagcattagcaacgatttatatgacttcttgcaggagttttttaaggctcatcctaagttcgttaagaatgacttttatattaccggagaatcatacgctggacactatattccggctcttgcatcccggataatccaaggaaataaagaaaatcaaggaatttatataaatctcaagggtttagccattggtaatggggcaacaaatcctgcaattcaataccaagcatatccagattttgcattagacaacaaaataattacaaaggctaattacgatgaaatcaacaagttaatcccagattgtgaacaagccgctaaaacttgtgaaactcaaggtggacaaagttgcgcgatcgcatttaatacttgccaaaaaatattctaccatatcctggactttgctcccggcattaactactatgacatcagaaaaaaatgtaagggagattggtgctatgactttcgaaacgtggagactctgttaaacctaccgaaagtaaagagtgttataggggtgtcaaatgacttgcagtatgtttcatgcagtaaaagagtgcatgaggctatgatgcaagactatatgagaaacatggaagtggagattctttctcttcttgaggacggaatcaagttgcttgtgtatgtaggggaagaagatctcatatgcaattggcttgggaattcaaggtgggtacatgcaatgaagtggtcaggcaaaaaggcctttggaaaatctcctacagtgaaatttgtggttgatggttcaaaagcagggtctcttaatagctatggacctctttctttcctcaaggtacatgaggctggacacttggtccctatggatcaaccaaaagctgcacttcagatgttgcaaagttggatggcagggaaactgacataaacaaaaggagagacaattaatgtcgctcaaaattctatacattcacctcaaaaccaaaaccagacatcctctgaacatggatagtgatcacaattattttggctacatgacttggtttgtttttggagggtggagtttatatttttttctgaacctttctgaaattcctgatatttatactcaaaac

SEQ ID NO: 7412 - protein, 489 aa, Glycine max
  misc_feature (1)..(489): Ceres Seq. ID no. 15171623
IMASSPTFSKVSLLLLVSLSFSYATSGFNHEHAYPPQSQAEMLTRNLNLFPKDPVNIIKGDFDSFVPGKIVEKKFSLLGHSGPSIQHLGHHAGHYSLPHSKAARMFYFFFESRNNKDDPVVIWLTGGPGCGSELALFYENGPFHIANNLSLTWNDYGWDQASNILFVDQPTGTGFSYSSDDSDIRHDEASISNDLYDFLQEFFKAHPKFVKNDFYITGESYAGHYIPALASRIIQGNKENQGIYINLKGLAIGNGATNPAIQYQAYPDFALDNKIITKANYDEINKLIPDCEQAAKTCETQGGQSCAIAFNTCQKIFYHILDFAPGINYYDIRKKCKGDWCYDFRNVETLLNLPKVKSVIGVSNDLQYVSCSKRVHEAMMQDYMRNMEVEILSLLEDGIKLLVYVGEEDLICNWLGNSRWVHAMKWSGKKAFGKSPTVKFVVDGSKAGSLNSYGPLSFLKVHEAGHLVPMDQPKAALQMLQSWMAGKLT

SEQ ID NO: 7413 - protein, 488 aa, Glycine max
  misc_feature (1)..(488): Ceres Seq. ID no. 15171624
MASSPTFSKVSLLLLVSLSFSYATSGFNHEHAYPPQSQAEMLTRNLNLFPKDPVNIIKGDFDSFVPGKIVEKKFSLLGHSGPSIQHLGHHAGHYSLPHSKAARMFYFFFESRNNKDDPVVIWLTGGPGCGSELALFYENGPFHIANNLSLTWNDYGWDQASNILFVDQPTGTGFSYSSDDSDIRHDEASISNDLYDFLQEFFKAHPKFVKNDFYITGESYAGHYIPALASRIIQGNKENQGIYINLKGLAIGNGATNPAIQYQAYPDFALDNKIITKANYDEINKLIPDCEQAAKTCETQGGQSCAIAFNTCQKIFYHILDFAPGINYYDIRKKCKGDWCYDFRNVETLLNLPKVKSVIGVSNDLQYVSCSKRVHEAMMQDYMRNMEVEILSLLEDGIKLLVYVGEEDLICNWLGNSRWVHAMKWSGKKAFGKSPTVKFVVDGSKAGSLNSYGPLSFLKVHEAGHLVPMDQPKAALQMLQSWMAGKLT

SEQ ID NO: 7414 - protein, 448 aa, Glycine max
  misc_feature (1)..(448): Ceres Seq. ID no. 15171625
MLTRNLNLFPKDPVNIIKGDFDSFVPGKIVEKKFSLLGHSGPSIQHLGHHAGHYSLPHSKAARMFYFFFESRNNKDDPVVIWLTGGPGCGSELALFYENGPFHIANNLSLTWNDYGWDQASNILFVDQPTGTGFSYSSDDSDIRHDEASISNDLYDFLQEFFKAHPKFVKNDFYITGESYAGHYIPALASRIIQGNKENQGIYINLKGLAIGNGATNPAIQYQAYPDFALDNKIITKANYDEINKLIPDCEQAAKTCETQGGQSCAIAFNTCQKIFYHILDFAPGINYYDIRKKCKGDWCYDFRNVETLLNLPKVKSVIGVSNDLQYVSCSKRVHEAMMQDYMRNMEVEILSLLEDGIKLLVYVGEEDLICNWLGNSRWVHAMKWSGKKAFGKSPTVKFVVDGSKAGSLNSYGPLSFLKVHEAGHLVPMDQPKAALQMLQSWMAGKLT

SEQ ID NO: 7415 - DNA, 1477 bp, Glycine max
  misc_feature (1)..(1477): Ceres Seq. ID no. 15171653
aattgaacatgaagagatgctggaagttattaggctggaaggtcactctcttgctcaagaagatgcttttgtttctagggacattcatctcttacagatatgtagtgggattgatgagaatgctgtgggggcttgttctgagcttgtatttgctccaattgatgaaatgttccccgatgatgctccattgattccttctggtttccgcattatcccattagattcaaaaccaggtgacaaaaaggaagttgctacaaatcggaccctggatttgacatctggttttgaagtgggtcctgcaacaactgctggcacagatgcatcatccagtcaaaacactcgatcagtgttgactattgccttccagttccctttcgacagcagtctgcaagacaatgtcgcagtcatggcacgtcagtatgtccgcagtgtgatttcttccgtgcagagggttgccatggctatatcaccatctggtataagcccatctgttggagctaaactttctcctggttctccagaggctgttacactagctcactggatctgccaaagttatagttactatatagggtctgacttactgagatccgattctcttgtgggtgacatgatgctgaaacaactgtggcatcatcaggatgcaattctatgctgttcactgaagccattgccagtgttcatatttgcaaatcaagctggccttgacatgttggaaacaactctagtagctttacaagacatcacattggataaaatatttgatgaggctggacgcaaggcattgtgtacagactttgccaagttaatggagcagggatttgcttatctgccagctggaatctgcatgtcgacgatgggacgccatgtgtcatatgaccaagccatcgcatggaaagtgcttactggagaagacaacactgttcactgcctggctttctctttcataaattggtcatttgtatgaaaatccaattcgcgtgccctgctttttcccacttgaacataaaaatgaaagggttaaaagggagacagtcaaatttggagggaaaaagaagtcctaaatttttgtataacacatcaggatcaggtatgcatttaattcgatttaatttatttcttatttagtgcagaaaccaaattgaattaatcttgtaaattatttagtgctagagtgaagttcagacttgaatgacacatgttgagtactttgtttttgtctctactatctttccctcgaccttaagctcatacacagaagaacttgtgtgatgacaaagcgcgtttgtaatgtttattcttacacaatcacagttctgacttgtgtgtccaacgtagtactatatattcttactggagtactttgtctttcaactcgagttaagcattagggtacatttgtatctgaagtactatgcatttgtacaacctatctgtattttaagattgctaaagttataaactgaagtgttaaatc

SEQ ID NO: 7416 - protein, 321 aa, Glycine max
  misc_feature (1)..(321): Ceres Seq. ID no. 15171654
IEHEEMLEVIRLEGHSLAQEDAFVSRDIHLLQICSGIDENAVGACSELVFAPIDEMFPDDAPLIPSGFRIIPLDSKPGDKKEVATNRTLDLTSGFEVGPATTAGTDASSSQNTRSVLTIAFQFPFDSSLQDNVAVMARQYVRSVISSVQRVAMAISPSGISPSVGAKLSPGSPEAVTLAHWICQSYSYYIGSDLLRSDSLVGDMMLKQLWHHQDAILCCSLKPLPVFIFANQAGLDMLETTLVALQDITLDKIFDEAGRKALCTDFAKLMEQGFAYLPAGICMSTMGRHVSYDQAIAWKVLTGEDNTVHCLAFSFINWSFV

SEQ ID NO: 7417 - protein, 316 aa, Glycine max
  misc_feature (1)..(316): Ceres Seq. ID no. 15171655
MLEVIRLEGHSLAQEDAFVSRDIHLLQICSGIDENAVGACSELVFAPIDEMFPDDAPLIPSGFRIIPLDSKPGDKKEVATNRTLDLTSGFEVGPATTAGTDASSSQNTRSVLTIAFQFPFDSSLQDNVAVMARQYVRSVISSVQRVAMAISPSGISPSVGAKLSPGSPEAVTLAHWICQSYSYYIGSDLLRSDSLVGDMMLKQLWHHQDAILCCSLKPLPVFIFANQAGLDMLETTLVALQDITLDKIFDEAGRKALCTDFAKLMEQGFAYLPAGICMSTMGRHVSYDQAIAWKVLTGEDNTVHCLAFSFINWSFV

SEQ ID NO: 7418 - protein, 266 aa, Glycine max
  misc_feature (1)..(266): Ceres Seq. ID no. 15171656
MFPDDAPLIPSGFRIIPLDSKPGDKKEVATNRTLDLTSGFEVGPATTAGTDASSSQNTRSVLTIAFQFPFDSSLQDNVAVMARQYVRSVISSVQRVAMAISPSGISPSVGAKLSPGSPEAVTLAHWICQSYSYYIGSDLLRSDSLVGDMMLKQLWHHQDAILCCSLKPLPVFIFANQAGLDMLETTLVALQDITLDKIFDEAGRKALCTDFAKLMEQGFAYLPAGICMSTMGRHVSYDQAIAWKVLTGEDNTVHCLAFSFINWSFV

SEQ ID NO: 7419 - DNA, 1552 bp, Glycine max
  misc_feature (1)..(1552): Ceres Seq. ID no. 15171669
atccttctggcgtcgacggtgaaacttgttttccttgcgcgaagctttggcattcccccaatcgcttcatcctcatctacttaaccctaaccccacactctcacatactacatatataaaaccgccgtcacgatgatgctcagaattcgtagccgcgatggcctggagcgagtgagcgtcgaaaaccccctcgccacaacagtctcggacctaaaacggattatccaaacccaattgggaatcccggttcacaaccaaaccctctccaccaaccagaacctcctcttggccaaatccctcgaagatctcctccgattcaccgacatgtccaacctcgatgcgtctctctcgtctcttaacctcggccacggctccatcgtcttcttggcctacgagggcgagcggcgcgtggcgggccccgccttcaaccccgccggctccttcggccgcaagatgaccatggacgacctcatcgccaagcagatgcgcgtcacgcgccaggagaatccacactgcgagctcgtctccttcgaccgcgactgcgccaacgcgttccagcactacgtcaacgacactctcgccttcgccgtcaagcgcggggggttcatgtacggcaccgtttcggaggtgggaaaggtcgaggtggacttcatctacgagcctccgcagcagggttcggaggacaatctcgtctttttcagggacccagaagaggagaagtttgttgaagctattgcggtggggttggggatgaggaaggttgggtttattttcacgcagacgattactcaggataagaaggattacactttgtcgaatagggaggtgcttcaggctgtggagtaccatgccgagagtgggttgaaggagtgggctactgcggtggttaagcttgaggtgaatgaggaaatgggtggtgctgatgtgcattttgaagcgtttcagatgagtgatgtgtgtgtgaggttgtttaaggaagggtggttcgagacggagatcaaggaggacgatgatcccaagttgtcgaagatgaagaaggatgtggttgtcggggttaaggatactagagaggttgacaatgatttcttcttggtcgtcgtcaaaatcgctgatcatcagggtcctctttcatcatcatttcccattgagaaccggaacactcaagtgactatgaaggctttgaagaatcatctggaacggtcaaaaaatcttccatttgtgaagcgaatttctgattttcatcttcttctcgtattagcaagggttttagacctgaatgctgatgttcctgcattgacggaatgtgtgcagacacagacttctgttccagaaggttatcagatccttattgagtctatggcaagcactgcttgatgctgtatgcagttgttctggactcatggtgacacgagaattatgcactttacgttcaggtcctttgcagcaacatggtgcatattgccccatagcactcaaggaatgtttcgtatgttggtaatttgtacattgcttctttattgctgcggaaaatctcggatctgtcattttaccg

SEQ ID NO: 7420 - protein, 413 aa, Glycine max
  misc_feature (1)..(413): Ceres Seq. ID no. 15171670
MMLRIRSRDGLERVSVENPLATTVSDLKRIIQTQLGIPVHNQTLSTNQNLLLAKSLEDLLRFTDMSNLDASLSSLNLGHGSIVFLAYEGERRVAGPAFNPAGSFGRKMTMDDLIAKQMRVTRQENPHCELVSFDRDCANAFQHYVNDTLAFAVKRGGFMYGTVSEVGKVEVDFIYEPPQQGSEDNLVFFRDPEEEKFVEAIAVGLGMRKVGFIFTQTITQDKKDYTLSNREVLQAVEYHAESGLKEWATAVVKLEVNEEMGGADVHFEAFQMSDVCVRLFKEGWFETEIKEDDDPKLSKMKKDVVVGVKDTREVDNDFFLVVVKIADHQGPLSSSFPIENRNTQVTMKALKNHLERSKNLPFVKRISDFHLLLVLARVLDLNADVPALTECVQTQTSVPEGYQILIESMASTA

SEQ ID NO: 7421 - protein, 412 aa, Glycine max
  misc_feature (1)..(412): Ceres Seq. ID no. 15171671
MLRIRSRDGLERVSVENPLATTVSDLKRIIQTQLGIPVHNQTLSTNQNLLLAKSLEDLLRFTDMSNLDASLSSLNLGHGSIVFLAYEGERRVAGPAFNPAGSFGRKMTMDDLIAKQMRVTRQENPHCELVSFDRDCANAFQHYVNDTLAFAVKRGGFMYGTVSEVGKVEVDFIYEPPQQGSEDNLVFFRDPEEEKFVEAIAVGLGMRKVGFIFTQTITQDKKDYTLSNREVLQAVEYHAESGLKEWATAVVKLEVNEEMGGADVHFEAFQMSDVCVRLFKEGWFETEIKEDDDPKLSKMKKDVVVGVKDTREVDNDFFLVVVKIADHQGPLSSSFPIENRNTQVTMKALKNHLERSKNLPFVKRISDFHLLLVLARVLDLNADVPALTECVQTQTSVPEGYQILIESMASTA

SEQ ID NO: 7422 - protein, 349 aa, Glycine max
  misc_feature (1)..(349): Ceres Seq. ID no. 15171672
MSNLDASLSSLNLGHGSIVFLAYEGERRVAGPAFNPAGSFGRKMTMDDLIAKQMRVTRQENPHCELVSFDRDCANAFQHYVNDTLAFAVKRGGFMYGTVSEVGKVEVDFIYEPPQQGSEDNLVFFRDPEEEKFVEAIAVGLGMRKVGFIFTQTITQDKKDYTLSNREVLQAVEYHAESGLKEWATAVVKLEVNEEMGGADVHFEAFQMSDVCVRLFKEGWFETEIKEDDDPKLSKMKKDVVVGVKDTREVDNDFFLVVVKIADHQGPLSSSFPIENRNTQVTMKALKNHLERSKNLPFVKRISDFHLLLVLARVLDLNADVPALTECVQTQTSVPEGYQILIESMASTA

SEQ ID NO: 7423 - DNA, 1224 bp, Glycine max
  misc_feature (1)..(1224): Ceres Seq. ID no. 15171685
ttttttcatattcttcttcttctttctcataactttccaccctttctctctcacaatggccaatacatccttcttctttttcttcatgttactcgctacctcctctctcgcccaatccccttcagcttcccccgccgcaactcccaaagcctcgccgtcgccaccacaggctgccgctcccaaagcctctcctccaaccacctcctccgctcccccacccaccacctccacccctcctccacccgctcccgctcccgtttccaagaccgctccggcctcttctcctccgtcccccaccccttcctcctcctcctcctccggccccaccgcttcctctccttctaactcccccaccgactctcctcccgcccccgtgtctccctccgactcccccgtcgcctccggccccgccgtagtcagcgacggacccgccgacgcccccaccgctcttggccccagcagccacgcccacctccgcagagtctccgcctccggatctgtcgccgccgttgcattcgccgccgcggccgctttgatgatgtagatccggaggcggagactcggcggaggttgcggtcacggtggcggtggaggcgtcgagttctatttccacaagctcaggttcggttgcgcaaccgaaccggtgtgccacgtgtcggaagcgcgtggggctgaccgggttcaagtgcaggtgcggattgacgttctgcggggcccacaggtactcggagaagcacgcgtgcgggttcgattttaagacggtggggagagaggagattgcacgtgccaaccccgtgatcaaagcggagaagctgcggaggatttgatgattcgttctcggccgttcgatgggaccggatttggtgatttgatctcgaccgtccacgtgtactgcgaaagatagagagagaaaatgtcgttattatctaaaattatgattatgatgatctgtgttttaattaagattaagatgaaagcttgaatagtcggtttgtctggtctagtagggcatgaaaatgaaataaatgagtaatttattttggctttgtaaaagcgagaaaaaaagaaaagaaaaaacaacgttggattaaaaaatttctaggtccaccgatgggggtggttgaaacttgaaatgatttgtgataagagtctccgggcaacgacgcagtgcggtggagcgttttattgtgctttcggtaatgaatgtgaaagtgaaattattgc

SEQ ID NO: 7424 - protein, 180 aa, Glycine max
  misc_feature (1)..(180): Ceres Seq. ID no. 15171686
FFIFFFFFLITFHPFSLTMANTSFFFFFMLLATSSLAQSPSASPAATPKASPSPPQAAAPKASPPTTSSAPPPTTSTPPPPAPAPVSKTAPASSPPSPTPSSSSSSGPTASSPSNSPTDSPPAPVSPSDSPVASGPAVVSDGPADAPTALGPSSHAHLRRVSASGSVAAVAFAAAAALMM

SEQ ID NO: 7425 - protein, 162 aa, Glycine max
  misc_feature (1)..(162): Ceres Seq. ID no. 15171687
MANTSFFFFFMLLATSSLAQSPSASPAATPKASPSPPQAAAPKASPPTTSSAPPPTTSTPPPPAPAPVSKTAPASSPPSPTPSSSSSSGPTASSPSNSPTDSPPAPVSPSDSPVASGPAVVSDGPADAPTALGPSSHAHLRRVSASGSVAAVAFAAAAALMM

SEQ ID NO: 7426 - protein, 152 aa, Glycine max
  misc_feature (1)..(152): Ceres Seq. ID no. 15171688
MLLATSSLAQSPSASPAATPKASPSPPQAAAPKASPPTTSSAPPPTTSTPPPPAPAPVSKTAPASSPPSPTPSSSSSSGPTASSPSNSPTDSPPAPVSPSDSPVASGPAVVSDGPADAPTALGPSSHAHLRRVSASGSVAAVAFAAAAALMM

SEQ ID NO: 7427 - DNA, 1725 bp, Glycine max
  misc_feature (1)..(1725): Ceres Seq. ID no. 15171693
atattccgataaacagaaacaccaccgttgaatttgagaatcccggcgaggcatgttcttgctccgagtccactcggtggaagaggaccaccctctggatccccaaaccatcttccaatcccaatcccaatcccaatcccaatcccaatccaacaaccctaaattcagcgaacgcagaggcgcactccacttgttccgaacctcttcccattcctcgctcccaacccagacctctctttcttctctcctcttcatcctcgccgtccccaactacctctccttccacgacttcattcccttctgtggaccccacctcgaccgtttccaccaccttctcttcatcagaaacgacggcaccgaagatcgctatagcgtcctcatcgagttcgccgatcactttgccgccgacgcattttttaccaatttcaatgccaagaagttttctcctgccgaggcagaggtgtgccatattttgtttctgcaatccgtggagtattctgaatatgcagaagttgctgggactccgcctcctggttgtacggaaataccaacttgtcctgtttgtcttgagaggttggacccagatacgagtgggattctcacaacactttgcgaccactcatttgattgcccttgtgtttcaaagtggacgtacttgtcttgccaggtttgtcaattctgtcagcaacaggatgagaagccaacctgttttatttgtggaacattagatgatctctgggtttgtatgatttgtggatttgttggatgtggaagatataaagaaggacatgccattcagcattggaaagatactcagcattgctattctcttgattttaaaacacagcaaatttgggattatgtgggtgacagttatgtccatcgactgaaccaggaccagtctaaaattgatggcaagttggaggagatgaattttcgctgtatgtcactggaaggagattgtggtatgtgcgaatgccgtgaagatttgggaattaatggggcccttttcaacagcaaagttgaaacgattgtggatgaatacaaccgtcttcttacatctcagttggagacacaaagacaatattatgaatctttactagtggaggcaaaaagtaaaatggaaagttccatgtctgaagcagtggagaaagctgcagcttctgaaatgcaggatatccaaaatgaactggaaaagtgtacagaagaaagaaatgccattgctgaggtcaatcagaaactcataaaaaatcaagagatttggcggaagaagtttaaagaagctgaagagagggaagctaaatcaattaaattgatgaatgagaggataattgatttggaggaacagattagagatatcaagatttttctagaagcacaaaaaacaattgataaaatgtcagattcaaatgggatcaaggagggaacagtcctgccggtggcttatgagcaatcttctccaggccacagtaagagaaacaaaaagtctggccgaaggaggaattagttgcaacctcaaccagaacacaatattcgaacttatgggtagtctgctttttaggagggaaggacactgcttctgattattacactgatacttgttgatatatagaggcagttccaactcgtggccatggattgctgtctgcatattttagatgttgtatagtttattcttgtaaacagttagtttaacgaatttcgtggtcctaaccctttcctctc

SEQ ID NO: 7428 - protein, 484 aa, Glycine max
  misc_feature (1)..(484): Ceres Seq. ID no. 15171694
MFLLRVHSVEEDHPLDPQTIFQSQSQSQSQSQSNNPKFSERRGALHLFRTSSHSSLPTQTSLSSLLFILAVPNYLSFHDFIPFCGPHLDRFHHLLFIRNDGTEDRYSVLIEFADHFAADAFFTNFNAKKFSPAEAEVCHILFLQSVEYSEYAEVAGTPPPGCTEIPTCPVCLERLDPDTSGILTTLCDHSFDCPCVSKWTYLSCQVCQFCQQQDEKPTCFICGTLDDLWVCMICGFVGCGRYKEGHAIQHWKDTQHCYSLDFKTQQIWDYVGDSYVHRLNQDQSKIDGKLEEMNFRCMSLEGDCGMCECREDLGINGALFNSKVETIVDEYNRLLTSQLETQRQYYESLLVEAKSKMESSMSEAVEKAAASEMQDIQNELEKCTEERNAIAEVNQKLIKNQEIWRKKFKEAEEREAKSIKLMNERIIDLEEQIRDIKIFLEAQKTIDKMSDSNGIKEGTVLPVAYEQSSPGHSKRNKKSGRRRN

SEQ ID NO: 7429 - protein, 253 aa, Glycine max
  misc_feature (1)..(253): Ceres Seq. ID no. 15171695
MICGFVGCGRYKEGHAIQHWKDTQHCYSLDFKTQQIWDYVGDSYVHRLNQDQSKIDGKLEEMNFRCMSLEGDCGMCECREDLGINGALFNSKVETIVDEYNRLLTSQLETQRQYYESLLVEAKSKMESSMSEAVEKAAASEMQDIQNELEKCTEERNAIAEVNQKLIKNQEIWRKKFKEAEEREAKSIKLMNERIIDLEEQIRDIKIFLEAQKTIDKMSDSNGIKEGTVLPVAYEQSSPGHSKRNKKSGRRRN

SEQ ID NO: 7430 - DNA, 1402 bp, Glycine max
  misc_feature (1)..(1402): Ceres Seq. ID no. 15171704
gttgactagaatgtggaaatccatgcttgaatgtcatcatgatcagtgtgaagcaattagagaagccagaatactgggttccattggatccaggaagaagagcagtgatagtcatctccaggcaaccaagcagcttgaacatgagcttatcaattggacattccaattctctggctggataagtgcccagaaaggttatgttagagcattgaataattggctgttgaaatgtctcctgtatgaacctgaagaaactccggatggcatagtccccttttcccctggtaggattggggctccgcaaatatttgtaatatgtaatcagtggtcccaagctttggatagaatatctgaaaaggaagttgttgattccatgcatgtatttaccatgagtgtgcttcagatatgggaacaagataagctagaaatgcataggcaggtgatgcagaataaggatctagagagaaaggtgagaaatatggatagagatgaccagaagctgcagaagcaaattcaagcgttagagcgaaaggtggttctggtatctggagaaggtaaaggtctctcagtttctgagaatatcatatatcagagtgacaaaagcagcagtctacaggctagcttacagtgcatttttgaggccatggagagatttactgatgaaactgtgagagcttatgaggagttgctacaacggagcaaagaagaaagtgctgcccggaatcacgagagagtctcatagggtggtgtgtagctgatggaagttggaatcatattatccttgccatttgccgagaagagaaactagctgatctccctctactaactctattctttacaatagagtcttgggaggaggggctgggtttgacttcttactaggctaagctaagctaagctaagctgcattggagccgaagatgctgctgggatgggacagtggaaattgttgtcaaacggaaggagaagtgaggtgtgaggcgcacagtggctttttgggtactcagtgctataaggctacaagtgaagttgtgctggctaaaagacagtggagcccacaaattataacatctaaatggtctttctttctgcattagaaaatagaaatgaaggagaaggacggactttcaggtatataacccctgtaactgcaactgcaagtcatgatagaaaggcgctcaaattgaagcagtgaaattggaacaagtttctctccttcgctgatgaacgtagctagctagctgtctgtcggaataacgcacgtcactgaatgcatgggtgtttattggttcctgtattaaaattatgttcatttcgtaaaaatattcgttttcaagttaaattattgtacagattacctattagtaacactgagcaggcttaatggaaaagcatttagaac

SEQ ID NO: 7431 - protein, 246 aa, Glycine max
  misc_feature (1)..(246): Ceres Seq. ID no. 15171705
LTRMWKSMLECHHDQCEAIREARILGSIGSRKKSSDSHLQATKQLEHELINWTFQFSGWISAQKGYVRALNNWLLKCLLYEPEETPDGIVPFSPGRIGAPQIFVICNQWSQALDRISEKEVVDSMHVFTMSVLQIWEQDKLEMHRQVMQNKDLERKVRNMDRDDQKLQKQIQALERKVVLVSGEGKGLSVSENIIYQSDKSSSLQASLQCIFEAMERFTDETVRAYEELLQRSKEESAARNHERVS

SEQ ID NO: 7432 - protein, 243 aa, Glycine max
  misc_feature (1)..(243): Ceres Seq. ID no. 15171706
MWKSMLECHHDQCEAIREARILGSIGSRKKSSDSHLQATKQLEHELINWTFQFSGWISAQKGYVRALNNWLLKCLLYEPEETPDGIVPFSPGRIGAPQIFVICNQWSQALDRISEKEVVDSMHVFTMSVLQIWEQDKLEMHRQVMQNKDLERKVRNMDRDDQKLQKQIQALERKVVLVSGEGKGLSVSENIIYQSDKSSSLQASLQCIFEAMERFTDETVRAYEELLQRSKEESAARNHERVS

SEQ ID NO: 7433 - protein, 239 aa, Glycine max
  misc_feature (1)..(239): Ceres Seq. ID no. 15171707
MLECHHDQCEAIREARILGSIGSRKKSSDSHLQATKQLEHELINWTFQFSGWISAQKGYVRALNNWLLKCLLYEPEETPDGIVPFSPGRIGAPQIFVICNQWSQALDRISEKEVVDSMHVFTMSVLQIWEQDKLEMHRQVMQNKDLERKVRNMDRDDQKLQKQIQALERKVVLVSGEGKGLSVSENIIYQSDKSSSLQASLQCIFEAMERFTDETVRAYEELLQRSKEESAARNHERVS

SEQ ID NO: 7434 - DNA, 1341 bp, Glycine max
  misc_feature (1)..(1341): Ceres Seq. ID no. 15171708
aaagactaatattctcattctccccaaaacctctgctagtttttggttttgcttcaacaccctcgtcctccttcttcttcacactcccccagaaatcccaattttgcccctaccctcttccccaatttacctacgatgtacagcaacatgctggtcaactgctccaactgccgcacccctctgcagctgccacctggcgcgggatccatccgctgcgccctctgccgcgctgtcactctcatcggcgatccacgcgccctcccttcgcagccaccggcctccacccacgcgcctcctcctccgtcctctccctacagccacgcgccgcccccgcccaacccccacggccgcaagaaggccgtcatcgtcggcatctcctaccgcttctcgcgacacgagctcaagggatgcatcaacgacgccaagtgcatgaagtacctcctcatcaacaagttcagctttccagaatcttccatcatcatgctcaccgaagaagaagatccccatggccccaaatttccaacgaagcacaacatcaggatggcaatgtattggcttgcacaaggatgtcaacctggagactccctggtttttcattattctggtcatggatcacagcaaaggaactatagtggtgatgaagctgatggatatgatgaaactctatgtccccttgattttgaaacacagggtatgattgtagatgatgagatcaatgccgcacttgttagacctattcctcatggagctaagctacatgcactaattgatgcctgccatagtggcactgttctagatttgccatttctttgcagaatgaacaggagtgggcaatatgtatgggaggaccatcgccctagatccggtgtatggaagggatctagtggtggagaagttatctgcttcagtggatgcgacgatcatcaaacttcagctgatacatctgctctatcaaaaattacatcgactggggcaatgacattttgcttcatccaagccatagagcgtggccatggggctacctatggcagcattcttactgcaatgcgcacttccatcagaaatgttggcggcggcggcggcggtaccgggggtggtgatgtggtaacatcccttctctccatgcttttgactggagggagtctcagcggtgtcggtggactgggacaggaaccacagttaacagcttgcgaagcatttgatgtgcatagaaaacctttttcattatgatactcaatattctttattctgcaatttgttttcctaggctctgcccctgtatacgactacattgattacaatgattaatatattataaagtagagaggattcttttttcgc

SEQ ID NO: 7435 - protein, 364 aa, Glycine max
  misc_feature (1)..(364): Ceres Seq. ID no. 15171709
MYSNMLVNCSNCRTPLQLPPGAGSIRCALCRAVTLIGDPRALPSQPPASTHAPPPPSSPYSHAPPPPNPHGRKKAVIVGISYRFSRHELKGCINDAKCMKYLLINKFSFPESSIIMLTEEEDPHGPKFPTKHNIRMAMYWLAQGCQPGDSLVFHYSGHGSQQRNYSGDEADGYDETLCPLDFETQGMIVDDEINAALVRPIPHGAKLHALIDACHSGTVLDLPFLCRMNRSGQYVWEDHRPRSGVWKGSSGGEVICFSGCDDHQTSADTSALSKITSTGAMTFCFIQAIERGHGATYGSILTAMRTSIRNVGGGGGGTGGGDVVTSLLSMLLTGGSLSGVGGLGQEPQLTACEAFDVHRKPFSL

SEQ ID NO: 7436 - protein, 360 aa, Glycine max
  misc_feature (1)..(360): Ceres Seq. ID no. 15171710
MLVNCSNCRTPLQLPPGAGSIRCALCRAVTLIGDPRALPSQPPASTHAPPPPSSPYSHAPPPPNPHGRKKAVIVGISYRFSRHELKGCINDAKCMKYLLINKFSFPESSIIMLTEEEDPHGPKFPTKHNIRMAMYWLAQGCQPGDSLVFHYSGHGSQQRNYSGDEADGYDETLCPLDFETQGMIVDDEINAALVRPIPHGAKLHALIDACHSGTVLDLPFLCRMNRSGQYVWEDHRPRSGVWKGSSGGEVICFSGCDDHQTSADTSALSKITSTGAMTFCFIQAIERGHGATYGSILTAMRTSIRNVGGGGGGTGGGDVVTSLLSMLLTGGSLSGVGGLGQEPQLTACEAFDVHRKPFSL

SEQ ID NO: 7437 - protein, 266 aa, Glycine max
  misc_feature (1)..(266): Ceres Seq. ID no. 15171711
MKYLLINKFSFPESSIIMLTEEEDPHGPKFPTKHNIRMAMYWLAQGCQPGDSLVFHYSGHGSQQRNYSGDEADGYDETLCPLDFETQGMIVDDEINAALVRPIPHGAKLHALIDACHSGTVLDLPFLCRMNRSGQYVWEDHRPRSGVWKGSSGGEVICFSGCDDHQTSADTSALSKITSTGAMTFCFIQAIERGHGATYGSILTAMRTSIRNVGGGGGGTGGGDVVTSLLSMLLTGGSLSGVGGLGQEPQLTACEAFDVHRKPFSL

SEQ ID NO: 7438 - DNA, 1309 bp, Glycine max
  misc_feature (1)..(1309): Ceres Seq. ID no. 15171739
atatacttcccttctggcaactctccaacagcttcccctttctccccttctccagaacctccgcgtcgtccgatgggaacagaaggttacacttacatggggcgcagtttgaccgaactccgcatcaacgacgattcctcttcctccgccttcagcgactgcaacagtgacagatctggcgaattcgccaccgcttcttcgcagacgcggaggtttctgatcgcctgcgccaccgaaaattccgacgacttgattcgccaactcgtttctgatctccactcctcttccatcgactatcagaaacaagccgccatggaaatccggttactcgcgaagaacaagccggagaatcgcatcaaaatcgcgaaagccggcgcaatcaaaccgctaatttctctcattttgtctccggacctccagctccaggaatacggcgtcaccgcgattttgaacctctcgctctgcgacgagaacaaggaggtgatagcctcctccggcgcgatcaagccgctggtccgcgcgctgggcgcgggaaccccgacggcgaaggagaacgcggcgtgcgcgctgctaagactctcgcaggtggaggagagcaaggcggcgatcgggcggtccggcgcgattccacttctggtgagcctcctggagagtggcgggttccgcgcgaagaaggacgcatcgacagcgctgtactcgctgtgcatggtgaaggagaacaagatcagggcggtgaaggcggggatcatgaaggtgctggtggagctgatggcggacttcgagtcgaacatggtggacaagtcggcgtacgtggtgagcgtgctggtggcggtagcggaggcgagggcggcgctggtggaggaaggaggcgtgccggtgctggtggagatcgtcgaggttgggacgcagcggcagaaggaaatcgttgtggttattctcttacaggtttgcgaggacagcgtggcgtatcgcaccatggtcgctcgcgaaggtgcgattcctcctttggtcgctttgtctcagtccggcaccaatcgtgccaagcaaaaggtattattctcttcaacgccatttccattactcttctccgctcgtgacgtggcacccttcccttcaaaccggtttgatccctttttttatttataaggtgagaatcaaataactcacctcagccaagtcaactaaattaaacccttttgacaccagttcggtttggtaactagttacggaaaactatttttgtaccgatgtgacaaatacaattgttgaagattgaagaaccaaaatgcaatactattatttctttgcc

SEQ ID NO: 7439 - protein, 381 aa, Glycine max
  misc_feature (1)..(381): Ceres Seq. ID no. 15171740
IYFPSGNSPTASPFSPSPEPPRRPMGTEGYTYMGRSLTELRINDDSSSSAFSDCNSDRSGEFATASSQTRRFLIACATENSDDLIRQLVSDLHSSSIDYQKQAAMEIRLLAKNKPENRIKIAKAGAIKPLISLILSPDLQLQEYGVTAILNLSLCDENKEVIASSGAIKPLVRALGAGTPTAKENAACALLRLSQVEESKAAIGRSGAIPLLVSLLESGGFRAKKDASTALYSLCMVKENKIRAVKAGIMKVLVELMADFESNMVDKSAYVVSVLVAVAEARAALVEEGGVPVLVEIVEVGTQRQKEIVVVILLQVCEDSVAYRTMVAREGAIPPLVALSQSGTNRAKQKVLFSSTPFPLLFSARDVAPFPSNRFDPFFYL

SEQ ID NO: 7440 - protein, 357 aa, Glycine max
  misc_feature (1)..(357): Ceres Seq. ID no. 15171741
MGTEGYTYMGRSLTELRINDDSSSSAFSDCNSDRSGEFATASSQTRRFLIACATENSDDLIRQLVSDLHSSSIDYQKQAAMEIRLLAKNKPENRIKIAKAGAIKPLISLILSPDLQLQEYGVTAILNLSLCDENKEVIASSGAIKPLVRALGAGTPTAKENAACALLRLSQVEESKAAIGRSGAIPLLVSLLESGGFRAKKDASTALYSLCMVKENKIRAVKAGIMKVLVELMADFESNMVDKSAYVVSVLVAVAEARAALVEEGGVPVLVEIVEVGTQRQKEIVVVILLQVCEDSVAYRTMVAREGAIPPLVALSQSGTNRAKQKVLFSSTPFPLLFSARDVAPFPSNRFDPFFYL

SEQ ID NO: 7441 - protein, 349 aa, Glycine max
  misc_feature (1)..(349): Ceres Seq. ID no. 15171742
MGRSLTELRINDDSSSSAFSDCNSDRSGEFATASSQTRRFLIACATENSDDLIRQLVSDLHSSSIDYQKQAAMEIRLLAKNKPENRIKIAKAGAIKPLISLILSPDLQLQEYGVTAILNLSLCDENKEVIASSGAIKPLVRALGAGTPTAKENAACALLRLSQVEESKAAIGRSGAIPLLVSLLESGGFRAKKDASTALYSLCMVKENKIRAVKAGIMKVLVELMADFESNMVDKSAYVVSVLVAVAEARAALVEEGGVPVLVEIVEVGTQRQKEIVVVILLQVCEDSVAYRTMVAREGAIPPLVALSQSGTNRAKQKVLFSSTPFPLLFSARDVAPFPSNRFDPFFYL

SEQ ID NO: 7442 - DNA, 1249 bp, Glycine max
  misc_feature (1)..(1249): Ceres Seq. ID no. 15171766
aaaaccataaccgttgttgaacctccgaaaaacaagactccctccaagaagaaaaatgctgaaagccgtggcgccactcttcagccgtagccacaagcagcagtctcggtccttcaaggagtactacgcagagtggttcaacaccctcaagaacaaccacctccccctcctccgccactccatctccggcgactccctcaccattctctccacccacgtcgagatgctccaccagcacttccagtcctactaccacgccctcgacgccgccgccacctccgacgcctcccagctcctctcccaggagtggcgcaactccctcgagaaacccctcctctggctcggcgacctccacccctccctcttcaccaacctcgcccgctccttcctccaagacgaacattcccccgaccacaccgacgacgaagatgattccgatccccaccaccaccaccaccaccaccaccactttcccctccccgaacgcccctggcaggtggcgatggcctggcgcaacccttcggaggctctaactgcccgcatggaccagatcgagtgcggcctccgcgtgattgtaccggccctttcggaccgcctgaaacacgcggaggacgcattcgtgggccgcgtaatggggaactggttccgctgccgtgaccatcatcacaagggcagcggagcctcgtccaaggttgctgtgggggccgatgtgaaggcccacatggaggagctcgtgagcgtgttcctctacgcaaaccgcctcaggaggaacgtgcttgtggacatacttagtgccaccaccgtttaccaggccgcgctgtttcttgaagggttggcccagtttcttattgggttcagggaccatgggttggtgaacgccgttgaacactgcaaggccttgcctctcgcaaacaataaacagtgtcgtcctcgctgccattgatgatgataatgcaacagtgtatgtatctatttcgttcctctcattgtgattgtgtggaacttttcgtggaaaaatactgtggaatggatggttactgtgttttaggtttagcattgatattctttacaattttgttgtttgtatttgataagatttttaggtttggaagatgacactggagacttaatttctgtgtcaatggattaattacgttttgtatttgtggagggaataagtgttagtgaacactgaacagtttcttcaattgagggaaatttctgttaacaatgttgatggatttgcagt

SEQ ID NO: 7443 - protein, 295 aa, Glycine max
  misc_feature (1)..(295): Ceres Seq. ID no. 15171767
MLKAVAPLFSRSHKQQSRSFKEYYAEWFNTLKNNHLPLLRHSISGDSLTILSTHVEMLHQHFQSYYHALDAAATSDASQLLSQEWRNSLEKPLLWLGDLHPSLFTNLARSFLQDEHSPDHTDDEDDSDPHHHHHHHHHFPLPERPWQVAMAWRNPSEALTARMDQIECGLRVIVPALSDRLKHAEDAFVGRVMGNWFRCRDHHHKGSGASSKVAVGADVKAHMEELVSVFLYANRLRRNVLVDILSATTVYQAALFLEGLAQFLIGFRDHGLVNAVEHCKALPLANNKQCRPRCH

SEQ ID NO: 7444 - protein, 239 aa, Glycine max
  misc_feature (1)..(239): Ceres Seq. ID no. 15171768
MLHQHFQSYYHALDAAATSDASQLLSQEWRNSLEKPLLWLGDLHPSLFTNLARSFLQDEHSPDHTDDEDDSDPHHHHHHHHHFPLPERPWQVAMAWRNPSEALTARMDQIECGLRVIVPALSDRLKHAEDAFVGRVMGNWFRCRDHHHKGSGASSKVAVGADVKAHMEELVSVFLYANRLRRNVLVDILSATTVYQAALFLEGLAQFLIGFRDHGLVNAVEHCKALPLANNKQCRPRCH

SEQ ID NO: 7445 - DNA, 1436 bp, Glycine max
  misc_feature (1)..(1436): Ceres Seq. ID no. 15171781
acactttcattatacattttttacaggcatctgaaatcttaaagcacccttatttgctgccttatgttgatcaatatcgttcatctttctgtactccaacagctggttctcctgaaaagccaatttctgctgtccatcatgctctaaaaaataagccaggaagtcaaaacagaagtagttcgagtaccgagaaagatagtttgatgtcaaatgagaaaaacaatgcaaaagcattgcacaaatgtgattgcaaaatcactgaaatagacctgacatcaattgaggatgacagctctgagcaactcctgcctggggaagaaggaaatggttccagcaaagtcaatgccaagacaaatgagaaagagctgacgaagcaatctaataatgaacagcattctaatgttgtatctaagcaaccaaaagcaattaagactgtagtgacagctttaaaagatggaaaacttaaagagacaagttctccaataagaagcaatcgcataaaggttggtggtgtgttgacacataaaataaatacagagacagtatccaatttgcccaaacccaattttggtgcttacgatttgaagcctaatttggaggtgccaactactgcaccttctaaaacaactcctattccgcaaaaagaatgcaagggtcaaacacttcaaagcatcaggtacattaccattataaatgctatagtgtactattagttacttttgaagatttcctcataacattgaaatttttttctgatatattgctacatgctggcagttaccaatgatagaatccacaccaaaaactaaacctagacataatgtgattccaccttctggtccagtcaaacaagtagaaggacgtgaagttccttccaagacaaggcaaaagactcctccaagcttacttaaaccaccttcttttacaggacatgtgaggcaggctgggtttgatgttctaaatgcagcaaataatactggaaagacaagtccaaagaaaatggttcgagagcctaagatgagccatcatcagttgaccaacagtcatctaccacatgtttctagagagattactagagagcctttgaagacttttgaaagcagttccaaaggaatgcaaacagacggcagcaattctgtctcatcttcgctctctattcaaggatttgaactttctgattttgcaaccacttttattgacttaagtgaaccaacacttcctgatcatgagaatttaaaccacactgaaaacaaggaatcacgtccagatagcagttcacctgcatcctatttgcattttgacatgtctgaacaattgtctggggaaacccctgtggttacaccacgttttcagaatataacttctagtaatgagaaagtaagtcccggtttaactcttgatcactcaagccaaaatgctgaggtaatgctttcttc

SEQ ID NO: 7446 - protein, 236 aa, Glycine max
  misc_feature (1)..(236): Ceres Seq. ID no. 15171782
TFIIHFLQASEILKHPYLLPYVDQYRSSFCTPTAGSPEKPISAVHHALKNKPGSQNRSSSSTEKDSLMSNEKNNAKALHKCDCKITEIDLTSIEDDSSEQLLPGEEGNGSSKVNAKTNEKELTKQSNNEQHSNVVSKQPKAIKTVVTALKDGKLKETSSPIRSNRIKVGGVLTHKINTETVSNLPKPNFGAYDLKPNLEVPTTAPSKTTPIPQKECKGQTLQSIRYITIINAIVYY

SEQ ID NO: 7447 - protein, 217 aa, Glycine max
  misc_feature (1)..(217): Ceres Seq. ID no. 15171783
MIESTPKTKPRHNVIPPSGPVKQVEGREVPSKTRQKTPPSLLKPPSFTGHVRQAGFDVLNAANNTGKTSPKKMVREPKMSHHQLTNSHLPHVSREITREPLKTFESSSKGMQTDGSNSVSSSLSIQGFELSDFATTFIDLSEPTLPDHENLNHTENKESRPDSSSPASYLHFDMSEQLSGETPVVTPRFQNITSSNEKVSPGLTLDHSSQNAEVMLS

SEQ ID NO: 7448 - protein, 169 aa, Glycine max
  misc_feature (1)..(169): Ceres Seq. ID no. 15171784
MSNEKNNAKALHKCDCKITEIDLTSIEDDSSEQLLPGEEGNGSSKVNAKTNEKELTKQSNNEQHSNVVSKQPKAIKTVVTALKDGKLKETSSPIRSNRIKVGGVLTHKINTETVSNLPKPNFGAYDLKPNLEVPTTAPSKTTPIPQKECKGQTLQSIRYITIINAIVYY

SEQ ID NO: 7449 - DNA, 1577 bp, Glycine max
  misc_feature (1)..(1577): Ceres Seq. ID no. 15171809
atccaagttccaacatcaactaaactccttctatgttctaactctctctcaccctccatattcctcaacttcaaattctttcttttctataccattttctctcaccaaagtcagctttacctgattcctttgtttagtttgatttattgtgatttcattggttcctttcttactttaaggaacaagtgtggctataatataactctggtgtacataatcacatagatgaggtggtgtggagttggtttattttcatttgttctccttttttctaacttcataaatggtgataatgattcaaaatgtaagtagcttagggaaataaaagtttgtggaaactgggtattcagcactatttttaaaaaataaaactttagtctaatttttggaatctgcattggtttccataaggattaagtgggaagcatgaagaacttatactggttcaaagagatttctaacaacgtgagatcagggagaaggctttcactaggggaatacaagagagcagtgtcatggtcaaagtatttggtctcttctggggcggccataaagggagaaggagaagaagaatggagtgctgatctgtctcagttgttcatagggtcaaaatttgcctctggcaggcatagcaggatctacagaggcatctacaagcacatggatgttgcaattaagctggtgagtcaacctgaggaggatgaggacttggctgttttgcttgagaagcaattcacttctgaggttgctttgctctttcgattgcgccatccaaatatcattacttttgttgcagcttgcaagaaacctcctgtgttctgcataattactgaatatttggctgggggttccttgagaaaatacttggttcagcaagggccacattcagttactcacaaagttgttctgaaattagctttagacatagcacggggaatgcaatatcttcattctcagggtatacttcacagggatctcaaatcagaaaacctgctgttgggggaagatttgtgcgtaaaagtagcagattttgggatctcttgcttggaatctcagacaggcagtgcaaaaggattcactggaacataccgttggatggcacctgaaatgatcaaagaaaagcgtcacaccaagaaagtagatgtctatagtttcgccatagttctatgggagctattaacaggattgacgccatttgacaacatgacaccagagcaagcagcatatgctgtgactcacaagaatgaaaggcctccgttgccatgtgactgtccaaaggcatttagccatctcatcaacagatgctggtcaagcaacccagataaaaggccacattttaatgagatagtcacaattttggagagctacattgaagcacttgagcaggatccagaatttttctctacttacaaaccacgtcctaataatataattctcagatgcttatcaaaatgtagtaatatatttgcttcttgcaaagcttagcattctctttccgataatgtaacatgaattgtattaaatcaatcccaagaaccaaaaatatgtttaattaataactatattaatcctcttcc

SEQ ID NO: 7450 - protein, 352 aa, Glycine max
  misc_feature (1)..(352): Ceres Seq. ID no. 15171810
MKNLYWFKEISNNVRSGRRLSLGEYKRAVSWSKYLVSSGAAIKGEGEEEWSADLSQLFIGSKFASGRHSRIYRGIYKHMDVAIKLVSQPEEDEDLAVLLEKQFTSEVALLFRLRHPNIITFVAACKKPPVFCIITEYLAGGSLRKYLVQQGPHSVTHKVVLKLALDIARGMQYLHSQGILHRDLKSENLLLGEDLCVKVADFGISCLESQTGSAKGFTGTYRWMAPEMIKEKRHTKKVDVYSFAIVLWELLTGLTPFDNMTPEQAAYAVTHKNERPPLPCDCPKAFSHLINRCWSSNPDKRPHFNEIVTILESYIEALEQDPEFFSTYKPRPNNIILRCLSKCSNIFASCKA

SEQ ID NO: 7451 - protein, 274 aa, Glycine max
  misc_feature (1)..(274): Ceres Seq. ID no. 15171811
MDVAIKLVSQPEEDEDLAVLLEKQFTSEVALLFRLRHPNIITFVAACKKPPVFCIITEYLAGGSLRKYLVQQGPHSVTHKVVLKLALDIARGMQYLHSQGILHRDLKSENLLLGEDLCVKVADFGISCLESQTGSAKGFTGTYRWMAPEMIKEKRHTKKVDVYSFAIVLWELLTGLTPFDNMTPEQAAYAVTHKNERPPLPCDCPKAFSHLINRCWSSNPDKRPHFNEIVTILESYIEALEQDPEFFSTYKPRPNNIILRCLSKCSNIFASCKA

SEQ ID NO: 7452 - protein, 182 aa, Glycine max
  misc_feature (1)..(182): Ceres Seq. ID no. 15171812
MQYLHSQGILHRDLKSENLLLGEDLCVKVADFGISCLESQTGSAKGFTGTYRWMAPEMIKEKRHTKKVDVYSFAIVLWELLTGLTPFDNMTPEQAAYAVTHKNERPPLPCDCPKAFSHLINRCWSSNPDKRPHFNEIVTILESYIEALEQDPEFFSTYKPRPNNIILRCLSKCSNIFASCKA

SEQ ID NO: 7453 - DNA, 1665 bp, Glycine max
  misc_feature (1)..(1665): Ceres Seq. ID no. 15171821
acttcataggcctttcttattcttccttctaagaaaccacttcaaatcatcaacttccctagacttacacaccctttgggctgtaacaagcaatctgatcctcttgttatcattcagattgatttctcttctagcacctcgatcaaagggctaaaaaaatttgctacttattgcacttttcttttcatggtttgatacatcttattgattttagtgctatttcaaggggtgaatttgagacatgggtttgagttctaagcaggtttctagcagtggacttgattggaaacaaaccttgttggaggctcagaatttggaacttccaaagcctaatctgatgaggaaacaacagcagcagcagcagcaacaacaacaacaaactcagccgaattcagagtctttgaaatgtccaagatgtgactctaccaacaccaaattttgttactacaacaactacaacaagtctcagcctcgccatttctgcagggcttgcaagaggcactggactaaaggtggaactctacgcaatgttccagttggtggtggaaggaagaacaagagggtcaaaaaatcaatcactccaattacaacatcttccaccaccaccacaccaatcacaaccgccacttcaacttgcactgccacagtcacaacctcaattggcaacaacatggatgctatgttgggttgttatagccacatgacaatccaaactcctcttgcggatgatcagaaaaacatgtcttcctctctctaccaagctctaattcgtccaccacctttgctgctacaacagaatctgctcaacacaagagaattagaaggcaaagattttggtattggtatcggtaataatggtatctttcctagttcaactttggctcttcctactcatcaaagccaaagcctactcttccctttctcagcctcaagcagatcttttgacaccaacccttgttcagtagtgtcaacctctcttagatcctccaatgtttataactatggggaggatcagtttaaagcaatagaggaaccaaccatcaatagtactactgctactatagtgcctagcacaggtggcaccaacaacacacatcatccatgggagatagcagcagcaacaagtggtgttggcttgggaacttcttcaaattcaaactattggaattgggaggattttgattcattggtttcaactgatctaaaagatccctgggatgattcagatatcaaaccctgagaaccaaacaataagcaacaacacatcatgatggggcatgagaagtatttagagctgtcatgttttagtttcagcttcagcttcaagcaaaagggtcccaaaattcctcacaattagttgcaacccactctgtttgcctctttgttcatctctcttatcatttcctctaatctctaataataaaatggtgtattaatgtatgcaaacattgcaaagtagtgtctagcattatttatcaatataggattttgttttttttattttttattttattttttggggagttttgtgagtgctttgtgatgggagtgatatagatatggggtctgctccagcactgctgaactgacagaatgtgattggaagattctttggacatgtatatatcttggaatgatattttatcatacggttttattgcttgc

SEQ ID NO: 7454 - protein, 332 aa, Glycine max
  misc_feature (1)..(332): Ceres Seq. ID no. 15171822
MGLSSKQVSSSGLDWKQTLLEAQNLELPKPNLMRKQQQQQQQQQQQTQPNSESLKCPRCDSTNTKFCYYNNYNKSQPRHFCRACKRHWTKGGTLRNVPVGGGRKNKRVKKSITPITTSSTTTTPITTATSTCTATVTTSIGNNMDAMLGCYSHMTIQTPLADDQKNMSSSLYQALIRPPPLLLQQNLLNTRELEGKDFGIGIGNNGIFPSSTLALPTHQSQSLLFPFSASSRSFDTNPCSVVSTSLRSSNVYNYGEDQFKAIEEPTINSTTATIVPSTGGTNNTHHPWEIAAATSGVGLGTSSNSNYWNWEDFDSLVSTDLKDPWDDSDIKP

SEQ ID NO: 7455 - protein, 300 aa, Glycine max
  misc_feature (1)..(300): Ceres Seq. ID no. 15171823
MRKQQQQQQQQQQQTQPNSESLKCPRCDSTNTKFCYYNNYNKSQPRHFCRACKRHWTKGGTLRNVPVGGGRKNKRVKKSITPITTSSTTTTPITTATSTCTATVTTSIGNNMDAMLGCYSHMTIQTPLADDQKNMSSSLYQALIRPPPLLLQQNLLNTRELEGKDFGIGIGNNGIFPSSTLALPTHQSQSLLFPFSASSRSFDTNPCSVVSTSLRSSNVYNYGEDQFKAIEEPTINSTTATIVPSTGGTNNTHHPWEIAAATSGVGLGTSSNSNYWNWEDFDSLVSTDLKDPWDDSDIKP

SEQ ID NO: 7456 - protein, 189 aa, Glycine max
  misc_feature (1)..(189): Ceres Seq. ID no. 15171824
MDAMLGCYSHMTIQTPLADDQKNMSSSLYQALIRPPPLLLQQNLLNTRELEGKDFGIGIGNNGIFPSSTLALPTHQSQSLLFPFSASSRSFDTNPCSVVSTSLRSSNVYNYGEDQFKAIEEPTINSTTATIVPSTGGTNNTHHPWEIAAATSGVGLGTSSNSNYWNWEDFDSLVSTDLKDPWDDSDIKP

SEQ ID NO: 7457 - DNA, 1745 bp, Glycine max
  misc_feature (1)..(1745): Ceres Seq. ID no. 15171845
atgcatcagttggagagtaccacacctcactttattcgctgtataaagccaaatactaagcagcttcctggcatttttgatgaagtccttgtcctacaacagctcagatgttgtgaagttctagaagttgttagagtttcaagggctggatatcctactcgaatggcccatcaagagttttccagaaggtatgggtttctgctttctgaggccaatgtattgcaggatccattgagcatctcggttgctgttttgcaaaaatttaatatcccttctgaaatgtaccatgttggctacaccaaattgtatcttcgagcagggcagattgattcactggagaataagagaaagcaggttttacagggaatacttgggattcaaaaatgcttccgtggtcatcgagctcgtgtttatttctgtgaacttaagaatggagtgacaacattgcaatcatttattcgtggagaaaatacaagaaggaaatatggtgttacagtgaagtcttcagtaacaatttattctagaatactggaggagatccatgcaatcatactattacaatctgtaattcgtggttggctggttagaaggggggatgctagtcacataaataggtcaaagagatatcctgaaaatgctaaacctaggtggaagtcctttatgaagataataccggaagtaaagccggacttgtccaaagagccggttcagaatctgctttcagctttagcagatctccaaaggcgagttgacaaggctgatgcaattgtgaagcaaaaggaagacgaaaataccgaattgagggaacagctaaaacaatctgagaggaagaggatcgaatatgagacaaaaatgaaatcaatggaggaggcttggcaaaagcagatggcatctttgcaaatgagtcttgttgctgctagaaagagccttgctcccgagaatgcttcagttcagcctgtaagacgtgattttgtgctacctcgtggttatgattctgaagatgctacatccatgggatctcgaacacctggtgggagcacaccaatgctttctggtagtctatctgcctctgatgcagggagacaggtcaatggtacattgaccacagttggcaatctgatgaaggaattcgagcaggaaagacagaactttgatgatgaagtgaaagctttgaacgatgttaaaccggagcagtctgccaatacaaattcctttgaagagcttcggaaactgaaacagagatttgagggatggaagaatcaatacaaggttagattacgagagactaaaacaaggctttataaatcagaaacggaaaaaagtcggcgaacatggtgggggaagttaagctcaaaagcataatgatattcagttttcaaactcatttgctgagaatagaaatgctggagaatccgcaaaattggcaaaatgattgttgtcatgaactttgtcctttttgagctgttgcttctatatcttgctggaacacttaaacaaagtgttaccaatttactcattggtgaagggaaagaagttgtatatctaccaattttgttacatggtggaagtgtcataggttgtgcatagtggtagacttgtaagatcgcatagttgtattgattagtctatagtttgcttttgtatatttttttcactttcttttttggggtgaaaaccagtaatgactcatgtatattctattgttgctgatgtgatctaaaactcagcctgaagatattaatagc

SEQ ID NO: 7458 - protein, 453 aa, Glycine max
  misc_feature (1)..(453): Ceres Seq. ID no. 15171846
MHQLESTTPHFIRCIKPNTKQLPGIFDEVLVLQQLRCCEVLEVVRVSRAGYPTRMAHQEFSRRYGFLLSEANVLQDPLSISVAVLQKFNIPSEMYHVGYTKLYLRAGQIDSLENKRKQVLQGILGIQKCFRGHRARVYFCELKNGVTTLQSFIRGENTRRKYGVTVKSSVTIYSRILEEIHAIILLQSVIRGWLVRRGDASHINRSKRYPENAKPRWKSFMKIIPEVKPDLSKEPVQNLLSALADLQRRVDKADAIVKQKEDENTELREQLKQSERKRIEYETKMKSMEEAWQKQMASLQMSLVAARKSLAPENASVQPVRRDFVLPRGYDSEDATSMGSRTPGGSTPMLSGSLSASDAGRQVNGTLTTVGNLMKEFEQERQNFDDEVKALNDVKPEQSANTNSFEELRKLKQRFEGWKNQYKVRLRETKTRLYKSETEKSRRTWWGKLSSKA

SEQ ID NO: 7459 - protein, 399 aa, Glycine max
  misc_feature (1)..(399): Ceres Seq. ID no. 15171847
MAHQEFSRRYGFLLSEANVLQDPLSISVAVLQKFNIPSEMYHVGYTKLYLRAGQIDSLENKRKQVLQGILGIQKCFRGHRARVYFCELKNGVTTLQSFIRGENTRRKYGVTVKSSVTIYSRILEEIHAIILLQSVIRGWLVRRGDASHINRSKRYPENAKPRWKSFMKIIPEVKPDLSKEPVQNLLSALADLQRRVDKADAIVKQKEDENTELREQLKQSERKRIEYETKMKSMEEAWQKQMASLQMSLVAARKSLAPENASVQPVRRDFVLPRGYDSEDATSMGSRTPGGSTPMLSGSLSASDAGRQVNGTLTTVGNLMKEFEQERQNFDDEVKALNDVKPEQSANTNSFEELRKLKQRFEGWKNQYKVRLRETKTRLYKSETEKSRRTWWGKLSSKA

SEQ ID NO: 7460 - protein, 360 aa, Glycine max
  misc_feature (1)..(360): Ceres Seq. ID no. 15171848
MYHVGYTKLYLRAGQIDSLENKRKQVLQGILGIQKCFRGHRARVYFCELKNGVTTLQSFIRGENTRRKYGVTVKSSVTIYSRILEEIHAIILLQSVIRGWLVRRGDASHINRSKRYPENAKPRWKSFMKIIPEVKPDLSKEPVQNLLSALADLQRRVDKADAIVKQKEDENTELREQLKQSERKRIEYETKMKSMEEAWQKQMASLQMSLVAARKSLAPENASVQPVRRDFVLPRGYDSEDATSMGSRTPGGSTPMLSGSLSASDAGRQVNGTLTTVGNLMKEFEQERQNFDDEVKALNDVKPEQSANTNSFEELRKLKQRFEGWKNQYKVRLRETKTRLYKSETEKSRRTWWGKLSSKA

SEQ ID NO: 7461 - DNA, 1927 bp, Glycine max
  misc_feature (1)..(1927): Ceres Seq. ID no. 15171856
gctcttccaaaccttcccttcaccttctataccctgccttgcaaaacaatattccaccccctcatcttcttttcttacacaaaccaatattttcataaaacagaaaccatggtgtcatcaaaacctagtggcttctatgaacaaaggagctttccatcaatcaaaatcctcatacttatactccttaattctatacttcacaaagccaactcaggctgcagcaactctgtttccaactccttagttccatttctatctcatgagatactctcatcattgcaaacactacctctagatggccactttagcctaagggacaatgaggatgctgccaaggactttggcaacatacaccattttcctcccctagcagtgctgtatccaaaaacagtttctgacatatcactcaccatcaagcatgtttttgaaatggggtttgccgcacagctgaagattgctgctagaggccatggccattcacttcaaggccaagcacaagtacatggaggcctagtcattaacatggagtctttacagggtcctgaaatgaaagttcacaatggagaattgccttatgtggatgtctcaggaggtgagttgtggataaacattctgcatgagactcttaaacttgggttggcaccaaagtcatggacagattaccttcacctcactgttgggggtactctttcaaatgctggcataagtgggcaagccttcaaacatggacctcagatcaataacatctttcagcttgaagtgatcacaggaaaaggagaggtggttacctgctcagggaaccgaaacgctgaccttttttatggtgttcttggagggcttggtcaatttggcatcattacaagggctagaatttctcttgaaccagcacctaagatggttaaatggattagggtgctctactcagagttctctacatttactagggatcaagagtatttggtatcacttaacaacacatttgattatattgaagggtttgtgatcataaacagaactggcatccttaacaattggagatcatcctttgatcccaaaaaccaacttcaagccagccaattcagttctgatgggaaaaccttctactgtctagagatggcaaaatatttcaaccctggtgaagctgaagccatgaatcagagtgtagcttacctactgtcaaagttgagttacattccatccacactcttcctatcagaagtttcttacgtggaattcttagacagagtgcatgtttctgagaaaaagctaagagcacaaggcttgtgggaagttccccatccttggctgaaccttctgatcccaaggagtgagattcataactttgctgaagaagtatttggcaatattcttaaagacacaaacaatggacccatactcattcaccccgtcaaccaaacacggtggaacagcaaaacatcattgattaccccagaggaagatattttttacctagtagcattcctatccttagctctcccaaattctaccggtgcagacagtttagaacacattctagcccaaaacaaaagagtcatagatttctacactggtgccaaaatgagagtgaagcaataccttccccattacagcacacaggaagaatggcaagtccattttgggtcacgatgggagacattcgtggaaagaaaaagggcctatgacccactagcactgctagcccctggccacaaaatctttcaaaaggctgtctcctcttcgtgttagttttctagtgtgttgtaaggttgtgaactaatgataaattacgtaagagtgttgcttcctgcacctctctggcatcccattacattacggaatgtccaatctgtaatgtaatttaatcattctgtaatgtaatggggcatgaagcaaaatttgaaggtgcacgaagtttcacttgttaatc

SEQ ID NO: 7462 - protein, 581 aa, Glycine max
  misc_feature (1)..(581): Ceres Seq. ID no. 15171857
ALPNLPFTFYTLPCKTIFHPLIFFSYTNQYFHKTETMVSSKPSGFYEQRSFPSIKILILILLNSILHKANSGCSNSVSNSLVPFLSHEILSSLQTLPLDGHFSLRDNEDAAKDFGNIHHFPPLAVLYPKTVSDISLTIKHVFEMGFAAQLKIAARGHGHSLQGQAQVHGGLVINMESLQGPEMKVHNGELPYVDVSGGELWINILHETLKLGLAPKSWTDYLHLTVGGTLSNAGISGQAFKHGPQINNIFQLEVITGKGEVVTCSGNRNADLFYGVLGGLGQFGIITRARISLEPAPKMVKWIRVLYSEFSTFTRDQEYLVSLNNTFDYIEGFVIINRTGILNNWRSSFDPKNQLQASQFSSDGKTFYCLEMAKYFNPGEAEAMNQSVAYLLSKLSYIPSTLFLSEVSYVEFLDRVHVSEKKLRAQGLWEVPHPWLNLLIPRSEIHNFAEEVFGNILKDTNNGPILIHPVNQTRWNSKTSLITPEEDIFYLVAFLSLALPNSTGADSLEHILAQNKRVIDFYTGAKMRVKQYLPHYSTQEEWQVHFGSRWETFVERKRAYDPLALLAPGHKIFQKAVSSSC

SEQ ID NO: 7463 - protein, 545 aa, Glycine max
  misc_feature (1)..(545): Ceres Seq. ID no. 15171858
MVSSKPSGFYEQRSFPSIKILILILLNSILHKANSGCSNSVSNSLVPFLSHEILSSLQTLPLDGHFSLRDNEDAAKDFGNIHHFPPLAVLYPKTVSDISLTIKHVFEMGFAAQLKIAARGHGHSLQGQAQVHGGLVINMESLQGPEMKVHNGELPYVDVSGGELWINILHETLKLGLAPKSWTDYLHLTVGGTLSNAGISGQAFKHGPQINNIFQLEVITGKGEVVTCSGNRNADLFYGVLGGLGQFGIITRARISLEPAPKMVKWIRVLYSEFSTFTRDQEYLVSLNNTFDYIEGFVIINRTGILNNWRSSFDPKNQLQASQFSSDGKTFYCLEMAKYFNPGEAEAMNQSVAYLLSKLSYIPSTLFLSEVSYVEFLDRVHVSEKKLRAQGLWEVPHPWLNLLIPRSEIHNFAEEVFGNILKDTNNGPILIHPVNQTRWNSKTSLITPEEDIFYLVAFLSLALPNSTGADSLEHILAQNKRVIDFYTGAKMRVKQYLPHYSTQEEWQVHFGSRWETFVERKRAYDPLALLAPGHKIFQKAVSSSC

SEQ ID NO: 7464 - protein, 438 aa, Glycine max
  misc_feature (1)..(438): Ceres Seq. ID no. 15171859
MGFAAQLKIAARGHGHSLQGQAQVHGGLVINMESLQGPEMKVHNGELPYVDVSGGELWINILHETLKLGLAPKSWTDYLHLTVGGTLSNAGISGQAFKHGPQINNIFQLEVITGKGEVVTCSGNRNADLFYGVLGGLGQFGIITRARISLEPAPKMVKWIRVLYSEFSTFTRDQEYLVSLNNTFDYIEGFVIINRTGILNNWRSSFDPKNQLQASQFSSDGKTFYCLEMAKYFNPGEAEAMNQSVAYLLSKLSYIPSTLFLSEVSYVEFLDRVHVSEKKLRAQGLWEVPHPWLNLLIPRSEIHNFAEEVFGNILKDTNNGPILIHPVNQTRWNSKTSLITPEEDIFYLVAFLSLALPNSTGADSLEHILAQNKRVIDFYTGAKMRVKQYLPHYSTQEEWQVHFGSRWETFVERKRAYDPLALLAPGHKIFQKAVSSSC

SEQ ID NO: 7465 - DNA, 1205 bp, Glycine max
  misc_feature (1)..(1205): Ceres Seq. ID no. 15171880
aatcgtggacgctggaaccagttgcgctcaatgggagaagccaagaatttgcttcaatatttgttcaattctgttggagatgctaggtgccaactgtgggaaaaggacactgagatcaaggaaataaaagatcaaatcaaagaacttgtaggtctattacggcaaagtgaaatgaaaagaaaggaaactgagaaggaactaaaagcgagagagcaagctgttgcaaccacattggcgaccccaacttctggaaactctccaaattcattgaaacactatgcggaagacatcaaggaacctttatctccagagtctgtgccagtacagaaacagcgcaaatatatgccaggcatcactaatggccaagtgagggaatcagcagcatttgtagatcagagtagaacgatgatacccattgggcaactgtcaatgaaaaaactagcaattgtaggacaagcttctggcaagctatggaggtggaaaagaagccaccatcagtggctagtacaatttaaatggaaatggcagaagccatggagactttctgaacggattcggcacagtgatgagacaatcatgagagcaaggccacgttcgcaggctttgccgcatataatgtgaatctgaatgttattgtgatcatccatttgctttggctcagtgttcattttttaacctacaagaatgatcctagaaatcaggcaataaagaaccaaaaactaggtgcagggtgtaatattaatggttgctgacaaataacattatatatactgcccaaatgttgaaaatgtttccattgtttgctgcatatggagcatcttgtgaggtgtgtaaaaatgttgccgagggctacccaaataatcaagagaataggagatagttgtttgcttggaggcattggtgaagatcttgttagacaaattatcttggaatgttttctgtttatactttataccaacactagaagggggaaaaaaggaaatattcttcaagtcttggaaatgtgtattgagggttttctatttcttgtaagttttaagtttctatgctcatagtatgtttgtcaatcattgatttttgttgataaaaatactgtagcgttcctctgccacaaagcaacagaaggaaaactcttctgttttacctctaggtcttgtgtgtaaagaacattaactatattgaaagagattgtaatttaccatacc

SEQ ID NO: 7466 - protein, 206 aa, Glycine max
  misc_feature (1)..(206): Ceres Seq. ID no. 15171881
NRGRWNQLRSMGEAKNLLQYLFNSVGDARCQLWEKDTEIKEIKDQIKELVGLLRQSEMKRKETEKELKAREQAVATTLATPTSGNSPNSLKHYAEDIKEPLSPESVPVQKQRKYMPGITNGQVRESAAFVDQSRTMIPIGQLSMKKLAIVGQASGKLWRWKRSHHQWLVQFKWKWQKPWRLSERIRHSDETIMRARPRSQALPHIM

SEQ ID NO: 7467 - protein, 196 aa, Glycine max
  misc_feature (1)..(196): Ceres Seq. ID no. 15171882
MGEAKNLLQYLFNSVGDARCQLWEKDTEIKEIKDQIKELVGLLRQSEMKRKETEKELKAREQAVATTLATPTSGNSPNSLKHYAEDIKEPLSPESVPVQKQRKYMPGITNGQVRESAAFVDQSRTMIPIGQLSMKKLAIVGQASGKLWRWKRSHHQWLVQFKWKWQKPWRLSERIRHSDETIMRARPRSQALPHIM

SEQ ID NO: 7468 - protein, 149 aa, Glycine max
  misc_feature (1)..(149): Ceres Seq. ID no. 15171883
MKRKETEKELKAREQAVATTLATPTSGNSPNSLKHYAEDIKEPLSPESVPVQKQRKYMPGITNGQVRESAAFVDQSRTMIPIGQLSMKKLAIVGQASGKLWRWKRSHHQWLVQFKWKWQKPWRLSERIRHSDETIMRARPRSQALPHIM

SEQ ID NO: 7469 - DNA, 1344 bp, Glycine max
  misc_feature (1)..(1344): Ceres Seq. ID no. 15171884
acacttcaaattcaccgccacttctgccgccctccataagctccatcgcgcctcttttcctctccgtctccgacctccgatcctccctcgccgagacatcctccgacggtggcagaatcgtaattttccgcggcaccgtcgacacacctcgaaaaccttgagacccggtgtcttggtttctcgcaagtccagcgataacagcgtcgttcttcaaagaactcaaacgtgtttgtccactgttttctgcttcctatttggcagagtttttatctgatctctggagaaatatggctgccaatttctggacatcatctcattacaagcatcttctggatcaggaagatgtggatgtggtgaatacactcgacaaggaaaagggtattacactggaggattttaagcttattaagatgcacatggctaattatattttgaaattggctcaacaagtaaaagtgaggcagagggttgtggccacagcagttacatacatgaggcgtgtttacaccaggaagagtatggctgaatatgatccacgcttggtagctccaacatgcttgtacctggcatcaaaagcagaagaaagcacagtgcaggctcggcttcttgtattttacattaaaaaattatacagtgatgacaagtatagatatgaaatcaaggacatacttgaaatggaaatgaagattttagaagctcttaattattacctggttgtataccatccataccgttcactagttccgttgcttcaggatgcaggtctgaatgatctaaacatgactcaactaacttgggggcttgtaaatgacacatacaagatggacctaattcttgtacatcctccgcatttgattgctttagcttgcatatacattgctagtgtgctcagggagaaagacaccactgcttggtttgaagaacttcgtgttgatatgaatgtggttaaaaacatatcaatggagatacttgatttttatgaaagcaatagaatgttcactgatgagagaatcaatgctgctcttcagaagctgagcctgagaccctagaacttactgtagatgactcaacgctgaatatgtggaatgaagttaatgctatggtgatttgtctgaatgatttttctgggtcaatgacatgttttacggtagaacactatctaaatgtatccaaaagtaagggcacgtaatattgggggtcaattcaaagtgtcctattaaagagcaaaaggaggatgaaaaaaggtgattctcggtgaggaccagatagactcccacctgattcatagaatcttttgtttttatctatttattgtcataaatcaaagtgtctacaatttttttg

SEQ ID NO: 7470 - protein, 253 aa, Glycine max
  misc_feature (1)..(253): Ceres Seq. ID no. 15171885
MAANFWTSSHYKHLLDQEDVDVVNTLDKEKGITLEDFKLIKMHMANYILKLAQQVKVRQRVVATAVTYMRRVYTRKSMAEYDPRLVAPTCLYLASKAEESTVQARLLVFYIKKLYSDDKYRYEIKDILEMEMKILEALNYYLVVYHPYRSLVPLLQDAGLNDLNMTQLTWGLVNDTYKMDLILVHPPHLIALACIYIASVLREKDTTAWFEELRVDMNVVKNISMEILDFYESNRMFTDERINAALQKLSLRP

SEQ ID NO: 7471 - protein, 212 aa, Glycine max
  misc_feature (1)..(212): Ceres Seq. ID no. 15171886
MHMANYILKLAQQVKVRQRVVATAVTYMRRVYTRKSMAEYDPRLVAPTCLYLASKAEESTVQARLLVFYIKKLYSDDKYRYEIKDILEMEMKILEALNYYLVVYHPYRSLVPLLQDAGLNDLNMTQLTWGLVNDTYKMDLILVHPPHLIALACIYIASVLREKDTTAWFEELRVDMNVVKNISMEILDFYESNRMFTDERINAALQKLSLRP

SEQ ID NO: 7472 - protein, 210 aa, Glycine max
  misc_feature (1)..(210): Ceres Seq. ID no. 15171887
MANYILKLAQQVKVRQRVVATAVTYMRRVYTRKSMAEYDPRLVAPTCLYLASKAEESTVQARLLVFYIKKLYSDDKYRYEIKDILEMEMKILEALNYYLVVYHPYRSLVPLLQDAGLNDLNMTQLTWGLVNDTYKMDLILVHPPHLIALACIYIASVLREKDTTAWFEELRVDMNVVKNISMEILDFYESNRMFTDERINAALQKLSLRP

SEQ ID NO: 7473 - DNA, 1245 bp, Glycine max
  misc_feature (1)..(1245): Ceres Seq. ID no. 15171915
aagtgatacacattggactgacaagggcatccagagtggttctgaaaaaaagctgccgcggagaagcaacagaagagactatcagcatgcccctgctgagccagaaaaacctattatagtttatactcgtaggtcctattccaggaaacaatgttcagacagcaatcttgttgtggttcctgaaaagccttttgtttgtgcagatgagaattctccggctgagcttgtgttgaactttgctgagctggattctgttccctcagaaatgcacctaaataagatttttaggcgatttggacctctaaatgaatctgaaacagaagttgatagagggagcagccgggctagagtggtttttaagaagtgtactgatgcagaggttgctttcagtaatgctaaaaacttcaacatatttggatcagttcttgtaaattacaagcttaaccatactccaagtacattgttcaaagcttcatctcttgccacaactcaagaccaggagaatggagatgcatgttgatctctctaattctgaacttaatatgatctaatcatttggtcataaatattttagtatcactagaatgtctttaaggaagcatgtcagctgaccaacaatctagaatagtgaagataaggaggaggatgttatcaaacattcagctttcaatcccgccacttcaagacaaaaggaaatgattttgcatttttgcagcaagaatctgagactacagaagaaagaaatatggaagaaaacaagggattacttcataagcaagctcgagtatcctagcagtgactcacttacatccagatgatggcttagccgcatttgagtcctataagttgatcacatgcaaagacactaggtaagcacatctttcaatacattattactccgctaactatgttgttggagtgtttttgcaggtaccttccattttcatcatcacaatttgaccagtagatttcttctcatctcaaagagaagcaaatatagtggccttaccaatcattttggtgctactagatcagctattctctatccaaaataaattacatttgcagttctcattgtagggagtgctgaaaacatgggagcatatacataactgaaactgctgaaccaatttattgctaaatggctggcaaaataaccgaaatgctatttcatatagccatccattattttgttgtaggatgcactattttattgcttgaataaaccttcaatttggtcttctg

SEQ ID NO: 7474 - protein, 172 aa, Glycine max
  misc_feature (1)..(172): Ceres Seq. ID no. 15171916
SDTHWTDKGIQSGSEKKLPRRSNRRDYQHAPAEPEKPIIVYTRRSYSRKQCSDSNLVVVPEKPFVCADENSPAELVLNFAELDSVPSEMHLNKIFRRFGPLNESETEVDRGSSRARVVFKKCTDAEVAFSNAKNFNIFGSVLVNYKLNHTPSTLFKASSLATTQDQENGDAC

SEQ ID NO: 7475 - DNA, 1293 bp, Glycine max
  misc_feature (1)..(1293): Ceres Seq. ID no. 15171967
gtattgatgtttgggcctccaggttgtagtaaaaccctcatggcacgtgcagttgcttctgaagcagggctgaactttctagcagtcaagggtcctgaactcttcagcaaatgggttggtgaatctgagaaggctgtcagatcattatttgcaaaagcaagggccaatgccccatcaatagtattttttgatgaaatagatagtcttgctgtaactcgtgggaaggaaagtgatggtgtttcagtatcagatagggtcatgagtcaacttcttgttgagttggatggtctgcatcaaagagttaatgtcaccgtcatagctgctacaaataggccagacaagattgaccctgcccttttaaggccaggacgctttgaccgtctgctatatgttggacctccaaatgaggtggacagggaagagatatttcgcatacatctgcgtaaaatcccgtgtggttctgatgttagccttaaagaactagctcgactcacagatggttgtacaggggctgacatatcattgatatgtcgggaggcagctgttgcagcaattgaggagagccttgatgcttcagttataacaatggagcatttaaagatggcaatcaaacagatccagccatcagaagttcactcctaccaaaagctgtcaacaaaatttcaaagagccgtccgctgctgtgatataaaggatgaattcaatgatatgccgtgcgacagtagatctactcagttcagcatttggaagttcataaaatcttacacattgtaaaatcgttcctctatcagattccatttgtcatctttaatttgagaactgctttaggtagttaacaacagtcctcagggaactattatgtttgtcatattccagtgactgggctcatgtgcattacatggggatcatctgccctgccaactggctagattgagcccttatttaaagtacgagtgcagtatctgtgaagcactagtaatggggatcaatgtcttcacccacagagtaagagaaaaatgtgtaattgcccaaatttgtgctgaaaccccttggctgaatcatggtcagcctttccgttgaaagatgaaaatattttgagaatgattactaatgtggtctcacgtgagttttgcttgcgtgttacttttgaaggtgagagatagcagtgttgtatgaggaactctgccatccatatctgtgcgccattttcaacaattttctctaggtctcggcttcacaagtttgtagttgtacacaaaatcataaattatcaagtttgttgataaaacttat

SEQ ID NO: 7476 - protein, 257 aa, Glycine max
  misc_feature (1)..(257): Ceres Seq. ID no. 15171968
VLMFGPPGCSKTLMARAVASEAGLNFLAVKGPELFSKWVGESEKAVRSLFAKARANAPSIVFFDEIDSLAVTRGKESDGVSVSDRVMSQLLVELDGLHQRVNVTVIAATNRPDKIDPALLRPGRFDRLLYVGPPNEVDREEIFRIHLRKIPCGSDVSLKELARLTDGCTGADISLICREAAVAAIEESLDASVITMEHLKMAIKQIQPSEVHSYQKLSTKFQRAVRCCDIKDEFNDMPCDSRSTQFSIWKFIKSYTL

SEQ ID NO: 7477 - protein, 255 aa, Glycine max
  misc_feature (1)..(255): Ceres Seq. ID no. 15171969
MFGPPGCSKTLMARAVASEAGLNFLAVKGPELFSKWVGESEKAVRSLFAKARANAPSIVFFDEIDSLAVTRGKESDGVSVSDRVMSQLLVELDGLHQRVNVTVIAATNRPDKIDPALLRPGRFDRLLYVGPPNEVDREEIFRIHLRKIPCGSDVSLKELARLTDGCTGADISLICREAAVAAIEESLDASVITMEHLKMAIKQIQPSEVHSYQKLSTKFQRAVRCCDIKDEFNDMPCDSRSTQFSIWKFIKSYTL

SEQ ID NO: 7478 - protein, 244 aa, Glycine max
  misc_feature (1)..(244): Ceres Seq. ID no. 15171970
MARAVASEAGLNFLAVKGPELFSKWVGESEKAVRSLFAKARANAPSIVFFDEIDSLAVTRGKESDGVSVSDRVMSQLLVELDGLHQRVNVTVIAATNRPDKIDPALLRPGRFDRLLYVGPPNEVDREEIFRIHLRKIPCGSDVSLKELARLTDGCTGADISLICREAAVAAIEESLDASVITMEHLKMAIKQIQPSEVHSYQKLSTKFQRAVRCCDIKDEFNDMPCDSRSTQFSIWKFIKSYTL

SEQ ID NO: 7479 - DNA, 1299 bp, Glycine max
  misc_feature (1)..(1299): Ceres Seq. ID no. 15172004
gagaagatcaagttgatattttggtagaacttacgggacatactgcaagcaataaattgggaatgatggcatgtcgacctgcaccgattcaggtgacttggattggttatcccaatacaacaggattgcctacaattgattatagaatcactgattcactggcagaccctcctgaaacaaagcagaagcatgttgaggagttagttagattgccagaatgcttcctttgttacaccccttccccggaggctggccctatttgtccaactcctgctctttccaatggttttgtcacatttggtagtttcaacaatcttgccaagattacaccaaaggtattgcaggtttgggcaaggatactgtgtgcaattccgaattcccgccttgtggtaaaatgtaaacctttttgcagtgacagtgtgcgacagagattcctttcaacactagagcagttaggtttagaaccactacgtgttgatcttctgccccttattcttcttaaccatgatcatatgcaagcctattctctgatggacatcagtttggatacatttccatatgctggaacaacaacaacatgtgaatctttatacatgggagttccatgtgtcactatggctggatcagtacatgcacacaacgttggtgttagtcttcttagcaaagttggactggagcatttgattgccagaaatgaagatgaatatgttgaattggctcagcagttggcctctgacatttccgcactacaaaatttgagaatgagtctgcgaaatctcatgtccaagtcccctctctgtgatggtgcaaaatttatcctaggtttggagtcaacatacagaaaaatgtggcaccggtattgtagaggagatgttccatctttaaaacgcttggaattgttacaagaagttgctactggtgacctgtcaaataagaattctgagccaacaaggattgcaaactcaagggaggacagtcctgggtctgtcaaggccaatggatataatacaattcctgcatcaaagcttaacatacacactcgcgaagaaaacgatgggtcatcaaatcacagtagtaaacaaggaaagatgagttgaagttggattccatccaagaatccttttgtagtgattcatgttgaatttcattacaatagttgtactactaggttgcatggttgctactggaagaagctggaaagcaaccacagcacagcacaaagttaacttgaatagagtaacattgggggcgggggctataggcagcaggttagttataaagcccccttcggtgcagagt

SEQ ID NO: 7480 - protein, 364 aa, Glycine max
  misc_feature (1)..(364): Ceres Seq. ID no. 15172005
EDQVDILVELTGHTASNKLGMMACRPAPIQVTWIGYPNTTGLPTIDYRITDSLADPPETKQKHVEELVRLPECFLCYTPSPEAGPICPTPALSNGFVTFGSFNNLAKITPKVLQVWARILCAIPNSRLVVKCKPFCSDSVRQRFLSTLEQLGLEPLRVDLLPLILLNHDHMQAYSLMDISLDTFPYAGTTTTCESLYMGVPCVTMAGSVHAHNVGVSLLSKVGLEHLIARNEDEYVELAQQLASDISALQNLRMSLRNLMSKSPLCDGAKFILGLESTYRKMWHRYCRGDVPSLKRLELLQEVATGDLSNKNSEPTRIANSREDSPGSVKANGYNTIPASKLNIHTREENDGSSNHSSKQGKMS

SEQ ID NO: 7481 - protein, 344 aa, Glycine max
  misc_feature (1)..(344): Ceres Seq. ID no. 15172006
MMACRPAPIQVTWIGYPNTTGLPTIDYRITDSLADPPETKQKHVEELVRLPECFLCYTPSPEAGPICPTPALSNGFVTFGSFNNLAKITPKVLQVWARILCAIPNSRLVVKCKPFCSDSVRQRFLSTLEQLGLEPLRVDLLPLILLNHDHMQAYSLMDISLDTFPYAGTTTTCESLYMGVPCVTMAGSVHAHNVGVSLLSKVGLEHLIARNEDEYVELAQQLASDISALQNLRMSLRNLMSKSPLCDGAKFILGLESTYRKMWHRYCRGDVPSLKRLELLQEVATGDLSNKNSEPTRIANSREDSPGSVKANGYNTIPASKLNIHTREENDGSSNHSSKQGKMS

SEQ ID NO: 7482 - protein, 343 aa, Glycine max
  misc_feature (1)..(343): Ceres Seq. ID no. 15172007
MACRPAPIQVTWIGYPNTTGLPTIDYRITDSLADPPETKQKHVEELVRLPECFLCYTPSPEAGPICPTPALSNGFVTFGSFNNLAKITPKVLQVWARILCAIPNSRLVVKCKPFCSDSVRQRFLSTLEQLGLEPLRVDLLPLILLNHDHMQAYSLMDISLDTFPYAGTTTTCESLYMGVPCVTMAGSVHAHNVGVSLLSKVGLEHLIARNEDEYVELAQQLASDISALQNLRMSLRNLMSKSPLCDGAKFILGLESTYRKMWHRYCRGDVPSLKRLELLQEVATGDLSNKNSEPTRIANSREDSPGSVKANGYNTIPASKLNIHTREENDGSSNHSSKQGKMS

SEQ ID NO: 7483 - DNA, 1366 bp, Glycine max
  misc_feature (1)..(1366): Ceres Seq. ID no. 15172028
actgtcttcattgcaaaagtgttttgaagacctagagtattcatacctggttgatagagcattggagtggggaaagcaggtcaggtcctcagctgtgctttcttttgtcacaaagcagttttaaaagcatgatctcctaggttcattttatcaaggggaatgacttgatgagaattctaaacattgcagcttttgctgtgtctagctatgcgtcaactgaaggtcgacaatgtaaaccttttaatcctttacttggggagacctacgaagctgactatccagataaaggacttaagtttttttctgaaaaggttagtcatcatccaatgattgttgcttgtcactgtgagggaaggggttggaagttttgggcagattctaatttgaaaggaaaattctgggggcgttctatccagttagatcctgtgggtgtcctcactctacagtttgaggatggtgaaacatttcagtggagcaaggtcaccacttccatatacaatatcatactaggtaaaatttattgtgaccactacggtaccatgcacatcaagggcagtggcaactattcttgcaaactgaaattcaaggagcaatccattattgacagaaatccacatcaggtccatgggtttgttcaagacaacagaactggagagaaggtagcgatgttaattgggaagtgggatgaagcaatgtactatgtacttggggatccaaccaccaagccaaaaggttatgatccgatgacagaagctgcattattgtgggaaagggacaaccatttaccgaagacaagatacaacctctctccttttgcaatttccttgaatgaaatattacctggtttatcagagaagttgcctccaactgactcaaggttgagaccagatcaaagacatttagaaaatggagaatatgagctggcaaatgcagaaaaactaagacttgaacagttgcagagacaggcaagaaagatgcaagaaagaggatggcaaccgagatggtttaagaaggaagaggatggttgttaccgatatattggtggctattgggaaacaagagaaaagaataattgggacggaatccctgatatatttggacagagttgtgatttaccttcatgctcggaagagactgcatcctactgaatactggttttcttttttttcacagcccttaaaaatatcatgttttgttaaatgtgaatttggttgtaggttgtaagttatataaagatcctttcaaaaagtgttaattccttttctggctgggctgggcgttttgggcatttgtcattaatctccgaaagtaattttatgttgatgcttactttactagtatattaataatatcaggttttcagagc

SEQ ID NO: 7484 - protein, 326 aa, Glycine max
  misc_feature (1)..(326): Ceres Seq. ID no. 15172029
MRILNIAAFAVSSYASTEGRQCKPFNPLLGETYEADYPDKGLKFFSEKVSHHPMIVACHCEGRGWKFWADSNLKGKFWGRSIQLDPVGVLTLQFEDGETFQWSKVTTSIYNIILGKIYCDHYGTMHIKGSGNYSCKLKFKEQSIIDRNPHQVHGFVQDNRTGEKVAMLIGKWDEAMYYVLGDPTTKPKGYDPMTEAALLWERDNHLPKTRYNLSPFAISLNEILPGLSEKLPPTDSRLRPDQRHLENGEYELANAEKLRLEQLQRQARKMQERGWQPRWFKKEEDGCYRYIGGYWETREKNNWDGIPDIFGQSCDLPSCSEETASY

SEQ ID NO: 7485 - protein, 273 aa, Glycine max
  misc_feature (1)..(273): Ceres Seq. ID no. 15172030
MIVACHCEGRGWKFWADSNLKGKFWGRSIQLDPVGVLTLQFEDGETFQWSKVTTSIYNIILGKIYCDHYGTMHIKGSGNYSCKLKFKEQSIIDRNPHQVHGFVQDNRTGEKVAMLIGKWDEAMYYVLGDPTTKPKGYDPMTEAALLWERDNHLPKTRYNLSPFAISLNEILPGLSEKLPPTDSRLRPDQRHLENGEYELANAEKLRLEQLQRQARKMQERGWQPRWFKKEEDGCYRYIGGYWETREKNNWDGIPDIFGQSCDLPSCSEETASY

SEQ ID NO: 7486 - protein, 202 aa, Glycine max
  misc_feature (1)..(202): Ceres Seq. ID no. 15172031
MHIKGSGNYSCKLKFKEQSIIDRNPHQVHGFVQDNRTGEKVAMLIGKWDEAMYYVLGDPTTKPKGYDPMTEAALLWERDNHLPKTRYNLSPFAISLNEILPGLSEKLPPTDSRLRPDQRHLENGEYELANAEKLRLEQLQRQARKMQERGWQPRWFKKEEDGCYRYIGGYWETREKNNWDGIPDIFGQSCDLPSCSEETASY

SEQ ID NO: 7487 - DNA, 1349 bp, Glycine max
  misc_feature (1)..(1349): Ceres Seq. ID no. 15172051
aggatgaaaatgataagtggctaggtatgggtaaccaggagcttcttaattattttagcgcatatgatgctgtgaaagctcgacacgcttatggcccccagggtcatcgggggttgagcgttttgatatttgaagcatcagctataggttatcttgaggctgagcgtctacacaagcactttgcagaacaaggaactgaccgagatgcttggtttagtcaccaccgtagattatttctccctggtggccggcgacagctctatggatacatggcaataaaagaagacctggactttttcaacagacattgccaaggtaaatctagactcaaatatgacatgagatcataccaggagatggttgtaaaccaacttcggcaaatgaatgaggacaaccagctgcttatttatttgaaggacagggatgccaaaaaacaaaaacaaacaaaagctcttgaagaatctttgggtatagtgactgagaagctgcgaaggacaatggaagaaaatcgcattgtgaggttgagaactaaaatgcaacatgaagagaacaaggaagagatgtacatgcaagaagaattttttaaggaacagatcagaatcattcatgattcaagggctgcaaaggaagaagagtttgagaggatgcagcaggagaaacgagagaaggtgaagccgtcaagtactagccctttaaatgaagaggaagggagagttaaggtggacgaatatctaaaatttgttgagtttcaagataaagaaatggaaaactttgttgctgaagaggagaaactccgtcaagctcataaagacaatgttgatgcaatgacgcggaggcactgggaggaaaaggtgcagttggaggaaaggtttaatgaggagctagccaagctcatggaaaagtattccctatctcacccagaaaagtccaatggtatctgatgacagtgtgttgcacatcgcagacaaaaagataaatacagcattataaacagaagataaatggatagagtgattgttctaagttgaagaccctcagatatctgcacttttgtacttgaatacaaggacatgcctagagaatggagatagaaagcttgctaaaatacaaatgacattgcttattttctcctttggtattagtggcttgaacttttgatgtaattgcttttatgcaaattttttgaatagcagcaatttggatggagtgaaatacaccactttaggttatctctggctttggtgaatcgtatgaatggaagcctgatagctctgctgtaatagaagtgttagcgacacactccctaacacacttcctattattattagtgaaaatttattggaaattac

SEQ ID NO: 7488 - protein, 312 aa, Glycine max
  misc_feature (1)..(312): Ceres Seq. ID no. 15172052
DENDKWLGMGNQELLNYFSAYDAVKARHAYGPQGHRGLSVLIFEASAIGYLEAERLHKHFAEQGTDRDAWFSHHRRLFLPGGRRQLYGYMAIKEDLDFFNRHCQGKSRLKYDMRSYQEMVVNQLRQMNEDNQLLIYLKDRDAKKQKQTKALEESLGIVTEKLRRTMEENRIVRLRTKMQHEENKEEMYMQEEFFKEQIRIIHDSRAAKEEEFERMQQEKREKVKPSSTSPLNEEEGRVKVDEYLKFVEFQDKEMENFVAEEEKLRQAHKDNVDAMTRRHWEEKVQLEERFNEELAKLMEKYSLSHPEKSNGI

SEQ ID NO: 7489 - protein, 304 aa, Glycine max
  misc_feature (1)..(304): Ceres Seq. ID no. 15172053
MGNQELLNYFSAYDAVKARHAYGPQGHRGLSVLIFEASAIGYLEAERLHKHFAEQGTDRDAWFSHHRRLFLPGGRRQLYGYMAIKEDLDFFNRHCQGKSRLKYDMRSYQEMVVNQLRQMNEDNQLLIYLKDRDAKKQKQTKALEESLGIVTEKLRRTMEENRIVRLRTKMQHEENKEEMYMQEEFFKEQIRIIHDSRAAKEEEFERMQQEKREKVKPSSTSPLNEEEGRVKVDEYLKFVEFQDKEMENFVAEEEKLRQAHKDNVDAMTRRHWEEKVQLEERFNEELAKLMEKYSLSHPEKSNGI

SEQ ID NO: 7490 - protein, 223 aa, Glycine max
  misc_feature (1)..(223): Ceres Seq. ID no. 15172054
MAIKEDLDFFNRHCQGKSRLKYDMRSYQEMVVNQLRQMNEDNQLLIYLKDRDAKKQKQTKALEESLGIVTEKLRRTMEENRIVRLRTKMQHEENKEEMYMQEEFFKEQIRIIHDSRAAKEEEFERMQQEKREKVKPSSTSPLNEEEGRVKVDEYLKFVEFQDKEMENFVAEEEKLRQAHKDNVDAMTRRHWEEKVQLEERFNEELAKLMEKYSLSHPEKSNGI

SEQ ID NO: 7491 - DNA, 1345 bp, Glycine max
  misc_feature (1)..(1345): Ceres Seq. ID no. 15172055
aggtttaggatcattaagagagttcataagaaaagccccaaggattctatttgtgctattttattcatatgctaaattttttaagaaattgacattggacttcataacaagttctccggatagaacccatgtactagctaaattgaattatacctcagctggaagttgaatatgatgcttaaactagtttgtataaaccaagactaaggttaaaatgcttccttgacatggaaatgaaaaatcaatgaggaaattgaaaatgatgaatgaggagccaaagtcttctcattgccactaaggttcctctgtttccttgaagttgaagattgtattgtttatcacttgaatatattgtgaataggctgaaattaagagacatgggttactaattgtctggagtttatcttaaattggaaacttaattgtggtgaactataatctttgaacatgtaaaacatggtggtaagttttaacagtattgatccataacaaataggaaaaaggaaacagaaatttgaggtttttaacttgccggctaaagtatactaatccagccactctctcggtcctcttggaggatcccttcttttatttaatatttatattatatttgtaatctatcccattttgcacctccatgttttgttctctgttactgattgatacaagaccaacctagaatatcagctttcctttggatgcgttgctttggttaattttgttgctgttgatcttttgccttcaaatatgtagttcttagagtttcaagggctggttgggctgatgcactcatttatttcgtcttccaatcactctaacaatgttttgatgttgttaaggaagtgaaggcattaacaagattttttctcctgagaagcatagcttagatggtagtgtttgtagctgtggaggattctctccattacaaaacctgacaaatgaaagtccaagcaaaactatggaaccaacattagctttgcttgaggaagcagttgctgattcaaaggctaagattaattctttgatgactgatattggtacttccgagtcttccttccagcaccttactgttgtcaaagacctcagtcaaaagattgagtcgttgcagggtttagtgctgcaattgcgggagcaactttaagacctctgcgtcatttgtatgaagttagaaataatgattttcatttgcgtaggtaagaattcttttgtatatagcatagaagtccacagattgagttttgttttgtacaagataggacaaaatgaagtctccacatttatgtagcagtaatttttctaccgttaaagcatcatggaatgagagaaatgaatgcaattttgttac

SEQ ID NO: 7492 - protein, 60 aa, Glycine max
  misc_feature (1)..(60): Ceres Seq. ID no. 15172056
MEPTLALLEEAVADSKAKINSLMTDIGTSESSFQHLTVVKDLSQKIESLQGLVLQLREQL

SEQ ID NO: 7493 - protein, 55 aa, Glycine max
  misc_feature (1)..(55): Ceres Seq. ID no. 15172057
GLGSLREFIRKAPRILFVLFYSYAKFFKKLTLDFITSSPDRTHVLAKLNYTSAGS

SEQ ID NO: 7494 - protein, 41 aa, Glycine max
  misc_feature (1)..(41): Ceres Seq. ID no. 15172058
MKLEIMIFICVGKNSFVYSIEVHRLSFVLYKIGQNEVSTFM

SEQ ID NO: 7495 - DNA, 1875 bp, Glycine max
  misc_feature (1)..(1875): Ceres Seq. ID no. 15172059
taaacttcttcaagaatatgggcaatttggtgaactagttattcgtagttatactcaacagattttgtcagggcttgcttatttgcatgctaaaaatactctccatagggatatcaaaggagcaaatatactggtagatccaactggtcgggtcaagttggcagactttggcatggcaaaacatataacagggcaatcgtgtctattgtcattcaagggaaccccttactggatggctcctgaggttataaagaactctaatggatgcaaccttgcagtggatatatggagtcttggatgcacggttttggaaatggctactaccaaacctccttggtttcagtatgaagcggttgctgccatgttcaagattggtaatagcaaggaactcccaacaatccctgatcatctctcaaatgaaggaaaagattttgttaggaaatgtcttcagcgtaacccgtatgatcgcccttcagcctgtgaattgttggaccacccttttgtaaaaaatgctgcacctttggaaagacctattctggctcctgaagtgttggaccctgtttctgggatcatacagggagcaaaagctctggccgctggacaaggaaagaatctttctagcttggattcagatagactttctattcattcttctagatttttgaaaactaatcctcgtgaaagtgaaatccatattccaaggaatatatcttgccctgtttctcccattggaagcccacttttgaggtcaagatcaccacagcacaggaatgggagaatgtctcctcctatatctagccctcggactgcttctggggcgtccacccctcttgctggtggcagtggtgccattccatttggtaatcactctaaacagccaatttactttcaagagggttttggaagcattcccaagtcctcaaatggtgtctacattaatggccattctcatcacgactcgagtgttgacatttttcgaggaatgcaaataggatctcacattcaaccagaattggtttccagtgaaaatgatgttttggttaatcagtttgcaaggcatcctcatgcagagccatatgattttcagtcagtcttggcagatcgtgttggccggcagctgctgagggaacatgttaagattaacccatccattgatctcagtcccaactcgtctttgcttagccggccaaacggtttatgacatcaagatttttccttaagtttctcatagtacctttggttatgcagatctgttcattgttctatttgcaagaatataactatacaataaggagccaaagcacaagagaatcgatgtaaataaatttgcatctgagaataggctacatggggcacaaaagtgcattttgcatggcttctgctcgggcttatggagttcattaatgtctcagcattaaactttctgacaatttgttcatatcaagcaatcaactaacaaatgctcacttgttcgaaaagaggaacttgttgtatgtaacatatttaaagcatcaacgcatgaggggtttctctcctgcacttaagatactagaaatgacagttcgtgcaatggcaaatgcatcttctggaatcagaacaccatatagatgccagagaaagggctaaattgatacaaaacttaacttgcatatttttcttttttgggaggttagacattgctgtacagtagatgggaaactgttttgtgattctgcatttacgaatggggaagtcaaggttttgtagagagtccatgcatggtttttgggctctgatgtattgttgtcagtgtatactctactactgggtctgttctgtacattattattcaacagtaaaatggaagaaatctgatcttatgatcctcattagatt

SEQ ID NO: 7496 - protein, 399 aa, Glycine max
  misc_feature (1)..(399): Ceres Seq. ID no. 15172060
KLLQEYGQFGELVIRSYTQQILSGLAYLHAKNTLHRDIKGANILVDPTGRVKLADFGMAKHITGQSCLLSFKGTPYWMAPEVIKNSNGCNLAVDIWSLGCTVLEMATTKPPWFQYEAVAAMFKIGNSKELPTIPDHLSNEGKDFVRKCLQRNPYDRPSACELLDHPFVKNAAPLERPILAPEVLDPVSGIIQGAKALAAGQGKNLSSLDSDRLSIHSSRFLKTNPRESEIHIPRNISCPVSPIGSPLLRSRSPQHRNGRMSPPISSPRTASGASTPLAGGSGAIPFGNHSKQPIYFQEGFGSIPKSSNGVYINGHSHHDSSVDIFRGMQIGSHIQPELVSSENDVLVNQFARHPHAEPYDFQSVLADRVGRQLLREHVKINPSIDLSPNSSLLSRPNGL

SEQ ID NO: 7497 - protein, 342 aa, Glycine max
  misc_feature (1)..(342): Ceres Seq. ID no. 15172061
MAKHITGQSCLLSFKGTPYWMAPEVIKNSNGCNLAVDIWSLGCTVLEMATTKPPWFQYEAVAAMFKIGNSKELPTIPDHLSNEGKDFVRKCLQRNPYDRPSACELLDHPFVKNAAPLERPILAPEVLDPVSGIIQGAKALAAGQGKNLSSLDSDRLSIHSSRFLKTNPRESEIHIPRNISCPVSPIGSPLLRSRSPQHRNGRMSPPISSPRTASGASTPLAGGSGAIPFGNHSKQPIYFQEGFGSIPKSSNGVYINGHSHHDSSVDIFRGMQIGSHIQPELVSSENDVLVNQFARHPHAEPYDFQSVLADRVGRQLLREHVKINPSIDLSPNSSLLSRPNGL

SEQ ID NO: 7498 - protein, 322 aa, Glycine max
  misc_feature (1)..(322): Ceres Seq. ID no. 15172062
MAPEVIKNSNGCNLAVDIWSLGCTVLEMATTKPPWFQYEAVAAMFKIGNSKELPTIPDHLSNEGKDFVRKCLQRNPYDRPSACELLDHPFVKNAAPLERPILAPEVLDPVSGIIQGAKALAAGQGKNLSSLDSDRLSIHSSRFLKTNPRESEIHIPRNISCPVSPIGSPLLRSRSPQHRNGRMSPPISSPRTASGASTPLAGGSGAIPFGNHSKQPIYFQEGFGSIPKSSNGVYINGHSHHDSSVDIFRGMQIGSHIQPELVSSENDVLVNQFARHPHAEPYDFQSVLADRVGRQLLREHVKINPSIDLSPNSSLLSRPNGL

SEQ ID NO: 7499 - DNA, 1416 bp, Glycine max
  misc_feature (1)..(1416): Ceres Seq. ID no. 15172063
gaattgcaatgggcaaatttttctaagatccacgctggcagagaaacaagagttatgtttctctgtagtttcactgttatggcacaagttgattgcatctcctgaaacacaaccttgtgcagaaagcacttctgcccaacagggctggagacaggttgttgatgcattatgcaatgttgtgtcagcctcaccaacaaaagcagctacggcagttgtacttcaggtccaaaattcgtcttatcatgaatggtttcataaattacgtttgccactaacatgaactcctattctgtttagcaagattactttcttttaagaattatcatttttaatacctctgagaattggcttttactgtctaaaaagttcaatagctgatgctgaaaatctcatctatccaatgtttatttgttgtacattttttttataaattattattattacccacatttcatttgtatagtcactttcctgggcttgtttacttgtcaggcggagcgggaattgcagccctggattgccaaggatgatgatttaggtcagaaggtgtggagaatcaatcagcggattgtgaaattgatcgtggaacttatgaggaatcatgagacttcagaatcattggtaattgtggcaagttcttcagatttactactgcgagccacagatgggatgctggttgatggagaagcttgcactttaccacagttggagctattggaagcaacagctagagcagttcagccagtgctcgagtttggagaatctggattggctgtggcagatggcctttcaaaccttttaaagtgtcgcctctcagctacaattagatgtctttctcatccaagtgcacatgtccgagctctgagtatatcagttcttcgtgacattttgcatactggttcaatcagatgtagtcctaaacctcggagattaaatggcacccacaacccctcttatcaatacttcaatttggatgtcattgactggcaagctgacatagaaaaatgcttgacttgggaagctcacagccgactttcaaacggattgtctattaactttcttgataccgctgccaaagagttaggctgtactatttccatgtgaaatgaaatcatccatcttagtccgtgacaattttttactagacgtatagaaaaaaaaaagttattgatatgcttattgaactaacgggtttgcaaataagcataattctgctagtcctgttgaaaagagctgcagtcataattctagtatgtttatagaaagctcattttgtatcatgtatgtactgtagctaaactaagtttcaccctgaacttgcttgtgagtctgctctcgatagaacagtcttgtacagtaacgaaaaacgctgtaaccaggtccttttctatattgtctcattttgtgttatgcttg

SEQ ID NO: 7500 - protein, 170 aa, Glycine max
  misc_feature (1)..(170): Ceres Seq. ID no. 15172064
MRNHETSESLVIVASSSDLLLRATDGMLVDGEACTLPQLELLEATARAVQPVLEFGESGLAVADGLSNLLKCRLSATIRCLSHPSAHVRALSISVLRDILHTGSIRCSPKPRRLNGTHNPSYQYFNLDVIDWQADIEKCLTWEAHSRLSNGLSINFLDTAAKELGCTISM

SEQ ID NO: 7501 - protein, 144 aa, Glycine max
  misc_feature (1)..(144): Ceres Seq. ID no. 15172065
MLVDGEACTLPQLELLEATARAVQPVLEFGESGLAVADGLSNLLKCRLSATIRCLSHPSAHVRALSISVLRDILHTGSIRCSPKPRRLNGTHNPSYQYFNLDVIDWQADIEKCLTWEAHSRLSNGLSINFLDTAAKELGCTISM

SEQ ID NO: 7502 - protein, 92 aa, Glycine max
  misc_feature (1)..(92): Ceres Seq. ID no. 15172066
NCNGQIFLRSTLAEKQELCFSVVSLLWHKLIASPETQPCAESTSAQQGWRQVVDALCNVVSASPTKAATAVVLQVQNSSYHEWFHKLRLPLT

SEQ ID NO: 7503 - DNA, 1619 bp, Glycine max
  misc_feature (1)..(1619): Ceres Seq. ID no. 15172124
gatccatcttcaactttcctttctttcctttcctcttctttttctccctccaagaacacatttttctttgacccttttgttccctctccacccacttcccctttaagacaatttcatgcttctctgtctcggatcctagatcttgctgtcggtgggttgatcggagtagatgtcgccgtcaaacgggttgcataacggcggcggaggcggcagcggtggtggcggaggtaatggggtgagttatatagagcaccaggtttcaaaacttgacactcttgctggtgtggcaatcaagtatggtgttgaggtagctgacataaaaaggatgaatgggttggccacagatcttcaaatgttcgcactgaagacattgaaaattccattaccaggacgtcatccaccatctcctgctcctggtccacatgatgaacctgcaaagtcaggagaagctagtattgagaggaaacccctacgcataggtcaatctgccatgaaggaacctctccagtccttagaactgaaaccacctcaaccgaatatttctccagctatgagcattttacagaaattctatggcctcaaatcttcaaattcaagagatacattgaatggaacagaaatggcagtttatttgtcctcaaattctgatcattctagtggggaatggcttcccaaagcctcacccattttagacctaccatcagcatcaaatgattaccccaggtcaacaaatttagtgtatgatctactgaccggggatgatgaatatgtgcctcttgcggaaattggggacacaggagttgagaagtctgatgagaaatctgtccgaagacgtcagaaagctgaagttgataacggaaccagtaccccagaaaagattatgaaagaaggaaatggtaatggatcaaatggtctttcttcaaatggaaaaacattagccatgaggccgaaatcggctagtcgagcagcgctgttccctgagtcagaatcaggatggttagattcaattccagtggggttgggagaatctatatttactgatggcttttccggagtgcgcaaatcgtcaagtgcatcaagcctcagagagcaggaaaaaaacaattcagcagcagcctggccgcctgcaatatggagcttgaaacctgacttgcaagcagccatttcgaaacctatctttgatggtctacctatcccaatatctggccgcagaagcaaagctgcccttgattagtgtaaaattgttccccatttgagcaaaatactttttgactttacacaaatataaattgcaacaagatgcaattatttgggttagtaagccttgcaaagaaggaaaagaaaaaagaagagagaaaaatacaaaattaggatatttgttccaggcctagcaaggggtagatgacctcctaagaggaaaagcttcagcagttgcaactgaggaaaaggtgcatgaaaatggtaagcagctggtttttcaattgtaccaataatgtaatggtgttcgaccccacctggatgataaagagttatttacatattgattatttcctttgttaaatgaacgagtgaagtgaaagtcattctgttcagtggttaatcatgtgattattattatt

SEQ ID NO: 7504 - protein, 354 aa, Glycine max
  misc_feature (1)..(354): Ceres Seq. ID no. 15172125
MSPSNGLHNGGGGGSGGGGGNGVSYIEHQVSKLDTLAGVAIKYGVEVADIKRMNGLATDLQMFALKTLKIPLPGRHPPSPAPGPHDEPAKSGEASIERKPLRIGQSAMKEPLQSLELKPPQPNISPAMSILQKFYGLKSSNSRDTLNGTEMAVYLSSNSDHSSGEWLPKASPILDLPSASNDYPRSTNLVYDLLTGDDEYVPLAEIGDTGVEKSDEKSVRRRQKAEVDNGTSTPEKIMKEGNGNGSNGLSSNGKTLAMRPKSASRAALFPESESGWLDSIPVGLGESIFTDGFSGVRKSSSASSLREQEKNNSAAAWPPAIWSLKPDLQAAISKPIFDGLPIPISGRRSKAALD

SEQ ID NO: 7505 - protein, 302 aa, Glycine max
  misc_feature (1)..(302): Ceres Seq. ID no. 15172126
MNGLATDLQMFALKTLKIPLPGRHPPSPAPGPHDEPAKSGEASIERKPLRIGQSAMKEPLQSLELKPPQPNISPAMSILQKFYGLKSSNSRDTLNGTEMAVYLSSNSDHSSGEWLPKASPILDLPSASNDYPRSTNLVYDLLTGDDEYVPLAEIGDTGVEKSDEKSVRRRQKAEVDNGTSTPEKIMKEGNGNGSNGLSSNGKTLAMRPKSASRAALFPESESGWLDSIPVGLGESIFTDGFSGVRKSSSASSLREQEKNNSAAAWPPAIWSLKPDLQAAISKPIFDGLPIPISGRRSKAALD

SEQ ID NO: 7506 - protein, 293 aa, Glycine max
  misc_feature (1)..(293): Ceres Seq. ID no. 15172127
MFALKTLKIPLPGRHPPSPAPGPHDEPAKSGEASIERKPLRIGQSAMKEPLQSLELKPPQPNISPAMSILQKFYGLKSSNSRDTLNGTEMAVYLSSNSDHSSGEWLPKASPILDLPSASNDYPRSTNLVYDLLTGDDEYVPLAEIGDTGVEKSDEKSVRRRQKAEVDNGTSTPEKIMKEGNGNGSNGLSSNGKTLAMRPKSASRAALFPESESGWLDSIPVGLGESIFTDGFSGVRKSSSASSLREQEKNNSAAAWPPAIWSLKPDLQAAISKPIFDGLPIPISGRRSKAALD

SEQ ID NO: 7507 - DNA, 1290 bp, Glycine max
  misc_feature (1)..(1290): Ceres Seq. ID no. 15172136
aagagattacccgacttcattcacaaggaagcaccattgcaaatcttgaacagcagcttgaaaatgttcaaaggtccatagacaagttggtgatgtctctcccgaacaacttccaacactcacccaatgaagcatcccctaagaataaaaaggaacacaaaaggaaaaagttgcttcctttgtcttcaagcaatgctgccaatcgccaaaacttcctaagatctccctgctcaccattatctgctacgcagcaagttttggaatctgatgttgaaaatagagcccctgagaatgatgatattgtttcaactgatactcttcctgagtccgagaaggagactccatcaaagagtgaagaagctggagatgtttcatcaaaggaaaataccccagtttatcgacgctctagttcagttaacatgaagaaaatgcagaaaatgtttcagaatgcagcagaggagaatgtaagaagtataagagcatatgtgacagaattgaaagaacgtgtagccaaactgcagtaccaaaagcagttacttgtttgccaggtgcttgaacttgaagcaaacgaagcaaatggccacaacatagacaatgaagagtactcatgtgaaccggaggagccccagatttcgtggcaaatagcatttaaagagcagcggcagcagattcttgaattatgggatctatgttatgtctccattattcacaggacccagttttatttgttattcaagggagacccagccgatcaaatatacatggaagtagaactaaggcgtttgacatggttgcagcaacacctagcagaacttgggaatgcaagcccagctcctcatgttggagaagaacctactatctcattgtcttcaagcattagagctttgaaacgagaaagggaatttctagccaagagactgacatcacgtttgtcgctggaggagagggaggcgttgtatatgaaatgggatgtccctcttgatgggaagcagaggaagatgcagtttatcagcaaactttggactgatcctcatgaccaaatccatgtacaggagagtgcagagatagttgcaaagcttgtgagtttccggacaggaggcaacatgtcaaaggagatgtttgagctgaactttgtgcttccatctgacaataggccatggttgatgggctggaatcacttgacaaacttgcttaatttgtaatggatttatgtttgtaaagtaccattaaaatcttgtacatgctcattattttggcgcttttctctattcaaaattattgttttggact

SEQ ID NO: 7508 - protein, 399 aa, Glycine max
  misc_feature (1)..(399): Ceres Seq. ID no. 15172137
EITRLHSQGSTIANLEQQLENVQRSIDKLVMSLPNNFQHSPNEASPKNKKEHKRKKLLPLSSSNAANRQNFLRSPCSPLSATQQVLESDVENRAPENDDIVSTDTLPESEKETPSKSEEAGDVSSKENTPVYRRSSSVNMKKMQKMFQNAAEENVRSIRAYVTELKERVAKLQYQKQLLVCQVLELEANEANGHNIDNEEYSCEPEEPQISWQIAFKEQRQQILELWDLCYVSIIHRTQFYLLFKGDPADQIYMEVELRRLTWLQQHLAELGNASPAPHVGEEPTISLSSSIRALKREREFLAKRLTSRLSLEEREALYMKWDVPLDGKQRKMQFISKLWTDPHDQIHVQESAEIVAKLVSFRTGGNMSKEMFELNFVLPSDNRPWLMGWNHLTNLLNL

SEQ ID NO: 7509 - protein, 369 aa, Glycine max
  misc_feature (1)..(369): Ceres Seq. ID no. 15172138
MSLPNNFQHSPNEASPKNKKEHKRKKLLPLSSSNAANRQNFLRSPCSPLSATQQVLESDVENRAPENDDIVSTDTLPESEKETPSKSEEAGDVSSKENTPVYRRSSSVNMKKMQKMFQNAAEENVRSIRAYVTELKERVAKLQYQKQLLVCQVLELEANEANGHNIDNEEYSCEPEEPQISWQIAFKEQRQQILELWDLCYVSIIHRTQFYLLFKGDPADQIYMEVELRRLTWLQQHLAELGNASPAPHVGEEPTISLSSSIRALKREREFLAKRLTSRLSLEEREALYMKWDVPLDGKQRKMQFISKLWTDPHDQIHVQESAEIVAKLVSFRTGGNMSKEMFELNFVLPSDNRPWLMGWNHLTNLLNL

SEQ ID NO: 7510 - protein, 260 aa, Glycine max
  misc_feature (1)..(260): Ceres Seq. ID no. 15172139
MKKMQKMFQNAAEENVRSIRAYVTELKERVAKLQYQKQLLVCQVLELEANEANGHNIDNEEYSCEPEEPQISWQIAFKEQRQQILELWDLCYVSIIHRTQFYLLFKGDPADQIYMEVELRRLTWLQQHLAELGNASPAPHVGEEPTISLSSSIRALKREREFLAKRLTSRLSLEEREALYMKWDVPLDGKQRKMQFISKLWTDPHDQIHVQESAEIVAKLVSFRTGGNMSKEMFELNFVLPSDNRPWLMGWNHLTNLLNL

SEQ ID NO: 7511 - DNA, 1285 bp, Glycine max
  misc_feature (1)..(1285): Ceres Seq. ID no. 15172150
atagagaacaaaaactatatacagaaggagaaaaaggcagaggaaaaaacagagcgagtgagtgagtggggtgagagcagaagcatcagagtgagaagggggttggggttgctttagcttttctgggtttgggaatcgttgaaagacagtggagaaaagcctgcaagagaattcaagacctaaacatggtaaagcttaggaagtgttgatctgcatatatagattcatcattcatctttgtttttctatgcttctctcttctttttttaacttctctgccacaacacacaccatcagataaaccgtaccactactactactccatccatccaaattttccactctctctacctctattacacactgcactgcactgagacaaaataaaaataaaaaaagtggtgtgtgtgtgtgtgagagagagagagagagagttgaaaagcacaaaaggggtgtgactttgtctatcttagacaaatgggctaagtgttaggtatttctttagctcttttttgcatggaacgtgcaagcccttgtgttggcaaaccctattattgactcatagcttcaaacattactcttcatagggtcaaagagagcgagtgtgagtgtgtgtttgtttcatatatctgcaaccatatcccagtgttgctgttgtaatgaagcaatttttcttcttgttcatggagaggaagagaaccacccctactagtatctccttctttttcttgctctcaatttgcacacccatcttcttcagtagaactactactactgcctctggcattccatgtttagatactcggtgtcccatgtttgccagagctggtagagactttcaggaactcaaggagaaaaatgggcaaggcttggtctttggaggtaaaatggaggtctcatcaatgggctggcacaggagacttctaggtgggcctgggtcatcgccgccacggtgcacctccaagtgtggcagatgtacaccctgcaggccggttcatgtgccggtgccgccggggacgccggttactgccgagtactacccggaggcatggagatgcaagtgtggcaacaagttgtacatgccatgaatataattttctctaagtatgatgtatttttgttgggtctaatatatatagttcattttattgactataaattaagacaaatctcatctctttgattaattacgttagctttagcttgtggtggatattggatatggaaaaaaagagggtacagaacttgatttgatgtgaaatatataatatatatcttcacactg

SEQ ID NO: 7512 - protein, 142 aa, Glycine max
  misc_feature (1)..(142): Ceres Seq. ID no. 15172151
MKQFFFLFMERKRTTPTSISFFFLLSICTPIFFSRTTTTASGIPCLDTRCPMFARAGRDFQELKEKNGQGLVFGGKMEVSSMGWHRRLLGGPGSSPPRCTSKCGRCTPCRPVHVPVPPGTPVTAEYYPEAWRCKCGNKLYMP

SEQ ID NO: 7513 - protein, 134 aa, Glycine max
  misc_feature (1)..(134): Ceres Seq. ID no. 15172152
MERKRTTPTSISFFFLLSICTPIFFSRTTTTASGIPCLDTRCPMFARAGRDFQELKEKNGQGLVFGGKMEVSSMGWHRRLLGGPGSSPPRCTSKCGRCTPCRPVHVPVPPGTPVTAEYYPEAWRCKCGNKLYMP

SEQ ID NO: 7514 - protein, 91 aa, Glycine max
  misc_feature (1)..(91): Ceres Seq. ID no. 15172153
MFARAGRDFQELKEKNGQGLVFGGKMEVSSMGWHRRLLGGPGSSPPRCTSKCGRCTPCRPVHVPVPPGTPVTAEYYPEAWRCKCGNKLYMP

SEQ ID NO: 7515 - DNA, 1211 bp, Glycine max
  misc_feature (1)..(1211): Ceres Seq. ID no. 15172162
atgacttatcaagtttaatacaaagttcgacgacaccgctcaatatacctggatctcaattgacaaactctctttctggtattttgcaaggaacatcggctccagtaaatattccgggtagttcactaaataattttagtccaaacaatcattcgaatatgttcaatgtgtcagatccattcagtcatctgagtgacccagcgccaaaaattaacaattcctttggtcataatgatagtagtagcctatttttccaatcgcatttgatatcgcccagtttgggtgacacattatcaatgagccccgatctaagccggctatcggaaatcaatccaattcgcgatgagctttcaactggttcaataacaaatagtttattcgaaaatagtttgcataataagcaatattcgatgtcaccatctctattgaataattccagcctaagtgatatgaatcgtttgcgtgatgaattttcaaatcaatcgaccaaacatcttccgacaccatgggaagagcaaattgtacaggtctccaaagcatgcgaggcatggaaatcagaggctgatgaaagcaatcgaaaggcttcggaagcaaaacagcagcgagatgaagccctaacacatgttcaattgctcaccgataagctggaacaaatcagcagcggtcaaaatggatcaatagctattccaaaagatctgaggggtttatccatacagaaattgaaaacattgcagacaaaactgcgatccgatttagaagaagtcgaaaaggtattatatttggagacggcgacaaaatgtatgaaatgtgaggagaacaaccgttcggtgactcttccctgtaatcatttcgttttgtgtgacatttgtgcgaagacagtgcgtgaatgtccgtattgccaaacattaatcacttcctaaacaagtaacccacacacccacacccacaactcacacacaatcactgaataattgatgtcaaagagagaaaaaagtgcaaaaaaaacccaaaagcagaatttttaaatgcaggaaaagcaacagccagccaagtacagtacataaatgaaatgtctacgaaaaaatttcaaaagcaaacaaaactattcctgatttaaacaacatcaacaaaatgatacaattaacaataagctaagtaagaatgaaaatagaaacaccgatgttaaaacaaaaacaaagctactctatgac

SEQ ID NO: 7516 - protein, 305 aa, Glycine max
  misc_feature (1)..(305): Ceres Seq. ID no. 15172163
DLSSLIQSSTTPLNIPGSQLTNSLSGILQGTSAPVNIPGSSLNNFSPNNHSNMFNVSDPFSHLSDPAPKINNSFGHNDSSSLFFQSHLISPSLGDTLSMSPDLSRLSEINPIRDELSTGSITNSLFENSLHNKQYSMSPSLLNNSSLSDMNRLRDEFSNQSTKHLPTPWEEQIVQVSKACEAWKSEADESNRKASEAKQQRDEALTHVQLLTDKLEQISSGQNGSIAIPKDLRGLSIQKLKTLQTKLRSDLEEVEKVLYLETATKCMKCEENNRSVTLPCNHFVLCDICAKTVRECPYCQTLITS

SEQ ID NO: 7517 - protein, 253 aa, Glycine max
  misc_feature (1)..(253): Ceres Seq. ID no. 15172164
MFNVSDPFSHLSDPAPKINNSFGHNDSSSLFFQSHLISPSLGDTLSMSPDLSRLSEINPIRDELSTGSITNSLFENSLHNKQYSMSPSLLNNSSLSDMNRLRDEFSNQSTKHLPTPWEEQIVQVSKACEAWKSEADESNRKASEAKQQRDEALTHVQLLTDKLEQISSGQNGSIAIPKDLRGLSIQKLKTLQTKLRSDLEEVEKVLYLETATKCMKCEENNRSVTLPCNHFVLCDICAKTVRECPYCQTLITS

SEQ ID NO: 7518 - protein, 207 aa, Glycine max
  misc_feature (1)..(207): Ceres Seq. ID no. 15172165
MSPDLSRLSEINPIRDELSTGSITNSLFENSLHNKQYSMSPSLLNNSSLSDMNRLRDEFSNQSTKHLPTPWEEQIVQVSKACEAWKSEADESNRKASEAKQQRDEALTHVQLLTDKLEQISSGQNGSIAIPKDLRGLSIQKLKTLQTKLRSDLEEVEKVLYLETATKCMKCEENNRSVTLPCNHFVLCDICAKTVRECPYCQTLITS

SEQ ID NO: 7519 - DNA, 1896 bp, Glycine max
  misc_feature (1)..(1896): Ceres Seq. ID no. 15172205
aatgcaaaaggacaagccttcttacaaaatcctcacataaatactcttataagagcattgctatctccagaacccgaaaaaaaagaaaaaacttgaagcatgagccttcttttgttgagtttcctcttgatcatcccaatccttcttcttcttagaagaaaaagaaaaccatccaaaagggtccctccaggttcacttggaatacctgttgttggccaaagccttggccttcttcgagctatgcgtgccaacaccgcagaaaaatgggttcaagagagaatcaacaagtatggtcccatttcaaagctaagcctctttgggaaaccaacagttttaatccatggacaggctgcaaataagtttatattctccggtggcggtaacgcgattgctaaccagcaaacacagtccatcaaaatgatcctaggtgaccggaacttgctggaattgactggtgaagatcacagccgagtcagaggtgcacttgtcccattcttgaagccagaatccttgaagagatatgtgggaaaaatggatgaagaagttaggaagcaccttgagatgcattggcaggggaaacagcagatcaaggtattgcccctgatgaagactctcacattcaacataatttgctctcttctgtttggtgttgagcgtggaaagcaaagagatcaattcctggattccttccaagagatgatacaaggaatgtggtcagtaccaattaacgtgcccttcacacgctacaaccgcagccttagagcaagtgcaagaatccagaacattttgaaggagattgtgcaaaagaagaagattgaactcaagcaaaatgcggcatctgcacgccaagacttgatcagtttcttgttaggcatggttgatgaagatggcaaacaagttatgagcgagaaggaaatctttcacaacattaagcttgtcatggttgctggacatgacacttcggctgttctgatcactttcatcatccgactcttagccaacgaacctgctatctatgcagcagttcttcaagaacaggaagagatagcaaaaggcaagctctcaggagaggcactgacatgggaagacctttcaaagatgaagtacacctggagagtagcaatggaaactattaggatgtttcctcctatttttggtggcttcagaaaggcagcaacagatattgaatatgatggatacttcatacccaaagggtggcaggtaagtgaaactctggtgtgtgttttcttgtacccatgacattggagtggagtatcaattagctttgatgatgactaatctccgttggaaaacctggttggcctcctttaggggatctccactcccaattatgtttttttcatccacaaggctcgagatcttacttaagggaattgagcctagtaccacttagaccaatgacttggtaactctgtgtttatcgttggtgaacttctttccatgcaatcatgttactgattaagacatttctacatgtttttagattttctgggtcacagcaatgacacacatggacgaaaacattttcccagagccatcaaagattgatcctagtagatttgaaaaccaagcatctgtcccaccctactgcttcattccatttggagggggagcaagaatatgtccagggtatgagttttccaggcttgaaactcttgttgcaattcattaccttgtgacacggttcagttggaagctatgttcagacaatttcttcagtagggatccaatgccagtaccaactcaagggctacttgttcagatttggccaaggaaactttcttaatggtcatttcaataactgctgatcttctaatcaatacaatgtaccaaaaataagtcaattttatgatcagcttacgactatattagctt

SEQ ID NO: 7520 - protein, 386 aa, Glycine max
  misc_feature (1)..(386): Ceres Seq. ID no. 15172206
MSLLLLSFLLIIPILLLLRRKRKPSKRVPPGSLGIPVVGQSLGLLRAMRANTAEKWVQERINKYGPISKLSLFGKPTVLIHGQAANKFIFSGGGNAIANQQTQSIKMILGDRNLLELTGEDHSRVRGALVPFLKPESLKRYVGKMDEEVRKHLEMHWQGKQQIKVLPLMKTLTFNIICSLLFGVERGKQRDQFLDSFQEMIQGMWSVPINVPFTRYNRSLRASARIQNILKEIVQKKKIELKQNAASARQDLISFLLGMVDEDGKQVMSEKEIFHNIKLVMVAGHDTSAVLITFIIRLLANEPAIYAAVLQEQEEIAKGKLSGEALTWEDLSKMKYTWRVAMETIRMFPPIFGGFRKAATDIEYDGYFIPKGWQVSETLVCVFLYP

SEQ ID NO: 7521 - protein, 339 aa, Glycine max
  misc_feature (1)..(339): Ceres Seq. ID no. 15172207
MRANTAEKWVQERINKYGPISKLSLFGKPTVLIHGQAANKFIFSGGGNAIANQQTQSIKMILGDRNLLELTGEDHSRVRGALVPFLKPESLKRYVGKMDEEVRKHLEMHWQGKQQIKVLPLMKTLTFNIICSLLFGVERGKQRDQFLDSFQEMIQGMWSVPINVPFTRYNRSLRASARIQNILKEIVQKKKIELKQNAASARQDLISFLLGMVDEDGKQVMSEKEIFHNIKLVMVAGHDTSAVLITFIIRLLANEPAIYAAVLQEQEEIAKGKLSGEALTWEDLSKMKYTWRVAMETIRMFPPIFGGFRKAATDIEYDGYFIPKGWQVSETLVCVFLYP

SEQ ID NO: 7522 - protein, 280 aa, Glycine max
  misc_feature (1)..(280): Ceres Seq. ID no. 15172208
MILGDRNLLELTGEDHSRVRGALVPFLKPESLKRYVGKMDEEVRKHLEMHWQGKQQIKVLPLMKTLTFNIICSLLFGVERGKQRDQFLDSFQEMIQGMWSVPINVPFTRYNRSLRASARIQNILKEIVQKKKIELKQNAASARQDLISFLLGMVDEDGKQVMSEKEIFHNIKLVMVAGHDTSAVLITFIIRLLANEPAIYAAVLQEQEEIAKGKLSGEALTWEDLSKMKYTWRVAMETIRMFPPIFGGFRKAATDIEYDGYFIPKGWQVSETLVCVFLYP

SEQ ID NO: 7523 - DNA, 1289 bp, Glycine max
  misc_feature (1)..(1289): Ceres Seq. ID no. 15172221
taatcctggacccatccttcacaattccatcaccgttgtctttgtctctaggagattttcccagtgaaaggctccaaatgttgagtcagagagatattaaaggaatggtggctaggggaatatgtatcacaaggagttcaataaagccagatgtatcaagttgctcagtggtgtatcctcctagatctttgtatcctgaacaggtgacttcaatcaaagctcttcagataggatcaaatctcgctgtttgtcctgcaggaacctttattttatacctttccactttgtgcaatgatgccgatgaaggaaagaagctactaaaagcagccatgaatgctctacttacgctgcctgtatcgggaaactctgaaagcattccaagtgttcaaagtgacagtgaagatataaaacccattgtgctctggagtgcattttatattcagaaattaattatgagtaaatttgaatttatcagctccactcctacaccggatggaaatctgaactacaatgcccttttagatgcgaccgagaagctatttaatcagatgtaccccaatgaagaattctttccaaaggcaacatcacctgaagatcctacagatgaggatgataatgggttaactttggatagctaaacaaggtgaaactggctgagcattaaaggaagttgtgaaagatatgtttgcgcccctaagagtcgaagaagtaggttaaaattgttaattatggaggtaaaaggttacagttcctaatttataggtgaacagaagcgaaaaaaggtcctcaaggcagggaagtagttgttactgattctgaaattttttgtcaagcatacacatgcggattttgtgctgtgtatccacttatgagcgtttgttggacaaagttgcaacttgtttcaagattgtggaacagcagtggaagtttcacggggccgaacagcgcttacactcctgtatcttcatctgcaatttgtattttgagaacgatttgatcgaataatattgtatgaatttaggacgtattcggatttattgcaacattaaccaacacataaacattgtaggttgttcgagcgcatttaattttggaaaaaacttgacttcgtcttagtacagaatgaatcaaaagatagggggcaagtagttctaccatcagaaaaaaggtgtggcccgtttagaagcaaataaactatggttgtgctttccaacaaaaaaatgtaatggatagagatatatagacattcatatactacaaatactcatttaacacttattatttctctt

SEQ ID NO: 7524 - protein, 211 aa, Glycine max
  misc_feature (1)..(211): Ceres Seq. ID no. 15172222
ILDPSFTIPSPLSLSLGDFPSERLQMLSQRDIKGMVARGICITRSSIKPDVSSCSVVYPPRSLYPEQVTSIKALQIGSNLAVCPAGTFILYLSTLCNDADEGKKLLKAAMNALLTLPVSGNSESIPSVQSDSEDIKPIVLWSAFYIQKLIMSKFEFISSTPTPDGNLNYNALLDATEKLFNQMYPNEEFFPKATSPEDPTDEDDNGLTLDS

SEQ ID NO: 7525 - protein, 186 aa, Glycine max
  misc_feature (1)..(186): Ceres Seq. ID no. 15172223
MLSQRDIKGMVARGICITRSSIKPDVSSCSVVYPPRSLYPEQVTSIKALQIGSNLAVCPAGTFILYLSTLCNDADEGKKLLKAAMNALLTLPVSGNSESIPSVQSDSEDIKPIVLWSAFYIQKLIMSKFEFISSTPTPDGNLNYNALLDATEKLFNQMYPNEEFFPKATSPEDPTDEDDNGLTLDS

SEQ ID NO: 7526 - protein, 177 aa, Glycine max
  misc_feature (1)..(177): Ceres Seq. ID no. 15172224
MVARGICITRSSIKPDVSSCSVVYPPRSLYPEQVTSIKALQIGSNLAVCPAGTFILYLSTLCNDADEGKKLLKAAMNALLTLPVSGNSESIPSVQSDSEDIKPIVLWSAFYIQKLIMSKFEFISSTPTPDGNLNYNALLDATEKLFNQMYPNEEFFPKATSPEDPTDEDDNGLTLDS

SEQ ID NO: 7527 - DNA, 1912 bp, Glycine max
  misc_feature (1)..(1912): Ceres Seq. ID no. 15172237
gccgagcaacagtgaatttggccaccataccataccatgagcataagggcgcgcgcgcgcaaaggattagggtttcgaacgtagcgattttggagcttccatttcgatttatacttgcgcacgatctgatgcaaaaaatgccagggacaaagcagagagatacatcccaaaatccagactcaccagaggggaacagtgagcctgagaaacctacagattctgatgagcgagtagactttgatggggacaatgatcaagaggagacaatggaggaagaagttgagtatgaagaagtagaggaggaggaagaagaggaggaggaggaggaggaagaagaagaagaagaagagactaagctctcagataagacaagagtggcagacactaaggatgaagttgagaaaaagaagcatgctgagcttcttgcacttccacctcatgggtctgaggtttacattgggggcattcctcaaaatgtttctgaagaagatttgagggtcttctgtcaatctgtgggagaagtttcagaggttaggataatgaagggaaaagaatccggtgaagcaaaaggttatgcttttgtgaccttcatgacaaaggaattggcatctaaggctattgaggagctgaacaactctgaatttaagggaaaaagaataaagtgctccacatctcaagttaagcacaagttgttcattggtaatgttcctaaatattggactgaaggagatatgaaaaaagttgttgctgaaattggccctggagtaatttgtgtggaactgttgaaggacccacagaattctagccgtaaccgaggatatgcttttatagagtattacaatcatgcttgtgcagagtattcaaggcagaagatgtcaaactcaaactttaaacttggcagcaatgctccaacggtgagctgggctgatccaaggaattctgaatcatctgcaatctctctggtaaaatcagtgtatgtaaagaaccttccagaaaacattactcaggatcgtctcaaggagctgtttgaacatcatggaaagatcacaaaagtggttctcccttctgctaaatcgggtcaagaaaagagcagatttggttttgttcactttgctgaaaggtcaagtgccatgaaggctttgaagaacacagagaaatatgaaattgatggacaattgctggagtgttcgctagcaaagccacaagcaaattcacaaaaaccagctttacttcccacttatccacctcatcttggttatggtatggttggtggtgctataggtgcaggatatggtgctgctggctttgcacaaccactgatgtatggtcccggaccaacccctggtggcatggcaatgatgccaatgatgttatcagatggaaggattgcatacatagtgcaacagccagggtttcaacagcctgccccagtatcccgacatgggaggagtggtggcagtagctccagtggtgggaaatgcagtaatgatgataatcgcaatcgtgggcatggccgctatcatccctactaacttaatgggctttaaggagctagcaaaacaaggaattgcacctgaggcctaaaagtgttgacgattcaaggcacagcgcccaactgattaagacaaacagggcgctgctgtgaatgcagttatgattttgtaatacatctacctagggccaagattcagttaagcatctaagtcaggttttcgtataattttacttatcttgtccatcaattttttgatctcaaattcttaaagagaccacagtgatctatctgaaggacatgataaatcttactagattgatgaaaaattatgtagaggtgtttcagatgtttagcttgcggttcatgtattcatgtttctaaccgtcgttctagaagaattggaacgatgtttgaatg

SEQ ID NO: 7528 - protein, 509 aa, Glycine max
  misc_feature (1)..(509): Ceres Seq. ID no. 15172238
RATVNLATIPYHEHKGARAQRIRVSNVAILELPFRFILAHDLMQKMPGTKQRDTSQNPDSPEGNSEPEKPTDSDERVDFDGDNDQEETMEEEVEYEEVEEEEEEEEEEEEEEEEEETKLSDKTRVADTKDEVEKKKHAELLALPPHGSEVYIGGIPQNVSEEDLRVFCQSVGEVSEVRIMKGKESGEAKGYAFVTFMTKELASKAIEELNNSEFKGKRIKCSTSQVKHKLFIGNVPKYWTEGDMKKVVAEIGPGVICVELLKDPQNSSRNRGYAFIEYYNHACAEYSRQKMSNSNFKLGSNAPTVSWADPRNSESSAISLVKSVYVKNLPENITQDRLKELFEHHGKITKVVLPSAKSGQEKSRFGFVHFAERSSAMKALKNTEKYEIDGQLLECSLAKPQANSQKPALLPTYPPHLGYGMVGGAIGAGYGAAGFAQPLMYGPGPTPGGMAMMPMMLSDGRIAYIVQQPGFQQPAPVSRHGRSGGSSSSGGKCSNDDNRNRGHGRYHPY

SEQ ID NO: 7529 - protein, 467 aa, Glycine max
  misc_feature (1)..(467): Ceres Seq. ID no. 15172239
MQKMPGTKQRDTSQNPDSPEGNSEPEKPTDSDERVDFDGDNDQEETMEEEVEYEEVEEEEEEEEEEEEEEEEEETKLSDKTRVADTKDEVEKKKHAELLALPPHGSEVYIGGIPQNVSEEDLRVFCQSVGEVSEVRIMKGKESGEAKGYAFVTFMTKELASKAIEELNNSEFKGKRIKCSTSQVKHKLFIGNVPKYWTEGDMKKVVAEIGPGVICVELLKDPQNSSRNRGYAFIEYYNHACAEYSRQKMSNSNFKLGSNAPTVSWADPRNSESSAISLVKSVYVKNLPENITQDRLKELFEHHGKITKVVLPSAKSGQEKSRFGFVHFAERSSAMKALKNTEKYEIDGQLLECSLAKPQANSQKPALLPTYPPHLGYGMVGGAIGAGYGAAGFAQPLMYGPGPTPGGMAMMPMMLSDGRIAYIVQQPGFQQPAPVSRHGRSGGSSSSGGKCSNDDNRNRGHGRYHPY

SEQ ID NO: 7530 - protein, 464 aa, Glycine max
  misc_feature (1)..(464): Ceres Seq. ID no. 15172240
MPGTKQRDTSQNPDSPEGNSEPEKPTDSDERVDFDGDNDQEETMEEEVEYEEVEEEEEEEEEEEEEEEEEETKLSDKTRVADTKDEVEKKKHAELLALPPHGSEVYIGGIPQNVSEEDLRVFCQSVGEVSEVRIMKGKESGEAKGYAFVTFMTKELASKAIEELNNSEFKGKRIKCSTSQVKHKLFIGNVPKYWTEGDMKKVVAEIGPGVICVELLKDPQNSSRNRGYAFIEYYNHACAEYSRQKMSNSNFKLGSNAPTVSWADPRNSESSAISLVKSVYVKNLPENITQDRLKELFEHHGKITKVVLPSAKSGQEKSRFGFVHFAERSSAMKALKNTEKYEIDGQLLECSLAKPQANSQKPALLPTYPPHLGYGMVGGAIGAGYGAAGFAQPLMYGPGPTPGGMAMMPMMLSDGRIAYIVQQPGFQQPAPVSRHGRSGGSSSSGGKCSNDDNRNRGHGRYHPY

SEQ ID NO: 7531 - DNA, 1376 bp, Glycine max
  misc_feature (1)..(1376): Ceres Seq. ID no. 15172307
atggtagattatacttggtctgttggggatagggttgatgcatgcagtgaagaaagttggcaggaaggagttattacagatcagaacaagaaagataaaacattaactgttcacttccctgcattatctaattggtttactgcagtcagtggaaaaacaaaacttgtcagagcttggcatctacgtccatcccgtttttggaaggatgggaaatggattgagtatcccaaggttggaaccggtgacagttctacccatgagggtgatacacctcatgaaaaacgacctaagttaggtagtcctgcagtagaggtaaaagggaaagacaggattccaaaaggtactaatgccgtggagtcggcaaatcctggcaagttgaggttacttgacttgactgaaaatgatagagtgttcaatattggtaagtacagcaagaatgaaaataaatctgatgcccacagaatggtgaggactggtcttcaaaaagaaggatcaagagtgatttttggtgttcctaaacctgggaagaaaagaaaatttatggaagtaagcaagcattatgttgcagatgggacaagcaagatcaatgatggaactgattcagtcaagctttcaaatttcttgatacctcaaggtactggatcacgtgggtggaaaaatagttcaaaaaatgataccaaggaaaaactaggagctgactccaggcccacctttaagtctggaaagtcgcagagtgttttgggtagagtggtcccaccaaaagaaaacccattatcaaactctcgtactaatgatttgacaagtcatgcagaaaggatcaaggattcatcaagtcattttaagaatgtatctcagagtgaaaatcaggtggaaagagcattgtattctggaagcactggagctggggccggaccaatcttgcattcatcacttgtgtcttcgactgattctcaccctgctaaaaagacatcaacatcaagggcaagtaaaggaaaacttgcgcctgctggtggtggaaggctgggtaagattgatgaagaaaaagctttcagtggaaatccactgaaatcaacatctgaaaacactgagcctcgtagatccattcgcaggattcagccaacgtcaagactattagaaggattgcagagctctttaattatctcaaagattccttctgcttcacatgaaaagggtcacaaaaaccagaatcggaaaacttctagggggtaaaaccaaggttgaacgaggaattacagtgtgcgcggttctgttcagttgaaagaccaacacacttggcatagatgtgtatatttatttataattttataatagggaacataggaatggaaattcttgtttccttcggtttaggcaga

SEQ ID NO: 7532 - protein, 409 aa, Glycine max
  misc_feature (1)..(409): Ceres Seq. ID no. 15172308
MVDYTWSVGDRVDACSEESWQEGVITDQNKKDKTLTVHFPALSNWFTAVSGKTKLVRAWHLRPSRFWKDGKWIEYPKVGTGDSSTHEGDTPHEKRPKLGSPAVEVKGKDRIPKGTNAVESANPGKLRLLDLTENDRVFNIGKYSKNENKSDAHRMVRTGLQKEGSRVIFGVPKPGKKRKFMEVSKHYVADGTSKINDGTDSVKLSNFLIPQGTGSRGWKNSSKNDTKEKLGADSRPTFKSGKSQSVLGRVVPPKENPLSNSRTNDLTSHAERIKDSSSHFKNVSQSENQVERALYSGSTGAGAGPILHSSLVSSTDSHPAKKTSTSRASKGKLAPAGGGRLGKIDEEKAFSGNPLKSTSENTEPRRSIRRIQPTSRLLEGLQSSLIISKIPSASHEKGHKNQNRKTSRG

SEQ ID NO: 7533 - protein, 255 aa, Glycine max
  misc_feature (1)..(255): Ceres Seq. ID no. 15172309
MVRTGLQKEGSRVIFGVPKPGKKRKFMEVSKHYVADGTSKINDGTDSVKLSNFLIPQGTGSRGWKNSSKNDTKEKLGADSRPTFKSGKSQSVLGRVVPPKENPLSNSRTNDLTSHAERIKDSSSHFKNVSQSENQVERALYSGSTGAGAGPILHSSLVSSTDSHPAKKTSTSRASKGKLAPAGGGRLGKIDEEKAFSGNPLKSTSENTEPRRSIRRIQPTSRLLEGLQSSLIISKIPSASHEKGHKNQNRKTSRG

SEQ ID NO: 7534 - protein, 229 aa, Glycine max
  misc_feature (1)..(229): Ceres Seq. ID no. 15172310
MEVSKHYVADGTSKINDGTDSVKLSNFLIPQGTGSRGWKNSSKNDTKEKLGADSRPTFKSGKSQSVLGRVVPPKENPLSNSRTNDLTSHAERIKDSSSHFKNVSQSENQVERALYSGSTGAGAGPILHSSLVSSTDSHPAKKTSTSRASKGKLAPAGGGRLGKIDEEKAFSGNPLKSTSENTEPRRSIRRIQPTSRLLEGLQSSLIISKIPSASHEKGHKNQNRKTSRG

SEQ ID NO: 7535 - DNA, 1552 bp, Glycine max
  misc_feature (1)..(1552): Ceres Seq. ID no. 15172321
gtgagttaattgcatttgcagagagagagagagagagagggggaagacggttgtggggattcgatgggggccaccgttcactcgccgctagtcacttatgcttccgtcatatctctgcttacactctgtcctccgtttgtcatacttctatggtacaccatgactcttgctgacggatctgtttccgagacattccattatttaaggcagaatgggttgcagggtttgctacatatatggcccacccccactcccaccgcctgcaaaatcattgcagtctatgctgcatttgaggcagcacttcagcttcttcttcccgggaaaaccgtttacggccctatttctccaaccggccaccgacctgtctacaaggcaaatggtctgcaagcctattttgtcaccttgattacttattttgctctctggtggtttgggatattcaaccctacgattgtttatcatcatttgggagaaatttattcagctctcatcttcggcagctttctcttctgtgttttcttgtacatcaagggtcatttggcaccgtcttctacagattctggctcatctggaaacttaatcattgatttttactgggggatggaactttatccacgcattggaaaacattttgacataaaagtcttcacaaactgcagatttggaatgatgtcatgggctgttcttgcactgacctactgcataaagcagtatgaagaaaatggaaaagtagcggactcaatgcttgtaaatactgcattaatgctggtatatgttaccaagtttttctggtgggaagctggatattggagcacaatggatattgcacatgatcgagctggattttatatttgctggggttgcttggtgtgggttccatctgtttatacgtctcctggaatgtaccttgtcaaccatcctgtaaatcttggcatcaagctagcgctctcaattttagtagctggcattctttgcatatacatcaactatgattgtgacaggcaaaggcaagaatttcgtaggacaaatggaaaaggcacagtctggggaaaagctccttcaaagatagaggccacatatactactacttctggggaaactaaaagaagccttcttttaacctctggatggtggggattatctcgtcactttcattatgtccctgaaatactggcagctttcttctggacagtcccagctcttttcgaacattttttgccttacttctacgtgatatttcttaccatccttctctttgatcgagcaaaacgagatgatgatcgttgcagatccaagtatggcaagtactggaaactatattgcgacaaggtaccttacagaatcattccaggaatatactgaagaatgattatcgaaaacggcttatctggagtcccccaacttaaaattaaaaaccaaggacgccatctgtagctttatattgtttggtgcctccttaagacacgtggtagattagactttcgctgagagctaattattgaattattgaaccggattttttaagctaatgtcgagacttgatttcggctcc

SEQ ID NO: 7536 - protein, 432 aa, Glycine max
  misc_feature (1)..(432): Ceres Seq. ID no. 15172322
MGATVHSPLVTYASVISLLTLCPPFVILLWYTMTLADGSVSETFHYLRQNGLQGLLHIWPTPTPTACKIIAVYAAFEAALQLLLPGKTVYGPISPTGHRPVYKANGLQAYFVTLITYFALWWFGIFNPTIVYHHLGEIYSALIFGSFLFCVFLYIKGHLAPSSTDSGSSGNLIIDFYWGMELYPRIGKHFDIKVFTNCRFGMMSWAVLALTYCIKQYEENGKVADSMLVNTALMLVYVTKFFWWEAGYWSTMDIAHDRAGFYICWGCLVWVPSVYTSPGMYLVNHPVNLGIKLALSILVAGILCIYINYDCDRQRQEFRRTNGKGTVWGKAPSKIEATYTTTSGETKRSLLLTSGWWGLSRHFHYVPEILAAFFWTVPALFEHFLPYFYVIFLTILLFDRAKRDDDRCRSKYGKYWKLYCDKVPYRIIPGIY

SEQ ID NO: 7537 - protein, 400 aa, Glycine max
  misc_feature (1)..(400): Ceres Seq. ID no. 15172323
MTLADGSVSETFHYLRQNGLQGLLHIWPTPTPTACKIIAVYAAFEAALQLLLPGKTVYGPISPTGHRPVYKANGLQAYFVTLITYFALWWFGIFNPTIVYHHLGEIYSALIFGSFLFCVFLYIKGHLAPSSTDSGSSGNLIIDFYWGMELYPRIGKHFDIKVFTNCRFGMMSWAVLALTYCIKQYEENGKVADSMLVNTALMLVYVTKFFWWEAGYWSTMDIAHDRAGFYICWGCLVWVPSVYTSPGMYLVNHPVNLGIKLALSILVAGILCIYINYDCDRQRQEFRRTNGKGTVWGKAPSKIEATYTTTSGETKRSLLLTSGWWGLSRHFHYVPEILAAFFWTVPALFEHFLPYFYVIFLTILLFDRAKRDDDRCRSKYGKYWKLYCDKVPYRIIPGIY

SEQ ID NO: 7538 - protein, 253 aa, Glycine max
  misc_feature (1)..(253): Ceres Seq. ID no. 15172324
MELYPRIGKHFDIKVFTNCRFGMMSWAVLALTYCIKQYEENGKVADSMLVNTALMLVYVTKFFWWEAGYWSTMDIAHDRAGFYICWGCLVWVPSVYTSPGMYLVNHPVNLGIKLALSILVAGILCIYINYDCDRQRQEFRRTNGKGTVWGKAPSKIEATYTTTSGETKRSLLLTSGWWGLSRHFHYVPEILAAFFWTVPALFEHFLPYFYVIFLTILLFDRAKRDDDRCRSKYGKYWKLYCDKVPYRIIPGIY

SEQ ID NO: 7539 - DNA, 1217 bp, Glycine max
  misc_feature (1)..(1217): Ceres Seq. ID no. 15172351
aagctccctttcgatcgccatctttccttaaaaaatgtccagagagttgtcactgaagctgatgggtatcagccccatctgattgctccagagcagggttatagaagactcattgaagggtctattggctatttcaaaggcccagctgaagcctctgtggatgctgtccactttgttttaaaagaacttgtgcggaagtcaatttcagaaactgaggtaagcaatgttttagttgatgcaacccttttctgacagatcatgattttaaaataaacatgggagttggatgtgactgtttgtattttacatctaattcatgcggccaaggtaattattagggttccttttcaaacattaactttagaatttgaagggaattagggtgaatttggatggggaaaaacactagggaagagagaattaaatcttacagttgttctacttgatgacatgtaggaactaaaaagatttccgacactttcaaatgatatagctactgctgcaaatgaagctctggaaaaattccgagaagaaagcaggaaaacagttttacggttggtcgatatggagtctagctatttaacagtggaatttttcaggaagattcattttgaaccagaaaagaatccaaacggaccaccaaatccaaatcggaatggtccccccaatatggatagttatactgacaatcacctgcgcaaaattggatcaaatgtaaattcctatatcggtatggtttgtgatacacttaagaatactataccaaaggccgtggttcattgtcaagttagagaggctaagagatcattgctaaaccacttttatgttcatgttgggaggaaggagaaggagaaattgggtgctatgttggacgaagacccggcccttatggaaaggagaaatcaaatagctaaaaggcttgaattatacaagcaagctagggatgatattgactccgtggcttggaaataatgagatcccagggtttgcaacagatgttacgagcaagatttgttatagaattgatcattcttactattttttaatcaaacacgaacagaaaagtctacggttatggcaagttgaattcgcacttgcgaataattcttttggcccacagaccacagtgtataaagcatccgagttctatgttgtgatattatgtaacttacgagttgttcagatatttggtttttacgaccatattgattattttc

SEQ ID NO: 7540 - protein, 135 aa, Glycine max
  misc_feature (1)..(135): Ceres Seq. ID no. 15172352
MESSYLTVEFFRKIHFEPEKNPNGPPNPNRNGPPNMDSYTDNHLRKIGSNVNSYIGMVCDTLKNTIPKAVVHCQVREAKRSLLNHFYVHVGRKEKEKLGAMLDEDPALMERRNQIAKRLELYKQARDDIDSVAWK

SEQ ID NO: 7541 - protein, 100 aa, Glycine max
  misc_feature (1)..(100): Ceres Seq. ID no. 15172353
MDSYTDNHLRKIGSNVNSYIGMVCDTLKNTIPKAVVHCQVREAKRSLLNHFYVHVGRKEKEKLGAMLDEDPALMERRNQIAKRLELYKQARDDIDSVAWK

SEQ ID NO: 7542 - protein, 91 aa, Glycine max
  misc_feature (1)..(91): Ceres Seq. ID no. 15172354
MILTPWLGNNEIPGFATDVTSKICYRIDHSYYFLIKHEQKSLRLWQVEFALANNSFGPQTTVYKASEFYVVILCNLRVVQIFGFYDHIDYF

SEQ ID NO: 7543 - DNA, 1193 bp, Glycine max
  misc_feature (1)..(1193): Ceres Seq. ID no. 15172359
tttgatgactgtcttggagagatatgggcaagtctttgcaaaattatgtcctgaccaggataagcaagtcattctgatagctgaagtgagttctttctggaagagtaatacccaaatgacagcaatagctattgacaggatgatggtttatcggcttgtttcaaatctggctattgtgagatgggtcttctcagcagagaatattgagcaatttcatatgtcagatcgtccttgggagattcttagaaatgcagtaagcaagacacacaatcgtatttctgatctaaggaaagaaatattatctcttaaaaagaatatttcatcatctgaagaagctgccaaggaagcaaaagcagagttagatgctgcagagtcaaaacttacactagtggatggtgaaccagttattggcgacaatcctgctaggttgaatagattgaaatcacatgctgaaaagacaaaggaggaggtggtgtctcttcaagaatctttagaagccaaggaagctcttctttcccgagcaattgaggaaaatgaggcattgtttctcttgttgtacaaaagcttctcaaacgtgttgacagagcgccttcctgaaggatctagaacactgcatgagttgaagtctgcacaagttgatgtggtgatggcagtggaccctgaagagccatcgtcaatggaattagacaaccagaatcagagacctcaaaacagtcatacaaatggcgagaagaaaggtggtgcttataatgtaggtgaaaaggagcagtggtgtatcaccactttgggctatgtgaaggccttctctaggcagtatgctgctgagatatggccccatgttgagaagttggatgcagaggtattgacagaagatgcacctcttctttttcggtcagctgtttattctggtcttcgaagaccaattcacgaggcttgatcaatttgatatttcacttctaagttgtgtttttttagaattaactaaaattcattctttagtctgtcagttaagcattttcttagtcaaccaaaagcgtaaagctgtatgcaattgtaatgtaagtgacaaggttggtatgacgagtctccgctgtttagattctaacgggaacttgaccactgctactgtacattatttcgattatagctactaatttattggaccttaaatacaaagaatgaagtttgtacgc

SEQ ID NO: 7544 - protein, 311 aa, Glycine max
  misc_feature (1)..(311): Ceres Seq. ID no. 15172360
LMTVLERYGQVFAKLCPDQDKQVILIAEVSSFWKSNTQMTAIAIDRMMVYRLVSNLAIVRWVFSAENIEQFHMSDRPWEILRNAVSKTHNRISDLRKEILSLKKNISSSEEAAKEAKAELDAAESKLTLVDGEPVIGDNPARLNRLKSHAEKTKEEVVSLQESLEAKEALLSRAIEENEALFLLLYKSFSNVLTERLPEGSRTLHELKSAQVDVVMAVDPEEPSSMELDNQNQRPQNSHTNGEKKGGAYNVGEKEQWCITTLGYVKAFSRQYAAEIWPHVEKLDAEVLTEDAPLLFRSAVYSGLRRPIHEA

SEQ ID NO: 7545 - protein, 310 aa, Glycine max
  misc_feature (1)..(310): Ceres Seq. ID no. 15172361
MTVLERYGQVFAKLCPDQDKQVILIAEVSSFWKSNTQMTAIAIDRMMVYRLVSNLAIVRWVFSAENIEQFHMSDRPWEILRNAVSKTHNRISDLRKEILSLKKNISSSEEAAKEAKAELDAAESKLTLVDGEPVIGDNPARLNRLKSHAEKTKEEVVSLQESLEAKEALLSRAIEENEALFLLLYKSFSNVLTERLPEGSRTLHELKSAQVDVVMAVDPEEPSSMELDNQNQRPQNSHTNGEKKGGAYNVGEKEQWCITTLGYVKAFSRQYAAEIWPHVEKLDAEVLTEDAPLLFRSAVYSGLRRPIHEA

SEQ ID NO: 7546 - protein, 273 aa, Glycine max
  misc_feature (1)..(273): Ceres Seq. ID no. 15172362
MTAIAIDRMMVYRLVSNLAIVRWVFSAENIEQFHMSDRPWEILRNAVSKTHNRISDLRKEILSLKKNISSSEEAAKEAKAELDAAESKLTLVDGEPVIGDNPARLNRLKSHAEKTKEEVVSLQESLEAKEALLSRAIEENEALFLLLYKSFSNVLTERLPEGSRTLHELKSAQVDVVMAVDPEEPSSMELDNQNQRPQNSHTNGEKKGGAYNVGEKEQWCITTLGYVKAFSRQYAAEIWPHVEKLDAEVLTEDAPLLFRSAVYSGLRRPIHEA

SEQ ID NO: 7547 - DNA, 1261 bp, Glycine max
  misc_feature (1)..(1261): Ceres Seq. ID no. 15172398
gtataatctagccttcatgtacaagcaaatggtgctagcaagtaccaaagaattgttcatgggaagcccttttcgactcggcgataaccctactccgggtattggctctatagaggctgctcctcataacacggttcataaatgggttggtgctgctgataagccacaccaggaggacatgggaacgttctacacagctgctagagatcccgttttctatccgcatcacacgaactcggatcgactgtgggggatatggaaaaaattgggagaaggaagaaaggactatagtgatgatccagattggttagattctgatttttacttctatgatgagaatgccaattttgttcgcgtgaaggtaagagattgctttgatactaaaagattggggtatgtttacgaagatgttgatcttccatggttgcgaacgccacccacatcgcgaaaaagcaagctactaagagaagccaaaaagggttcacttttgagttcaaagccatggaaatttcctttggttttggattccataacgagtattgttgttaagaggccgaagaaatggaggagcaaggaggagaaagaacaagaggaggaggttttggtgatagaagggattgagtttggaagtgataaatatgtcaagtttgatgttcatattgatgatgatgaagacaatttgagtggtccggatgagacagagtttgtgggaagttttgtgaatgtgcagcatgggcatggccataatgtcaaaactagctttaaggtagggatatcgaaagtgctggagagtgtagaagctgaagaagacgatgaggtgctggtttctttggtacctaaggtgggaaaaggggatgccataataggaggcatcaaaattgagtttattccaaaatactaggattattttgtgggtgtgaaaattttacactttttacaagttttgttgtttatgcttttaaaaggtagttttttttttttcctttttttagtgtagcaagtcgagctcgtattctctgtggctggattttgtccaactaactgaaatatgagatgtcgaatttgctatatattttacagcaattggggaagggaaagaatgtgaaggaagttgaaattttggatgtggggaagtactcctagaagtagatataaatttgttgtggtgcatgtctttcaacactagtgcatgtaaagaaaatcaaataaatcaatttgattttctagaactaattttcataataaaaaattgagtttgatg

SEQ ID NO: 7548 - protein, 299 aa, Glycine max
  misc_feature (1)..(299): Ceres Seq. ID no. 15172399
YNLAFMYKQMVLASTKELFMGSPFRLGDNPTPGIGSIEAAPHNTVHKWVGAADKPHQEDMGTFYTAARDPVFYPHHTNSDRLWGIWKKLGEGRKDYSDDPDWLDSDFYFYDENANFVRVKVRDCFDTKRLGYVYEDVDLPWLRTPPTSRKSKLLREAKKGSLLSSKPWKFPLVLDSITSIVVKRPKKWRSKEEKEQEEEVLVIEGIEFGSDKYVKFDVHIDDDEDNLSGPDETEFVGSFVNVQHGHGHNVKTSFKVGISKVLESVEAEEDDEVLVSLVPKVGKGDAIIGGIKIEFIPKY

SEQ ID NO: 7549 - protein, 294 aa, Glycine max
  misc_feature (1)..(294): Ceres Seq. ID no. 15172400
MYKQMVLASTKELFMGSPFRLGDNPTPGIGSIEAAPHNTVHKWVGAADKPHQEDMGTFYTAARDPVFYPHHTNSDRLWGIWKKLGEGRKDYSDDPDWLDSDFYFYDENANFVRVKVRDCFDTKRLGYVYEDVDLPWLRTPPTSRKSKLLREAKKGSLLSSKPWKFPLVLDSITSIVVKRPKKWRSKEEKEQEEEVLVIEGIEFGSDKYVKFDVHIDDDEDNLSGPDETEFVGSFVNVQHGHGHNVKTSFKVGISKVLESVEAEEDDEVLVSLVPKVGKGDAIIGGIKIEFIPKY

SEQ ID NO: 7550 - protein, 290 aa, Glycine max
  misc_feature (1)..(290): Ceres Seq. ID no. 15172401
MVLASTKELFMGSPFRLGDNPTPGIGSIEAAPHNTVHKWVGAADKPHQEDMGTFYTAARDPVFYPHHTNSDRLWGIWKKLGEGRKDYSDDPDWLDSDFYFYDENANFVRVKVRDCFDTKRLGYVYEDVDLPWLRTPPTSRKSKLLREAKKGSLLSSKPWKFPLVLDSITSIVVKRPKKWRSKEEKEQEEEVLVIEGIEFGSDKYVKFDVHIDDDEDNLSGPDETEFVGSFVNVQHGHGHNVKTSFKVGISKVLESVEAEEDDEVLVSLVPKVGKGDAIIGGIKIEFIPKY

SEQ ID NO: 7551 - DNA, 1632 bp, Glycine max
  misc_feature (1)..(1632): Ceres Seq. ID no. 15172426
gaagggaagaaccactaccaaacttcaactcactttctctctctcattctccctctctctcaccccctccgatctataaatcattctctctctctctctctctctcttacttacaaagtaaagagtagagtttgttctgtgaagaactgagggaggttcaggtccatgatattttgaaatctctctgtagtaggaagaccatgggacgagcttcatcattacttataatttttttggttcttggttcttcctttgccacctataatgtggtaacgatgataaggcactacggatcttcagaaggtgtggctgttaatgatggtgcattgttttttgaccctattactgagatgcctgatcatgtaaagaatcggaagacatctaaagtgccctttcatgtcgcgttaacggcgacggatgctccatataacaaatggcagtgccgcgtcatgtattactggtataaacaacaaaagaagttacctgggtctgagatgggaggattcacgaggattctacattctggaaatcctgacaacttgatggatgaaattcctactgttgtggttgatccccttccagcaggtttggatcggggatacattgttctgaataggccatgggcctttgttcagtggctggaaaagactaaaatagaggaagaatatgtgttaatggcagagcccgatcacatatttgtgcgtcctctgcccaatctggcctatggaggacatccggctgcttttccatttttttacattagacctgatgagaatgaaaaaatcataaggaagttttatcctgaggagctgggaccagttacaaatgttgatccaattggaaattcgcctgtaattataagaaaggatttgattgcaaagattgcccccacatggatgaatatttctttgaagatgaaagaggatccagagactgataaagcttttggatgggtgctagaaatgtatgcttatgctgttgcatctgctctgcatggtgtgaggcacattctgcggaaagacttcatgctgcagcccccatgggatcttgaaactaacaagaagtacattatacattacacttacggatgtgactacaatatgaagggtgaattgacttatggcaaagttggtgaatggagatttgacaaaaggtcgcatctacgaggacctccaccaaaaaacttgcccctgcccccaccaggggttcctgaaagtgtggtaacccttgtaaagatggtgaacgaggctagtgctaacatcccaaattgggacacatcgtaaatattttccacctcatcatgatgatatcccaagtgcacattttaaaaagaaaaaaaattgacaatgagtctttttttttttttttttatcacgagtttagtcttattagatggatagatgaatgtaagcaataccattttatatgacaattaaatacaggataaatatttatatttttttttcttgttggtgatatttttgaatggtatttgggctcgtaccacaatggctgatactttgttcattaagtattggcttcgaaattgcttatgtatatgttagacaattcttgtattgtatgccatgcatagccctagacaacataataattgtttctcttcatttctac

SEQ ID NO: 7552 - protein, 360 aa, Glycine max
  misc_feature (1)..(360): Ceres Seq. ID no. 15172427
MGRASSLLIIFLVLGSSFATYNVVTMIRHYGSSEGVAVNDGALFFDPITEMPDHVKNRKTSKVPFHVALTATDAPYNKWQCRVMYYWYKQQKKLPGSEMGGFTRILHSGNPDNLMDEIPTVVVDPLPAGLDRGYIVLNRPWAFVQWLEKTKIEEEYVLMAEPDHIFVRPLPNLAYGGHPAAFPFFYIRPDENEKIIRKFYPEELGPVTNVDPIGNSPVIIRKDLIAKIAPTWMNISLKMKEDPETDKAFGWVLEMYAYAVASALHGVRHILRKDFMLQPPWDLETNKKYIIHYTYGCDYNMKGELTYGKVGEWRFDKRSHLRGPPPKNLPLPPPGVPESVVTLVKMVNEASANIPNWDTS

SEQ ID NO: 7553 - protein, 335 aa, Glycine max
  misc_feature (1)..(335): Ceres Seq. ID no. 15172428
MIRHYGSSEGVAVNDGALFFDPITEMPDHVKNRKTSKVPFHVALTATDAPYNKWQCRVMYYWYKQQKKLPGSEMGGFTRILHSGNPDNLMDEIPTVVVDPLPAGLDRGYIVLNRPWAFVQWLEKTKIEEEYVLMAEPDHIFVRPLPNLAYGGHPAAFPFFYIRPDENEKIIRKFYPEELGPVTNVDPIGNSPVIIRKDLIAKIAPTWMNISLKMKEDPETDKAFGWVLEMYAYAVASALHGVRHILRKDFMLQPPWDLETNKKYIIHYTYGCDYNMKGELTYGKVGEWRFDKRSHLRGPPPKNLPLPPPGVPESVVTLVKMVNEASANIPNWDTS

SEQ ID NO: 7554 - protein, 310 aa, Glycine max
  misc_feature (1)..(310): Ceres Seq. ID no. 15172429
MPDHVKNRKTSKVPFHVALTATDAPYNKWQCRVMYYWYKQQKKLPGSEMGGFTRILHSGNPDNLMDEIPTVVVDPLPAGLDRGYIVLNRPWAFVQWLEKTKIEEEYVLMAEPDHIFVRPLPNLAYGGHPAAFPFFYIRPDENEKIIRKFYPEELGPVTNVDPIGNSPVIIRKDLIAKIAPTWMNISLKMKEDPETDKAFGWVLEMYAYAVASALHGVRHILRKDFMLQPPWDLETNKKYIIHYTYGCDYNMKGELTYGKVGEWRFDKRSHLRGPPPKNLPLPPPGVPESVVTLVKMVNEASANIPNWDTS

SEQ ID NO: 7555 - DNA, 1338 bp, Glycine max
  misc_feature (1)..(1338): Ceres Seq. ID no. 15172430
gacacttcccagtttcaacttcatgcctcagtgaatttctctgcaattttgctcccaaaaatttcatctctcgccattgccgtaggagagcacttcaattttctctccaataagacaattcgttctttcccttctcaatttccggcgagttctcccaatctgtaatttgcccccactctctctattcatcttactgttaccagaaagttggaatatcctccctcttcaatttctcgtaagattcatcgatcacgaacttatattgatttcgctattcttacactgatcttatttttcagtcgattttgttctgcaacatttatcgcttccagaatccagatctggatggacatgaaccatcgtttgcatttggggcaaccttgatttgggttttgaagtgctttatggaaactggggtctctaaatttttaaatttttgtctaatgacgagtggcgtgcctagatttgagtaactgggtcgctgctacagttgtggaagtttgagaattgggcttcgatttgtttgaggaagtttgtcgggtcggcgtcatgttctatggttcggtggtatgggacccttggcttattgttgctcagattgtgtgtcttcaatgtttgtactatatcaccctggggttgttcttgtcgatacttgttggcacacgtgtgtctcggttgagtctcgtgtatttctttgactatgttgcgattactacctctaccgttactggttggtgtgttattgcttcgtttctgctcagctcagttgcaggggcggtatatgtgttttgtttgattgaaagatcaaagaagtgcttggatttttcagccacagtctacattgtccatctttttatatgcattgtgtatgggggttggccctcatctataacatggtggattgtgaatggtactggaattgcagtgatggctttgctcggtgaacgtctgtgcatgaagcgtgaactccaggagatatcattgacacgatttcggtcaaatgtttgattggtagaaggtacttttgaatacaagaaacaagtgctgcaggatggcaactacttttacttctatatattggatgatcatgatcttcaagatgaatcccacgaagtgaatagttctattctgccattgaaagacctgcatttattttctattctttagttggaatagaattgaaacatatataaccagacgagactaagtatataattttacaggaatttccggaagtcttattgtaattttattctttttacccttttgtgagttttcggatctgtttacaatctcatatgttacctctttctatcccattacttttaatgaggttgt

SEQ ID NO: 7556 - protein, 152 aa, Glycine max
  misc_feature (1)..(152): Ceres Seq. ID no. 15172431
MFYGSVVWDPWLIVAQIVCLQCLYYITLGLFLSILVGTRVSRLSLVYFFDYVAITTSTVTGWCVIASFLLSSVAGAVYVFCLIERSKKCLDFSATVYIVHLFICIVYGGWPSSITWWIVNGTGIAVMALLGERLCMKRELQEISLTRFRSNV

SEQ ID NO: 7557 - DNA, 1207 bp, Glycine max
  misc_feature (1)..(1207): Ceres Seq. ID no. 15172453
atatgaaattatcattgggacagccgaaggattagtttatctgcatgagaactccaaaacaaggataattcacagagatataaaagccagcaacatcttattggatgcaaagcttcgtgctaaaattgcagattttggtttggccaggtcctttcaagaggacaagagccacataagtacagctattgcaggaactttgtaagtatctttttataaatcataacatacttttgaacaaatcacagtaggaggcaaagaggcaagtgctattgcaggaaactgcagtgtagtacatctgaaataaccatttactcttggaactgcagggggtatatggctcctgaatacctagctcatggtcagttaacagaaaaggcagacgtatatagttttggagtgttgctgctagagatagtcactgctagacagaacaacaggagcaaagcatcagaatattcagacagcttagttacagtggtcagttgcagattcccttggttgttttgttctgattgttgttcaactgtacattgattgtggtaagataagataaattactgatgaaacaattctgttctttcttttttaaccgatatattcgggtaacatcaggcatggaagcattttcaggcagggactgctgaacaattatttgatccaaacctagacttgcaggaagatcacaatagcaatgttaatgttaaggatgagattttaagagtggttcacataggacttctatgcacccaagaggtctcttctttacgaccaagcatgtcaaaggcactgcaaatgctaacaaagaaagaggaggatcttgttgctccctctaatccacccttccttgatgagagtaccatggaacttcatgacacaagtggtgacccattttatcctcttactgcacctgattcaattgccactatgtcccatagctctttttatcccaggtgaccaagagaatgcagagaaaatccctgacatgacatgtcggcagcgcagcttgtgattggcaaataacttggtctgcctcagaaatcagacctatgtcacttaaggttgttaacaaagcaatcgatcctttgctatttaaaatacatacttaagacacggggagattttgagccaaatgtccaatacggttatgggaagcaaacagtgtatactgtatagttccatgattaacattattaaacaattttagatt

SEQ ID NO: 7558 - protein, 66 aa, Glycine max
  misc_feature (1)..(66): Ceres Seq. ID no. 15172454
MAPEYLAHGQLTEKADVYSFGVLLLEIVTARQNNRSKASEYSDSLVTVVSCRFPWLFCSDCCSTVH

SEQ ID NO: 7559 - protein, 66 aa, Glycine max
  misc_feature (1)..(66): Ceres Seq. ID no. 15172455
YEIIIGTAEGLVYLHENSKTRIIHRDIKASNILLDAKLRAKIADFGLARSFQEDKSHISTAIAGTL

SEQ ID NO: 7560 - protein, 59 aa, Glycine max
  misc_feature (1)..(59): Ceres Seq. ID no. 15172456
MSKALQMLTKKEEDLVAPSNPPFLDESTMELHDTSGDPFYPLTAPDSIATMSHSSFYPR

SEQ ID NO: 7561 - DNA, 1486 bp, Glycine max
  misc_feature (1)..(1486): Ceres Seq. ID no. 15172495
gagggcgcatgtgtatgtagcgtgcacccttccacattctttctcgttctcgatctctctcgatttttccttcccttttctccataaacgaggtgcttcagatttgctcacaataggagggaatcgaatcgaatcgaatcgaaaggaaagtgcagaatggatgacatgccgttgccggcgctctttgagcaagcccgcaagatccacgccgcagccaccgattccggcgccgaccaggaggttgtgaagaaggggtgcgaggctctgcatagatgcgaggacatggtcaataatctaggtttgttctctcccaacgagaccaaagaagatatcagcaccacgaatctcaaatacattctggtgccattttatcttgcggagttgacagaaaaaatagcacaggatgacaggatacagattctaaagtcttcccaggcaaaacttaaggagtttatctcattttgtgaagcaatggagctggtcccaaaagaggagttagaatcttacattgatggggcaccaaaaactgttgctgatcagagggccaggaagatcgctaggttcaaacgtcagagagctgcagaatcaaagttgttggaaataaaagagcgaaaggaacgacgtgggcgttctactaaagcagctgccctgtccacccctgttgaggcaggagaggaagaagtattggatgatgatggggaagaagaaagagaggcttggatcactaccatatctttggcaatctgtaaggcactagatatgctggatatgttgaagaaagaggaagagatgctttctgctgtaaaggatagacaatccaaggatggggataaggagttctctaaggatgttcttgatgaacgtgccaagaaagcagaagcttggcatcgtgattctgcagttcgtgcacagtacactaggccatcaccaccaatcacatgtgccactttcgcccaagatgttctagaaggaagagcaaaggcttcacaagaacacgatcacaagcatcaacccctaatatttggaccagctagccttgtaaatggaaacataacaactgagagagaaagaatggcagctcaggtcttccaacctagtcataggatgccaactatgagcattgaggaggccgggctaaaagaaatggaaataatgaacaaatggcaagagagaaatgtcaaactcatggaagaagtcaattcatcttggcacaatgataggaagtcaaagctaggagaagacgatgatgatgaagatgatgatgctgcacaggagaaagcaagggcttgggatgactggaaggatgataatccacgtggtgctggaaataagaaacttaccccttgtgggtaaactgaggtcttccctggcttaagtaacgggcttaggataaaactgtttttaacgaaatcccgtaatttggagttgatatactacttgtagttagattgtgttaagattatatgtataccaggattttcatttg

SEQ ID NO: 7562 - protein, 398 aa, Glycine max
  misc_feature (1)..(398): Ceres Seq. ID no. 15172496
MDDMPLPALFEQARKIHAAATDSGADQEVVKKGCEALHRCEDMVNNLGLFSPNETKEDISTTNLKYILVPFYLAELTEKIAQDDRIQILKSSQAKLKEFISFCEAMELVPKEELESYIDGAPKTVADQRARKIARFKRQRAAESKLLEIKERKERRGRSTKAAALSTPVEAGEEEVLDDDGEEEREAWITTISLAICKALDMLDMLKKEEEMLSAVKDRQSKDGDKEFSKDVLDERAKKAEAWHRDSAVRAQYTRPSPPITCATFAQDVLEGRAKASQEHDHKHQPLIFGPASLVNGNITTERERMAAQVFQPSHRMPTMSIEEAGLKEMEIMNKWQERNVKLMEEVNSSWHNDRKSKLGEDDDDEDDDAAQEKARAWDDWKDDNPRGAGNKKLTPCG

SEQ ID NO: 7563 - protein, 395 aa, Glycine max
  misc_feature (1)..(395): Ceres Seq. ID no. 15172497
MPLPALFEQARKIHAAATDSGADQEVVKKGCEALHRCEDMVNNLGLFSPNETKEDISTTNLKYILVPFYLAELTEKIAQDDRIQILKSSQAKLKEFISFCEAMELVPKEELESYIDGAPKTVADQRARKIARFKRQRAAESKLLEIKERKERRGRSTKAAALSTPVEAGEEEVLDDDGEEEREAWITTISLAICKALDMLDMLKKEEEMLSAVKDRQSKDGDKEFSKDVLDERAKKAEAWHRDSAVRAQYTRPSPPITCATFAQDVLEGRAKASQEHDHKHQPLIFGPASLVNGNITTERERMAAQVFQPSHRMPTMSIEEAGLKEMEIMNKWQERNVKLMEEVNSSWHNDRKSKLGEDDDDEDDDAAQEKARAWDDWKDDNPRGAGNKKLTPCG

SEQ ID NO: 7564 - protein, 356 aa, Glycine max
  misc_feature (1)..(356): Ceres Seq. ID no. 15172498
MVNNLGLFSPNETKEDISTTNLKYILVPFYLAELTEKIAQDDRIQILKSSQAKLKEFISFCEAMELVPKEELESYIDGAPKTVADQRARKIARFKRQRAAESKLLEIKERKERRGRSTKAAALSTPVEAGEEEVLDDDGEEEREAWITTISLAICKALDMLDMLKKEEEMLSAVKDRQSKDGDKEFSKDVLDERAKKAEAWHRDSAVRAQYTRPSPPITCATFAQDVLEGRAKASQEHDHKHQPLIFGPASLVNGNITTERERMAAQVFQPSHRMPTMSIEEAGLKEMEIMNKWQERNVKLMEEVNSSWHNDRKSKLGEDDDDEDDDAAQEKARAWDDWKDDNPRGAGNKKLTPCG

SEQ ID NO: 7565 - DNA, 1078 bp, Glycine max
  misc_feature (1)..(1078): Ceres Seq. ID no. 15172503
tcaatgcaaaacaattttatcaaaatcaagaaatgtgttggtttcccgaaatgcgactcaaatacccaatatcattgttagactcaccggatttaacgccggccgccaaggattcgatcaatcattttcataattttaaatatgattatccacaagaagtgcttaatacacatccatccataatggtatgctccgtattaaaagaacaatgcaatgctgactcatctctgccaaagcgcttggtcactgttctattggctgctctacgctcaaatggatcgtttggtgtgcatgtgtgcatcaatacaaccgatcgttttatgcatcaattctattcgaagctcggattcaccgaaattttcgaagacaccacaaaagtgtatttaggtcgaaatttctgaaacacaaatttacgttaaacacttttgatttcatcgaattttcatacgtgacaaccgatcgattagcgaaacaaatttcttttttgtttcacggaaattggaaaaaaagtggtttgaagttagatatttgttacttactttgaatccaaacataaaaatattaagagatgatattaatatagataaactattccgttcgtaaaaaaaagtgcccatgacttggaagcagcatacttcaaatggctcatggctaactgagatgtgaatgaatgtcaatacatatctattcaatatttaaataattgtcttcaaccctcttttttcattggtttgttgtattttgtaattgaatggatcgaaaaattgaagataagaaaataaatcgatggaacatttgcaggtaaatatatgaatttttttaaaattaaactgaaaatgcatgttatgtctgcagaatagcacacatagaaaaatatcaataaatctaaatgtgaatttaatgtattcaagcaatccaaaatgaaaaaccacaacaacaacaataagaaaaaaacacacagacttaatattaatccatttttttttctctattttattttatttcaaaacattatttatgtaaatttcatcaacaaaacatgaaataaataaaaaaaagcgattcattggaaatgaac

SEQ ID NO: 7566 - protein, 132 aa, Glycine max
  misc_feature (1)..(132): Ceres Seq. ID no. 15172504
NAKQFYQNQEMCWFPEMRLKYPISLLDSPDLTPAAKDSINHFHNFKYDYPQEVLNTHPSIMVCSVLKEQCNADSSLPKRLVTVLLAALRSNGSFGVHVCINTTDRFMHQFYSKLGFTEIFEDTTKVYLGRNF

SEQ ID NO: 7567 - protein, 122 aa, Glycine max
  misc_feature (1)..(122): Ceres Seq. ID no. 15172505
MCWFPEMRLKYPISLLDSPDLTPAAKDSINHFHNFKYDYPQEVLNTHPSIMVCSVLKEQCNADSSLPKRLVTVLLAALRSNGSFGVHVCINTTDRFMHQFYSKLGFTEIFEDTTKVYLGRNF

SEQ ID NO: 7568 - protein, 116 aa, Glycine max
  misc_feature (1)..(116): Ceres Seq. ID no. 15172506
MRLKYPISLLDSPDLTPAAKDSINHFHNFKYDYPQEVLNTHPSIMVCSVLKEQCNADSSLPKRLVTVLLAALRSNGSFGVHVCINTTDRFMHQFYSKLGFTEIFEDTTKVYLGRNF

SEQ ID NO: 7569 - DNA, 587 bp, Glycine max
  misc_feature (1)..(587): Ceres Seq. ID no. 15172526
gttaccattccattgggtgcacgctcttcccaaaaccctagattccctccaaacagaaagctacgatgccaaccctcaccaatttctactccatcaaagatttatcccagcacactaccaaagacgattgctggatcctcgttgatggaaaggtatacgacgtgacacagtatttggatgatcatcccggtggagatgatgtaatcctcgccgcaaccgggaaagacgcaacagaagaatttgaagatgctggccacagcaaaagtgctagagaacatatggagcagtattgtattggtgagcttgacacatcttctccaatttccaccaaagaaaagttcatacaactcactaagcaatattgggttgttccggcaaccgtcgtcggtatctcggtggtagtagctttcttatacttacgtaagaagtagcactacacaagtctgcaattcaatttttttgtcattgttacaacaaactttgtattgctatgaaggataatttggcttatttcaaaacagtaatgattgattatatgcatgatattacattggaggtttgataattaaaaaaaggtctttaggatc

SEQ ID NO: 7570 - protein, 121 aa, Glycine max
  misc_feature (1)..(121): Ceres Seq. ID no. 15172527
MPTLTNFYSIKDLSQHTTKDDCWILVDGKVYDVTQYLDDHPGGDDVILAATGKDATEEFEDAGHSKSAREHMEQYCIGELDTSSPISTKEKFIQLTKQYWVVPATVVGISVVVAFLYLRKK

SEQ ID NO: 7571 - DNA, 1223 bp, Glycine max
  misc_feature (1)..(1223): Ceres Seq. ID no. 15172539
tagctctttgttctctgttctcgcgatttcggaagggtcgtgtttccctgcttcagtttcagcttcggcttcgagaagcgtcgattgggtccttaagctgttccttctctgtttctgacaaactgtataactcctatcaaacatgagcggtcgcttttctcgcacaatttatgtcggcaacctgccctctgatataagagagtcagaaattgaagatctattctacaagtatggccgtataatggatattgaattgaaggttcctccccgccctccatgttattgctttgttgagtttgataatgctcgagatgccgaagatgcaattcggggtcgagatggatacaactttgatggttgtcggttaagagtggagcttgctcatggtggtagagggccatcatcaagtgatcgacgtggatatggaggaggaggtggtaatggtggagcaggcgggggtcgttttggcatctcacgccattctgaatttcgagttattgttcgtggactcccatcttctgcatcttggcaagatttgaaggatcatatgcgaaaagctggggacgtgtgttttgctgaggtttcccgtgatagtgaagggacttttggcattgttgattacactaattatgatgacatgaagtatgccattcggaaattggatgacactgagtttagaaatccctgggcgagagcttatattcgggtgaggaagtatgagagtagtcgttctaggagccgcagcaggagccccagcaggagccccagcaggagcagaagtccaaaaagagttagaagtagatctctggagcgttctgtgtctaggtcacgatctagatctcaatcagcatcaccaatcaaatcttctaggccaagatcacgatcccgatcacgatcacgatctggatctggatctcctcatcaggtcctgtcaggtagtggttgaatttctgacaaagctggtggttctctggtgatattgttccattctggtgggcagtatcggaattatattggagttggactaaattgttttaagggaaaattattgatgtgcctaggctgtttggtgattgtcttatttcttttaaattaaaatgttggacattggccttgccctttgtaccttagcaaacacaagaatatctttagtcctcgcaaactgtgaatccaatttgaatggttttaaacagatttataaaaaaaaaatctacatatatcgc

SEQ ID NO: 7572 - protein, 267 aa, Glycine max
  misc_feature (1)..(267): Ceres Seq. ID no. 15172540
MSGRFSRTIYVGNLPSDIRESEIEDLFYKYGRIMDIELKVPPRPPCYCFVEFDNARDAEDAIRGRDGYNFDGCRLRVELAHGGRGPSSSDRRGYGGGGGNGGAGGGRFGISRHSEFRVIVRGLPSSASWQDLKDHMRKAGDVCFAEVSRDSEGTFGIVDYTNYDDMKYAIRKLDDTEFRNPWARAYIRVRKYESSRSRSRSRSPSRSPSRSRSPKRVRSRSLERSVSRSRSRSQSASPIKSSRPRSRSRSRSRSGSGSPHQVLSGSG

SEQ ID NO: 7573 - protein, 234 aa, Glycine max
  misc_feature (1)..(234): Ceres Seq. ID no. 15172541
MDIELKVPPRPPCYCFVEFDNARDAEDAIRGRDGYNFDGCRLRVELAHGGRGPSSSDRRGYGGGGGNGGAGGGRFGISRHSEFRVIVRGLPSSASWQDLKDHMRKAGDVCFAEVSRDSEGTFGIVDYTNYDDMKYAIRKLDDTEFRNPWARAYIRVRKYESSRSRSRSRSPSRSPSRSRSPKRVRSRSLERSVSRSRSRSQSASPIKSSRPRSRSRSRSRSGSGSPHQVLSGSG

SEQ ID NO: 7574 - DNA, 1371 bp, Glycine max
  misc_feature (1)..(1371): Ceres Seq. ID no. 15172553
aaaccacgaaaggatgcgagaataagaatagctttatagttaacacacacttcgtcttgttgctgagacaagagtcataatcttggctgtaacaggttgaacactgcatcgcaaattctgaatggaaatgtgtggagccacagctctgacatggtctcacaccatctgtccatcgcttcaccttcctcgatccgtctctaccagggaggctaggaggagcttcagtgtttggtgtgtctctgatcaagaccccaagggaaataaaatgatcatatctgtaactggagcaacaggttttattggtagaaggttggtgcaaagattacatgcagacaatcacagtgttcatgtcttgacacgatccaaatctaacgcagaaacaatttttccggcaaaagactttcctggaatcaagatagcagaagagccggaatggaaagatagcattcagggctcaacgggggttgtgaatttggctggactgcccataagtacccgatggtctcctgagataaaaaaggaaatcaagcaaagcaggattcgagtgacctcaaaggttgtagaattgataaacagtgcaccagacgatattcgacctaaagtttttgttagtgctacagctgttggttattatggcaccagtgagacacaagtctttgatgaacaaagtccatcaggaaaggattacttggctgaggtttgtagggaatgggaatcgacagccctaaaggtaaacggaggtgttagagtggctctaattcgcattggtgttgttcttggtaaagatggtggagcattagctaaaatgatacctatgttcaagttgtttgctggtggacctctaggctctggaacacaatggttctcctggattcatttggaagacattgtcaatttaatatatgaaacgctgtcaaatccatcttacaaaggtgttatcaatggaactgcaccaaatcctgtgcgattggcagaattgtgtgatcagctgggacatgccttgggtcgtccctcatggctaccagtaccagactttgcgctcaaggctgtccttggagaaggtgctactgtggttttagaagggcagaaagtgcttcctactcaagctaagaagttgggtttcccattcaaatattcttacgtgaaggatgccctgcaagcaattctttcttgaaagctgcatagcagctactgccacattcttaattcttttgacatcagtggcattcaccgtattgagatttttgaaagcgatagatatacttctgaagatgtgattgaattgtaatctattttatttttggtcatgtgaattcaaaaacgtaactattaactaacaaaaaaaaaaaaaaaaaaaaaaaaaaaaaaaag

SEQ ID NO: 7575 - protein, 350 aa, Glycine max
  misc_feature (1)..(350): Ceres Seq. ID no. 15172554
MEMCGATALTWSHTICPSLHLPRSVSTREARRSFSVWCVSDQDPKGNKMIISVTGATGFIGRRLVQRLHADNHSVHVLTRSKSNAETIFPAKDFPGIKIAEEPEWKDSIQGSTGVVNLAGLPISTRWSPEIKKEIKQSRIRVTSKVVELINSAPDDIRPKVFVSATAVGYYGTSETQVFDEQSPSGKDYLAEVCREWESTALKVNGGVRVALIRIGVVLGKDGGALAKMIPMFKLFAGGPLGSGTQWFSWIHLEDIVNLIYETLSNPSYKGVINGTAPNPVRLAELCDQLGHALGRPSWLPVPDFALKAVLGEGATVVLEGQKVLPTQAKKLGFPFKYSYVKDALQAILS

SEQ ID NO: 7576 - protein, 348 aa, Glycine max
  misc_feature (1)..(348): Ceres Seq. ID no. 15172555
MCGATALTWSHTICPSLHLPRSVSTREARRSFSVWCVSDQDPKGNKMIISVTGATGFIGRRLVQRLHADNHSVHVLTRSKSNAETIFPAKDFPGIKIAEEPEWKDSIQGSTGVVNLAGLPISTRWSPEIKKEIKQSRIRVTSKVVELINSAPDDIRPKVFVSATAVGYYGTSETQVFDEQSPSGKDYLAEVCREWESTALKVNGGVRVALIRIGVVLGKDGGALAKMIPMFKLFAGGPLGSGTQWFSWIHLEDIVNLIYETLSNPSYKGVINGTAPNPVRLAELCDQLGHALGRPSWLPVPDFALKAVLGEGATVVLEGQKVLPTQAKKLGFPFKYSYVKDALQAILS

SEQ ID NO: 7577 - protein, 302 aa, Glycine max
  misc_feature (1)..(302): Ceres Seq. ID no. 15172556
MIISVTGATGFIGRRLVQRLHADNHSVHVLTRSKSNAETIFPAKDFPGIKIAEEPEWKDSIQGSTGVVNLAGLPISTRWSPEIKKEIKQSRIRVTSKVVELINSAPDDIRPKVFVSATAVGYYGTSETQVFDEQSPSGKDYLAEVCREWESTALKVNGGVRVALIRIGVVLGKDGGALAKMIPMFKLFAGGPLGSGTQWFSWIHLEDIVNLIYETLSNPSYKGVINGTAPNPVRLAELCDQLGHALGRPSWLPVPDFALKAVLGEGATVVLEGQKVLPTQAKKLGFPFKYSYVKDALQAILS

SEQ ID NO: 7578 - DNA, 580 bp, Glycine max
  misc_feature (1)..(580): Ceres Seq. ID no. 15172593
aacacaaaccagtatcaattcagcgagatagttcaagagaatcagctctgttctttcagtaccgcaactttgcaagtccactactaccatacagaaggatcacaagtcagtgtccactctccagcagcgcagcaagaacaaggaggaggaggaggaggagagatggctgctccggcgaaggcgtcgtggatggtggccatgagcgtgggcgctgtggaggccctcaaggaccaggctggactctgccgctggaactacgcactcaggtccgtccaccggacagccaaggccaacgttcgaggcggcgcctcgcagggcaagaagcagctgcctgcctccgcggcagccgtggcagagaggcggcgagcggagaattccgaggaggggctgaggacggtcatgtacctcagctgttggggcccaaattaggagtactagtagctagggcataggggcgcttgtgttcgttgcagcaagagtaaccttgtacgaagacatggcctgagagacttcctggttgtccccatgatcggttgtaaagataccatgatgatgatgaaaatttcgcctacgagtttat

SEQ ID NO: 7579 - protein, 149 aa, Glycine max
  misc_feature (1)..(149): Ceres Seq. ID no. 15172594
HKPVSIQRDSSRESALFFQYRNFASPLLPYRRITSQCPLSSSAARTRRRRRRRDGCSGEGVVDGGHERGRCGGPQGPGWTLPLELRTQVRPPDSQGQRSRRRLAGQEAAACLRGSRGREAASGEFRGGAEDGHVPQLLGPKLGVLVARA

SEQ ID NO: 7580 - protein, 142 aa, Glycine max
  misc_feature (1)..(142): Ceres Seq. ID no. 15172595
NTNQYQFSEIVQENQLCSFSTATLQVHYYHTEGSQVSVHSPAAQQEQGGGGGGEMAAPAKASWMVAMSVGAVEALKDQAGLCRWNYALRSVHRTAKANVRGGASQGKKQLPASAAAVAERRRAENSEEGLRTVMYLSCWGPN

SEQ ID NO: 7581 - protein, 88 aa, Glycine max
  misc_feature (1)..(88): Ceres Seq. ID no. 15172596
MAAPAKASWMVAMSVGAVEALKDQAGLCRWNYALRSVHRTAKANVRGGASQGKKQLPASAAAVAERRRAENSEEGLRTVMYLSCWGPN

SEQ ID NO: 7582 - DNA, 532 bp, Glycine max
  misc_feature (1)..(532): Ceres Seq. ID no. 15172614
caagttctgtatttccttctcttttccaattgtttgagcgtgaatttttgcgttaatgaagtctgaaacctatgataaggggatatctgttgatgactggaaaatactggtaaagtggtaataggcaaagaagtgaagaatcacaattggtttggaggcccatcgcattgaggcaagtagaaaattgacccgcccaagtggagattcaagtcgggtaccgaacgtgcgactataaagggaatgaacgtggacaccccacgctttcttcacggcaacagaagaataatcaaatttctcagatctatccgacgtcgtcgcagatccaccaaccgttatggctgccttcagcggtgatgaaacggctccgtttttcggcttccttggagccgcagctgccctcgtcttctcctgtactccttccactctcttcaattcccccaatcacttccattagatccgtatttaccgtttcattatttatgtaatccgttcctaaaattgacttttaatccaatttcatgttccactgccc

SEQ ID NO: 7583 - protein, 43 aa, Glycine max
  misc_feature (1)..(43): Ceres Seq. ID no. 15172615
MKRLRFSASLEPQLPSSSPVLLPLSSIPPITSIRSVFTVSLFM

SEQ ID NO: 7584 - protein, 39 aa, Glycine max
  misc_feature (1)..(39): Ceres Seq. ID no. 15172616
MAAFSGDETAPFFGFLGAAAALVFSCTPSTLFNSPNHFH

SEQ ID NO: 7585 - protein, 37 aa, Glycine max
  misc_feature (1)..(37): Ceres Seq. ID no. 15172617
MNVDTPRFLHGNRRIIKFLRSIRRRRRSTNRYGCLQR

SEQ ID NO: 7586 - DNA, 587 bp, Glycine max
  misc_feature (1)..(587): Ceres Seq. ID no. 15172653
ttttttatattgagaataatctcttcatgaataatcaacttccttgattttcagatatgcagttttcattcttcctgttttctggctatattggggtttcacttcttagccctgtgatgcacaatctatggatatggaggggtactggaaatgcaaatttttactttgcgactgcaattgcttatgtgtgcttgcagatcattctggtagttgagagtgttagtgccatgctcaatcatgacagaaaactcaccaagctatatactgcaaagcttcaaaacatcaaatcttgagaactttgaagtgtgcttttatgtgtcaatggtaattctgagctttgtgtggacatctgggttccacgatccgttgttgtgctgtccttcaattcctttatcaaatatctgcatttctttgaatgcaagcatatttcaccggggttgtaaatggacgcaaggctctgcaatcttgatgctgaatgccacttacagtttgttataaaggataacaatcatgatattttattgtggttcttagagctcttttgtacttgatgtaccgtttaagtagtttcaatgacttcattcttc

SEQ ID NO: 7587 - protein, 86 aa, Glycine max
  misc_feature (1)..(86): Ceres Seq. ID no. 15172654
MTENSPSYILQSFKTSNLENFEVCFYVSMVILSFVWTSGFHDPLLCCPSIPLSNICISLNASIFHRGCKWTQGSAILMLNATYSLL

SEQ ID NO: 7588 - protein, 78 aa, Glycine max
  misc_feature (1)..(78): Ceres Seq. ID no. 15172655
MQFSFFLFSGYIGVSLLSPVMHNLWIWRGTGNANFYFATAIAYVCLQIILVVESVSAMLNHDRKLTKLYTAKLQNIKS

SEQ ID NO: 7589 - protein, 58 aa, Glycine max
  misc_feature (1)..(58): Ceres Seq. ID no. 15172656
MVILSFVWTSGFHDPLLCCPSIPLSNICISLNASIFHRGCKWTQGSAILMLNATYSLL

SEQ ID NO: 7590 - DNA, 637 bp, Glycine max
  misc_feature (1)..(637): Ceres Seq. ID no. 15172699
gaagaaagatagatccagatatcaatggcgacgaatcacgaaccggttttagggtacgttgtgctttacgtcaaagacgtagccgagtcggtggctttctatgccaaagccttcggctattctgttcgtcgcttagacgagtctcacagatggggagagttggaaacggggaacacaactattgctttcactccgattcaccagcacgagaccgatgatctgaccggtgcggttcataaccctggatcttgtcgagaaagaccacccatggaggtttgttttgtttactctgacgttgatgctgcttacaagcatgcggtggagaatggagcggtggcagtgagcgagcctgagctgaaggagtggggacagaaggttgggtacgtcagagatattgacggcaacgttgtgagaatgggaagtcacgtgaacccacccaaataggtggacatagcataacagcaactgggaaatcatgctttcacgtatgtttgtgattaggaataaacaagaaccactgtctgagatgtgtgttatttacgctacaataaatcaaattttccctctgccaggcacttccttgtaactagtttaactctgagatggagatgctatggaatcatgcggcacgagaagc

SEQ ID NO: 7591 - protein, 139 aa, Glycine max
  misc_feature (1)..(139): Ceres Seq. ID no. 15172700
MATNHEPVLGYVVLYVKDVAESVAFYAKAFGYSVRRLDESHRWGELETGNTTIAFTPIHQHETDDLTGAVHNPGSCRERPPMEVCFVYSDVDAAYKHAVENGAVAVSEPELKEWGQKVGYVRDIDGNVVRMGSHVNPPK

SEQ ID NO: 7592 - protein, 71 aa, Glycine max
  misc_feature (1)..(71): Ceres Seq. ID no. 15172701
RKIDPDINGDESRTGFRVRCALRQRRSRVGGFLCQSLRLFCSSLRRVSQMGRVGNGEHNYCFHSDSPARDR

SEQ ID NO: 7593 - DNA, 478 bp, Glycine max
  misc_feature (1)..(478): Ceres Seq. ID no. 15172725
accaccacaacaacagagagcattctaccaccgcaccgcacgagtgaagtgagagctttgcacgaaaagttcatcagcgaccatgaagggcaccaagctcgcggcgatcctcatcctccaggccgtcctggtcatgggagtcctctcacacgtgaacgccgactatttccccaagtgctgcaacaactgcaggtccttctccggggtcgacgtctgcgacgacgcccaccccaagtgccccaagggctgctcggcgtgccgcgtggtgtcgacgagccccgaaatgtggcgctgcgcggatatgaaatccaccgtcgacggcacctgcggtgggccctgcaagaagtactgatcggctcatgccagcatgatatgttccgcctaaaatgaaataaaagctcagacgagatgagcagcgtcatcgtgcctatgcgtgtgtgtgtggccaacaaatatgtataccagtatgccgtgtctt

SEQ ID NO: 7594 - protein, 129 aa, Glycine max
  misc_feature (1)..(129): Ceres Seq. ID no. 15172726
TTTTTESILPPHRTSEVRALHEKFISDHEGHQARGDPHPPGRPGHGSPLTRERRLFPQVLQQLQVLLRGRRLRRRPPQVPQGLLGVPRGVDEPRNVALRGYEIHRRRHLRWALQEVLIGSCQHDMFRLK

SEQ ID NO: 7595 - protein, 89 aa, Glycine max
  misc_feature (1)..(89): Ceres Seq. ID no. 15172727
MKGTKLAAILILQAVLVMGVLSHVNADYFPKCCNNCRSFSGVDVCDDAHPKCPKGCSACRVVSTSPEMWRCADMKSTVDGTCGGPCKKY

SEQ ID NO: 7596 - protein, 72 aa, Glycine max
  misc_feature (1)..(72): Ceres Seq. ID no. 15172728
MGVLSHVNADYFPKCCNNCRSFSGVDVCDDAHPKCPKGCSACRVVSTSPEMWRCADMKSTVDGTCGGPCKKY

SEQ ID NO: 7597 - DNA, 625 bp, Glycine max
  misc_feature (1)..(625): Ceres Seq. ID no. 15172764
gtaccactcgcctcgcatcgaatcgatcgctcttatcgcctcgaacgtatcgaagcccaggagaggagagcggagcagccgacgagccgccgatcgacatgggtctcaaggaggagtttgaggagcacgcggagaaggccaagacgctgcccgacaccaccaccaacgagagcaagctctgcctctacggcctctacaagcaggccaccgtcggccccgtcaacaccgcccgccccggcggcctcttcgatatggctggcaaggccaagtgggatgcttggaaggccgtcgaagccaaatccaaggaggaggccatggcggactacatcaccaaggtgaagcagctgctggaggaggctgccgccgcatccgcttaatcctaggccacaagaccgcaatcgctattgctatcctggtggtgcagacatgtgtgccagcaaacacaaataaatttcaagtactagttgttgtcgagcttatcgccgtcgtgggtgtaattacgttgaacaagaagccctgtgatacatgaaagtgcaatctcagtttacgccatgattgattaatactcctacatgtcttctgttgttaagatgtttttttcctttggggaataccggttcctgat

SEQ ID NO: 7598 - protein, 124 aa, Glycine max
  misc_feature (1)..(124): Ceres Seq. ID no. 15172765
TTRLASNRSLLSPRTYRSPGEESGAADEPPIDMGLKEEFEEHAEKAKTLPDTTTNESKLCLYGLYKQATVGPVNTARPGGLFDMAGKAKWDAWKAVEAKSKEEAMADYITKVKQLLEEAAAASA

SEQ ID NO: 7599 - protein, 112 aa, Glycine max
  misc_feature (1)..(112): Ceres Seq. ID no. 15172766
VPLASHRIDRSYRLERIEAQERRAEQPTSRRSTWVSRRSLRSTRRRPRRCPTPPPTRASSASTASTSRPPSAPSTPPAPAASSIWLARPSGMLGRPSKPNPRRRPWRTTSPR

SEQ ID NO: 7600 - protein, 92 aa, Glycine max
  misc_feature (1)..(92): Ceres Seq. ID no. 15172767
MGLKEEFEEHAEKAKTLPDTTTNESKLCLYGLYKQATVGPVNTARPGGLFDMAGKAKWDAWKAVEAKSKEEAMADYITKVKQLLEEAAAASA

SEQ ID NO: 7601 - DNA, 658 bp, Glycine max
  misc_feature (1)..(658): Ceres Seq. ID no. 15172768
atctccccactcggccactccccaccccatagccgcggatccactgcgccgcggcgaggacgacggcgaggcgatcccggccctgtgcaccaggggcgcgatggctgaccatgacccagagttggaggccattaggcagaggcgaatgcaagagctaatgggacagcgtggtggtgcggcaagcccacaaaatgcagggcaacaaaaggctcaggaagatgcaaagcaggaagctgaggaacgccggcagatgatgcttgctcagatactgtcttctgaagctagagaaagaatctcccgcatagctttggtcaagcctgataaagcaagaggagtggaggatgttctgctgagagctgcacaaactggtggaatatctgaaaaggtgtctgaagaaaggcttatctcacttctggagcaaatcaacacccacacaagcaaacaaaccaaagtgacgattcagaggcgtcgctttgacgacgatgactagttggtaagcttgatgtactagcgaatgggtgcagtagcgtctgttgcttgattcaacaaccgtcagaacctgacaaactatttgattggtcttgggttgtatatgatctggatattatttggtggggtttttcattgataactgttggatgcgtcacttctacccctg

SEQ ID NO: 7602 - protein, 162 aa, Glycine max
  misc_feature (1)..(162): Ceres Seq. ID no. 15172769
SPHSATPHPIAADPLRRGEDDGEAIPALCTRGAMADHDPELEAIRQRRMQELMGQRGGAASPQNAGQQKAQEDAKQEAEERRQMMLAQILSSEARERISRIALVKPDKARGVEDVLLRAAQTGGISEKVSEERLISLLEQINTHTSKQTKVTIQRRRFDDDD

SEQ ID NO: 7603 - protein, 129 aa, Glycine max
  misc_feature (1)..(129): Ceres Seq. ID no. 15172770
MADHDPELEAIRQRRMQELMGQRGGAASPQNAGQQKAQEDAKQEAEERRQMMLAQILSSEARERISRIALVKPDKARGVEDVLLRAAQTGGISEKVSEERLISLLEQINTHTSKQTKVTIQRRRFDDDD

SEQ ID NO: 7604 - protein, 114 aa, Glycine max
  misc_feature (1)..(114): Ceres Seq. ID no. 15172771
MQELMGQRGGAASPQNAGQQKAQEDAKQEAEERRQMMLAQILSSEARERISRIALVKPDKARGVEDVLLRAAQTGGISEKVSEERLISLLEQINTHTSKQTKVTIQRRRFDDDD

SEQ ID NO: 7605 - DNA, 564 bp, Glycine max
  misc_feature (1)..(564): Ceres Seq. ID no. 15172772
acctcctcaaacacagccacacaagctaaagcaagactgtctcctcagtagtatcagaagttcagaacctcccagttagcaatggcgaagtgtctcgccgtcgcgctgctgttggtggtggtgctcgcgtcctgtgacgggagggagctgagccagaaggacggcgcactgggagcgacacgcggtgccggcgtcgccgagtccaaggcttcttcgggttcggggttgccagacctgccggtggtgggaaccggtaccggaaccagtaccattaacggcccgctggtggtggttcctggggtccctgtccatccatgaaccatgatcatctctagttcatgagctgacttacatacatacgagctgaagctgaacttgtgggttttagacttctatatagctggcatcgccctgaagaaaagcaccggcgtctcgctcatgtccacgttcctaaatgagtgtctgtatctgtatttcctctcagttcatgtttgtatttttcgttccttggtgtgccacatgtacgtatcatcaacgtaatactacataatactttgttagtgc

SEQ ID NO: 7606 - protein, 78 aa, Glycine max
  misc_feature (1)..(78): Ceres Seq. ID no. 15172773
MAKCLAVALLLVVVLASCDGRELSQKDGALGATRGAGVAESKASSGSGLPDLPVVGTGTGTSTINGPLVVVPGVPVHP

SEQ ID NO: 7607 - DNA, 727 bp, Glycine max
  misc_feature (1)..(727): Ceres Seq. ID no. 15172807
aaaacacaccacaccttcaaaccctaaccctagaagaaaaaaaaaccacaaccaccaccatctagggtttttctttttctcatggctagtttgtcaactaggattttcttcatcatgtcccttgtgtgcctggctctcggtccaatggcacaaggggaaatgacatgtggccaggttgtgagcaacctgaccccatgcatctcctatgtggtgtatggtggaaccaatgttcctgaacagtgctgcaatgggataagaaatctctatggcatggctcagaccaaaccagaccgccaagctgtttgcaactgcatcaagaacggtgttaggaacagtggcttcaactactctgacttcaacctcaaccttgctgctaaccttcccaagaaatgtggggtcaacattccctaccagatcagccccaacacagactgcactagggtgcagtgaggttggtgcatatgatgtttatgttagcagtgttagaataagaggccacgtgacatgacaagggaatggctacaaattgcttctttaatgtactagtgctcttgtattatgtctgtggttatatatattatatagtgtgtaactgaggttatggtgctgcttgtgtagcatgcatatgtaggcattagtataagatcataggaagctatgggaagaaacatatggttgtgtaagctgttgttgtcacttatttaatgatatgagcagtttgggaaat

SEQ ID NO: 7608 - protein, 122 aa, Glycine max
  misc_feature (1)..(122): Ceres Seq. ID no. 15172808
MASLSTRIFFIMSLVCLALGPMAQGEMTCGQVVSNLTPCISYVVYGGTNVPEQCCNGIRNLYGMAQTKPDRQAVCNCIKNGVRNSGFNYSDFNLNLAANLPKKCGVNIPYQISPNTDCTRVQ

SEQ ID NO: 7609 - protein, 111 aa, Glycine max
  misc_feature (1)..(111): Ceres Seq. ID no. 15172809
MSLVCLALGPMAQGEMTCGQVVSNLTPCISYVVYGGTNVPEQCCNGIRNLYGMAQTKPDRQAVCNCIKNGVRNSGFNYSDFNLNLAANLPKKCGVNIPYQISPNTDCTRVQ

SEQ ID NO: 7610 - protein, 101 aa, Glycine max
  misc_feature (1)..(101): Ceres Seq. ID no. 15172810
MAQGEMTCGQVVSNLTPCISYVVYGGTNVPEQCCNGIRNLYGMAQTKPDRQAVCNCIKNGVRNSGFNYSDFNLNLAANLPKKCGVNIPYQISPNTDCTRVQ

SEQ ID NO: 7611 - DNA, 752 bp, Glycine max
  misc_feature (1)..(752): Ceres Seq. ID no. 15172839
actcaatacaaacgaaattggtacaaaacaaaatgctactgtttctccggctgatgatgcagttgttgtgatgcgtcaaagcactgctccaactgctcgataattattctcgctgttaccgccagcaactgcttcttttgttagatctcaaagactgagttagtggttggaaaaggtttaattaacaagatgtgcaaaagaaagtgtccaggtcgagaattgaagctgccaagcaggcccacatcggcggagttatcatcgtcgacatcatcaggtgagtggccggaattatcatcgtcatcgtctgcatcttcggtatcatgtacatcaaagatgccgaaggagtcagaagaagagaacgagcaacgtgaaaattctactccagaaacaaaggccatggatctcgttggttgtcctcgatgcttcatgtacgtcatgttatccgaggtggatccaaagtgccctaagtgcaagaccacagtgtttcttgaacttttcaaagatgaaaacttgaagactaacagttgagttatggggagaattatgggaattaaataaataaaatcctcgtggttttaggacgtttgtttgtttgtgcttattttgtttgtaaaatctgaagcttcatatcttgttgagagtgaagtaaagattatgggagctagtatatggtagtgtaacgcgatgccacactatatgggtacggaacgaggaatcgtggtagtaataagatgcgcctattttttttcttt

SEQ ID NO: 7612 - protein, 112 aa, Glycine max
  misc_feature (1)..(112): Ceres Seq. ID no. 15172840
MCKRKCPGRELKLPSRPTSAELSSSTSSGEWPELSSSSSASSVSCTSKMPKESEEENEQRENSTPETKAMDLVGCPRCFMYVMLSEVDPKCPKCKTTVFLELFKDENLKTNS

SEQ ID NO: 7613 - protein, 64 aa, Glycine max
  misc_feature (1)..(64): Ceres Seq. ID no. 15172841
MPKESEEENEQRENSTPETKAMDLVGCPRCFMYVMLSEVDPKCPKCKTTVFLELFKDENLKTNS

SEQ ID NO: 7614 - DNA, 563 bp, Glycine max
  misc_feature (1)..(563): Ceres Seq. ID no. 15172854
aattcgctcttgctttgtttacagaagtcctccattctcacagattttgttgcagctaggtggtggtgattagtgtatatatatacatacatggttgaagtgggtatttatcagatccctacgagcagtttggacccatttgcggaggcaaaagaaacagatgcaccaggggcgaaagaatatgttcatatccgcatacagcagaggaatgggaagaagagtctcaccacagtgcaagggctgaagaaagagttcagctacgagaagatcctcaaagacctcaagaaagagttgtgctgcaatggcaatgttgtgcatgacaaggagcttggcaagattatccaactccaaggcgatcagcgaaagaacgtctctcactttctcattcatgctcgccttgctaggaaggaccagatcaagattcatggtttctgacctttcttgtattaattaacatatgccgccgtttatgaaataagtaacgagtttcgaatatttggttattttccttctgtatcattgaaaatcatcttaaatatattactacttcatgttgtgctttc

SEQ ID NO: 7615 - protein, 114 aa, Glycine max
  misc_feature (1)..(114): Ceres Seq. ID no. 15172855
MVEVGIYQIPTSSLDPFAEAKETDAPGAKEYVHIRIQQRNGKKSLTTVQGLKKEFSYEKILKDLKKELCCNGNVVHDKELGKIIQLQGDQRKNVSHFLIHARLARKDQIKIHGF

SEQ ID NO: 7616 - DNA, 719 bp, Glycine max
  misc_feature (1)..(719): Ceres Seq. ID no. 15172945
accaaactcacccaccttttcccctccaagagcagcagcgaactctgagttctactagctcaagcacaagcccgagctagctgcctagaagaagcctctgttgaaccatggcggcatcagtagcttgcgccttcttcttcgacgccgagccggccggcgagcccggcaagcacgcgctggacgcgtgcgcgctctgcgccaagcggctggcacgcgacagcgacgtcttcatgtacagaggggacacgcccttctgcagcgaggagtgccgccacgagcagatgcacctcgacgccgtctgcgccaggcaggccgcgcggagactgcagcgcttctcggcggagacggagtcccagtcccaccgtgggcagcggcagtcccggaaggtgtccatcgccggctagccgcggaaagttttgtttggatcgacaagataaccattgatgttgttttgaagaaacgaccgctgtattctgaagaaacgactgctgtattctgaagaaccatcgatgttgttttgggaggcagtgcagggcacggcatccggtggtaggtgcctgttgcttcccatatgtgtccatggcaagctaattatgctgcccgggtgcctgtagattcttggttgatctgtgctgtgccggtgatttgatttggttggaaacaaaatagaaaaggccatggatctgaaggaggcaatcaaacatgattcacaagttttc

SEQ ID NO: 7617 - protein, 98 aa, Glycine max
  misc_feature (1)..(98): Ceres Seq. ID no. 15172946
MAASVACAFFFDAEPAGEPGKHALDACALCAKRLARDSDVFMYRGDTPFCSEECRHEQMHLDAVCARQAARRLQRFSAETESQSHRGQRQSRKVSIAG

SEQ ID NO: 7618 - protein, 57 aa, Glycine max
  misc_feature (1)..(57): Ceres Seq. ID no. 15172947
MYRGDTPFCSEECRHEQMHLDAVCARQAARRLQRFSAETESQSHRGQRQSRKVSIAG

SEQ ID NO: 7619 - DNA, 780 bp, Glycine max
  misc_feature (1)..(780): Ceres Seq. ID no. 15172970
atcccaagctagcaaagcccacctagcgctcagccacaagccagtacactctagctagctactagtgttatccacatagcaatggcgcccttcaagctcgccctcttcctcgccatgaacctggccatcctcttggccgtgcatggctgcgggtcatgcggcaacacaccgcccgtcccagtcccaagcccgcccatcgccgtgcccccaccagctcccgtgccgtctccgccttcgtccggtggtgggggcggcacctgctccatcgacacgctgaagctgaaggtatgcgccaacgtgttgaacctgctgaagctaaacctcggcgtgccgacggacgagcagtgctgcccccttctgagcggcctcgccgacctagacgccgccgtgtgcctctgcaccgccatcaaggccaatgtcctcggcatcaagctcaacgtccctgtcgacctcgttctcctcctcaaccagtgcggcaagacctgccctgccgatttcacctgccctagctgatccatccatcacaaaccatgcatttcatacttgcatcatcatcatcatcgccgtacttgcaattacaatgttttctcgtatacgcatgcacctatatatttcctcgtaattacaatatgttatatgtcagtcgcgtgcatgcatgggctccctccctcgtgcatgcatgcttcaggcattcagttagtcatttgccgttacggtattccagtatttgtaaaagggtatatgtgcgtggaataaaaagtttgttcatgttgtcttttt

SEQ ID NO: 7620 - protein, 143 aa, Glycine max
  misc_feature (1)..(143): Ceres Seq. ID no. 15172971
MAPFKLALFLAMNLAILLAVHGCGSCGNTPPVPVPSPPIAVPPPAPVPSPPSSGGGGGTCSIDTLKLKVCANVLNLLKLNLGVPTDEQCCPLLSGLADLDAAVCLCTAIKANVLGIKLNVPVDLVLLLNQCGKTCPADFTCPS

SEQ ID NO: 7621 - protein, 132 aa, Glycine max
  misc_feature (1)..(132): Ceres Seq. ID no. 15172972
MNLAILLAVHGCGSCGNTPPVPVPSPPIAVPPPAPVPSPPSSGGGGGTCSIDTLKLKVCANVLNLLKLNLGVPTDEQCCPLLSGLADLDAAVCLCTAIKANVLGIKLNVPVDLVLLLNQCGKTCPADFTCPS

SEQ ID NO: 7622 - protein, 117 aa, Glycine max
  misc_feature (1)..(117): Ceres Seq. ID no. 15172973
MRQHTARPSPKPAHRRAPTSSRAVSAFVRWWGRHLLHRHAEAEGMRQRVEPAEAKPRRADGRAVLPPSERPRRPRRRRVPLHRHQGQCPRHQAQRPCRPRSPPQPVRQDLPCRFHLP

SEQ ID NO: 7623 - DNA, 789 bp, Glycine max
  misc_feature (1)..(789): Ceres Seq. ID no. 15173015
accaaagcattccacaaaattcagcaagcaatccaacgcagtccaacccgaggagatcgaccgagctcgagatcagcgagcgagaatggcgggcatggtgttcggcttggatgccccgatgatggccgccctgcagcacctgctggacatcccggacggcgaggccggagcagccgccggcgagaagcagggcccgacgcgcgcctacgtccgcgacgcgcgcgccatggcggccacccccgccgacgtgaaggagctgccgggcgcgtacgcgttcgtggtggacatgccggggctcgggtccggcgacatcaaggtgcaggtggaggacgagcgggtgctggtgatcagcggcgagcggcggagggaggagaaggaggacgccaagtacctgcggatggagcgccgcatgggcaagctgatgcgcaagttcgtgctgccggagaacgccgacatggagaagatctccgccgcgtgccgcgacggcgtgctcaccgtgaccgtcgacaagctgccgccgcccgagcccaagaagcccaagaccatccaggtccaggtcgcctgagatgcatcgtgtgcgcgtcgaatcgaatcagagtgtgagtgggtagcgagtttcctgtgatgagtgatgggagtgtctgtcctttgatttcatctactagtagtatggttatctgagggagagggtgtgtactgtctgttcgtgcgtactggtggttgtttgatgtttcgttaatggaaatggggatgatctccggcctcgcctgaataaaacatgcgaacctc

SEQ ID NO: 7624 - protein, 200 aa, Glycine max
  misc_feature (1)..(200): Ceres Seq. ID no. 15173016
TKAFHKIQQAIQRSPTRGDRPSSRSASENGGHGVRLGCPDDGRPAAPAGHPGRRGRSSRRREAGPDARLRPRRARHGGHPRRREGAAGRVRVRGGHAGARVRRHQGAGGGRAGAGDQRRAAEGGEGGRQVPADGAPHGQADAQVRAAGERRHGEDLRRVPRRRAHRDRRQAAAARAQEAQDHPGPGRLRCIVCASNRIRV

SEQ ID NO: 7625 - protein, 187 aa, Glycine max
  misc_feature (1)..(187): Ceres Seq. ID no. 15173017
PKHSTKFSKQSNAVQPEEIDRARDQRARMAGMVFGLDAPMMAALQHLLDIPDGEAGAAAGEKQGPTRAYVRDARAMAATPADVKELPGAYAFVVDMPGLGSGDIKVQVEDERVLVISGERRREEKEDAKYLRMERRMGKLMRKFVLPENADMEKISAACRDGVLTVTVDKLPPPEPKKPKTIQVQVA

SEQ ID NO: 7626 - protein, 159 aa, Glycine max
  misc_feature (1)..(159): Ceres Seq. ID no. 15173018
MAGMVFGLDAPMMAALQHLLDIPDGEAGAAAGEKQGPTRAYVRDARAMAATPADVKELPGAYAFVVDMPGLGSGDIKVQVEDERVLVISGERRREEKEDAKYLRMERRMGKLMRKFVLPENADMEKISAACRDGVLTVTVDKLPPPEPKKPKTIQVQVA

SEQ ID NO: 7627 - DNA, 882 bp, Glycine max
  misc_feature (1)..(882): Ceres Seq. ID no. 15173213
ttccctctgatgaatgctctactctactctgactctcacacatcgttttatccgaaagcaagcattatcagaagcagaaagaaagaataagaggttgcagcaacaatggcagccatggctgcgcttcagagctcaatggtcggtctctccctctcctccaactctttcttaggccaacgcctttctcccatcaccctcccctctcttcttccgggtaagtcaacagagaagcaatgtcctattgtaatgaggcttaaacgatgggaacggaaggagtgtaaaccaaacagccttcctatcttgcacaaaatgcatgttaaacttggagatacggtgcaagtcatatctggacgtgaaaggggtaaagttggggagattactaaaatcttcaagcataacagcactgttatagtgaaagatttaaatttgaagacaaagcatgtgaagagtagagaagagggggaaccagggcaaattattaagattgaaggtcctatccacagctcaaatgtgatgctctactccaaagatcagaaggtagcaagccgtgtggggcataaagtccttgataatggtaaaaaagtccgctaccttataaaaactggtgaaataattgatagtgcagagaactggaagaaactgaaggaggctactaagcaaactgaagaagctactgctgctgctgcctagttttacctacgtaattcattcattcactagtaatgtaactctagcagtacttgttgtgatctctcttccattttgttatctaatgtatatttttggtctgtctattgatctccatataatgaaacctgggtgatcaaatttgtctattgcttattgagcaattgagattttttgaagaactattgttcatac

SEQ ID NO: 7628 - protein, 194 aa, Glycine max
  misc_feature (1)..(194): Ceres Seq. ID no. 15173214
MAAMAALQSSMVGLSLSSNSFLGQRLSPITLPSLLPGKSTEKQCPIVMRLKRWERKECKPNSLPILHKMHVKLGDTVQVISGRERGKVGEITKIFKHNSTVIVKDLNLKTKHVKSREEGEPGQIIKIEGPIHSSNVMLYSKDQKVASRVGHKVLDNGKKVRYLIKTGEIIDSAENWKKLKEATKQTEEATAAAA

SEQ ID NO: 7629 - protein, 191 aa, Glycine max
  misc_feature (1)..(191): Ceres Seq. ID no. 15173215
MAALQSSMVGLSLSSNSFLGQRLSPITLPSLLPGKSTEKQCPIVMRLKRWERKECKPNSLPILHKMHVKLGDTVQVISGRERGKVGEITKIFKHNSTVIVKDLNLKTKHVKSREEGEPGQIIKIEGPIHSSNVMLYSKDQKVASRVGHKVLDNGKKVRYLIKTGEIIDSAENWKKLKEATKQTEEATAAAA

SEQ ID NO: 7630 - protein, 184 aa, Glycine max
  misc_feature (1)..(184): Ceres Seq. ID no. 15173216
MVGLSLSSNSFLGQRLSPITLPSLLPGKSTEKQCPIVMRLKRWERKECKPNSLPILHKMHVKLGDTVQVISGRERGKVGEITKIFKHNSTVIVKDLNLKTKHVKSREEGEPGQIIKIEGPIHSSNVMLYSKDQKVASRVGHKVLDNGKKVRYLIKTGEIIDSAENWKKLKEATKQTEEATAAAA

SEQ ID NO: 7631 - DNA, 661 bp, Glycine max
  misc_feature (1)..(661): Ceres Seq. ID no. 15173311
actaaatccagaaggggaaaaaaagagagaaaagaaatcaggggtaaactttctctctctcccttgcttattcctcccaaaagaaaaagacggtttccgttggaaggaagaaagaaagaaattgagtttgagatctgattgtgcggcgacgatggagaacaacgacagcatcatatcgcgggagaagatcgaccaggcagcggtgtggctcggctccgccgtctcttccgctttcttttcctcattggaacgcttttcctgcgtcaacgtcgccacctctgaccccgacaacgacgatgacgacgacgattattactccaccaccaccgccactcccacctccgcatccaccaccaccaccaccgccctcgccaccactcctccctccgttcaggtcaacgggcaaaaaacaaacgacgacgtctccaacctccccgtttgaggcaatataacgacgacgacgtcgttgctgcgctgtgtatagacctttttcccttttcctcctttcgtgtgtgtgttatgtaaggattctcgattttcgttgcttcatacttttgaagtcgtgaaaaagaaaaaacaagatgtgatgcaattttatgcctgtctatttaattaactaattacatgcttatatatttttattaaattgtattattagttc

SEQ ID NO: 7632 - protein, 146 aa, Glycine max
  misc_feature (1)..(146): Ceres Seq. ID no. 15173312
LNPEGEKKREKKSGVNFLSLPCLFLPKEKDGFRWKEERKKLSLRSDCAATMENNDSIISREKIDQAAVWLGSAVSSAFFSSLERFSCVNVATSDPDNDDDDDDYYSTTTATPTSASTTTTTALATTPPSVQVNGQKTNDDVSNLPV

SEQ ID NO: 7633 - protein, 96 aa, Glycine max
  misc_feature (1)..(96): Ceres Seq. ID no. 15173313
MENNDSIISREKIDQAAVWLGSAVSSAFFSSLERFSCVNVATSDPDNDDDDDDYYSTTTATPTSASTTTTTALATTPPSVQVNGQKTNDDVSNLPV

SEQ ID NO: 7634 - DNA, 804 bp, Glycine max
  misc_feature (1)..(804): Ceres Seq. ID no. 15173567
cttccaaactctttaatctctcttctttcttgaatcaaactaaattcctttgttcagagacaaagaacaacaacaacaactgtaaccatgcttgtctaccaagatcttcttacaggtgacgagcttctctctgactcattcccgtacaaggaaactgagaatggaatgctgtgggaagtggaaggaaagtgggttgttcaaggagcagtcaatgtagatattggtgctaacccttctgcagaaggtggggatgaggacgagggagttgatgatcaagctgtcaaagtagttgatattgttgacacttttaggcttcaggaacaaccaccctttgataagaaacaatttattacttatatgaagagatatattaagttgctgacggccaaattagagggtgagcagcaagagttgttcaagaagcacatcgagggagcaactaagtccctcctatcaaagctcaaagacctccaattttttgtgggggagagtatgcacgatgatggaagccttgtctttgcttactacaaggaaggtgctactgatccaacttttatctactttgcctatggattgaaggaaatcaagtgctgagcacatgcaatgcatgccccttagttatcttttatctgagttgaaaaattgtctttaattttagttcttgtgttttgggttttggttatgttattaggacttaggaggttgtttcaagagtttaatttgtatgcgtttttatgttggttggtatgagaggaacatgttatcgtataatagtaatttaaaagagtatcatgtgttttagtc

SEQ ID NO: 7635 - protein, 168 aa, Glycine max
  misc_feature (1)..(168): Ceres Seq. ID no. 15173568
MLVYQDLLTGDELLSDSFPYKETENGMLWEVEGKWVVQGAVNVDIGANPSAEGGDEDEGVDDQAVKVVDIVDTFRLQEQPPFDKKQFITYMKRYIKLLTAKLEGEQQELFKKHIEGATKSLLSKLKDLQFFVGESMHDDGSLVFAYYKEGATDPTFIYFAYGLKEIKC

SEQ ID NO: 7636 - protein, 142 aa, Glycine max
  misc_feature (1)..(142): Ceres Seq. ID no. 15173569
MLWEVEGKWVVQGAVNVDIGANPSAEGGDEDEGVDDQAVKVVDIVDTFRLQEQPPFDKKQFITYMKRYIKLLTAKLEGEQQELFKKHIEGATKSLLSKLKDLQFFVGESMHDDGSLVFAYYKEGATDPTFIYFAYGLKEIKC

SEQ ID NO: 7637 - DNA, 818 bp, Glycine max
  misc_feature (1)..(818): Ceres Seq. ID no. 15173764
gtagttctgttttgccagtgattgaagctagttagaacaagatgttgcagctactctacactgcgattttctccgaaatgcttttgattctcacgctcgtcttcaaaaccccactgagaaaactcgtcatcgtttccctcgatagtgtgaagcgcggtcgcggtcccgtggtggtttccaccgtgggcgccacattgatggtggttctcgcttcgagcctctacagcatggccaagatccagcaacgcaccctcgaggccggcatagtcaaccccaccgaccaagtcctcatgtccaagcacatgctcgaagcttctctcatggggtttctgctgttcctctctctgatgattgatagattgcaccattacataagagagcttcggtcactcaggaagaccatggaagctattaagaaacaaagccgaagttttgaagatggtaaaaatggaaattcagaggaacataaagcattgaatgaagaaattaccacattgaagtctaaaattaagaaactagaatctgaatgtgaggcaaaaggaagtcaagctaagactttggaaactgaagtagaggctcttaaaaagcaatccgaggggttccttatggaatatgatcgcctcttggaagacaatcagagtcttaggagtcagttgcaggccattgaccagagccctttgaattttgataataaaaagagtatgtgattgttgaaatatccagaaaacagtttttatcctttgttttaactcttgtttgagtgtcacatactttcttaatgaggttacagttgtaaataccaagtgtttacagacagg

SEQ ID NO: 7638 - protein, 221 aa, Glycine max
  misc_feature (1)..(221): Ceres Seq. ID no. 15173765
MLQLLYTAIFSEMLLILTLVFKTPLRKLVIVSLDSVKRGRGPVVVSTVGATLMVVLASSLYSMAKIQQRTLEAGIVNPTDQVLMSKHMLEASLMGFLLFLSLMIDRLHHYIRELRSLRKTMEAIKKQSRSFEDGKNGNSEEHKALNEEITTLKSKIKKLESECEAKGSQAKTLETEVEALKKQSEGFLMEYDRLLEDNQSLRSQLQAIDQSPLNFDNKKSM

SEQ ID NO: 7639 - protein, 209 aa, Glycine max
  misc_feature (1)..(209): Ceres Seq. ID no. 15173766
MLLILTLVFKTPLRKLVIVSLDSVKRGRGPVVVSTVGATLMVVLASSLYSMAKIQQRTLEAGIVNPTDQVLMSKHMLEASLMGFLLFLSLMIDRLHHYIRELRSLRKTMEAIKKQSRSFEDGKNGNSEEHKALNEEITTLKSKIKKLESECEAKGSQAKTLETEVEALKKQSEGFLMEYDRLLEDNQSLRSQLQAIDQSPLNFDNKKSM

SEQ ID NO: 7640 - protein, 169 aa, Glycine max
  misc_feature (1)..(169): Ceres Seq. ID no. 15173767
MVVLASSLYSMAKIQQRTLEAGIVNPTDQVLMSKHMLEASLMGFLLFLSLMIDRLHHYIRELRSLRKTMEAIKKQSRSFEDGKNGNSEEHKALNEEITTLKSKIKKLESECEAKGSQAKTLETEVEALKKQSEGFLMEYDRLLEDNQSLRSQLQAIDQSPLNFDNKKSM

SEQ ID NO: 7641 - DNA, 1745 bp, Glycine max
  misc_feature (1)..(1745): Ceres Seq. ID no. 15174535
gccttcatgataagctatctattgaattcatcatgctcttgctggctactatatatggtaccccttttgtatgttatggcttttaatataatcatttacaggtaaacacggcagcagaggttatatatgacctcgtggaccctactgctaatttaatatttggagcagtaatagatccatcactcagtggtcaagtaagttaaactatgtaaatctgtatcattaattatatgaagttgtaaataatatgcagtgattccaccagaaatgaattgcaccacataccccactctcgtgtaatgtgtataactagaagaaggagatatactgccattgttccttaatattaaagtcagtatgatgtaacgggcatgtgataaccattagtaattcatgactgtagaaaagattttacgataagttctctttgcaagtgatagagactagttagcaatcaatttgaatttctaaaatattagtataatcctttcattgttttgggttaatttcgccaagtgaaggatcattagctttaaaaaagtcacccaacacaattgacctcaaatattaattatttagtcctcaaaggaaataactaaatgtcctactttcacattgtggaccacaaaatctgagtactattaggtgaaaagaactaaaattaatatattgcttgtgtataagtgggccaagtttaaactaccatgttaaatacattaaataagaatagtgcttctctttcagtaagaggttagagaataataaagttcaatatatgctttattctcctaacataattgttaatatgttagatgatagtggtagaaaagattaataaatttgggttgttctggacacattaatagtcataatatggaacagaatggacttttattcaagataactatttgcttgaactgtatgtaagactttaattttacaatatgtacataccagtatcattttgctgaatttgagattctgtcctttgcaagtcaatttcttcaactcaaatgctcatttcttattacaagttaatggtagtgatctttctttatttatggtgaacttgtccagtgattatttgtgttgctggcatttgggttgagtgttagtttaattatttggacatataatatgatcattatggtgaaccatgaaatttggtttcatacaggtgagcataacattgattgcaactgggttcaagcgtcaagaggagagccaagggaggcctctgcaggtaaggatcatctcttccaactactctgtttctgtcatgcatatggcatactgtaattctggttttgttctgatcacaggtcagtcaactcactcaagcggatacaacctatggcaccaaccggcggtcttcctctttcgctgatggtggtttgtttgagataccagaattcctaaagaagaaaggaggaggttcacgctatccaagggcgtaatactcttcatcctaatttctttgatcccttgcatttcttcacctttggatatacatagcattggtctagttcttaggtccctgtcttgcccttttttggattttagtcagagtagtgaatacagtttgttcatgaaagttgattactttccactgtccagtcttgtgcgcctaactggaggtattgcagcatggatgcttttcttggcatatttgaataagtttgttagcttgtacagagaatatttcagtaatgctgagagcttgttatagaaaattcattattgtt

SEQ ID NO: 7642 - protein, 76 aa, Glycine max
  misc_feature (1)..(76): Ceres Seq. ID no. 15174536
MKFGFIQVSITLIATGFKRQEESQGRPLQVRIISSNYSVSVMHMAYCNSGFVLITGQSTHSSGYNLWHQPAVFLFR

SEQ ID NO: 7643 - protein, 53 aa, Glycine max
  misc_feature (1)..(53): Ceres Seq. ID no. 15174537
MIIMVNHEIWFHTGEHNIDCNWVQASRGEPREASAGKDHLFQLLCFCHAYGIL

SEQ ID NO: 7644 - protein, 50 aa, Glycine max
  misc_feature (1)..(50): Ceres Seq. ID no. 15174538
MVNHEIWFHTGEHNIDCNWVQASRGEPREASAGKDHLFQLLCFCHAYGIL

SEQ ID NO: 7645 - DNA, 1836 bp, Glycine max
  misc_feature (1)..(1836): Ceres Seq. ID no. 15174547
agaatcagataagtgttggtttgtttttttgttgagaagagagaatggctgtggcgtcgtcatcatcccttatcacgttgaaggtgaaaccttgcattttcgggtctcctcggagatccgcggtggttcggaattgtgcgaagtcaacggcggggacaatatcgacgagttggagcctggacagctggagggcgaagaaggcgcttcagcttccggagtacccagatgcgaatgaattggacctagtcctccaaaccctctcttcttttcccccaatcgtcttcgccggcgaggcgaggaatctggaggagaagctcgctcaggctgccatggggaacgcttttctccttcagggcggtgattgcgccgagagcttcaaggaattcactgccaacaacatccgtgacaccttccgtgtcatccttcaaatgggtgtggtcctcatgttcggtggccaaatgcccgttatcaaggtggggagaatggcaggtcaatttgcaaagccgagatccgattcatttgaggagaagaatggagtgacgctcccgagttacaggggtgataatgtgaatggcgatgcatttgacgcggcatctagaatccccgatccacagaggatgataagagcctactgccaatctgtgtctactctgaaccttttgcgggcatttgccacgggaggttatgctgccatgcaaagggttaatcaatggaatcttgatttcatggagcatagtgaacagggagacaggtaccgtgaattagcccatagagtggatgaggctcttggcttcatgaatgttgctgggctcacagccgaccatcccatcatgagtacaacagacttttggacctcccatgagtgtttgcttctcccttatgagcaagcacttactagggaggattctactactgggcttcattatgattgctcagctcacatgctatgggttggggaacgtacccgccaacttgatggtgctcatgttgaattcttgagaggagttgctaatccacttggcatcaaggtgagtgataagatggttcccgatgaacttgttaagctgatagatattctgaaccctaaaaacaagcctggaagaattacagtcattgttagaatgggagctgagaatatgcgagtgaagcttccacatcttatcagggcagttcgcagagcaggtcaaattgtcacttgggttagtgaccccatgcatgggaacaccattaaagctccatctggacttaaaacccgctcttttgatgcaataagggctgagctgagggcattctttgatgtgcatgatcaagaaggaagctacccaggaggggttcatttagagatgacagggcagaacgtgacagaatgtgttggaggctcaaggactattacttatgatgacttgagctcacgctaccacacacattgtgatccaaggcttaatgcttctcaatctctcgagcttgcatttaatattgcggacaggttgcgcaagagaaggctcaattcaactcgatcacttggaatttagacaagagggggtctgtcttcctttgtacctggatcacaatactggtcaaacatgtgttgagttttcttgagcacagtgaacaaatactctactgggagccactctaccgagtttcataagaacttaaaatagtcggcacaattaatagttgtgctgtatgagtgttacaagacagttcaaaacactgcaggtgtatgtacttgcaagtttgcacttttaagtttggagatagtacgtgtgtagtatttatgctcgactcgagtaaatgagtaataaataaagtttcaaggtacaacttacatcg

SEQ ID NO: 7646 - protein, 495 aa, Glycine max
  misc_feature (1)..(495): Ceres Seq. ID no. 15174548
MAVASSSSLITLKVKPCIFGSPRRSAVVRNCAKSTAGTISTSWSLDSWRAKKALQLPEYPDANELDLVLQTLSSFPPIVFAGEARNLEEKLAQAAMGNAFLLQGGDCAESFKEFTANNIRDTFRVILQMGVVLMFGGQMPVIKVGRMAGQFAKPRSDSFEEKNGVTLPSYRGDNVNGDAFDAASRIPDPQRMIRAYCQSVSTLNLLRAFATGGYAAMQRVNQWNLDFMEHSEQGDRYRELAHRVDEALGFMNVAGLTADHPIMSTTDFWTSHECLLLPYEQALTREDSTTGLHYDCSAHMLWVGERTRQLDGAHVEFLRGVANPLGIKVSDKMVPDELVKLIDILNPKNKPGRITVIVRMGAENMRVKLPHLIRAVRRAGQIVTWVSDPMHGNTIKAPSGLKTRSFDAIRAELRAFFDVHDQEGSYPGGVHLEMTGQNVTECVGGSRTITYDDLSSRYHTHCDPRLNASQSLELAFNIADRLRKRRLNSTRSLGI

SEQ ID NO: 7647 - protein, 400 aa, Glycine max
  misc_feature (1)..(400): Ceres Seq. ID no. 15174549
MGNAFLLQGGDCAESFKEFTANNIRDTFRVILQMGVVLMFGGQMPVIKVGRMAGQFAKPRSDSFEEKNGVTLPSYRGDNVNGDAFDAASRIPDPQRMIRAYCQSVSTLNLLRAFATGGYAAMQRVNQWNLDFMEHSEQGDRYRELAHRVDEALGFMNVAGLTADHPIMSTTDFWTSHECLLLPYEQALTREDSTTGLHYDCSAHMLWVGERTRQLDGAHVEFLRGVANPLGIKVSDKMVPDELVKLIDILNPKNKPGRITVIVRMGAENMRVKLPHLIRAVRRAGQIVTWVSDPMHGNTIKAPSGLKTRSFDAIRAELRAFFDVHDQEGSYPGGVHLEMTGQNVTECVGGSRTITYDDLSSRYHTHCDPRLNASQSLELAFNIADRLRKRRLNSTRSLGI

SEQ ID NO: 7648 - protein, 367 aa, Glycine max
  misc_feature (1)..(367): Ceres Seq. ID no. 15174550
MGVVLMFGGQMPVIKVGRMAGQFAKPRSDSFEEKNGVTLPSYRGDNVNGDAFDAASRIPDPQRMIRAYCQSVSTLNLLRAFATGGYAAMQRVNQWNLDFMEHSEQGDRYRELAHRVDEALGFMNVAGLTADHPIMSTTDFWTSHECLLLPYEQALTREDSTTGLHYDCSAHMLWVGERTRQLDGAHVEFLRGVANPLGIKVSDKMVPDELVKLIDILNPKNKPGRITVIVRMGAENMRVKLPHLIRAVRRAGQIVTWVSDPMHGNTIKAPSGLKTRSFDAIRAELRAFFDVHDQEGSYPGGVHLEMTGQNVTECVGGSRTITYDDLSSRYHTHCDPRLNASQSLELAFNIADRLRKRRLNSTRSLGI

SEQ ID NO: 7649 - DNA, 1433 bp, Glycine max
  misc_feature (1)..(1433): Ceres Seq. ID no. 15174551
ggatccaagtcttcagtgtgccaggtttatatatgatgaattaataaagatcagccatcgctgtatggtgattgaactgcagcgattccctttcttgtggaagcgcatggatgaagctctagggaactttttacgagaaggccttgaagccttggagaacatgattgcacacttaatagcaatggagttgaactacataaacacttcccaccataattttattggtggaagcaaagcattagaaattgcctcgcaacagaccaagtcttctatggtttctatacctgtttctcggcagaaggaggttctggaatctgacaagggatcagtctctgaaagaagtgtgaagtctcgggccattcttgcgagacaagctaatggagtagttactgaaccgggtgtccatgctgcatcagatgctgaaaaagttgtatcctctggaaacactggtggatcaagttggggtatctcatccatttttggtggaggtgatagccatacgattgtgaaggagaatgtagctagtaaaccacatactgaaccagttcacagtgtggagcaatcattctctatgatccatttgagagagccacctcctgtcttgaggtcatcagagagctattcagagacagaagctattgacataacagtaacaaagttgcttttgagatcatactatgacattgtcagaaaaaatgttgaggatttggtccctaaagcaattatgtatttcttggtagacaaggccaagggagagctgcacaatgtctttattaaaaagctatacagagacaacctgtttgaagagatgttgcgagaaccagatgagatagccctaaaaagaaagcgctgtcgagaacttctccgagcttatcagcaggcttttaaggacttggaggagctgcctctggaagctgacacagttgaaagaggatatggtttgcctgaaaaaactggtttacctaaaattaatggattaccaacgtcatccatgtactctgcaagcagttcaggagactattatgcagctttttcgaagtaccctaagtcgaaaaagtcctcccattctggggagcttcaatcaccattgcatgctgatgcagattccaatggaagtggaaggccattgtatatataaaattgagtctgtaccttgggtagtaaggcttttatttgggaagctaggaataacaaatttaataacatgtttagaaattagtgaagagcctaatttatgatgattttgaggagttaatgaagttgtgcaaacaaaagtcccagtattttctttgggatcttttgtttcttgaaagatgtcctcaatccttcattcacatccatcaccaatttttgtccacctttgaacatatacgtgaattttatactaaaattttgtattctttattaaaaaaaaaaaaaaaaaaaaaaaaaat

SEQ ID NO: 7650 - protein, 378 aa, Glycine max
  misc_feature (1)..(378): Ceres Seq. ID no. 15174552
DPSLQCARFIYDELIKISHRCMVIELQRFPFLWKRMDEALGNFLREGLEALENMIAHLIAMELNYINTSHHNFIGGSKALEIASQQTKSSMVSIPVSRQKEVLESDKGSVSERSVKSRAILARQANGVVTEPGVHAASDAEKVVSSGNTGGSSWGISSIFGGGDSHTIVKENVASKPHTEPVHSVEQSFSMIHLREPPPVLRSSESYSETEAIDITVTKLLLRSYYDIVRKNVEDLVPKAIMYFLVDKAKGELHNVFIKKLYRDNLFEEMLREPDEIALKRKRCRELLRAYQQAFKDLEELPLEADTVERGYGLPEKTGLPKINGLPTSSMYSASSSGDYYAAFSKYPKSKKSSHSGELQSPLHADADSNGSGRPLYI

SEQ ID NO: 7651 - protein, 357 aa, Glycine max
  misc_feature (1)..(357): Ceres Seq. ID no. 15174553
MVIELQRFPFLWKRMDEALGNFLREGLEALENMIAHLIAMELNYINTSHHNFIGGSKALEIASQQTKSSMVSIPVSRQKEVLESDKGSVSERSVKSRAILARQANGVVTEPGVHAASDAEKVVSSGNTGGSSWGISSIFGGGDSHTIVKENVASKPHTEPVHSVEQSFSMIHLREPPPVLRSSESYSETEAIDITVTKLLLRSYYDIVRKNVEDLVPKAIMYFLVDKAKGELHNVFIKKLYRDNLFEEMLREPDEIALKRKRCRELLRAYQQAFKDLEELPLEADTVERGYGLPEKTGLPKINGLPTSSMYSASSSGDYYAAFSKYPKSKKSSHSGELQSPLHADADSNGSGRPLYI

SEQ ID NO: 7652 - protein, 343 aa, Glycine max
  misc_feature (1)..(343): Ceres Seq. ID no. 15174554
MDEALGNFLREGLEALENMIAHLIAMELNYINTSHHNFIGGSKALEIASQQTKSSMVSIPVSRQKEVLESDKGSVSERSVKSRAILARQANGVVTEPGVHAASDAEKVVSSGNTGGSSWGISSIFGGGDSHTIVKENVASKPHTEPVHSVEQSFSMIHLREPPPVLRSSESYSETEAIDITVTKLLLRSYYDIVRKNVEDLVPKAIMYFLVDKAKGELHNVFIKKLYRDNLFEEMLREPDEIALKRKRCRELLRAYQQAFKDLEELPLEADTVERGYGLPEKTGLPKINGLPTSSMYSASSSGDYYAAFSKYPKSKKSSHSGELQSPLHADADSNGSGRPLYI

SEQ ID NO: 7653 - DNA, 1216 bp, Glycine max
  misc_feature (1)..(1216): Ceres Seq. ID no. 15174595
ttctccctcttgcttctttcaacaacttagcattgtattgtcttcaaactttgcttcttccatactttcttctttttccttagccatcattgattgttgcctttcttggctttaaaatggagttcgaggaccgcttcagacaccaggctcagagaccaaaatatgactgccttctttttgatttagatgacactttgtatcccctcaaatctggtcttgcaaaatcatgtctccaaaatattaaagactacatggttgagaagcttggcatacaccctagcaaaattgatgacttgtccaacctcctttacaagaattatggaacaactatggctggtctaagggcaattggatatgactttgactatgatgaatatcacagttttgttcatggaagattaccttatgagaacctaaaaccagaccaagttctgaggaacctgttgctgagcctaccctatagaaaacttatcttcacaaacgcagacaaagttcacgcggcgaaggcgcttaacaggcttggattagaagactgctttgaaggaatcatatgctttgagacccttaatcccatccacaagagcattgtttctgatgatgaagatgacattgagtttgtaggttcaagaaccaccaatccaaccaccacttgtaatggttcaggcacctctcaaatctttgacatcatagggcattttgctcagctcaatcccagtgcagtcttgccaaagacaccaattgtttgcaagccatcagaaaatgccattgaactggccctcaatatagccaatcttaacccacagagaactttgttcttcgaggacagtacccgcaacatacaagctggaaaacgtgtggggcttcacactgtgctggttggtacatcacaaagatgtaaaggtgcagattatgctttggaaagcattcacaaccttagggaggctgtgcctgaactatgggaggctgatataaaatcagaagctgcataccctggaaagctagctgtggagacatcagtcacagcttgagattattattatgtgcatgaaattaattaagccccttcaatattgttcatttaatcaaaattgaaaacccgaccaccaacaaaaaaaaaagagagagagagaagaagcccacgggaattcccccaacttcagatgatgtagttgtagttgatgtagatgctttgtaagttgcaataaattagtcattc

SEQ ID NO: 7654 - protein, 303 aa, Glycine max
  misc_feature (1)..(303): Ceres Seq. ID no. 15174596
MEFEDRFRHQAQRPKYDCLLFDLDDTLYPLKSGLAKSCLQNIKDYMVEKLGIHPSKIDDLSNLLYKNYGTTMAGLRAIGYDFDYDEYHSFVHGRLPYENLKPDQVLRNLLLSLPYRKLIFTNADKVHAAKALNRLGLEDCFEGIICFETLNPIHKSIVSDDEDDIEFVGSRTTNPTTTCNGSGTSQIFDIIGHFAQLNPSAVLPKTPIVCKPSENAIELALNIANLNPQRTLFFEDSTRNIQAGKRVGLHTVLVGTSQRCKGADYALESIHNLREAVPELWEADIKSEAAYPGKLAVETSVTA

SEQ ID NO: 7655 - protein, 258 aa, Glycine max
  misc_feature (1)..(258): Ceres Seq. ID no. 15174597
MVEKLGIHPSKIDDLSNLLYKNYGTTMAGLRAIGYDFDYDEYHSFVHGRLPYENLKPDQVLRNLLLSLPYRKLIFTNADKVHAAKALNRLGLEDCFEGIICFETLNPIHKSIVSDDEDDIEFVGSRTTNPTTTCNGSGTSQIFDIIGHFAQLNPSAVLPKTPIVCKPSENAIELALNIANLNPQRTLFFEDSTRNIQAGKRVGLHTVLVGTSQRCKGADYALESIHNLREAVPELWEADIKSEAAYPGKLAVETSVTA

SEQ ID NO: 7656 - protein, 232 aa, Glycine max
  misc_feature (1)..(232): Ceres Seq. ID no. 15174598
MAGLRAIGYDFDYDEYHSFVHGRLPYENLKPDQVLRNLLLSLPYRKLIFTNADKVHAAKALNRLGLEDCFEGIICFETLNPIHKSIVSDDEDDIEFVGSRTTNPTTTCNGSGTSQIFDIIGHFAQLNPSAVLPKTPIVCKPSENAIELALNIANLNPQRTLFFEDSTRNIQAGKRVGLHTVLVGTSQRCKGADYALESIHNLREAVPELWEADIKSEAAYPGKLAVETSVTA

SEQ ID NO: 7657 - DNA, 1741 bp, Glycine max
  misc_feature (1)..(1741): Ceres Seq. ID no. 15174599
gaaaaagtcttcacttcactatgaccaacagcttacccacagcccatctcatgggtcataattgctctatatgattgttttttctcttcttatatgaaatggctcgcattagattccactcacaccattttgcctgttttgtctgagaagccactttggtttctttgcctttctcaatacattttattttccaatggaggtaggaagtgttcttaactttcttgaggacaagaccattttaattgttggagccactggctttctcgccaaaatttttctggagaagatattgagggttcaaccaaatgttaagaagctttttcttcttttaagagcttcggatgccaaatcagctaattatcgcttgcaaaatgagatcatagcgaaggacttatttattgtgctaaaggagaaattgggtgcaaattttaagtcctttatttcggaaaaagtgactctggtgccgggggacatttcttacgaggacttgggcctgaaggattccattctaagggaagagatttgcaaccagacagatgttattgtcaatttggcagcaacaactaactttgatgaaaggtacgatatagcgttgggtctaaatatttttggagttaagcatgtgatgaactttgctaaacaatgtaccaaactcaaagttgttcttcatgtatcaacagcttatgtatgtggtgagagaggtggactaatactagaggaaccttataactttggtgattcactaaatggagtgtctggactagacatcgatgcagaaaggacaatagtgtgtgacaaattggatgaactacgagagcaaggggccacagagcgtgaaattaaaatagctatgaagaacctcggtattagcagggcaaaggtgtatggatggccaaacacatacgtatttacgaaggcagtaggagagatgcttgtggagcaattaaaaggaagactatccgttgttattatgcgtccgaccatcgttacaagcactttaagagaacctttccctggttgggttgagggtgtaagaaccattgacagtttagccgttacttatgggaaaggaaaattaacatgcttccttggaaatatcaacggagttgtggatgcggtaccagctgacatggtggtgaatgcaatgctagtggccatggtggctcatgcaaatcaacctagtgatatcatctatcatgtgggttcctctcttagaaatccactcacatacttaaatctccaagactatggattaaaatatttcacggcaaaaccatggataaacaaggatggaacaccggtcaaggttggcagagtaactgtattgactgacatggatagcttccagagatatatgttcattcgttacctgcttccattaaagggacttgagctggccaatactgcactttgccagtattttcggggaacttatcttgagctccacaggaagatccaggttgtgatgcggatggttgaactttacaggccttacatgttcttcaatggcgtatttgatgatataaacacagagaagttgcgaatagcagcaaaacaaagtggaacagagacagatttgttttactttgatacgaaagaggttaattgggaggattactttatgaagacccatctccccggtattgtcaagcacgttttcaagtgatgataaatgctatacttttaagtgatttgtgaaactagtaactctattaatatcttgtttagacaacctgaaagg

SEQ ID NO: 7658 - protein, 490 aa, Glycine max
  misc_feature (1)..(490): Ceres Seq. ID no. 15174600
MEVGSVLNFLEDKTILIVGATGFLAKIFLEKILRVQPNVKKLFLLLRASDAKSANYRLQNEIIAKDLFIVLKEKLGANFKSFISEKVTLVPGDISYEDLGLKDSILREEICNQTDVIVNLAATTNFDERYDIALGLNIFGVKHVMNFAKQCTKLKVVLHVSTAYVCGERGGLILEEPYNFGDSLNGVSGLDIDAERTIVCDKLDELREQGATEREIKIAMKNLGISRAKVYGWPNTYVFTKAVGEMLVEQLKGRLSVVIMRPTIVTSTLREPFPGWVEGVRTIDSLAVTYGKGKLTCFLGNINGVVDAVPADMVVNAMLVAMVAHANQPSDIIYHVGSSLRNPLTYLNLQDYGLKYFTAKPWINKDGTPVKVGRVTVLTDMDSFQRYMFIRYLLPLKGLELANTALCQYFRGTYLELHRKIQVVMRMVELYRPYMFFNGVFDDINTEKLRIAAKQSGTETDLFYFDTKEVNWEDYFMKTHLPGIVKHVFK

SEQ ID NO: 7659 - protein, 346 aa, Glycine max
  misc_feature (1)..(346): Ceres Seq. ID no. 15174601
MNFAKQCTKLKVVLHVSTAYVCGERGGLILEEPYNFGDSLNGVSGLDIDAERTIVCDKLDELREQGATEREIKIAMKNLGISRAKVYGWPNTYVFTKAVGEMLVEQLKGRLSVVIMRPTIVTSTLREPFPGWVEGVRTIDSLAVTYGKGKLTCFLGNINGVVDAVPADMVVNAMLVAMVAHANQPSDIIYHVGSSLRNPLTYLNLQDYGLKYFTAKPWINKDGTPVKVGRVTVLTDMDSFQRYMFIRYLLPLKGLELANTALCQYFRGTYLELHRKIQVVMRMVELYRPYMFFNGVFDDINTEKLRIAAKQSGTETDLFYFDTKEVNWEDYFMKTHLPGIVKHVFK

SEQ ID NO: 7660 - protein, 271 aa, Glycine max
  misc_feature (1)..(271): Ceres Seq. ID no. 15174602
MKNLGISRAKVYGWPNTYVFTKAVGEMLVEQLKGRLSVVIMRPTIVTSTLREPFPGWVEGVRTIDSLAVTYGKGKLTCFLGNINGVVDAVPADMVVNAMLVAMVAHANQPSDIIYHVGSSLRNPLTYLNLQDYGLKYFTAKPWINKDGTPVKVGRVTVLTDMDSFQRYMFIRYLLPLKGLELANTALCQYFRGTYLELHRKIQVVMRMVELYRPYMFFNGVFDDINTEKLRIAAKQSGTETDLFYFDTKEVNWEDYFMKTHLPGIVKHVFK

SEQ ID NO: 7661 - DNA, 2091 bp, Glycine max
  misc_feature (1)..(2091): Ceres Seq. ID no. 15174626
gcgaacaaacgaagagtgcaagtgtccgcaaagccgttactcttactcatcacatgaacccctaaatcctaattgctttgttttcccccaattcccaatggcgaacgactcgtcgtttttgttcgccggcattcgtttcgatagaaagaagttcggcgccgatattgccaggttccagaaaaaagacagtgatactgattcggcgatgattttgagcgccgccgaagacgaaggcgagaaaacaatagaacctctggaagaagagaaagtcgcggcgtcaacgacgaagaagaggaagcgcaagggaacctcttccgaaacggtcgaaggattcaatgtgttcagaagttcgacgtctgtggcgcagtcgaatgatgaagtccgagtcattgaggagtccgttgagctgtataataataataagaaggaacaaaataagcaactcgagcgggacgcaatattcagaaagcaacacaacattcatgtctctggttataacgtgccgtctccgcttcaaagctttgatgagttgaaatcaagatataactgtccttcatatttgttgcgcaatctgaaggaacttggatttagagaaccaacacctatccaaaggcaggctataccagtacttttacaaggtcgtgaatgctttgcttgtgcaccaactggctctgggaaaacccttgcgtttgtgtggccaatgcttatgaagcttaaggatccggaaaaaggcagcattcgagctgtgatcctttgtcatactcgtgaattatctgttcaaacatatcgagagtgcaaaaagcttgctaaaagaaaaaaatttcgcattaagttgatgactaagaatcttttaagaaatgctgatttttcaaaatttccatgtgatgtactaatatccacaccacttcgattacgtttggctatcaagaggaagaagattgatctcagcagagttgagtatcttgtcctggatgaatcggataagctatttgagcctgaattattcaagcagattgattctgttatcaaggcatgctcaaatccctcaataatacgctcactgttcagtgctactttacctgattttgttgaagatcgagctcgagaacttatgcatgatgctgttcgtgtaattgttggcagaaagaatatggcttctgaaacaataaagcaaaaattggtttttactggaagtgaagaaggaaaacttctagcaattcgtcaaagctttgccgagagtctaaatcctccggtattggttttcctccaaagcaaggagcgtgccaaggagctgtgcagtgaacttgcatttgacagcattagagttgatgttatccattctgatttgtctcaagcagagcgagaaaatgctgttgataacttcagagctggaaaaacatgggttttgattgctactgatgtagttgcccggggcatggatttcaaaggtgtgaactgtgtgatcaattatgatttccctgattctgctgctgcatatttccacagaattggtcgttctggcagagcagggaggactggagaagcgattactttttacacggaagatgacattccattccttcggaatgttgctaatcttatggcagcatcaggctgtgaggttccttcctatctcatgaagttgcgcaaaaagaagtggaagaagcaccgacccaaaagagattcaatctccacaaaaccagacctatagccctgtaatagcatagaatgacaacatgcttttaaccttgaaatttccagtggtgtttagtatttcttaaataggccgggcagcctagtgtcatgattgcccattcccaaaaatgcaacacgatggaaagggaagggtgaggctaggcaattgcgaccaagagagaatcacgttttatagctaatgcaaggcagtgttgcctaaatttaaaccatgattgtcgtcatatactcctcagccctcactgtaagccccctaaagtgtaatctcatgtgaaatgggaatttttgtgcctctagaaactagaatgtttatttgaacaacatttagaaatttttgtgcccccaaaaccattatttttatatgcttattcagccctt

SEQ ID NO: 7662 - protein, 569 aa, Glycine max
  misc_feature (1)..(569): Ceres Seq. ID no. 15174627
RTNEECKCPQSRYSYSSHEPLNPNCFVFPQFPMANDSSFLFAGIRFDRKKFGADIARFQKKDSDTDSAMILSAAEDEGEKTIEPLEEEKVAASTTKKRKRKGTSSETVEGFNVFRSSTSVAQSNDEVRVIEESVELYNNNKKEQNKQLERDAIFRKQHNIHVSGYNVPSPLQSFDELKSRYNCPSYLLRNLKELGFREPTPIQRQAIPVLLQGRECFACAPTGSGKTLAFVWPMLMKLKDPEKGSIRAVILCHTRELSVQTYRECKKLAKRKKFRIKLMTKNLLRNADFSKFPCDVLISTPLRLRLAIKRKKIDLSRVEYLVLDESDKLFEPELFKQIDSVIKACSNPSIIRSLFSATLPDFVEDRARELMHDAVRVIVGRKNMASETIKQKLVFTGSEEGKLLAIRQSFAESLNPPVLVFLQSKERAKELCSELAFDSIRVDVIHSDLSQAERENAVDNFRAGKTWVLIATDVVARGMDFKGVNCVINYDFPDSAAAYFHRIGRSGRAGRTGEAITFYTEDDIPFLRNVANLMAASGCEVPSYLMKLRKKKWKKHRPKRDSISTKPDL

SEQ ID NO: 7663 - protein, 537 aa, Glycine max
  misc_feature (1)..(537): Ceres Seq. ID no. 15174628
MANDSSFLFAGIRFDRKKFGADIARFQKKDSDTDSAMILSAAEDEGEKTIEPLEEEKVAASTTKKRKRKGTSSETVEGFNVFRSSTSVAQSNDEVRVIEESVELYNNNKKEQNKQLERDAIFRKQHNIHVSGYNVPSPLQSFDELKSRYNCPSYLLRNLKELGFREPTPIQRQAIPVLLQGRECFACAPTGSGKTLAFVWPMLMKLKDPEKGSIRAVILCHTRELSVQTYRECKKLAKRKKFRIKLMTKNLLRNADFSKFPCDVLISTPLRLRLAIKRKKIDLSRVEYLVLDESDKLFEPELFKQIDSVIKACSNPSIIRSLFSATLPDFVEDRARELMHDAVRVIVGRKNMASETIKQKLVFTGSEEGKLLAIRQSFAESLNPPVLVFLQSKERAKELCSELAFDSIRVDVIHSDLSQAERENAVDNFRAGKTWVLIATDVVARGMDFKGVNCVINYDFPDSAAAYFHRIGRSGRAGRTGEAITFYTEDDIPFLRNVANLMAASGCEVPSYLMKLRKKKWKKHRPKRDSISTKPDL

SEQ ID NO: 7664 - protein, 501 aa, Glycine max
  misc_feature (1)..(501): Ceres Seq. ID no. 15174629
MILSAAEDEGEKTIEPLEEEKVAASTTKKRKRKGTSSETVEGFNVFRSSTSVAQSNDEVRVIEESVELYNNNKKEQNKQLERDAIFRKQHNIHVSGYNVPSPLQSFDELKSRYNCPSYLLRNLKELGFREPTPIQRQAIPVLLQGRECFACAPTGSGKTLAFVWPMLMKLKDPEKGSIRAVILCHTRELSVQTYRECKKLAKRKKFRIKLMTKNLLRNADFSKFPCDVLISTPLRLRLAIKRKKIDLSRVEYLVLDESDKLFEPELFKQIDSVIKACSNPSIIRSLFSATLPDFVEDRARELMHDAVRVIVGRKNMASETIKQKLVFTGSEEGKLLAIRQSFAESLNPPVLVFLQSKERAKELCSELAFDSIRVDVIHSDLSQAERENAVDNFRAGKTWVLIATDVVARGMDFKGVNCVINYDFPDSAAAYFHRIGRSGRAGRTGEAITFYTEDDIPFLRNVANLMAASGCEVPSYLMKLRKKKWKKHRPKRDSISTKPDL

SEQ ID NO: 7665 - DNA, 1747 bp, Glycine max
  misc_feature (1)..(1747): Ceres Seq. ID no. 15174646
ttgtgtctgcctcttctgaaacgccactatttctgctttctctctcattaataataatattattgccttacactttttccacaatggagttgggaagcatactccattttcttcaggacaagaacattttgatcactggagccactggctttcttgccaaagttttgttggagaagatattgagggtccaaccaaatgttaagaagctttaccttcttctaagagctgcagatgccaaatctgccactcatcgcttgaacaatgagatcatagggaaggatttgtttagggtactaaaggagaaattgggtgcaaattttaattcctttgtctcgaaaaagttgactctggtacccggggacatctctcgtgaagacttgggattggaggattccattctaagggaagagatttatgatcaaacagatgtcattattaacttagctgcaacaactaactttgatgaaaggtatgatatatcgttgggtctaaatacctttggtgttaagtatgtcatcaacttcgccaaaaaatgtaccaaactcgaggttcttgtgcatgtatcaacagcctatgtatgtggtgagggaggccgagaagggctcatattagagaaaccatatcatttgggtgattcactgaatggagtgtctggattagacattaatgcagaagagaaagttgtgcgtgacaaattaagtgagttacaacaactgggggccacagaaaaggaaattaaagaggttatgaaggacttgggcattagcagggcaaagttatatggatggccaaacacatatgtattcaccaaggcaatgggagagatgcttgtggagcaactaaaaggaaacttatccgttgtgaccattcgtcccaccattgttaccagcacattcaaagaacctttccctggttgggctgaaggtgtaagaaccattgacagtttagctgtaacttatgggaaaggaaaattaacatgcttccttggagatctcaaagcaattgttgatgcgataccagctgacatggtggtgaatgcaatacttgtggccatggtggctcatgcaaatcatcctagtgatgatgttatatatcatgttggttcctctgttagaagaccactaagatatggcaatcttcaagagtatggctttagatatttcacagcaaaaccatgcataaacaaggatggaaggccagttaaggttggaaaagttacagtgttgagcaacatggatagcttcagaagatatatgttcattcgctacctgcttgtgttaaagggacttgagctggccaatactgcattttgccagtatttccaaggaacatatcttaatctcaataggaagattcagattgtgatgcggttggtggacctttacaagccttacttgttctttaaagctgcatttgatgatatgaacacagagaagttgagaatggcagcaagacaaggtggggtggagacagatttgttttattttgaccccgaactgattgattgggaagattactttttgaacatccatcttcctggtgtggtgaagtacattttgaagtgatatatagagctttgaaactagtaattttattatgttcaaatttgtactagctagaagagtcacattatagttatgttatttgtttctcaagggcagtataattgtgttagctagctgccaaatgtgtttcaaaactttgatcaagtgtacccaatatcatatattttaattttaatttgctc

SEQ ID NO: 7666 - protein, 520 aa, Glycine max
  misc_feature (1)..(520): Ceres Seq. ID no. 15174647
VSASSETPLFLLSLSLIIILLPYTFSTMELGSILHFLQDKNILITGATGFLAKVLLEKILRVQPNVKKLYLLLRAADAKSATHRLNNEIIGKDLFRVLKEKLGANFNSFVSKKLTLVPGDISREDLGLEDSILREEIYDQTDVIINLAATTNFDERYDISLGLNTFGVKYVINFAKKCTKLEVLVHVSTAYVCGEGGREGLILEKPYHLGDSLNGVSGLDINAEEKVVRDKLSELQQLGATEKEIKEVMKDLGISRAKLYGWPNTYVFTKAMGEMLVEQLKGNLSVVTIRPTIVTSTFKEPFPGWAEGVRTIDSLAVTYGKGKLTCFLGDLKAIVDAIPADMVVNAILVAMVAHANHPSDDVIYHVGSSVRRPLRYGNLQEYGFRYFTAKPCINKDGRPVKVGKVTVLSNMDSFRRYMFIRYLLVLKGLELANTAFCQYFQGTYLNLNRKIQIVMRLVDLYKPYLFFKAAFDDMNTEKLRMAARQGGVETDLFYFDPELIDWEDYFLNIHLPGVVKYILK

SEQ ID NO: 7667 - protein, 493 aa, Glycine max
  misc_feature (1)..(493): Ceres Seq. ID no. 15174648
MELGSILHFLQDKNILITGATGFLAKVLLEKILRVQPNVKKLYLLLRAADAKSATHRLNNEIIGKDLFRVLKEKLGANFNSFVSKKLTLVPGDISREDLGLEDSILREEIYDQTDVIINLAATTNFDERYDISLGLNTFGVKYVINFAKKCTKLEVLVHVSTAYVCGEGGREGLILEKPYHLGDSLNGVSGLDINAEEKVVRDKLSELQQLGATEKEIKEVMKDLGISRAKLYGWPNTYVFTKAMGEMLVEQLKGNLSVVTIRPTIVTSTFKEPFPGWAEGVRTIDSLAVTYGKGKLTCFLGDLKAIVDAIPADMVVNAILVAMVAHANHPSDDVIYHVGSSVRRPLRYGNLQEYGFRYFTAKPCINKDGRPVKVGKVTVLSNMDSFRRYMFIRYLLVLKGLELANTAFCQYFQGTYLNLNRKIQIVMRLVDLYKPYLFFKAAFDDMNTEKLRMAARQGGVETDLFYFDPELIDWEDYFLNIHLPGVVKYILK

SEQ ID NO: 7668 - protein, 272 aa, Glycine max
  misc_feature (1)..(272): Ceres Seq. ID no. 15174649
MKDLGISRAKLYGWPNTYVFTKAMGEMLVEQLKGNLSVVTIRPTIVTSTFKEPFPGWAEGVRTIDSLAVTYGKGKLTCFLGDLKAIVDAIPADMVVNAILVAMVAHANHPSDDVIYHVGSSVRRPLRYGNLQEYGFRYFTAKPCINKDGRPVKVGKVTVLSNMDSFRRYMFIRYLLVLKGLELANTAFCQYFQGTYLNLNRKIQIVMRLVDLYKPYLFFKAAFDDMNTEKLRMAARQGGVETDLFYFDPELIDWEDYFLNIHLPGVVKYILK

SEQ ID NO: 7669 - DNA, 1541 bp, Glycine max
  misc_feature (1)..(1541): Ceres Seq. ID no. 15174669
gaaaaatgggtaaaagcaaccccaaaattcttgcgtgtccgaaacctctgaaagaaattgcaatctaatcaaagccagagtgaatgctgttgaacgctgtctgaattttttgagctaaataaaagaagaaaaacagggtgagagagaaacagagtgagagagaaacagaggatcttcatatgaagagtgaagtgagttggagaataaagattcaacaacctgggaaagccgggagagtttttcttggagggaattttggactgcatccatgaaatcacaacagctcttgcttttgctgataggatgagcgattctgcatacagagtccaaaccacaccgcgccttgctcaatggagaatcgaaaacttggcttcttgcacttaccgcaaatcagatcctttcaagatcggaaactggaattgggttttgtttgttaaattgttcccagaaatatccaatcttacgagagacaaccccccaattgcatctttcatcgttcgggtcgttagttctgttggaggtcgccaggccatcacacatccagaaataaaggacaaagtgttaaagaacaacgaggattttgtttgggcaattgaggttccactaactgggaaattcattattgacgtagagtttcttgatttgaagactgcatccccaaacggtggagaaccttgttccatttgggcagaaggatttactcagcaaagatcaaatgcaaaagccatagagtctcttggtagaatgctaacagaaggcattcacacagacatcaccatcaatgcttctgatggaagtataggagctcatagagctgttcttgctgccagatcacctgtcttccgcagcatgttctcacataatcttcaggagaaagagttatcaaccataaacatctcagacatgtcacttgaatcatgccaggcttttctctattatctttatgggataatcaaacatgaagagtttctgactcataggctggcccttctgcaggcggctgacaagtatgacatatctgacttgagagatgtatgccacgaaagtcttctagaagatattgacacaaagaatgtacttgagaggctccaaaatgcatctctatatcagttgatgaaactgaagatgagttgcatccgatatcttgtgaagtttggtaaaatatatgaaattcgcgatgatttcaataccttcctgcgaaatgcagatagggatctgatttctgaagtcttccatgaagttcttgatgcttggaaaggattctgaagattttgcagcttcaatgaaagataggaaagcttgttgttattcaacatacccaagaaataggttgtttcaatttgttgtgcaggatttgttttgatgaacctaattctttctctcagatgattttttattattattatgattttatgtacatacttatgttgtgctcttcaaatgtaaaccataaggtattattgtttacaaaaaatgtatatcatatgaaaagaaaagtaacatattcatgaatgcaaaaggtcctcctgaattctgatgat

SEQ ID NO: 7670 - protein, 320 aa, Glycine max
  misc_feature (1)..(320): Ceres Seq. ID no. 15174670
MSDSAYRVQTTPRLAQWRIENLASCTYRKSDPFKIGNWNWVLFVKLFPEISNLTRDNPPIASFIVRVVSSVGGRQAITHPEIKDKVLKNNEDFVWAIEVPLTGKFIIDVEFLDLKTASPNGGEPCSIWAEGFTQQRSNAKAIESLGRMLTEGIHTDITINASDGSIGAHRAVLAARSPVFRSMFSHNLQEKELSTINISDMSLESCQAFLYYLYGIIKHEEFLTHRLALLQAADKYDISDLRDVCHESLLEDIDTKNVLERLQNASLYQLMKLKMSCIRYLVKFGKIYEIRDDFNTFLRNADRDLISEVFHEVLDAWKGF

SEQ ID NO: 7671 - protein, 173 aa, Glycine max
  misc_feature (1)..(173): Ceres Seq. ID no. 15174671
MLTEGIHTDITINASDGSIGAHRAVLAARSPVFRSMFSHNLQEKELSTINISDMSLESCQAFLYYLYGIIKHEEFLTHRLALLQAADKYDISDLRDVCHESLLEDIDTKNVLERLQNASLYQLMKLKMSCIRYLVKFGKIYEIRDDFNTFLRNADRDLISEVFHEVLDAWKGF

SEQ ID NO: 7672 - DNA, 1457 bp, Glycine max
  misc_feature (1)..(1457): Ceres Seq. ID no. 15174680
gtaggccccccccccccatgttcaatatgatgatgtgagtgaattgcaaacacctgcaaagatcagcacatatactattggacctttccaatctacaataactgaaaaagcaaaagttaaagtgaaagttcggttgaatcttcatggaattgtatctgtcgaatctgcaactctgctggaagaggaagaaattgaggttccagtttccaaagaaccagcaggagaaaataccaagatggaaactgatgaagctcctgccaatgttgctgcacctcctagcaccaatgacaatgatgttaacatgcaagatgctaattccaaggcaactgctgatgcccctgggtccgaaaatgggacccctgaggcaggagataagcctgtgcaaatggatactgataccaaggttgaggctccaaagaaaaaagttaagaaaataaacattcctgtggtggagttagtttatggggcaatggcagctgcagatgtccagaaagctgtagagaaggagtttgaaatggctttgcaagatagagtgatggaggaaacaaaggataagaaaaatgcagtagaggcttatgtttatgacacgagaaacaagcttaatgacaaataccaagagtttgtcgttgattcagagagggaatcatttactgctaaacttcaggaggtagaagactggctatatgaggatggtgaagatgaaactaaaggtgtatacattgccaagctagaagaactcaagaagcaaggtgatccaattgaagagcgttacaaagaatacatggagaggggtacagtaatagatcaacttgtctattgtataaatagttatagagaagctgcaatgtcaaatgatcccaaattcgatcacattgacatcaatgagaaacaaaaggtcttaaatgaatgtgtggaagctgagaactggctcagggagaaaaaacagcaacaggactctcttccgaaatatgtcaccccggtacttttgtcagctgacataagaaagaaagctgaagctgttgacaggttctgtaagccaattatgatgaaaccaaagccaccaccacccaagccagctacaccagaagcaccagcaaccccacctcctcagggtggtgagcagccacagcagcagcaacaacaaccacctgaggagaatcctaatgccagtactaatgaaaaggcaggggacaatgctaatccagccccaccaccagcatctgctgaaccaatggagactgacaaaccagagaacacaggctctgcttaatttttgttgattttgtctggtctctacgttttgtataacaatttgaattgtacctggaaaaatcgtcgtgggtgagagttgatgctgggattctttgctggaaaaattggtaatgggtgaattatctgagattcggattatttttggtcaaatctacgttctataagtggaattacaatgcttgttt

SEQ ID NO: 7673 - protein, 344 aa, Glycine max
  misc_feature (1)..(344): Ceres Seq. ID no. 15174681
METDEAPANVAAPPSTNDNDVNMQDANSKATADAPGSENGTPEAGDKPVQMDTDTKVEAPKKKVKKINIPVVELVYGAMAAADVQKAVEKEFEMALQDRVMEETKDKKNAVEAYVYDTRNKLNDKYQEFVVDSERESFTAKLQEVEDWLYEDGEDETKGVYIAKLEELKKQGDPIEERYKEYMERGTVIDQLVYCINSYREAAMSNDPKFDHIDINEKQKVLNECVEAENWLREKKQQQDSLPKYVTPVLLSADIRKKAEAVDRFCKPIMMKPKPPPPKPATPEAPATPPPQGGEQPQQQQQQPPEENPNASTNEKAGDNANPAPPPASAEPMETDKPENTGSA

SEQ ID NO: 7674 - protein, 322 aa, Glycine max
  misc_feature (1)..(322): Ceres Seq. ID no. 15174682
MQDANSKATADAPGSENGTPEAGDKPVQMDTDTKVEAPKKKVKKINIPVVELVYGAMAAADVQKAVEKEFEMALQDRVMEETKDKKNAVEAYVYDTRNKLNDKYQEFVVDSERESFTAKLQEVEDWLYEDGEDETKGVYIAKLEELKKQGDPIEERYKEYMERGTVIDQLVYCINSYREAAMSNDPKFDHIDINEKQKVLNECVEAENWLREKKQQQDSLPKYVTPVLLSADIRKKAEAVDRFCKPIMMKPKPPPPKPATPEAPATPPPQGGEQPQQQQQQPPEENPNASTNEKAGDNANPAPPPASAEPMETDKPENTGSA

SEQ ID NO: 7675 - protein, 294 aa, Glycine max
  misc_feature (1)..(294): Ceres Seq. ID no. 15174683
MDTDTKVEAPKKKVKKINIPVVELVYGAMAAADVQKAVEKEFEMALQDRVMEETKDKKNAVEAYVYDTRNKLNDKYQEFVVDSERESFTAKLQEVEDWLYEDGEDETKGVYIAKLEELKKQGDPIEERYKEYMERGTVIDQLVYCINSYREAAMSNDPKFDHIDINEKQKVLNECVEAENWLREKKQQQDSLPKYVTPVLLSADIRKKAEAVDRFCKPIMMKPKPPPPKPATPEAPATPPPQGGEQPQQQQQQPPEENPNASTNEKAGDNANPAPPPASAEPMETDKPENTGSA

SEQ ID NO: 7676 - DNA, 1554 bp, Glycine max
  misc_feature (1)..(1554): Ceres Seq. ID no. 15174705
aatatcacgtcaagaagcaaagcatcccctggaagcaaaactagagttactaagagcaaatctgagaaggaagaggaaaatagaaagaaaaaggaggaattgatgattcagcggcagaaaagaattgctgaaagaagtgcctctaagaagactggaactggaactaagacttccttgacttctgcaaagaaagagaatcctaagatacatccatccaatgaggagaccaagaaattgcaaaaaccagtcatcaggaattccaccattgaacgtcttgcaactgcccgagtaagtcagtcgaaggtttcaccaagtccagcaaaatcaggtccaaccaagaaaccaaccttgaaggcaaatggtgtacctttgcagaagactacaagcacagaaaagaaacaggacccaaaagaagtcaaatcttcaagtcttaaagaagacgcgaagaaaacaaatggggaggttctaggagccactaatggccaggctaagaatgaaatagaaatctcagtagcattgccaaggaactctggcgccacacagtctgttgaaacaaataacagtaatcttggtttgaaagacaatggagagctatccaagacgtcatcagagaaagatgcgacatctttgatttcagaaagagagcatgtgcacgcaaatgttggccagcttcatgccgatccatctttgccgaatcacaatcttgcgttgggaggaaatcagcccagaggtgaagaagtgtcaaacaagttatcttcacttcctggtgatagcaaacctcaacatattactgatgtgatcacaaatcctacagctgcattacctagcaaacccctcacagtttctgctgtgaactcaaatgttaatcaagaaatacacgagaataatgctatcttgcctcaagtcactgagaaacaaatttctactacccctccacccaataaccaagtgatgatgccagaatcagtccactccaggaagaaatggaacactgatgaggacaattcaaaaccagcaaaaggatttcgtaagcttctattctttggaagaaagagctgaagcaaagcaccctggtggattgattttgtgcaaattggttcataataatcttctgaagtgttttgataagctatcagttctcttttccatgcttttggtttttcaacatttcaaagagtttacttcgtccattcttttgctcaacagaaagtgtttggcacattgaattatttcttgttttgaacacacatatggaagtcatgtggaagattgtagatagtttcctgcttgacacacgaaataacaaagccatgagatggggagttgcttgttacgttagagatccatgatgtaaattatctgaatatggtgtatcctaaggaaggctttcacaggtaataaattttccatgttggaactttttatacgaggcttaacttgtttaatgtcatatgatgccaaaaaaaaaaacctgtttccttgtattcatgaaagttgtaatgtttggttgtgtatgactttcatattatttcatgctgatattctattgcaaac

SEQ ID NO: 7677 - protein, 352 aa, Glycine max
  misc_feature (1)..(352): Ceres Seq. ID no. 15174706
NITSRSKASPGSKTRVTKSKSEKEEENRKKKEELMIQRQKRIAERSASKKTGTGTKTSLTSAKKENPKIHPSNEETKKLQKPVIRNSTIERLATARVSQSKVSPSPAKSGPTKKPTLKANGVPLQKTTSTEKKQDPKEVKSSSLKEDAKKTNGEVLGATNGQAKNEIEISVALPRNSGATQSVETNNSNLGLKDNGELSKTSSEKDATSLISEREHVHANVGQLHADPSLPNHNLALGGNQPRGEEVSNKLSSLPGDSKPQHITDVITNPTAALPSKPLTVSAVNSNVNQEIHENNAILPQVTEKQISTTPPPNNQVMMPESVHSRKKWNTDEDNSKPAKGFRKLLFFGRKS

SEQ ID NO: 7678 - protein, 318 aa, Glycine max
  misc_feature (1)..(318): Ceres Seq. ID no. 15174707
MIQRQKRIAERSASKKTGTGTKTSLTSAKKENPKIHPSNEETKKLQKPVIRNSTIERLATARVSQSKVSPSPAKSGPTKKPTLKANGVPLQKTTSTEKKQDPKEVKSSSLKEDAKKTNGEVLGATNGQAKNEIEISVALPRNSGATQSVETNNSNLGLKDNGELSKTSSEKDATSLISEREHVHANVGQLHADPSLPNHNLALGGNQPRGEEVSNKLSSLPGDSKPQHITDVITNPTAALPSKPLTVSAVNSNVNQEIHENNAILPQVTEKQISTTPPPNNQVMMPESVHSRKKWNTDEDNSKPAKGFRKLLFFGRKS

SEQ ID NO: 7679 - DNA, 1831 bp, Glycine max
  misc_feature (1)..(1831): Ceres Seq. ID no. 15174712
aattctggatgtgaatttattgataaatcttctagtacttctgggacatctcaatctcctttggtggaagaaaagtgtgggagcgtcagaaaggtccattccagtagcaataagagagactacattcttcgacagaagtcattccacatggaaaaaagttatcggacatatggacctaaagggtcttcaagaggaggaagactgaatggcttgaatggattaatcttggataaaaaacttaaatctgtatctgagtctactaccataaacttaaagagtgcatcgataaacataagtaaggcagtgggagttgatgtgacacaagacaatttaaatgctgatttttcatctaatgatggaccatcaacccccactgcatttagtctggattctactgttactgtttctcagtcaaccaatactttatcttcagtgcatgaagcaaatgctatacctgcagttggtagcccaaatgtattatcagctacagatactgatctttctctttctttgtcttcaaatagtaagtctcctacaacaactgtccgctgcaataatgaggcacctaatagtagttgtatggggatacctcatgacaggtccctggggaagtggataccccaagatagaaaggatgagatgattttgaagctagttccaagggttcgggagctgcaaaatcagcttcaagaatggacagagtgggcaaatcagaaggttatgcaggctgctcgtcggctgagtaaggatagggccgagcttaagacactgagacaagagaaagatgaagttgaacgtcttaaaaaagaaaaacaatctctagaggaaaacactatgaagaagatttctgagatggaaaatgccttgtctaaagcgagtgcacaggtagaaagaaccaatgctgatgtccggaaacttgaggtggaaaatgctgcactgaggaaagagatggaggttgctaagttacaagcggctgagtcagccacaagctgtcaagaggtctcaaggagggaaaagaagacccaaatgaagtttcaatcatgggagaagcagaaatccttgtttcaggaagagctaatgaatgaaaaacacaaattagctcagttgcagcaagaattagagcaagctaaagtgcaacagcagcaagtcgaggctaggtggcagcaagcagcaaaggcaaaagaagaactcctcctgcaggccagttctataagaaaagaaagggaacaaattgaggagtcagcaaaatcaaaggaggatatgatcaaactgaaagcagaggaaaatctacacaggtacagagatgacatccagaaacttgaaaaagaaattgcacaactgagacagaagaccgactcttctaaaattgctgcactgagaaggggaattgatggaaactatgtcagcagctttatggacgtgaaaagcatggctctgaaagaatcgcgggccacttttatctcagaaatggtttcaaatttaaatgactactctttgatagggggtgtaaagcgggaaagagaatgtgtcatgtgcctttctgaggagatgtctgttgtattcctcccatgtgctcatcaggttgtttgcacaacatgcaatgatctccacgagaaacaaggtatgcaagactgtccttcttgcaggagccccatccagaggcgtatttctgtccgatttgcccgtacataatttatttacttgaatgaaatgagtgttttgaataatgtctgttggaacactcttgcaaagaataatgcattcagaatcatgcatctcgagtttaaagatacattaagttgctttcaatgccaaggttgatttttatgtt

SEQ ID NO: 7680 - protein, 563 aa, Glycine max
  misc_feature (1)..(563): Ceres Seq. ID no. 15174713
NSGCEFIDKSSSTSGTSQSPLVEEKCGSVRKVHSSSNKRDYILRQKSFHMEKSYRTYGPKGSSRGGRLNGLNGLILDKKLKSVSESTTINLKSASINISKAVGVDVTQDNLNADFSSNDGPSTPTAFSLDSTVTVSQSTNTLSSVHEANAIPAVGSPNVLSATDTDLSLSLSSNSKSPTTTVRCNNEAPNSSCMGIPHDRSLGKWIPQDRKDEMILKLVPRVRELQNQLQEWTEWANQKVMQAARRLSKDRAELKTLRQEKDEVERLKKEKQSLEENTMKKISEMENALSKASAQVERTNADVRKLEVENAALRKEMEVAKLQAAESATSCQEVSRREKKTQMKFQSWEKQKSLFQEELMNEKHKLAQLQQELEQAKVQQQQVEARWQQAAKAKEELLLQASSIRKEREQIEESAKSKEDMIKLKAEENLHRYRDDIQKLEKEIAQLRQKTDSSKIAALRRGIDGNYVSSFMDVKSMALKESRATFISEMVSNLNDYSLIGGVKRERECVMCLSEEMSVVFLPCAHQVVCTTCNDLHEKQGMQDCPSCRSPIQRRISVRFART

SEQ ID NO: 7681 - protein, 514 aa, Glycine max
  misc_feature (1)..(514): Ceres Seq. ID no. 15174714
MEKSYRTYGPKGSSRGGRLNGLNGLILDKKLKSVSESTTINLKSASINISKAVGVDVTQDNLNADFSSNDGPSTPTAFSLDSTVTVSQSTNTLSSVHEANAIPAVGSPNVLSATDTDLSLSLSSNSKSPTTTVRCNNEAPNSSCMGIPHDRSLGKWIPQDRKDEMILKLVPRVRELQNQLQEWTEWANQKVMQAARRLSKDRAELKTLRQEKDEVERLKKEKQSLEENTMKKISEMENALSKASAQVERTNADVRKLEVENAALRKEMEVAKLQAAESATSCQEVSRREKKTQMKFQSWEKQKSLFQEELMNEKHKLAQLQQELEQAKVQQQQVEARWQQAAKAKEELLLQASSIRKEREQIEESAKSKEDMIKLKAEENLHRYRDDIQKLEKEIAQLRQKTDSSKIAALRRGIDGNYVSSFMDVKSMALKESRATFISEMVSNLNDYSLIGGVKRERECVMCLSEEMSVVFLPCAHQVVCTTCNDLHEKQGMQDCPSCRSPIQRRISVRFART

SEQ ID NO: 7682 - protein, 370 aa, Glycine max
  misc_feature (1)..(370): Ceres Seq. ID no. 15174715
MGIPHDRSLGKWIPQDRKDEMILKLVPRVRELQNQLQEWTEWANQKVMQAARRLSKDRAELKTLRQEKDEVERLKKEKQSLEENTMKKISEMENALSKASAQVERTNADVRKLEVENAALRKEMEVAKLQAAESATSCQEVSRREKKTQMKFQSWEKQKSLFQEELMNEKHKLAQLQQELEQAKVQQQQVEARWQQAAKAKEELLLQASSIRKEREQIEESAKSKEDMIKLKAEENLHRYRDDIQKLEKEIAQLRQKTDSSKIAALRRGIDGNYVSSFMDVKSMALKESRATFISEMVSNLNDYSLIGGVKRERECVMCLSEEMSVVFLPCAHQVVCTTCNDLHEKQGMQDCPSCRSPIQRRISVRFART

SEQ ID NO: 7683 - DNA, 1526 bp, Glycine max
  misc_feature (1)..(1526): Ceres Seq. ID no. 15174737
agtatgcctatgtaagaaggcatgctatgctattgctatggagaagaaaacaagtgtccaagagtcacgtaaattcaaccaattatttttccccaagcaacacaacaaagtgtacccaattaggctacagagaagctcttcaacttcatccttgtcttcattatcatcatcattgtcacaaaagtcagatgactcttctctaacagattccttgaatctagcagatgagagttttcaatttgcactgaatttgatttcgccgcgttgtcaaagaagagaaccagaaattattaatgatgcacaccaacaacaaattccacagactgctgaggctggtgaattgaaaaggtgcaactggatcactaagaactgtgatgaggcttacattcaatttcacgatgagtgctggggagtcccagcttacgatgacaaaaaattgtttgagctgcttacactatcaggattgctgatagattacaactggaccgaaattctaaaaagaaaggaaattcttagaaaagtttttgctggatttgatcctaatactgtggccaaaatggaggagaaagaaatcatggaaatagcatcaaacaaagaagttttgttagccgattgcagagttaggtgcatagtagacaatgccaaatgcataatgaagattgtgagggaatgtggatcattcagctgctatatatggggctatgtgaatcacaaaccagtgattaacagatacagatacccaagagatgtccctctaaggactacaaaagcagataccatcagcaaggacttgataaagcgtggctttcaatttttgggtccagtgatagtttattcttttatgcaagctgcaggattggcaattgatcatcttgtggattgttataggcacaatgaatgtgtaaggctcgcagaaaggccttggagacatttgtaacataatcgaggattgctaacaacacacgttttaacatatttcttgcaatacactttctattgttgataaaattttattggaaactacaaaattactagtgagtcattgaataagaaatgagactcacaattttgtgattttcaaaaaaaaaaactaatcaataataaatgatgtattcaaaagagttgttataaactgtgttgttagcctttctctctgtaacattcatcagtttacttgcataattttcgattgttttttgtatcaacagctattcagttttccatacatgcctattctagcaagagagggaggtaaaacaatgctttgtagtccctctatttttttattttttggtttttggggtcatttttccttctcttccttccatcccatgtcataatcatcaagtcaagctttgccgttgtcaataaattgaagagggttgcttgcttgcctttgaatttgagtgatgaacagagtcagccttgaggccttggttgtggaacactacatgtttggtatggtaagtgcatcaaagaccaattgtacactactgaatgaaaatgttcttgtttgcattgtttac

SEQ ID NO: 7684 - protein, 311 aa, Glycine max
  misc_feature (1)..(311): Ceres Seq. ID no. 15174738
VCLCKKACYAIAMEKKTSVQESRKFNQLFFPKQHNKVYPIRLQRSSSTSSLSSLSSSLSQKSDDSSLTDSLNLADESFQFALNLISPRCQRREPEIINDAHQQQIPQTAEAGELKRCNWITKNCDEAYIQFHDECWGVPAYDDKKLFELLTLSGLLIDYNWTEILKRKEILRKVFAGFDPNTVAKMEEKEIMEIASNKEVLLADCRVRCIVDNAKCIMKIVRECGSFSCYIWGYVNHKPVINRYRYPRDVPLRTTKADTISKDLIKRGFQFLGPVIVYSFMQAAGLAIDHLVDCYRHNECVRLAERPWRHL

SEQ ID NO: 7685 - protein, 299 aa, Glycine max
  misc_feature (1)..(299): Ceres Seq. ID no. 15174739
MEKKTSVQESRKFNQLFFPKQHNKVYPIRLQRSSSTSSLSSLSSSLSQKSDDSSLTDSLNLADESFQFALNLISPRCQRREPEIINDAHQQQIPQTAEAGELKRCNWITKNCDEAYIQFHDECWGVPAYDDKKLFELLTLSGLLIDYNWTEILKRKEILRKVFAGFDPNTVAKMEEKEIMEIASNKEVLLADCRVRCIVDNAKCIMKIVRECGSFSCYIWGYVNHKPVINRYRYPRDVPLRTTKADTISKDLIKRGFQFLGPVIVYSFMQAAGLAIDHLVDCYRHNECVRLAERPWRHL

SEQ ID NO: 7686 - DNA, 1259 bp, Glycine max
  misc_feature (1)..(1259): Ceres Seq. ID no. 15174740
gacgtacctcattattcttaaacctccttttctattctattcaattcaataccagtggtggtgactcacttgttgttggagcaaagctgctcgtgatcaattttcgtgttccttcttcgttcccaccgaatgaggattaattatcaattatatatcatatattaggtttgtttgacttgttttcgtttatgtgaaaaacgatttctctattgtatacaacttcggatgcgcatatcgagctttttcggttatcaatgacgttattgcagaatctgagatgttgctttgatcgctactgtggacatactttcacgaacaaccgaagatgctcgctgttgtttaactagaatattctattttgtagcaaatatgttctacgcgttggattggcggagcatggttaacgttttggaccttgaagattttgttgctccggaagatatgaggagcaattgcgacatgttcatttgttggtaaaagagaggttgatcttccgccatgtcttcccttcaactgttccaactaactcagcatggccggagttttctggcttcaaggagaaaaactttgctacttgcaactggtatcttagttgctggtggaactgcagcatatgtgcaatcgaggtttagaggtaatagagatgatttattaggtgattcctatgagcgcaataatgataaagaactcacaaaggaggaggtcatgaaaggaacttctgcaccaaagaataaacaaaagaaaggagggttgaagtcacttcaagtccttgctgcaattcttttatctgagatgggccaattaggtgcaaagaaccttttatctttggtttctatagtggtgctgcgaaccactttgagcaacaggctagcaaaagtgcaaggtttcctatttcgcgccgcttttcttcgacgtgtgccattgtttctgcggctaatttcagaaaatattcttttgtgtttcctcttatcaaccatgcagtctacatctaagtacattactgggactttgagtctgcacttccgtaaaatattgactaaacttatccattctcgctattttgaggtagatattgctgatttgtatgtaaaagcttactatatttgattgtctgtattgagcttgttatccatttatgcattcctactgtcatatgaagtgtctgtatatttacttgtgaactaaaatctttccgagttatttttacctgtttataaggcttgtctgttttcttctttatttgcaatgtatgaaagttc

SEQ ID NO: 7687 - protein, 202 aa, Glycine max
  misc_feature (1)..(202): Ceres Seq. ID no. 15174741
MSSLQLFQLTQHGRSFLASRRKTLLLATGILVAGGTAAYVQSRFRGNRDDLLGDSYERNNDKELTKEEVMKGTSAPKNKQKKGGLKSLQVLAAILLSEMGQLGAKNLLSLVSIVVLRTTLSNRLAKVQGFLFRAAFLRRVPLFLRLISENILLCFLLSTMQSTSKYITGTLSLHFRKILTKLIHSRYFEVDIADLYVKAYYI

SEQ ID NO: 7688 - protein, 133 aa, Glycine max
  misc_feature (1)..(133): Ceres Seq. ID no. 15174742
MKGTSAPKNKQKKGGLKSLQVLAAILLSEMGQLGAKNLLSLVSIVVLRTTLSNRLAKVQGFLFRAAFLRRVPLFLRLISENILLCFLLSTMQSTSKYITGTLSLHFRKILTKLIHSRYFEVDIADLYVKAYYI

SEQ ID NO: 7689 - protein, 104 aa, Glycine max
  misc_feature (1)..(104): Ceres Seq. ID no. 15174743
MGQLGAKNLLSLVSIVVLRTTLSNRLAKVQGFLFRAAFLRRVPLFLRLISENILLCFLLSTMQSTSKYITGTLSLHFRKILTKLIHSRYFEVDIADLYVKAYYI

SEQ ID NO: 7690 - DNA, 1280 bp, Glycine max
  misc_feature (1)..(1280): Ceres Seq. ID no. 15174772
acaaagctggatgcttcctcatcaagcgaagaccttcttcagatattgacggcattggaaggtgctataaagagggagtatttggattcaaactatgaaactacttttgagctgttgggtttgtttagtgcttctggatgtcacactaaggattccattgatggtgaaaggatgtctgtacttccatgggttccatatacatcagctgctgtagctctaaggctcctgcaacttgatgcatgtatcttttacacctcacagcagaagctggagtctgagaaggataagaaaattggaattgtgatgaagcttccatcaaaacatgcttctgccagaaaatcttacaatgctggtgcaattgaaacttcacatcaggctgaacgtgctgtagagaactgggttgatcttggagctggtcttacgagctgcagcagaggacaaaggacccaacagggccgtggccgttctcatggtggaagaacatcatcaaaaaggagggtggttagttcaagatccggttctaaaaagagaagtactacctctagaagcaggaaaatgggaaaattacttgaatggaaagggagaccatgcagacaaggaggaaatgcccgtggtcctcgtagcattagaagctggcagaaatcagaagccaaggtggatgtgatcactggtgagagggataccccaaaagatgtcatggaggaagcagctggtatctttgtccaagaggagattaatgaaggtgaaatggaagccgctgcactaaatgctagtagttcagagagatcaggctatgaagatgatgtttatcaagaaataggtgatgagtatgattatctggtggacaataatgatggatatcagggtgtatttagtgggaagtctgagaacttattacatggaagccactataatgtggttggtaaggaagatatggatattgatgacaatgttgacgatgatgatgacgacaacgggaaaattgatcttgatgttgaaggttacataattgggggcaactcagatgcaagggacaggaaagaagaaaatgcagaacaaaacatggatctggatggagttggttctacatcatcagactatagtgattaatagtatcagtcattgcaagtgactccacaagagtatgtagttaaattttgaaggtttgtttagtaatgtaggccagtgatttgtgatatactttgtagattgcaaaattatgaaagaaaatgtttctcgtattttgaaagagaatatccaaaaaaaaaaaaaaaaaaaat

SEQ ID NO: 7691 - protein, 369 aa, Glycine max
  misc_feature (1)..(369): Ceres Seq. ID no. 15174773
TKLDASSSSEDLLQILTALEGAIKREYLDSNYETTFELLGLFSASGCHTKDSIDGERMSVLPWVPYTSAAVALRLLQLDACIFYTSQQKLESEKDKKIGIVMKLPSKHASARKSYNAGAIETSHQAERAVENWVDLGAGLTSCSRGQRTQQGRGRSHGGRTSSKRRVVSSRSGSKKRSTTSRSRKMGKLLEWKGRPCRQGGNARGPRSIRSWQKSEAKVDVITGERDTPKDVMEEAAGIFVQEEINEGEMEAAALNASSSERSGYEDDVYQEIGDEYDYLVDNNDGYQGVFSGKSENLLHGSHYNVVGKEDMDIDDNVDDDDDDNGKIDLDVEGYIIGGNSDARDRKEENAEQNMDLDGVGSTSSDYSD

SEQ ID NO: 7692 - protein, 312 aa, Glycine max
  misc_feature (1)..(312): Ceres Seq. ID no. 15174774
MSVLPWVPYTSAAVALRLLQLDACIFYTSQQKLESEKDKKIGIVMKLPSKHASARKSYNAGAIETSHQAERAVENWVDLGAGLTSCSRGQRTQQGRGRSHGGRTSSKRRVVSSRSGSKKRSTTSRSRKMGKLLEWKGRPCRQGGNARGPRSIRSWQKSEAKVDVITGERDTPKDVMEEAAGIFVQEEINEGEMEAAALNASSSERSGYEDDVYQEIGDEYDYLVDNNDGYQGVFSGKSENLLHGSHYNVVGKEDMDIDDNVDDDDDDNGKIDLDVEGYIIGGNSDARDRKEENAEQNMDLDGVGSTSSDYSD

SEQ ID NO: 7693 - protein, 268 aa, Glycine max
  misc_feature (1)..(268): Ceres Seq. ID no. 15174775
MKLPSKHASARKSYNAGAIETSHQAERAVENWVDLGAGLTSCSRGQRTQQGRGRSHGGRTSSKRRVVSSRSGSKKRSTTSRSRKMGKLLEWKGRPCRQGGNARGPRSIRSWQKSEAKVDVITGERDTPKDVMEEAAGIFVQEEINEGEMEAAALNASSSERSGYEDDVYQEIGDEYDYLVDNNDGYQGVFSGKSENLLHGSHYNVVGKEDMDIDDNVDDDDDDNGKIDLDVEGYIIGGNSDARDRKEENAEQNMDLDGVGSTSSDYSD

SEQ ID NO: 7694 - DNA, 1481 bp, Glycine max
  misc_feature (1)..(1481): Ceres Seq. ID no. 15174818
gtgaagtaaagcccaagaaagatctgcaagctgaagatattttgaagaagaaaatgtaccctaagagggaagagtttcaatggcgcccttcacctcttctgtgcaaacgctttgatcttattgatccttatatggggaagccaccacctgctccacggattaggagtaagatggataccttgatttttacatcagattcggtcaaaggtgccaaagtggacgagcctgttacttcaaagaaagacatctcacctttgcagctatctactaataaagacataaccataagtattactgaaaatgaaatggaaggggacgtggaagtggaaaatattgaaaggccagttgacctatacaaggctattttctccgatgattcagatgatgaaggccctagtaataggagagtggagaatcaagaaaagaaagctgaagtagctaatacagcactgagccgtttgattgctggtgattttctggaatcattgggcaaggaactaggaattgaggttcctcctgatatgccttacgctatgcaaaagtccaggaatgttgcacctcagaaagacatctttaatgaagatgcaagaaccgatatcctgaagagtgaaaacaacggtgtgatgtccttaaatcatgatttgccaaatgatcagcagcacattgctcatgagggtgggccatcaaaaggtgatgacaccattgatggaaatatgcttgagagcagtattaacaaaaccaagggaaccagcagccaagacaatgacagctgttcagaagaaaggagcaaaaagcaatctaatagggaaaaatacaatgagtacaggaaagataaaacccctgtaacacacggctgggattatagcagcagttctaagttagaagaggaaaggagcagaaaatgttccagacatcatcggcataagaagcgccatgcaggaagtcattcatctagtgacgatgacagaagagatagacacagttcaaggtcaaaagggagaaggaaaggttcttcccaagaaaaaagcaggagtgaaaaacactcaaaacatcacaagcacagaaagcatgaatctccaaatagatcctctcgttatagcaaagagaaagacaattcacattccagaaaagagaaaaggcggggagaatgagcgagagacttgtttcctttgattttgagaattttttggaattatgttgggggattgctgttgtattaaaagatgttagtaggttttgggtttgtgatactgaggtgcatcctatggatttcatttgctccgatcgaaactcaagcctcttgcataggttttcttcactggtttgaagtgacgctgcttaattcaatcctttcttggccgtaaagaaatggaataggcatacctagcgaaattgctggtacacccaacaattttatgaacctgggatttttaagttattagcatgatgttctaactaattaaattaatagtttaattatg

SEQ ID NO: 7695 - protein, 382 aa, Glycine max
  misc_feature (1)..(382): Ceres Seq. ID no. 15174819
EVKPKKDLQAEDILKKKMYPKREEFQWRPSPLLCKRFDLIDPYMGKPPPAPRIRSKMDTLIFTSDSVKGAKVDEPVTSKKDISPLQLSTNKDITISITENEMEGDVEVENIERPVDLYKAIFSDDSDDEGPSNRRVENQEKKAEVANTALSRLIAGDFLESLGKELGIEVPPDMPYAMQKSRNVAPQKDIFNEDARTDILKSENNGVMSLNHDLPNDQQHIAHEGGPSKGDDTIDGNMLESSINKTKGTSSQDNDSCSEERSKKQSNREKYNEYRKDKTPVTHGWDYSSSSKLEEERSRKCSRHHRHKKRHAGSHSSSDDDRRDRHSSRSKGRRKGSSQEKSRSEKHSKHHKHRKHESPNRSSRYSKEKDNSHSRKEKRRGE

SEQ ID NO: 7696 - protein, 365 aa, Glycine max
  misc_feature (1)..(365): Ceres Seq. ID no. 15174820
MYPKREEFQWRPSPLLCKRFDLIDPYMGKPPPAPRIRSKMDTLIFTSDSVKGAKVDEPVTSKKDISPLQLSTNKDITISITENEMEGDVEVENIERPVDLYKAIFSDDSDDEGPSNRRVENQEKKAEVANTALSRLIAGDFLESLGKELGIEVPPDMPYAMQKSRNVAPQKDIFNEDARTDILKSENNGVMSLNHDLPNDQQHIAHEGGPSKGDDTIDGNMLESSINKTKGTSSQDNDSCSEERSKKQSNREKYNEYRKDKTPVTHGWDYSSSSKLEEERSRKCSRHHRHKKRHAGSHSSSDDDRRDRHSSRSKGRRKGSSQEKSRSEKHSKHHKHRKHESPNRSSRYSKEKDNSHSRKEKRRGE

SEQ ID NO: 7697 - protein, 339 aa, Glycine max
  misc_feature (1)..(339): Ceres Seq. ID no. 15174821
MGKPPPAPRIRSKMDTLIFTSDSVKGAKVDEPVTSKKDISPLQLSTNKDITISITENEMEGDVEVENIERPVDLYKAIFSDDSDDEGPSNRRVENQEKKAEVANTALSRLIAGDFLESLGKELGIEVPPDMPYAMQKSRNVAPQKDIFNEDARTDILKSENNGVMSLNHDLPNDQQHIAHEGGPSKGDDTIDGNMLESSINKTKGTSSQDNDSCSEERSKKQSNREKYNEYRKDKTPVTHGWDYSSSSKLEEERSRKCSRHHRHKKRHAGSHSSSDDDRRDRHSSRSKGRRKGSSQEKSRSEKHSKHHKHRKHESPNRSSRYSKEKDNSHSRKEKRRGE

SEQ ID NO: 7698 - DNA, 1416 bp, Glycine max
  misc_feature (1)..(1416): Ceres Seq. ID no. 15174826
tagcttggggctctggtaccttgcaatggcttgaattctgaaagcttaacaatattacaatcagaggcaaaggtgtcattgatggtcaaggctctgtttggtggaataatgactctcctacttacaatcccacagaagtgatgctggaaagcaaaggaagacttcctagcacaaagccaacactaaaagtccttttgtatcgttgaacttcttaacatattgaaattgaaattctcatgtgctatgctattaattacttctttattataattaggcactcaggttctatggaagtgatggtgtaacagtcacatgcataacaattcagaatagtcaacaaacccatctcaagtttgactcttgcacaaatgttcaagtctcgggcattagtgtttcatcacctggtgatagccccaacactgatggaattcacttacaaaattctcaaaatgtggttatctatagtagcacacttgcttgtggttagaggggatatagcaagggcattaatgtacatggcagtctgttatgggttccaacaaccaaggggaatcccaggccttcacctctcggatgccccaaatgttgaaaagagggagattgaactcctttccactttattaaaatcgaatgaagttgatccaccatcgagggatgaaaaactgagaaatgaaaggatatacaaattttatcagcacaatcggaatccatttgtcgaccatccgaaagtttgtatttttgttctcaagacagtatccttgatgagatggatatgttatgagatgctctatgtatgaagtcctttttggtaccgaatccagaagttgttccattcaattgcctgggtagtgcaccctttttctccctttcatgctttaattgttgtggtttatctttttttggatgcagcaaatatagtgcatgaagttttggtcgtcatcatctgatggagttctctatttcttgatgatcttagattttgaacttatttctgattaagttgttagccagtaattttaatgaaggggaattattgtatcctttacaaaatatatgagtttatgattaaaaggagctaatgtatgcttaatgtgttcgatgcacgacgggaacgtgctgctgctctagcagaagggcaaccagctctagcattatgcagtagtggggacgttagagatttaaacatggaagacattaaatatgctcatcagtagggtgtgcttatgatatttttgtgattcaaatttgtcaccatgagtaggtcagggcaaccacgggatttgaagaaggtgttgcctaggatatttccgtgattcaaatttgtcaccatgaacagggcaaccacgggatttgaagaagttaattctggaaaagtatcagctacaaaacttcagagttgcaacaattcctaaagag

SEQ ID NO: 7699 - protein, 142 aa, Glycine max
  misc_feature (1)..(142): Ceres Seq. ID no. 15174827
MFKSRALVFHHLVIAPTLMEFTYKILKMWLSIVAHLLVVRGDIARALMYMAVCYGFQQPRGIPGLHLSDAPNVEKREIELLSTLLKSNEVDPPSRDEKLRNERIYKFYQHNRNPFVDHPKVCIFVLKTVSLMRWICYEMLYV

SEQ ID NO: 7700 - protein, 124 aa, Glycine max
  misc_feature (1)..(124): Ceres Seq. ID no. 15174828
MEFTYKILKMWLSIVAHLLVVRGDIARALMYMAVCYGFQQPRGIPGLHLSDAPNVEKREIELLSTLLKSNEVDPPSRDEKLRNERIYKFYQHNRNPFVDHPKVCIFVLKTVSLMRWICYEMLYV

SEQ ID NO: 7701 - protein, 115 aa, Glycine max
  misc_feature (1)..(115): Ceres Seq. ID no. 15174829
MWLSIVAHLLVVRGDIARALMYMAVCYGFQQPRGIPGLHLSDAPNVEKREIELLSTLLKSNEVDPPSRDEKLRNERIYKFYQHNRNPFVDHPKVCIFVLKTVSLMRWICYEMLYV

SEQ ID NO: 7702 - DNA, 1414 bp, Glycine max
  misc_feature (1)..(1414): Ceres Seq. ID no. 15174830
atcatcagatatctgaagctgctcaactgctttcagcatccagagggacctgccagacatctgctctgataattgatggaaaatcacttacttatgctctagaggataatatgaagaacatgtttctagagcttgcaagtcattgtgcgtctgttatctgctgtcgctcatcgccaaagcagaaggctctggttactagactggtcaaatatggaactggtaaaacaacattagctattggtgatggagctaatgatgttggaatgcttcaagaagcagatgtagggattggaatcagtggtgtcgaaggaatgcaggccgttatgtctagtgatattgcaattgcacagttccggtatttggaaagattacttcttgtacatggacattggtgttaccggaggatgtcatcaatgatatgctattttttctacaagaatatcacatttggcttcactctattcttgtatgaggtgtatgcatcattctccggacagcctgcatataatgactggtttttgtctctctatagtgtcttcttttcatcacttcctgtgattgcccttggggtccttgaccaggatgtatctgccaggtactgtctgaagtttcctattctataccaagaaggtgtgcaaaatgtcctctttagctggcgtctgatacttagctggatgcttaatggatttattagtgccacaatgatattcttcttctgcacaaaagcgattgagccacaggcctttaatgaggagggaagaactgctggaagggatatgctggccgtgacgatgtacacttgtgtggtctgggttgtgaacttgcagatggcgcttgctatacgttacttcaccttgataaaacatattttcatctggggttccattgcttactggtatcttttcctcatggtatatggagcaatgcctccaaacatttccacaaatgtttacaaagtcttcatcgaaactcttgccccgtctccttccttttggattgtgacattctttgtggcgatctcaacactcataccatacgtctcatgctcagtaattcagatgtggttcttccccatgtatcaccaaatggttcagtggataaggtatgagaggaagacaaatggtcctgaataaaatacagtgatgtgatgaggcaaaatatcattgaggccaactgagttcaacagcacattttgcagctgaggctaaccatagtagacagaattactaaccatagataatacatgtataattgtatattgacatgcaaaagggtctattaaagaattataactacttgactgaaaactttatagtatgtggcacgaatggaagttggaacggttgagaatgagatggagtgggtcctatctagtgtaacatactgagattttagttgaaaaatgtgatttgct

SEQ ID NO: 7703 - protein, 376 aa, Glycine max
  misc_feature (1)..(376): Ceres Seq. ID no. 15174831
HQISEAAQLLSASRGTCQTSALIIDGKSLTYALEDNMKNMFLELASHCASVICCRSSPKQKALVTRLVKYGTGKTTLAIGDGANDVGMLQEADVGIGISGVEGMQAVMSSDIAIAQFRYLERLLLVHGHWCYRRMSSMICYFFYKNITFGFTLFLYEVYASFSGQPAYNDWFLSLYSVFFSSLPVIALGVLDQDVSARYCLKFPILYQEGVQNVLFSWRLILSWMLNGFISATMIFFFCTKAIEPQAFNEEGRTAGRDMLAVTMYTCVVWVVNLQMALAIRYFTLIKHIFIWGSIAYWYLFLMVYGAMPPNISTNVYKVFIETLAPSPSFWIVTFFVAISTLIPYVSCSVIQMWFFPMYHQMVQWIRYERKTNGPE

SEQ ID NO: 7704 - protein, 340 aa, Glycine max
  misc_feature (1)..(340): Ceres Seq. ID no. 15174832
MKNMFLELASHCASVICCRSSPKQKALVTRLVKYGTGKTTLAIGDGANDVGMLQEADVGIGISGVEGMQAVMSSDIAIAQFRYLERLLLVHGHWCYRRMSSMICYFFYKNITFGFTLFLYEVYASFSGQPAYNDWFLSLYSVFFSSLPVIALGVLDQDVSARYCLKFPILYQEGVQNVLFSWRLILSWMLNGFISATMIFFFCTKAIEPQAFNEEGRTAGRDMLAVTMYTCVVWVVNLQMALAIRYFTLIKHIFIWGSIAYWYLFLMVYGAMPPNISTNVYKVFIETLAPSPSFWIVTFFVAISTLIPYVSCSVIQMWFFPMYHQMVQWIRYERKTNGPE

SEQ ID NO: 7705 - protein, 337 aa, Glycine max
  misc_feature (1)..(337): Ceres Seq. ID no. 15174833
MFLELASHCASVICCRSSPKQKALVTRLVKYGTGKTTLAIGDGANDVGMLQEADVGIGISGVEGMQAVMSSDIAIAQFRYLERLLLVHGHWCYRRMSSMICYFFYKNITFGFTLFLYEVYASFSGQPAYNDWFLSLYSVFFSSLPVIALGVLDQDVSARYCLKFPILYQEGVQNVLFSWRLILSWMLNGFISATMIFFFCTKAIEPQAFNEEGRTAGRDMLAVTMYTCVVWVVNLQMALAIRYFTLIKHIFIWGSIAYWYLFLMVYGAMPPNISTNVYKVFIETLAPSPSFWIVTFFVAISTLIPYVSCSVIQMWFFPMYHQMVQWIRYERKTNGPE

SEQ ID NO: 7706 - DNA, 1691 bp, Glycine max
  misc_feature (1)..(1691): Ceres Seq. ID no. 15174842
gtaatgctcacatctcagaccctttcatttatatgcatagaaatgtgacgaaaagaaaaaaacttgatctgtttcatgagttgagttaatacccactttgcctatgtttacttcaaactcttgttctgcattgtccactcttactctgatttgcctgctgcaatggttctttaggttgctttctcttacaatttttgtgggtaaactttagatctgtccattatgttgagatttagcttctttgagtaaaaagtaaaagcacattaccaaagttaatgagatgttttacctaattcaaatgagaagtgaatatactatctcattttacatatatgggatccccccccccccccgaaggaatatctagctatgggagacattgatccagcttttatacaatccacagaacaccgtcccatagcaaaggtggtggaagttagagagattccagtgatagacctttcagaaggtagaaaagaattactcatttcagaaattggcaaagcatgtgaggagtggggatttttccaagtaataaatcatggggtaccctttgagattagtagagaggttgagattgtctccaagaagttctttgagacgagcttagaggagaagaagaaagtgaaaagagatgaatttaatgcaatggggtaccatgatggggagcacaccaagaacgtaagagactggaaagaggtgtttgattaccttgttgaaaacactgcacaagtcccatcttcccatgagccaaatgatttggatttgaggactctcaccaaccaatggccccaaaactctcctcattttagggaaacattgcaagagtatgctcgagaagtggaaaagctagcttacaagttgttggagctgatttcacagagcttgggtttggctgctgacaaattccatggctgtttcaagaaccaactcagcatggtgcgactcaattactatcccgcatgccctttccctgacctggcacttggtgttggtcgccacaaggattccagtgctttaactgtgcttgcccaagatgatgttggaggattacaagttaagagaaaatcagatggagaatggattcctgttaaacctaccccaaatgcatttattatcaatgtgggggatatagttcaggtttggagcaatgacaagtacgagagcgtggagcacagggtggtggtgaatacagaaaaggaaaggttttcaattccattcttctttttccctgctcaccatgttatggtgaagcctgccgaggagctggtaaatgagcaaaatccagcaagatatagagaatacaagtatggtaagttctttgccaacagaaaccggagtgatttcaagaagcgtgatgtggagaatatccaaattcatcacttcaggatcttggatgaggcatttgggttggcatcctcaatatcatccatatctgagcataactagttctatctgctagttccatcatttcaaatccaaacaaaattgtgttggttcgattctgccaataaataataaaatattgagctttagttctagtatgtgttgttctctaaatttttattctatataaagagttcaagacatggactagtgtaagttgtagtgtgagtatctggtaacaccttagaagtcctggttgagtataaaatcactgtgaaatcaatacaaaagaagacattttatcc

SEQ ID NO: 7707 - protein, 359 aa, Glycine max
  misc_feature (1)..(359): Ceres Seq. ID no. 15174843
MGDIDPAFIQSTEHRPIAKVVEVREIPVIDLSEGRKELLISEIGKACEEWGFFQVINHGVPFEISREVEIVSKKFFETSLEEKKKVKRDEFNAMGYHDGEHTKNVRDWKEVFDYLVENTAQVPSSHEPNDLDLRTLTNQWPQNSPHFRETLQEYAREVEKLAYKLLELISQSLGLAADKFHGCFKNQLSMVRLNYYPACPFPDLALGVGRHKDSSALTVLAQDDVGGLQVKRKSDGEWIPVKPTPNAFIINVGDIVQVWSNDKYESVEHRVVVNTEKERFSIPFFFFPAHHVMVKPAEELVNEQNPARYREYKYGKFFANRNRSDFKKRDVENIQIHHFRILDEAFGLASSISSISEHN

SEQ ID NO: 7708 - protein, 266 aa, Glycine max
  misc_feature (1)..(266): Ceres Seq. ID no. 15174844
MGYHDGEHTKNVRDWKEVFDYLVENTAQVPSSHEPNDLDLRTLTNQWPQNSPHFRETLQEYAREVEKLAYKLLELISQSLGLAADKFHGCFKNQLSMVRLNYYPACPFPDLALGVGRHKDSSALTVLAQDDVGGLQVKRKSDGEWIPVKPTPNAFIINVGDIVQVWSNDKYESVEHRVVVNTEKERFSIPFFFFPAHHVMVKPAEELVNEQNPARYREYKYGKFFANRNRSDFKKRDVENIQIHHFRILDEAFGLASSISSISEHN

SEQ ID NO: 7709 - DNA, 1148 bp, Glycine max
  misc_feature (1)..(1148): Ceres Seq. ID no. 15174863
aagcaaagtagcatacattgggcaaactaggccagcttcgcctcccctcccacatcagccatggctgctcaagcagtagtagctccatccatgatgagtgatccagagagtactactgccaagagttcaacaacacaagaagaagaagatgtcctcccacccaaggatttcgtagccgcacttccagtaagagaggggtggtctgaaccactggttcaatacaagaactactggttcaggccgaggctcctggagcagatcctgctcgttcagcacgcctttgtgccccgcgccgacgacatcatcctcgccacgcagcccaaatgcggcaccacctggctcaaagccctcgccttcaccatcgccaaccgatcccgctacggcttcagcgaccacccgctcctcacacgccacccacagcatgtcgtgccgttcatcgagatcccgggcgccggcccgaaccacaccgacatccatacacttccgcctccgaggcttctcgccacgcacatgcccatgtcgttgctcccgccgggcacgagatcggtcggctgccgggtcgtgtacctgtgccgggaccccaaagacgccctcgtgtcaaggctgcacttcgagaacaaggcgttccagggcaccaatctgtccatggacaatgctttcagcatgttctgcgaggggttctcgccctatggccccttctgggatcactgccttgggtactggagggagagcatagcaaggccggacaacgtcctcttcttgaagtatgaagagatcaagtccgatcctgtgcccgtggtgaggaagctggcgaaatttctcggcgtcccgctgaccgaggaggaggagagctctggtgttgctcaagaggtggtgaagttgtgcagctttgagacgcttaccagcctgcaagtgaatcaggtcggcggcgttcgtcacggtgataaaattttcatgagtaactctgtgttttacagaaaaggagaagtaggggactgggcaaaccacatgagccacgtgatgggggaggagttggatcgcatcgtccaacaaaagcttgagggatctgggcttgtgttttgacttttgagttgttgttatctgttcatttctcctttcctcaccatgtacgcggtattgcacattac

SEQ ID NO: 7710 - protein, 340 aa, Glycine max
  misc_feature (1)..(340): Ceres Seq. ID no. 15174864
MAAQAVVAPSMMSDPESTTAKSSTTQEEEDVLPPKDFVAALPVREGWSEPLVQYKNYWFRPRLLEQILLVQHAFVPRADDIILATQPKCGTTWLKALAFTIANRSRYGFSDHPLLTRHPQHVVPFIEIPGAGPNHTDIHTLPPPRLLATHMPMSLLPPGTRSVGCRVVYLCRDPKDALVSRLHFENKAFQGTNLSMDNAFSMFCEGFSPYGPFWDHCLGYWRESIARPDNVLFLKYEEIKSDPVPVVRKLAKFLGVPLTEEEESSGVAQEVVKLCSFETLTSLQVNQVGGVRHGDKIFMSNSVFYRKGEVGDWANHMSHVMGEELDRIVQQKLEGSGLVF

SEQ ID NO: 7711 - protein, 330 aa, Glycine max
  misc_feature (1)..(330): Ceres Seq. ID no. 15174865
MMSDPESTTAKSSTTQEEEDVLPPKDFVAALPVREGWSEPLVQYKNYWFRPRLLEQILLVQHAFVPRADDIILATQPKCGTTWLKALAFTIANRSRYGFSDHPLLTRHPQHVVPFIEIPGAGPNHTDIHTLPPPRLLATHMPMSLLPPGTRSVGCRVVYLCRDPKDALVSRLHFENKAFQGTNLSMDNAFSMFCEGFSPYGPFWDHCLGYWRESIARPDNVLFLKYEEIKSDPVPVVRKLAKFLGVPLTEEEESSGVAQEVVKLCSFETLTSLQVNQVGGVRHGDKIFMSNSVFYRKGEVGDWANHMSHVMGEELDRIVQQKLEGSGLVF

SEQ ID NO: 7712 - protein, 329 aa, Glycine max
  misc_feature (1)..(329): Ceres Seq. ID no. 15174866
MSDPESTTAKSSTTQEEEDVLPPKDFVAALPVREGWSEPLVQYKNYWFRPRLLEQILLVQHAFVPRADDIILATQPKCGTTWLKALAFTIANRSRYGFSDHPLLTRHPQHVVPFIEIPGAGPNHTDIHTLPPPRLLATHMPMSLLPPGTRSVGCRVVYLCRDPKDALVSRLHFENKAFQGTNLSMDNAFSMFCEGFSPYGPFWDHCLGYWRESIARPDNVLFLKYEEIKSDPVPVVRKLAKFLGVPLTEEEESSGVAQEVVKLCSFETLTSLQVNQVGGVRHGDKIFMSNSVFYRKGEVGDWANHMSHVMGEELDRIVQQKLEGSGLVF

SEQ ID NO: 7713 - DNA, 567 bp, Glycine max
  misc_feature (1)..(567): Ceres Seq. ID no. 15175068
cactaatgtcatgggtaacattatggatgaggaagctgctgagaagcagagaaagaaggctgctttgcaagctattcaagcacagaaagagaaagccaatgaagctgctgagctgaataaggtcgttgagagtaataggagcagcgtggagaatactaatactaataatactcaaaataggtctatggtgtcttcttctactgtgaatccggcggtgtttcagggtgttttctgccgcgatcttacggtggtggggaacttgctttctcaggcggggtttaaccggtccatgccggtgaagtatgaagcgttgagctgttgattgaatcgaagttggtcggaaatggaaatgtttggtgggggggctgttggagatggtaccggcagagagaatctctggttcgttcgttcacttttgttgtacaaaattatgcaaagaaaaaatattttagactgccggaaaattttgtcaccttttcctttttatctttcattagccatctttttatttttatctctctatcagatgtacagattatcagtactgaatgaagactctacttttgc

SEQ ID NO: 7714 - protein, 106 aa, Glycine max
  misc_feature (1)..(106): Ceres Seq. ID no. 15175069
TNVMGNIMDEEAAEKQRKKAALQAIQAQKEKANEAAELNKVVESNRSSVENTNTNNTQNRSMVSSSTVNPAVFQGVFCRDLTVVGNLLSQAGFNRSMPVKYEALSC

SEQ ID NO: 7715 - protein, 103 aa, Glycine max
  misc_feature (1)..(103): Ceres Seq. ID no. 15175070
MGNIMDEEAAEKQRKKAALQAIQAQKEKANEAAELNKVVESNRSSVENTNTNNTQNRSMVSSSTVNPAVFQGVFCRDLTVVGNLLSQAGFNRSMPVKYEALSC

SEQ ID NO: 7716 - protein, 99 aa, Glycine max
  misc_feature (1)..(99): Ceres Seq. ID no. 15175071
MDEEAAEKQRKKAALQAIQAQKEKANEAAELNKVVESNRSSVENTNTNNTQNRSMVSSSTVNPAVFQGVFCRDLTVVGNLLSQAGFNRSMPVKYEALSC

SEQ ID NO: 7717 - DNA, 499 bp, Glycine max
  misc_feature (1)..(499): Ceres Seq. ID no. 15175119
ctccgcagcccatcacagctccgccgccgccgcacccgtccatctccccccttaaccgagcagtgtcccagtatccctccagtccccattatgcagaacgaggtgggtgatatggtggacctctatgtcccaaggaagtgctctgccaccaacaggatcataactgccaaggaccatgcctctgtccagatcaacatcgggcatgtggatgcgaatggactgtataatggcagtttcaccacgtttgccctctctggattcgtccgcgcccagggtgatgctgatggttctttggacaggctctggcagcagaagagggctgagatcaagcagtagatgagttccgcgtggcagattttgctaggatggatatttatgaaaccgctttaaaccttttttgaggaatctgttatgggtgtttatgctttgcctatgaatggtctatgataaaaccgtggactgcacgcagtgcttatggaaaccttacttgaagaatcat

SEQ ID NO: 7718 - protein, 111 aa, Glycine max
  misc_feature (1)..(111): Ceres Seq. ID no. 15175120
LRSPSQLRRRRTRPSPPLTEQCPSIPPVPIMQNEVGDMVDLYVPRKCSATNRIITAKDHASVQINIGHVDANGLYNGSFTTFALSGFVRAQGDADGSLDRLWQQKRAEIKQ

SEQ ID NO: 7719 - protein, 81 aa, Glycine max
  misc_feature (1)..(81): Ceres Seq. ID no. 15175121
MQNEVGDMVDLYVPRKCSATNRIITAKDHASVQINIGHVDANGLYNGSFTTFALSGFVRAQGDADGSLDRLWQQKRAEIKQ

SEQ ID NO: 7720 - protein, 74 aa, Glycine max
  misc_feature (1)..(74): Ceres Seq. ID no. 15175122
MVDLYVPRKCSATNRIITAKDHASVQINIGHVDANGLYNGSFTTFALSGFVRAQGDADGSLDRLWQQKRAEIKQ

SEQ ID NO: 7721 - DNA, 497 bp, Glycine max
  misc_feature (1)..(497): Ceres Seq. ID no. 15175125
gaacacaaacagcgcgagacagaggcacagagagaaaatggtttcggggtcagggatctgtgccaagagggtaattgtggacgcacgacaccacatgctggggaggctggcatcgatcgtggcgaaagaacttctgaatgggcagaagaagtgaatcgtgcggtttggttcatcaggggatgtcgtttcttatggttacaataaatgttggtttcttgcccttgtgtcttcgtttctaggtagcttgtttttcggacatagtttgaagtctccaccatcatctcgcaacttttgttcccagaattgggttcttgatcgacggtggcaagactccttttatcattcttttttaatgtgttgtgtttgtgagaacccctgattacatttttgttaagcgcagcgagttttagggctttgccgttgcgttgttggtttgctttttaaatgtcaactttatatttgtgttcaatttttgcttggtttgcttttaaaaaatc

SEQ ID NO: 7722 - protein, 67 aa, Glycine max
  misc_feature (1)..(67): Ceres Seq. ID no. 15175126
EHKQRETEAQRENGFGVRDLCQEGNCGRTTPHAGEAGIDRGERTSEWAEEVNRAVWFIRGCRFLWLQ

SEQ ID NO: 7723 - protein, 50 aa, Glycine max
  misc_feature (1)..(50): Ceres Seq. ID no. 15175127
NTNSARQRHREKMVSGSGICAKRVIVDARHHMLGRLASIVAKELLNGQKK

SEQ ID NO: 7724 - protein, 38 aa, Glycine max
  misc_feature (1)..(38): Ceres Seq. ID no. 15175128
MVSGSGICAKRVIVDARHHMLGRLASIVAKELLNGQKK

SEQ ID NO: 7725 - DNA, 508 bp, Glycine max
  misc_feature (1)..(508): Ceres Seq. ID no. 15175187
atactttcgtttccccttctcatcgaatcgaagcgccgcaccgtgtttcttctctgcctgaataacgcaaagaaaattgaagcatcctaagggttgtttctaagggataccgggttgggagagaagatgaaacaggtggtgggaacggtggtttcaaataagatgcagaaatcagtggtggtggcagtggatagactattctaccacaaattgtacgaccgatatgtcaagcgcacgtctaagtttatggctcatgatgagcacaatcattgtaacatcggtgaccgagttcggctggatccttctaggcctttggtggagacatattttgagctgtcataaattatgtaactgggcctgccattccactatgaagtaaaggttgatatacagatataataggattatcatgttgtaaggtttccagatgtatactggagtatgaactttctgtattgaaagaactaagtgattgttgaaggcaaaactcagttaatagtttgtgcat

SEQ ID NO: 7726 - protein, 71 aa, Glycine max
  misc_feature (1)..(71): Ceres Seq. ID no. 15175188
MKQVVGTVVSNKMQKSVVVAVDRLFYHKLYDRYVKRTSKFMAHDEHNHCNIGDRVRLDPSRPLVETYFELS

SEQ ID NO: 7727 - protein, 59 aa, Glycine max
  misc_feature (1)..(59): Ceres Seq. ID no. 15175189
MQKSVVVAVDRLFYHKLYDRYVKRTSKFMAHDEHNHCNIGDRVRLDPSRPLVETYFELS

SEQ ID NO: 7728 - protein, 51 aa, Glycine max
  misc_feature (1)..(51): Ceres Seq. ID no. 15175190
MSSARLSLWLMMSTIIVTSVTEFGWILLGLWWRHILSCHKLCNWACHSTMK

SEQ ID NO: 7729 - DNA, 750 bp, Glycine max
  misc_feature (1)..(750): Ceres Seq. ID no. 15175191
atttctctctctctctctctctcttctccgtcaatgccttctcctctcacagtcacagggtctgtttgttagggtttcctttttttccatttcccccctttctcccacactatctctttccgcattttcccaattaggatgtgtcattgagacagaagaagaagaagaaattggagggggtgtgtgatcgggtcctcaggtgaagatctgaggctgttggtgtctcttttcttttctccgagttccaaagatgagcgcttctaggttcatcaagtgcgtcactgttggggatggtgctgtgggcaaaacctgtttgcttatttcctacaccagcagtgacgcacttgatgaaccttgaagctcagctgagaaaaattgaggaacaactagagaaaaagaaagcagaatatggtgaaaaaatgaaaaacaaaatagccttagttcacaagcaagcagaggagaagagagcaatggttgaagccaagcgtggtgaagaaattctcaaggcagaggaaatagctgcaaaacaccgtgcaactggaacctctccaaagaaggcctttggatgcttttaaatttttattcctttttttgttgttgtgcttttgtgcctgatgtcatagcaataatgaaatttttgtctataatattttcatgtttgttttttaaatgttgtttatgtgtgtacgaaatggaaagggggacactatgaagtttgtgacatacagaacagcctctagatctttttgt

SEQ ID NO: 7730 - protein, 94 aa, Glycine max
  misc_feature (1)..(94): Ceres Seq. ID no. 15175192
MVLWAKPVCLFPTPAVTHLMNLEAQLRKIEEQLEKKKAEYGEKMKNKIALVHKQAEEKRAMVEAKRGEEILKAEEIAAKHRATGTSPKKAFGCF

SEQ ID NO: 7731 - protein, 75 aa, Glycine max
  misc_feature (1)..(75): Ceres Seq. ID no. 15175193
MNLEAQLRKIEEQLEKKKAEYGEKMKNKIALVHKQAEEKRAMVEAKRGEEILKAEEIAAKHRATGTSPKKAFGCF

SEQ ID NO: 7732 - protein, 61 aa, Glycine max
  misc_feature (1)..(61): Ceres Seq. ID no. 15175194
FLSLSLSLLRQCLLLSQSQGLFVRVSFFSISPLSPTLSLSAFSQLGCVIETEEEEEIGGGV

SEQ ID NO: 7733 - DNA, 727 bp, Glycine max
  misc_feature (1)..(727): Ceres Seq. ID no. 15175195
ccgcaagctcagaaagaattgatacatggccttggatgtggaggcaaccttcctcttggcgcggtaaagaaagtgatggattcctacaaggaggatgataaccaatcccagtcttctgaaatggaagggagagggatttcgggcaattcgtttggtaggggaaggaaggaaagtggaaaacaaattgcatctcatcagcagcaggagaaacaatctgatgattccgaggtggatggcaataatcaaagggggagagggagaggaagtggcaagggaagggggggaggaggaggaagaaacaatcattaccagaaggaccgagccatgaagaagcatttctctggaatgagtggttattaagcgcacaagagaatatttcttacatgctaagataccatacttcatctgctcggtaactatttggcttttgcccaaaaccttatatttttgcaaggttaaggttcaatgaggtgcatagatatagtgctacatagctcatacatagtggcattatcgaaagcacaatcagttcttgataccaacatcctctacaacagcaagaatagtataatgtctgtaaaggttgatttaaactccatcccgggatcacattttgtttagaaggatttgggtgtattttagcctacatttcctttcaagtagggcatatgaatagcttatacaggtacatatagctttcaaatacaataaatgggtaatggtgttc

SEQ ID NO: 7734 - protein, 119 aa, Glycine max
  misc_feature (1)..(119): Ceres Seq. ID no. 15175196
PQAQKELIHGLGCGGNLPLGAVKKVMDSYKEDDNQSQSSEMEGRGISGNSFGRGRKESGKQIASHQQQEKQSDDSEVDGNNQRGRGRGSGKGRGGGGGRNNHYQKDRAMKKHFSGMSGY

SEQ ID NO: 7735 - protein, 94 aa, Glycine max
  misc_feature (1)..(94): Ceres Seq. ID no. 15175197
MDSYKEDDNQSQSSEMEGRGISGNSFGRGRKESGKQIASHQQQEKQSDDSEVDGNNQRGRGRGSGKGRGGGGGRNNHYQKDRAMKKHFSGMSGY

SEQ ID NO: 7736 - protein, 79 aa, Glycine max
  misc_feature (1)..(79): Ceres Seq. ID no. 15175198
MEGRGISGNSFGRGRKESGKQIASHQQQEKQSDDSEVDGNNQRGRGRGSGKGRGGGGGRNNHYQKDRAMKKHFSGMSGY

SEQ ID NO: 7737 - DNA, 466 bp, Glycine max
  misc_feature (1)..(466): Ceres Seq. ID no. 15175315
aatgggtctgcatctaaaaatagtgcacctccaaaaggtacacctccattgtcatcaaaggccgggtcttccacaaccacttctggacctgtgagtgaggaagaaattagggctgttttaaggcagaagactccggtgaccactcaggatcttgtagctaaatttaaggcaagactaagatgttcagaggataagcaagcatttgctgagatccttaagagaatctctaagatacagaagactacaagtggagccagttatgttatcctgagagataagtgacaatgtagaccccaatgattggttttgacggaaaatgcagcattaagaagaaaataagttcatataccatgtatatttttcacattttgggcccaatctttgagatttatactattaagttaatgcccattaagtttacgacttttgctttaaaactcgttgaagatcagtttttttttggggg

SEQ ID NO: 7738 - protein, 93 aa, Glycine max
  misc_feature (1)..(93): Ceres Seq. ID no. 15175316
NGSASKNSAPPKGTPPLSSKAGSSTTTSGPVSEEEIRAVLRQKTPVTTQDLVAKFKARLRCSEDKQAFAEILKRISKIQKTTSGASYVILRDK

SEQ ID NO: 7739 - protein, 56 aa, Glycine max
  misc_feature (1)..(56): Ceres Seq. ID no. 15175317
MIGFDGKCSIKKKISSYTMYIFHILGPIFEIYTIKLMPIKFTTFALKLVEDQFFFG

SEQ ID NO: 7740 - DNA, 570 bp, Glycine max
  misc_feature (1)..(570): Ceres Seq. ID no. 15175318
atatctctagctggtaatgctgccacacaagctagtctactccttggtatgttcccatctgagggctataccttggtggaggacaatggcattcttaaacttggttggaaggacctttgcttgctcactgcttcagcttggagaccacccttccatagtgccattacccatcacaactaggcttttgtgttggcctttttcatcatcatctcattattctaatcatgtgtagcatccaccccctctttgttacttaatttagagagagattgttaaggtgatcccatagcacgtgatttttcttgcctaatgtgtaccacttcagcagtaacatattaaaaagaagatatagttaaaaataggaaacagtgatatgaccaaatggttgaaggggtaccccacttattgacataatgcaagaaagttctcttgctcggggagcacttgggagtttttctaatagtattttattaagagaacttataaggatgttacttttatattctgatttttaatggttacccttaaaaaggatgttactttatattctgatttttaatggttaccctt

SEQ ID NO: 7741 - protein, 71 aa, Glycine max
  misc_feature (1)..(71): Ceres Seq. ID no. 15175319
MLPHKLVYSLVCSHLRAIPWWRTMAFLNLVGRTFACSLLQLGDHPSIVPLPITTRLLCWPFSSSSHYSNHV

SEQ ID NO: 7742 - protein, 59 aa, Glycine max
  misc_feature (1)..(59): Ceres Seq. ID no. 15175320
ISLAGNAATQASLLLGMFPSEGYTLVEDNGILKLGWKDLCLLTASAWRPPFHSAITHHN

SEQ ID NO: 7743 - protein, 48 aa, Glycine max
  misc_feature (1)..(48): Ceres Seq. ID no. 15175321
MAFLNLVGRTFACSLLQLGDHPSIVPLPITTRLLCWPFSSSSHYSNHV

SEQ ID NO: 7744 - DNA, 664 bp, Glycine max
  misc_feature (1)..(664): Ceres Seq. ID no. 15175362
gtacttgcatcacatgggaaattgtctgaggctctagttatttatgaggaaatcaagcaatctggacacaagctggaggcaaaagaagttacgagtctcattgagcacactcattccgagggagagttggataggttgcttctgctacttaaggaattggatgatacagactattggaatgatgcttgctgcagaatcatcttgtattgcatttggaataagcatttaagttctgctgttgaattgtgtaatctgctcaaggataagttccaaagtgacgagcaagttatggaatttctctttgataaggtattttctctgattgaagagtcagaagagtccagtcatttgcacacttgctccgagttgctttcggaaatcaaggataagcttgggcttttgccttcacacaaacgtcatgattctctgctatgtgcttgtgctaatgccactgatttgcatgattctgaatgagggtccttaataagagggctttgtatagtgcgtttcatcaagtttgctctacaacttccccagccaacaattttttgatgaatcatacttaccaaattcccatataatcatttctgcttccacaacaatttcagatttgccctaacaatgttgctaacaaggaaaaatgcaatatgatctttactctgat

SEQ ID NO: 7745 - protein, 157 aa, Glycine max
  misc_feature (1)..(157): Ceres Seq. ID no. 15175363
VLASHGKLSEALVIYEEIKQSGHKLEAKEVTSLIEHTHSEGELDRLLLLLKELDDTDYWNDACCRIILYCIWNKHLSSAVELCNLLKDKFQSDEQVMEFLFDKVFSLIEESEESSHLHTCSELLSEIKDKLGLLPSHKRHDSLLCACANATDLHDSE

SEQ ID NO: 7746 - DNA, 650 bp, Glycine max
  misc_feature (1)..(650): Ceres Seq. ID no. 15175368
atatttggagagagagagagagagagagaataaaaatggaaggaggatcaggtggcgagaggaacagtagtgtataccgagagtgcttgagaaatcatgcagccagcctaggaagctacgccacggacgggtgcgccgagtacacggtggacggcgcggggggactacaatgcgccgcgtgcgggtgccaccgcaacttccaccggaaagtgaagtacctggcggcggctgaaagccctcccacggagtatgggggcagcaacagcaagaagcggttcaggtctaagttcacggaagatcaaaaggagaagatgctagggtttgcggagaagcttggttggaagcttcagaggagggatcttgatgatgagatagagaggttttgccgaagcgttggggtgagtaggcaagtcttcaaagtttggatgcataaccataagaactcttcctcctcctcttctaccgccgccaatgtctcctccctcacccagtaattcactctctcctcttgtaattgtttctcattaattatcactttcatctttttagattgactagtttacttcaatattgtaagaagtcaatgaaatcacttaattgtcaggattatgtatgctatcactatctatttataacctataaagtttccg

SEQ ID NO: 7747 - protein, 163 aa, Glycine max
  misc_feature (1)..(163): Ceres Seq. ID no. 15175369
IWRERERERIKMEGGSGGERNSSVYRECLRNHAASLGSYATDGCAEYTVDGAGGLQCAACGCHRNFHRKVKYLAAAESPPTEYGGSNSKKRFRSKFTEDQKEKMLGFAEKLGWKLQRRDLDDEIERFCRSVGVSRQVFKVWMHNHKNSSSSSSTAANVSSLTQ

SEQ ID NO: 7748 - protein, 152 aa, Glycine max
  misc_feature (1)..(152): Ceres Seq. ID no. 15175370
MEGGSGGERNSSVYRECLRNHAASLGSYATDGCAEYTVDGAGGLQCAACGCHRNFHRKVKYLAAAESPPTEYGGSNSKKRFRSKFTEDQKEKMLGFAEKLGWKLQRRDLDDEIERFCRSVGVSRQVFKVWMHNHKNSSSSSSTAANVSSLTQ

SEQ ID NO: 7749 - DNA, 548 bp, Glycine max
  misc_feature (1)..(548): Ceres Seq. ID no. 15175396
gaaattagtattcaccaggcattgcttttgggacaagatgcaacttctccttatgggctttacaatggtcacagatgtcacatgtgtttgagatctgattcgctttacaaagtgatggagcggttggctaatcctggtattgttttctttactaagaagctcgttctactttcttagaagaaaaggaaagggttaaaaatgacattagtttctcggtcaccaatttcctccttcattttacaggggttaggagacttgtggctgtggaggctggcagcaagcgtgtggaagggattatttctttaagcgatgtgttcagattcttgttaggctagttgggatatattggccggcttatatgaaggaaatagctgtggttggcattggaaggaactcgtttgttctatttgcactgcttttctgagctatccccagtcttccttggtgctgttgccctcgtatactgttttaggatagaaactggagagaaaaatctgtaaattgaggatcgtttttctccgttaaacatcttaacgaaattgttttag

SEQ ID NO: 7750 - protein, 58 aa, Glycine max
  misc_feature (1)..(58): Ceres Seq. ID no. 15175397
EISIHQALLLGQDATSPYGLYNGHRCHMCLRSDSLYKVMERLANPGIVFFTKKLVLLS

SEQ ID NO: 7751 - protein, 35 aa, Glycine max
  misc_feature (1)..(35): Ceres Seq. ID no. 15175398
MTLVSRSPISSFILQGLGDLWLWRLAASVWKGLFL

SEQ ID NO: 7752 - protein, 31 aa, Glycine max
  misc_feature (1)..(31): Ceres Seq. ID no. 15175399
MCLRSDSLYKVMERLANPGIVFFTKKLVLLS

SEQ ID NO: 7753 - DNA, 1536 bp, Glycine max
  misc_feature (1)..(1536): Ceres Seq. ID no. 15175476
aaattaaggcagagaatgcttcattgccaattactgcagagacatcctctggaacttcagggattcctgcccacgaatgtaaatcaggaccttgttctaagcggcataacaggaaagaaatagcagcacttagacagagattccttcatatggagaaaacttacaggtcttgtggaaaaggaagttttaaatcaggaggtaagtctggaacattacctgcaaaggatacaatatctacttctcggatggtgaatgcaaacacttcaacacctggcaatatgtccaaaccaaaatctgagctaagcttttctgtcaagattcttgattactgtgctgatattccttttgatgaggctttgggtaagtatgtcccacgggatgagaaggataggctaattttgaagttaataactcgagtgcaagaattgcagaatgagctacatggctggaacaactggacaaatcagaaggttatgcaggttaccaataggcttggcaaactacaggctgagtttaaaactctgaggaaggagaagcaagatgctgaactgttgaaaaaagataagaaaattgtggaggagaatgctgtgaagaggatatctgaaatggagaatgccatggaaaatactaaaaagcaaattgagagtgctgcttctgctactcttgtgttagaggcagaaaattccttgttaaagaaggagttggatgctgctaagttgtgggttgtaaagtcaatgacaagccatcaacaagcactggagagagagcagatggctcttaaacaggcccagatattggaaagccagaacagtttgcttcgagatgagcttgagagagagaagcacaaattatttaatctgcaacaggagctacacaaagagacaaatcttcaagccaaggttgagggtagattggctaaagagagagctgcaaaagaaaagctccttgcacaggctgcatccattaaaaaggagagagagcaacttgaacagcacatgaaatctgaggaggatatggctagaaagaaggcagctactgatctgcagaaatatgtggaagatattggaaagctagagaaggagttggttgacttgaaactaaaatctgattctgaaaaaatagcagcacttcgtaggtgtgttgatgtaaggaatgatagtttctcaagaaccaagagtgctccaaacatgaagggaaacaagaaatctgatacgtcacaaacattggtgagctaccaagacaaattggctgctggaagtttgaggcgtgagcaggagtgtgtcatgtgcctatcagaggagatgtcagtagtttttctgccatgtgcacatcaggttgtgtgtcctgaatgcaatgagctccatgagaaacaagggatgaaggaatgcccttcatgtagggccccaatccaacgtaggattcatgctagatttgctcggcattagagagtatagactttcctgaatgaatgggaatcgtgaagaaatacattatgtccccccccccctccccccccaaaaaaaaacaataggaaac

SEQ ID NO: 7754 - protein, 480 aa, Glycine max
  misc_feature (1)..(480): Ceres Seq. ID no. 15175477
IKAENASLPITAETSSGTSGIPAHECKSGPCSKRHNRKEIAALRQRFLHMEKTYRSCGKGSFKSGGKSGTLPAKDTISTSRMVNANTSTPGNMSKPKSELSFSVKILDYCADIPFDEALGKYVPRDEKDRLILKLITRVQELQNELHGWNNWTNQKVMQVTNRLGKLQAEFKTLRKEKQDAELLKKDKKIVEENAVKRISEMENAMENTKKQIESAASATLVLEAENSLLKKELDAAKLWVVKSMTSHQQALEREQMALKQAQILESQNSLLRDELEREKHKLFNLQQELHKETNLQAKVEGRLAKERAAKEKLLAQAASIKKEREQLEQHMKSEEDMARKKAATDLQKYVEDIGKLEKELVDLKLKSDSEKIAALRRCVDVRNDSFSRTKSAPNMKGNKKSDTSQTLVSYQDKLAAGSLRREQECVMCLSEEMSVVFLPCAHQVVCPECNELHEKQGMKECPSCRAPIQRRIHARFARH

SEQ ID NO: 7755 - protein, 431 aa, Glycine max
  misc_feature (1)..(431): Ceres Seq. ID no. 15175478
MEKTYRSCGKGSFKSGGKSGTLPAKDTISTSRMVNANTSTPGNMSKPKSELSFSVKILDYCADIPFDEALGKYVPRDEKDRLILKLITRVQELQNELHGWNNWTNQKVMQVTNRLGKLQAEFKTLRKEKQDAELLKKDKKIVEENAVKRISEMENAMENTKKQIESAASATLVLEAENSLLKKELDAAKLWVVKSMTSHQQALEREQMALKQAQILESQNSLLRDELEREKHKLFNLQQELHKETNLQAKVEGRLAKERAAKEKLLAQAASIKKEREQLEQHMKSEEDMARKKAATDLQKYVEDIGKLEKELVDLKLKSDSEKIAALRRCVDVRNDSFSRTKSAPNMKGNKKSDTSQTLVSYQDKLAAGSLRREQECVMCLSEEMSVVFLPCAHQVVCPECNELHEKQGMKECPSCRAPIQRRIHARFARH

SEQ ID NO: 7756 - protein, 399 aa, Glycine max
  misc_feature (1)..(399): Ceres Seq. ID no. 15175479
MVNANTSTPGNMSKPKSELSFSVKILDYCADIPFDEALGKYVPRDEKDRLILKLITRVQELQNELHGWNNWTNQKVMQVTNRLGKLQAEFKTLRKEKQDAELLKKDKKIVEENAVKRISEMENAMENTKKQIESAASATLVLEAENSLLKKELDAAKLWVVKSMTSHQQALEREQMALKQAQILESQNSLLRDELEREKHKLFNLQQELHKETNLQAKVEGRLAKERAAKEKLLAQAASIKKEREQLEQHMKSEEDMARKKAATDLQKYVEDIGKLEKELVDLKLKSDSEKIAALRRCVDVRNDSFSRTKSAPNMKGNKKSDTSQTLVSYQDKLAAGSLRREQECVMCLSEEMSVVFLPCAHQVVCPECNELHEKQGMKECPSCRAPIQRRIHARFARH

SEQ ID NO: 7757 - DNA, 1238 bp, Glycine max
  misc_feature (1)..(1238): Ceres Seq. ID no. 15175484
atgcttgattcagcagagcaaaagtatgtgtctgtttttaagcctattgatgaagaaccaatggctgtgaataaccctcgaggtcttcctttgtcattagatggtgaaggcttaaaaaagggtacaagagttggtcaaggagcattcagggaagtagcagcctatgttctagaccatccattgagtgggtgccagcgccactcattatttggtgatgggaagggctttgctggtgttcccccaacattgatggttaagtgcttgcataaagcattcaactatccccgagaattgactcctaagattggctccttgcaaatgttcacagaaaatagtggaagttgtgaagatatgggcccgggggctttcccagtaaaggaggtacataaaattactgttttggacataagactggcaaatgcagataggcatgctgggaatattttgatcagcaaagaggaggacaacaaccagtctgttctgattccaattgatcatggatactgcttgcccacaagttttgaagattgcacctttgaatggctttactggcctcaagctcgccagccatactcctcagaaactattgactacataaagtcactggatgctgaagaagacattgcccttttgaagtttcatggatgggatctgccagttgaatgtgcccgcactcttaggatctcaaccatgcttttgaagaaaggggtagagagaggattgaccccttttgccattggaagcctgatgtgcagggaatccttgaacaaggaatctgtgatagaagaagtagtacaagcagcactggattctgttcttcctggcacaagtgaagctacattgctggattctgtttcccaaatcctggacttgcacctcgatgagattgtcagatctcatttataatagcattgaattctgcaatggtagctggtatatacatgtcagtgtgtacatatgttcacgtacatatgtatagctcaaataattggatttttagttcttgacaaaggaagtctatttctttggttggaatgtcaaaccattcttaactccctaggttttactttttggcagtttccttccgttaacaaattctttcaagtctgctgttgatatctttattaaatttgaattctagggatagtagacatctctatttgaattgtagtttaacattcttggcctgtagtgagtgttgtctgtttcaactaaggctgtgcttgtttaggagtgtg

SEQ ID NO: 7758 - protein, 301 aa, Glycine max
  misc_feature (1)..(301): Ceres Seq. ID no. 15175485
MLDSAEQKYVSVFKPIDEEPMAVNNPRGLPLSLDGEGLKKGTRVGQGAFREVAAYVLDHPLSGCQRHSLFGDGKGFAGVPPTLMVKCLHKAFNYPRELTPKIGSLQMFTENSGSCEDMGPGAFPVKEVHKITVLDIRLANADRHAGNILISKEEDNNQSVLIPIDHGYCLPTSFEDCTFEWLYWPQARQPYSSETIDYIKSLDAEEDIALLKFHGWDLPVECARTLRISTMLLKKGVERGLTPFAIGSLMCRESLNKESVIEEVVQAALDSVLPGTSEATLLDSVSQILDLHLDEIVRSHL

SEQ ID NO: 7759 - protein, 281 aa, Glycine max
  misc_feature (1)..(281): Ceres Seq. ID no. 15175486
MAVNNPRGLPLSLDGEGLKKGTRVGQGAFREVAAYVLDHPLSGCQRHSLFGDGKGFAGVPPTLMVKCLHKAFNYPRELTPKIGSLQMFTENSGSCEDMGPGAFPVKEVHKITVLDIRLANADRHAGNILISKEEDNNQSVLIPIDHGYCLPTSFEDCTFEWLYWPQARQPYSSETIDYIKSLDAEEDIALLKFHGWDLPVECARTLRISTMLLKKGVERGLTPFAIGSLMCRESLNKESVIEEVVQAALDSVLPGTSEATLLDSVSQILDLHLDEIVRSHL

SEQ ID NO: 7760 - protein, 218 aa, Glycine max
  misc_feature (1)..(218): Ceres Seq. ID no. 15175487
MVKCLHKAFNYPRELTPKIGSLQMFTENSGSCEDMGPGAFPVKEVHKITVLDIRLANADRHAGNILISKEEDNNQSVLIPIDHGYCLPTSFEDCTFEWLYWPQARQPYSSETIDYIKSLDAEEDIALLKFHGWDLPVECARTLRISTMLLKKGVERGLTPFAIGSLMCRESLNKESVIEEVVQAALDSVLPGTSEATLLDSVSQILDLHLDEIVRSHL

SEQ ID NO: 7761 - DNA, 1339 bp, Glycine max
  misc_feature (1)..(1339): Ceres Seq. ID no. 15175488
cgggacatcaagctaagaaagggaaagagaaagatcacagaaagagaattcatctttctttgcgaacagctaaaaacctcaaagggaaagaaggcatgaatagaggtgttcttcagagctcaccagtgcaacaaatgatgactggaaaccctaactggtggaacatcaatatcaatagcatggctccacaagctcctcctttcttgtccactcctaacaactttcctatcccttgtgctcccacttctcttccctttccttcttggcatgagaatcaagatcttccagagtcatggagccagctacttatgagtggagtggtggatgaacaaggtaaggctgggatgggtcagtttattcagactaagaagttggagagctgggaggatcaaatgctaggtcaggctccaaacgcttctcttgttgatgttaaacaagaaaacttggttaacagctatgcatatgggcatggaagcgaagaacttcagtcatcaaagccatcttggtctccaaaatcatgtgtgacaacaagtttcagtagcaacatgttagatttctctaacaataagacagatgcaaggcatccaccaccagatctatcttctgagtgcaacagcactgcagctggtggggcactcaagaaagctagggttcaaccctctgctacaacgcagactacgttcaaggttaggaaggaaaagctaggtgagagaattacggcccttcatcagctcgtttccccatttgggaagactgacacggcctctgtcttgttagaagctattgggtatatcagattccttcagagtcaaattgaggctcttagcttaccatacttgagcggtggatcagggaacacgaggcagcaacattctgttcaaggagagaagagatgtatattccctgaagaccccggtcagctgctggatgaaaactgcttgaagaggaaagcagctggagagccggatactcaagaagaaccaaagaaggggctgaggagtagagggttgtgtctggtgccagtgtcatgcacactgcaagttggaagtgacaatggagcagattattgggctccagccctaggagggggctttcgttaggagttttttacaaatggggcagcatatacatataaatatggtagcatgcatagaggtaaattcatggaaatgatataacatcatgagcagtcaatctgctaaaaaaatctaaggctgattgctcatgatgctatacttcattattcctgaataaaatgtgtgctagctagccgtgacagtatttgcaagcccttgaagacttcataattcatggaaatcaagcttaattagttttcttt

SEQ ID NO: 7762 - protein, 365 aa, Glycine max
  misc_feature (1)..(365): Ceres Seq. ID no. 15175489
GHQAKKGKEKDHRKRIHLSLRTAKNLKGKEGMNRGVLQSSPVQQMMTGNPNWWNININSMAPQAPPFLSTPNNFPIPCAPTSLPFPSWHENQDLPESWSQLLMSGVVDEQGKAGMGQFIQTKKLESWEDQMLGQAPNASLVDVKQENLVNSYAYGHGSEELQSSKPSWSPKSCVTTSFSSNMLDFSNNKTDARHPPPDLSSECNSTAAGGALKKARVQPSATTQTTFKVRKEKLGERITALHQLVSPFGKTDTASVLLEAIGYIRFLQSQIEALSLPYLSGGSGNTRQQHSVQGEKRCIFPEDPGQLLDENCLKRKAAGEPDTQEEPKKGLRSRGLCLVPVSCTLQVGSDNGADYWAPALGGGFR

SEQ ID NO: 7763 - protein, 334 aa, Glycine max
  misc_feature (1)..(334): Ceres Seq. ID no. 15175490
MNRGVLQSSPVQQMMTGNPNWWNININSMAPQAPPFLSTPNNFPIPCAPTSLPFPSWHENQDLPESWSQLLMSGVVDEQGKAGMGQFIQTKKLESWEDQMLGQAPNASLVDVKQENLVNSYAYGHGSEELQSSKPSWSPKSCVTTSFSSNMLDFSNNKTDARHPPPDLSSECNSTAAGGALKKARVQPSATTQTTFKVRKEKLGERITALHQLVSPFGKTDTASVLLEAIGYIRFLQSQIEALSLPYLSGGSGNTRQQHSVQGEKRCIFPEDPGQLLDENCLKRKAAGEPDTQEEPKKGLRSRGLCLVPVSCTLQVGSDNGADYWAPALGGGFR

SEQ ID NO: 7764 - protein, 321 aa, Glycine max
  misc_feature (1)..(321): Ceres Seq. ID no. 15175491
MMTGNPNWWNININSMAPQAPPFLSTPNNFPIPCAPTSLPFPSWHENQDLPESWSQLLMSGVVDEQGKAGMGQFIQTKKLESWEDQMLGQAPNASLVDVKQENLVNSYAYGHGSEELQSSKPSWSPKSCVTTSFSSNMLDFSNNKTDARHPPPDLSSECNSTAAGGALKKARVQPSATTQTTFKVRKEKLGERITALHQLVSPFGKTDTASVLLEAIGYIRFLQSQIEALSLPYLSGGSGNTRQQHSVQGEKRCIFPEDPGQLLDENCLKRKAAGEPDTQEEPKKGLRSRGLCLVPVSCTLQVGSDNGADYWAPALGGGFR

SEQ ID NO: 7765 - DNA, 1565 bp, Glycine max
  misc_feature (1)..(1565): Ceres Seq. ID no. 15175492
gtagcaccgcgattcgccatagccactgcccagcgagcggcccagtggtagctaagctgagcgagtgagtgtgcactgcgtgtgacacgacgaccggttggcccatcactagcgcgctagctagacgtacgcacgcacgtgtctacgctacctatctctctctccgtcgaccgaccatgccggccttcgccgagccagccattgatccgccgctggcggacagctaccgcgcgctgctgcgcagcgaccagctccgccgcggcggcattgcgccggcgccggcgtcggagagcgtggccgtgcttgagcgcgccctgccgatgatcgacttgaagcgcctgacgagcggcgacgcgggggagaggaaggcgtgcgcggacgccatggcgaccgcggcgtcggagtggggcttcttccaggtgatcaaccacgacgtggggcgggagctcctggaggagatgcggcgcgagcaggcgcggctgttccgcctgccgttcgacaccaaggagaaggccgggctcctcaacggctcgtaccggtggggcaacccgacggctacgtcgctccggcacctctcgtggtcggaggccttccacgttccgctcgccagcatctcccgggaggactgcgactacgggaagctcagctccttgaggggcgtgatgcaggaggtggcggacgcgatgtcgcgtgtggcggacacggtggcggcggtgctggcggaggacctcgggcacgatgcggggggcggcgagccggcgttcccggcggggtgcgacgggacgacgtgcttcctgcggctcaacaggtacccggcgtgcccgttcgcgccggacacgttcgggctggtgccgcacacggacagcgacttcctcaccatcctctgccaggaccaggtcgggggcctgcagctcatgaaggactcccgctgggtcgccgtgaaaccccgctccgacgcgctcatcgtcaacatcggcgatctgtttcaggcgtggagcaacaacaggtacaagagcgtggagcacaaagtggtggccaacgccaaggcggagcgcctctccgtcgcctacttcctgtgcccgtcgtacgactcgccggtcggcacatgcggcgagccgtccccgtacaggccgttcaccttcggggagtaccggaggaaggtgcaggacgatgtcaagagaaccggcaaaaagattgggctccccaactttctcaaacagtctcccgttgacgccatgaatcacggcctctgtttttaacacgtactcaaatctcaccgtagaagcgtcgtgcgcccgcagtatggaatcggagataatttcccttttttttagttctttctatttctattctagttttgtttcgccccttttgggcctaggtgataggtactataccacgagataatgatggaggaatcaatggaatatataacatgatgctatggtgatacgtctgcccatctgctcccgtttgtttgttcctcgttccttcttttcgtcttgtcgtgcgtactacgaggaacaaacgtggacggacgagcacctaagcttcaacgttgtttc

SEQ ID NO: 7766 - protein, 360 aa, Glycine max
  misc_feature (1)..(360): Ceres Seq. ID no. 15175493
MPAFAEPAIDPPLADSYRALLRSDQLRRGGIAPAPASESVAVLERALPMIDLKRLTSGDAGERKACADAMATAASEWGFFQVINHDVGRELLEEMRREQARLFRLPFDTKEKAGLLNGSYRWGNPTATSLRHLSWSEAFHVPLASISREDCDYGKLSSLRGVMQEVADAMSRVADTVAAVLAEDLGHDAGGGEPAFPAGCDGTTCFLRLNRYPACPFAPDTFGLVPHTDSDFLTILCQDQVGGLQLMKDSRWVAVKPRSDALIVNIGDLFQAWSNNRYKSVEHKVVANAKAERLSVAYFLCPSYDSPVGTCGEPSPYRPFTFGEYRRKVQDDVKRTGKKIGLPNFLKQSPVDAMNHGLCF

SEQ ID NO: 7767 - protein, 312 aa, Glycine max
  misc_feature (1)..(312): Ceres Seq. ID no. 15175494
MIDLKRLTSGDAGERKACADAMATAASEWGFFQVINHDVGRELLEEMRREQARLFRLPFDTKEKAGLLNGSYRWGNPTATSLRHLSWSEAFHVPLASISREDCDYGKLSSLRGVMQEVADAMSRVADTVAAVLAEDLGHDAGGGEPAFPAGCDGTTCFLRLNRYPACPFAPDTFGLVPHTDSDFLTILCQDQVGGLQLMKDSRWVAVKPRSDALIVNIGDLFQAWSNNRYKSVEHKVVANAKAERLSVAYFLCPSYDSPVGTCGEPSPYRPFTFGEYRRKVQDDVKRTGKKIGLPNFLKQSPVDAMNHGLCF

SEQ ID NO: 7768 - protein, 291 aa, Glycine max
  misc_feature (1)..(291): Ceres Seq. ID no. 15175495
MATAASEWGFFQVINHDVGRELLEEMRREQARLFRLPFDTKEKAGLLNGSYRWGNPTATSLRHLSWSEAFHVPLASISREDCDYGKLSSLRGVMQEVADAMSRVADTVAAVLAEDLGHDAGGGEPAFPAGCDGTTCFLRLNRYPACPFAPDTFGLVPHTDSDFLTILCQDQVGGLQLMKDSRWVAVKPRSDALIVNIGDLFQAWSNNRYKSVEHKVVANAKAERLSVAYFLCPSYDSPVGTCGEPSPYRPFTFGEYRRKVQDDVKRTGKKIGLPNFLKQSPVDAMNHGLCF

SEQ ID NO: 7769 - DNA, 1479 bp, Glycine max
  misc_feature (1)..(1479): Ceres Seq. ID no. 15175496
gatcctagctctctcctcaggccttttctttctctctctctctcgcgagctcctcgctctctagattcttttctaggatgggtactgccagcggtgccgtggccctgctgctggtggtgctaggagccagcgtctccagctccagtgggcagctgcaggtggggttctactccaagtcgtgccccagcgccgagtccaccgtcgcgtccgtcgtccggggaaccgccgccgccgactccaccatcctccccgccctcctccggctccagttccacgactgcttcgtcagggggtgcgacgcgtcggtgctgatcaagggcgggaacaacaacgcggaggtggacaacaacaagcaccaggggctccgcgggatggacgtcatcgaaaacgccaaggcgcagctcgagtccgagtgccccggcgtcgtctcgtgcgccgacatcgtcgtcctcgccgcgcgcgacgccgtcgcattcaccggcgggccgtcgttcgacgtgccgacggggcgccgcgacgggaaggtgtccaacgtgcgggacggcgacgtgctgccggacgtgcgcgactccgcccaggtgctccgctccaagttccgcgccagcggcctcgacgacaaggacctcgtcctcctcagctcggcgcacacggtgggcacaacggcgtgcttcttcatccaggaccggctctacaagttcccgctcccgggcggcgggctcgggtcagatccgtcgatcccggacggcttcctgtcggagctcaagtcccggtgcgcgccgggggactccaactcgcgcgtctccctggaccgcggcagcgagcgcgtgttcgacacctccatcctccgcaacatccgcaacggcttcgcggtgatcgcctccgacgccgcgctctacaacgacaccagcaccgtcgacgtggtggactcctactcgggcctcctcagcaccatcttcgggccctacttccggcaggacttcgcggactccatggtgaagatgggcagcatcggcgtgctcaccggcgccagcggggaggtcaggaaggtctgctccaagttcaactgagagagacccatccatggatccagattccattcattgcgctgccggccggagtactggtactggttggctagctggagatgaaaagcactagctagcccatgcggacatgcatctcgtgggtgcatggcccggtctcgtggcgctttcatggcttttcttcttcttcaatttattgtgtacatgttattgaaaagagagaggggaaatttagtggattcatgtgattctggcgccaaggtctagtacgtacggccaaggatctgtgcagttttctcttttgcagcggctggaagcgagattaaattcatatagctagggtatatataagatgtgcttctgtatgcttgtatgtacactacacacaccatatgtgcaattaagtggaggtgtaatttatggtcttgtcttgggt

SEQ ID NO: 7770 - protein, 329 aa, Glycine max
  misc_feature (1)..(329): Ceres Seq. ID no. 15175497
MGTASGAVALLLVVLGASVSSSSGQLQVGFYSKSCPSAESTVASVVRGTAAADSTILPALLRLQFHDCFVRGCDASVLIKGGNNNAEVDNNKHQGLRGMDVIENAKAQLESECPGVVSCADIVVLAARDAVAFTGGPSFDVPTGRRDGKVSNVRDGDVLPDVRDSAQVLRSKFRASGLDDKDLVLLSSAHTVGTTACFFIQDRLYKFPLPGGGLGSDPSIPDGFLSELKSRCAPGDSNSRVSLDRGSERVFDTSILRNIRNGFAVIASDAALYNDTSTVDVVDSYSGLLSTIFGPYFRQDFADSMVKMGSIGVLTGASGEVRKVCSKFN

SEQ ID NO: 7771 - protein, 231 aa, Glycine max
  misc_feature (1)..(231): Ceres Seq. ID no. 15175498
MDVIENAKAQLESECPGVVSCADIVVLAARDAVAFTGGPSFDVPTGRRDGKVSNVRDGDVLPDVRDSAQVLRSKFRASGLDDKDLVLLSSAHTVGTTACFFIQDRLYKFPLPGGGLGSDPSIPDGFLSELKSRCAPGDSNSRVSLDRGSERVFDTSILRNIRNGFAVIASDAALYNDTSTVDVVDSYSGLLSTIFGPYFRQDFADSMVKMGSIGVLTGASGEVRKVCSKFN

SEQ ID NO: 7772 - DNA, 1230 bp, Glycine max
  misc_feature (1)..(1230): Ceres Seq. ID no. 15175591
atgaatgatgtgttctagcaattttcctgtgtcgtatcatcaaagcgacggattggtgggggtggcgccttcggccattggcacgtacacctcctaaaaacgacaactcgtttccacggcttggtattttagcaggcaaaacgcaaggacctgggcgagtggcgaaatggcagttccagcagagaggaaccacaaccatttctcagttttgatcgtactctttcttttcctcgtccacaatgctctctgcattaggttcccggatcggatcgcccaacccgccctcgacccgctcgaccaacaccgcctgcgggtcgccgtcttcgccctcggaagcttctggagatccgaagcggtgttcggttgtttaccgggcgttgttcgcaccaccgtcggctacgccggcggatccaagtccaaccccgaataccgaagcctcggtgaccacgccgagtccgttaaggttgagtatgatccgcagctgattagctttagggaactcctggatgtcttttggtcaagtcacgatcctaggcaagtgtatggccaaggtcctgatgtgggtagtcagtacagatctattatttttgttaatggaaccgaagaatcaagaatggctgctgtcagcaaagaacaggaacaaaccctgtcaagaagcagcattgtgactacacaaattctgcaacttggaacattttaccctgcagagccagagcaccagaaatttgaactcaagcaaaataccatccttcttcagttaattgggaaccttccggcagaggagcttgagaggtctagcctggcaacgaaattgaatggatatgttgcagagctttgccctccaaatatccaaaagcaaattgatgccaagatcaacaatattattaaaaagggttggccaattttgagagatttgtagttggcctcgtgggaagttactcagattgtcaacttgtcatttttcaactaacctgcttcgtttcagtacctataggttttattcaatagcttgtatcagttgccgggcttgatttaacgattgtgttgtaattattgtacttgtaaagtcttgagtctccctgtcatccttcaaaaaagaaaccctttgattttttttatttattttttgttttcattcatttaccttttttatttatgaggacaacagagaacctttattattattttattactattattcaaaagagggacaaagaaactagtaattcc

SEQ ID NO: 7773 - protein, 250 aa, Glycine max
  misc_feature (1)..(250): Ceres Seq. ID no. 15175592
MAVPAERNHNHFSVLIVLFLFLVHNALCIRFPDRIAQPALDPLDQHRLRVAVFALGSFWRSEAVFGCLPGVVRTTVGYAGGSKSNPEYRSLGDHAESVKVEYDPQLISFRELLDVFWSSHDPRQVYGQGPDVGSQYRSIIFVNGTEESRMAAVSKEQEQTLSRSSIVTTQILQLGTFYPAEPEHQKFELKQNTILLQLIGNLPAEELERSSLATKLNGYVAELCPPNIQKQIDAKINNIIKKGWPILRDL

SEQ ID NO: 7774 - DNA, 1572 bp, Glycine max
  misc_feature (1)..(1572): Ceres Seq. ID no. 15175651
gaacaatatggcccaaaacggcgacactgaggcccaaagcccatcaacccccgaggcccggcccgtcggcggcaccgagttcagctggtgcaaggctgttcccatcggcactggcgtaacggttctgagcctcctcctctcaaaaccgccgcaaatcgctgttgtccaaaatgccctccacaaactccaaaattcccaccctattctccgctccaagatccatctcgatccctccaacaacactttccacttcctcacccctcccactcccaccgtccaaatccaccccttcgatctcgcttcaacggctcacatcatccaatgccaatccgacggccacgatcccttccacgtgctcctcgagcacgagatgaaccaggaggacacgtggcgcaattacgccgccgacgtcgacgtactccacgccgccgtgtatagcatcagccacgaccgcttcgccgtgttcctccgcctccacaccgcttcgtgcgaccgcgcctccgccgtggcgctgctcaacgagctcctccgcttcgtcgccggcggcgacgaggcgagcggggagaaggtaaattctccgatcgaggatctgattcctgaggggaagacgaacaagccgttctgggcgcgtggactggacgtgctcgggtacacgctcaacgcgttcaggttcgcgaatttgagtttcgtcgacgctggctcgccccggagttcgaggataataaggttgcaactgaacgtagctgaaaccgagaacttattagctggatgcaaatcaagagggatcaaactttgtggggcacttgctgcagctggaatgattgctgcatggacctctagatgccttcctgattatcaaagagaaaagtatgctgtagtaacacttgttgattgccgctcacttcttgatccagtccttcccagcaaccatgctggattttaccattctgccgtcctgaacacacatgacgtgtgtggggaaacagaaaccttatgggagttggcaaagaaaagctacacagcctttgtaaatgctatgaactgcaacaagcatttcacagacatgtctgacctgaactacctcatgtgcaaggctattgagaaccccggtttgacgccatcgtcatcacttaggacagccttgatctctgtgtttgaagatcctgtcttcgacgactcggccgaaatgcatggagagattggattggaagactatgtaggttgtgcttctgctcatggtgttggtccatccattgccgtattcgacaccatacggaatggaaagttggattgtgcttgtatatatccatcaccccttcattcaagagagcagattcaaggactagttgatcatatgaagagaatacttgtggaaggttgtaacagtgaaaatcaacaaattgaaccataatccgcttctgaggctgggcaattggttataatttcataatcaaattcataaacttcgttgcctcttcaatttcagtctgtgactctgtgattctccttgctctgttgaatttcccagggccaggtattttaatatgaaggtagaaataaatatattgcatg

SEQ ID NO: 7775 - protein, 469 aa, Glycine max
  misc_feature (1)..(469): Ceres Seq. ID no. 15175652
NNMAQNGDTEAQSPSTPEARPVGGTEFSWCKAVPIGTGVTVLSLLLSKPPQIAVVQNALHKLQNSHPILRSKIHLDPSNNTFHFLTPPTPTVQIHPFDLASTAHIIQCQSDGHDPFHVLLEHEMNQEDTWRNYAADVDVLHAAVYSISHDRFAVFLRLHTASCDRASAVALLNELLRFVAGGDEASGEKVNSPIEDLIPEGKTNKPFWARGLDVLGYTLNAFRFANLSFVDAGSPRSSRIIRLQLNVAETENLLAGCKSRGIKLCGALAAAGMIAAWTSRCLPDYQREKYAVVTLVDCRSLLDPVLPSNHAGFYHSAVLNTHDVCGETETLWELAKKSYTAFVNAMNCNKHFTDMSDLNYLMCKAIENPGLTPSSSLRTALISVFEDPVFDDSAEMHGEIGLEDYVGCASAHGVGPSIAVFDTIRNGKLDCACIYPSPLHSREQIQGLVDHMKRILVEGCNSENQQIEP

SEQ ID NO: 7776 - protein, 467 aa, Glycine max
  misc_feature (1)..(467): Ceres Seq. ID no. 15175653
MAQNGDTEAQSPSTPEARPVGGTEFSWCKAVPIGTGVTVLSLLLSKPPQIAVVQNALHKLQNSHPILRSKIHLDPSNNTFHFLTPPTPTVQIHPFDLASTAHIIQCQSDGHDPFHVLLEHEMNQEDTWRNYAADVDVLHAAVYSISHDRFAVFLRLHTASCDRASAVALLNELLRFVAGGDEASGEKVNSPIEDLIPEGKTNKPFWARGLDVLGYTLNAFRFANLSFVDAGSPRSSRIIRLQLNVAETENLLAGCKSRGIKLCGALAAAGMIAAWTSRCLPDYQREKYAVVTLVDCRSLLDPVLPSNHAGFYHSAVLNTHDVCGETETLWELAKKSYTAFVNAMNCNKHFTDMSDLNYLMCKAIENPGLTPSSSLRTALISVFEDPVFDDSAEMHGEIGLEDYVGCASAHGVGPSIAVFDTIRNGKLDCACIYPSPLHSREQIQGLVDHMKRILVEGCNSENQQIEP

SEQ ID NO: 7777 - protein, 346 aa, Glycine max
  misc_feature (1)..(346): Ceres Seq. ID no. 15175654
MNQEDTWRNYAADVDVLHAAVYSISHDRFAVFLRLHTASCDRASAVALLNELLRFVAGGDEASGEKVNSPIEDLIPEGKTNKPFWARGLDVLGYTLNAFRFANLSFVDAGSPRSSRIIRLQLNVAETENLLAGCKSRGIKLCGALAAAGMIAAWTSRCLPDYQREKYAVVTLVDCRSLLDPVLPSNHAGFYHSAVLNTHDVCGETETLWELAKKSYTAFVNAMNCNKHFTDMSDLNYLMCKAIENPGLTPSSSLRTALISVFEDPVFDDSAEMHGEIGLEDYVGCASAHGVGPSIAVFDTIRNGKLDCACIYPSPLHSREQIQGLVDHMKRILVEGCNSENQQIEP

SEQ ID NO: 7778 - DNA, 1252 bp, Glycine max
  misc_feature (1)..(1252): Ceres Seq. ID no. 15175697
atacattaccgtttttttccccttcttattcgtcgttcagttcaatttctcgcgagtttttcttccatatgctaccaatcgttgccgttgatccacgcgccggcgaatttcagttttgattctccgccaccgttttggctgttgttactttggttcttccgagagaagggagccatatatagaaagtattttatggtgcgccgatgagcagaactgatgttattggcagtagaaggaggaggattcttctctgcttcggcttcagggtatactaagggcctgagccttctcctcttgggtcagaggaatgaggataaacccatgagagtagcgccgtggaaccagtatcagttggtagaccaagaatctgaccctgagctccagctggcttccacaaagaatcgcctctcccgcggctgtgcctcctttgtttgctttggtcgcacttccgcaggacttgatactccgtctcctcttaaagtgggccctgctcaacaacatgatgtctcaccagggccactggtttccaacaagggaaaggatccttctgcacatgtagatgatgaaagtgataacagaaaggctacactaaaaagtagcataaagaagccacaaaatagaaaatccgttcctgttgaggttgctaatgaacatgaagcatcaagtggacaggggatttgtactcctggaggtcaacccgaaagaaggaaagtgcagtggacagataattgtggtagtgagcttgtggaaattcgagaatttgagcccagtgaagtggatggatcagatgatgaatttgatagtggaaatgacagaacttgttcctgtgcgattatgtaaattggagtttcattaagttgataggttcatcgggtcattcactgctaacatccatcactcgatttgagacaaaagaggcaaaggtttcagttctgtggagatatatacacaaacatcttgcctgagtgatgtgtctgttattgcttgctgcggctttaaattttgctcctctgcccctcatcaatttgtataattcttgtcatgtgtgaattctttgcctttgattcatcatttttatgctactttatgttcttatttttataaggattaacaaagttttctttctatgatctggcattatcttgaaaaaaggtaatacaagtgtaagattttgtaaaaaaatcagtgtgccaacctggtaacaaacttgtgatgagactaggatttgttaaggcttatctgttgaaagtat

SEQ ID NO: 7779 - protein, 207 aa, Glycine max
  misc_feature (1)..(207): Ceres Seq. ID no. 15175698
MLLAVEGGGFFSASASGYTKGLSLLLLGQRNEDKPMRVAPWNQYQLVDQESDPELQLASTKNRLSRGCASFVCFGRTSAGLDTPSPLKVGPAQQHDVSPGPLVSNKGKDPSAHVDDESDNRKATLKSSIKKPQNRKSVPVEVANEHEASSGQGICTPGGQPERRKVQWTDNCGSELVEIREFEPSEVDGSDDEFDSGNDRTCSCAIM

SEQ ID NO: 7780 - protein, 172 aa, Glycine max
  misc_feature (1)..(172): Ceres Seq. ID no. 15175699
MRVAPWNQYQLVDQESDPELQLASTKNRLSRGCASFVCFGRTSAGLDTPSPLKVGPAQQHDVSPGPLVSNKGKDPSAHVDDESDNRKATLKSSIKKPQNRKSVPVEVANEHEASSGQGICTPGGQPERRKVQWTDNCGSELVEIREFEPSEVDGSDDEFDSGNDRTCSCAIM

SEQ ID NO: 7781 - DNA, 1195 bp, Glycine max
  misc_feature (1)..(1195): Ceres Seq. ID no. 15175720
tttttatgcttggtacttttcttaaatacatttgacctgactcacaatagaaaatcatgtaaaaaaatttacaggcttatgtgagggtggctgtgctgcagttgttgactcgggcacatcattaattgctggtccaactactgttgtgactcaaattaaccatgccattggagcagaaggatataccagttttgagtgtaaaagcattctccataactatggggattcaatatgggaatccttgattgctgggttatatcctgacattatatgcagtgccattggattctgttcaaataatgaatttaatacaatggatgatgttattaaaacagtggtgcataatcaaagttggaatcggtctcaaacaagggagagccccttttgtagtttttgcaatatgattgtcctttggatccaagttcagcttaagcaaagcaatgtaaaggaaaaagtattaaaatatgtggatgagctttgtgagaagctcccaaatcccccgggacaatcatttataaattgcaataggattgctactatgccacacattacattcaccattggaaacaagtcctttcccctctctccagaacaggtctgttgtttaacatgaattttgtagtttatacatcagtgccttagcactagaaaaaagcgatcacgcataatgtattttaactatttatatctgatacctacctcaattttatttagctctctccaacttctcatatttgcttctatccgtttgcattaaaaatgcttgacaagtaaacataaaaaagaaggtattttttgttgcaatccatgactgccatttcataatctcagacaattaatctcccctttattcttcttagtatgtccttcgagttgaagaaggctgttctactgtctgctatggcggttttgttgctatagatgtgcctcccccacagggtcccctctgggttcttggaagtattttcttgggggcatatcatacagtgtttgattatggcaatctccgtataggatttgcagaagctgcctagtcatagtttggtgatattactatgccaaaatcttttgaataaaaaaaatgcaggtctacgtgattcattacagcaaataatgatagaagtctctgaggatttgtctcagggtctcttgtaagtgacgattggtatattatataagctttgtgatattagtt

SEQ ID NO: 7782 - protein, 99 aa, Glycine max
  misc_feature (1)..(99): Ceres Seq. ID no. 15175721
MDDVIKTVVHNQSWNRSQTRESPFCSFCNMIVLWIQVQLKQSNVKEKVLKYVDELCEKLPNPPGQSFINCNRIATMPHITFTIGNKSFPLSPEQVCCLT

SEQ ID NO: 7783 - protein, 70 aa, Glycine max
  misc_feature (1)..(70): Ceres Seq. ID no. 15175722
MIVLWIQVQLKQSNVKEKVLKYVDELCEKLPNPPGQSFINCNRIATMPHITFTIGNKSFPLSPEQVCCLT

SEQ ID NO: 7784 - DNA, 1199 bp, Glycine max
  misc_feature (1)..(1199): Ceres Seq. ID no. 15175723
actcttttattcttattttgttttttaaactttcttaacgcaacaaacacatagccacatcttctctttctcttcccatggcattctgactcatacccaaatcattgattgtttgtctatcgaatcggtgagaaaatggcagtggagctgatggggttcccccaaatgggcgaacagaaggcaattgaagaagcagccgccgaaggcctcaagggcatggaacacctcctccgtctcctctcccatcaaccttcccacctccgcactcaccacaccgacgccaccgtttccaacttcaaaaaactcatctcccttctcaaccgccgcaccggccatgcccgtttccgccgcgcacccctcccttccacttccaactctctcgccccatcccctccaccggctaacccggtcaccttcgccccttcgcagtcacagagtctaaccctcgatttctcaaaacctaacatgttcaacaccaccaacgccaaatccatggacctcgagttctctaaagaaaccttcagcgtctcctccaactcctccttcatgtcctccgctatcaccggcgacggtagcgtctccaatggcaaactaggatcctccctcttcctcactcctccgccagtctccgccggaaaacctcctctctcgtttgctccgatcaagaagaggtgccacgaccaccgcgagcactccgacgacatctccgggaaactctccggctccagcaagtgccactgcatcaagagaaggaagaatcgtgtgaagaaaacggttagagttccggcgattagttcgaaggtcgccgatattccgccggatgagtactcgtggaggaagtacggacagaagccgatcaagggatcaccgtacccgagggggtattacaagtgcagtaccgtgagagggtgcccggcgaggaaacacgtggagcgtgcttcggacgatccgacgatgttgattgtaacgtacgagggggagcaccgacactcgattcagaccgcgatgcaggagaacatttccgggggagtgggtttggtattcgagtcaacgtgagtgtggaattaaagaaaggggaactgttggggggctttttttttgtagtaggaaaaaaaaaagaggtgaataggaaaattgaattaaggtggtggttgcaatgtaaatctgaccttattgaaagaaaatattattgtgctgct

SEQ ID NO: 7785 - protein, 306 aa, Glycine max
  misc_feature (1)..(306): Ceres Seq. ID no. 15175724
MAVELMGFPQMGEQKAIEEAAAEGLKGMEHLLRLLSHQPSHLRTHHTDATVSNFKKLISLLNRRTGHARFRRAPLPSTSNSLAPSPPPANPVTFAPSQSQSLTLDFSKPNMFNTTNAKSMDLEFSKETFSVSSNSSFMSSAITGDGSVSNGKLGSSLFLTPPPVSAGKPPLSFAPIKKRCHDHREHSDDISGKLSGSSKCHCIKRRKNRVKKTVRVPAISSKVADIPPDEYSWRKYGQKPIKGSPYPRGYYKCSTVRGCPARKHVERASDDPTMLIVTYEGEHRHSIQTAMQENISGGVGLVFEST

SEQ ID NO: 7786 - protein, 301 aa, Glycine max
  misc_feature (1)..(301): Ceres Seq. ID no. 15175725
MGFPQMGEQKAIEEAAAEGLKGMEHLLRLLSHQPSHLRTHHTDATVSNFKKLISLLNRRTGHARFRRAPLPSTSNSLAPSPPPANPVTFAPSQSQSLTLDFSKPNMFNTTNAKSMDLEFSKETFSVSSNSSFMSSAITGDGSVSNGKLGSSLFLTPPPVSAGKPPLSFAPIKKRCHDHREHSDDISGKLSGSSKCHCIKRRKNRVKKTVRVPAISSKVADIPPDEYSWRKYGQKPIKGSPYPRGYYKCSTVRGCPARKHVERASDDPTMLIVTYEGEHRHSIQTAMQENISGGVGLVFEST

SEQ ID NO: 7787 - protein, 296 aa, Glycine max
  misc_feature (1)..(296): Ceres Seq. ID no. 15175726
MGEQKAIEEAAAEGLKGMEHLLRLLSHQPSHLRTHHTDATVSNFKKLISLLNRRTGHARFRRAPLPSTSNSLAPSPPPANPVTFAPSQSQSLTLDFSKPNMFNTTNAKSMDLEFSKETFSVSSNSSFMSSAITGDGSVSNGKLGSSLFLTPPPVSAGKPPLSFAPIKKRCHDHREHSDDISGKLSGSSKCHCIKRRKNRVKKTVRVPAISSKVADIPPDEYSWRKYGQKPIKGSPYPRGYYKCSTVRGCPARKHVERASDDPTMLIVTYEGEHRHSIQTAMQENISGGVGLVFEST

SEQ ID NO: 7788 - DNA, 1812 bp, Glycine max
  misc_feature (1)..(1812): Ceres Seq. ID no. 15175762
  misc_feature (1809)..(1809): n is a, c, t, g, unknown, or other
ttttcaaattctttagaatttatcatttcctaagtattatgtttatatgctgtcataaaaaaatgtttatatgctcaatatttgctgtcagcatgacatgatgaaacaagttgcaacgatagtttagtttatcctattatatagctgcaactaagtgattcttaagcatgatattggctatttaatcattttttgtttatcgctactcttgaagttggcttaatgtgaatattcactgccaaacaaaaatgtgaactgaatttcatatgactggagctttgagaatcccgcgtataacggaatcctggttaactttgatgttgatctgagtttcaaaatattacaccatgttcttcatcttgatcaaactctttatcacttgttgagacttgagaaggttcctcatactctgtcgaaaaaatagttgtatagagagaacagcccacatgcatgaagagacatagaaagcccttagtgtctcataatgtactgacattgagaacataattttattcatacatttggaaagtgttcattgtcatatacaacatggcttacaaaacgttgatcagaaaattgttgccttgctgataatataaaattgagttctcttgatcttaacatgagaaaacttatgtctctagctttctggacctatgtaagtcctcatggtacaagcataccagttatatttgagtgagcgtacaagaagttgtctgactttggcagggtgaaactctgcggataatgatgattcttggcctgctttattttgatgctcagaagcatcctacttgttcatcttatctgttccatgcctggtggttgactatcaggaatgttttagttttgacacttgacagcagtgtggaggattgagttatatactacaaatatgcatgaattccgaagtttattactagacgacatagtattagatgtcacctgtatgttaagtggtcgccatgctttgagaaagcgacttgaagagcttggttatgaacttaatgacgaccaagttcagactttattttggtgttttaaagcagtggctgagcaaaaaaagagggttactgatgctgacctcagagcattggtatcagatgaagtttttcaagcagagcctgtctggaaacttggtgatttgcaggtgacttgtggaactcttggcctttctacagcaactgtcaaacttttgagtagtgatggtagcacacacgttgcctgttccattggtacaggaccagtggattcggcttacaaggctgttgatctgattgtgaaggagcaagtaacacttcttgagtactcgatgaatgcagtgacagaaggcattgatgcaattgccactacccgggttgtaattcgtggggagagtgaaacaagtactattactacccatgctttaacgggagaaactgttattcgaacatttagtgggactggagcgggaatggatgttgttgtttccagtgtcaaggcctatattgctgcactaaacaagatgtcgggtttcaaggaatcctctcaatctgctgaaaaaatttcaatttcttcattgaagatttgagaattgtgtggtgcttctttggtaacaattgtttgtgttaaaccacgaagaggaagacaatgttgcagcagcatccttgcctctcgcagttctccatattaagggttgtccctgtattttgaccggaatatatttgcaacctgtaatttattgattcacccaagtagcctttgcaaagaatgtaacttaagtccgttttaaatattcagactacagggattctttcccttttcattttncat

SEQ ID NO: 7789 - protein, 224 aa, Glycine max
  misc_feature (1)..(224): Ceres Seq. ID no. 15175763
MHEFRSLLLDDIVLDVTCMLSGRHALRKRLEELGYELNDDQVQTLFWCFKAVAEQKKRVTDADLRALVSDEVFQAEPVWKLGDLQVTCGTLGLSTATVKLLSSDGSTHVACSIGTGPVDSAYKAVDLIVKEQVTLLEYSMNAVTEGIDAIATTRVVIRGESETSTITTHALTGETVIRTFSGTGAGMDVVVSSVKAYIAALNKMSGFKESSQSAEKISISSLKI

SEQ ID NO: 7790 - protein, 206 aa, Glycine max
  misc_feature (1)..(206): Ceres Seq. ID no. 15175764
MLSGRHALRKRLEELGYELNDDQVQTLFWCFKAVAEQKKRVTDADLRALVSDEVFQAEPVWKLGDLQVTCGTLGLSTATVKLLSSDGSTHVACSIGTGPVDSAYKAVDLIVKEQVTLLEYSMNAVTEGIDAIATTRVVIRGESETSTITTHALTGETVIRTFSGTGAGMDVVVSSVKAYIAALNKMSGFKESSQSAEKISISSLKI

SEQ ID NO: 7791 - DNA, 1433 bp, Glycine max
  misc_feature (1)..(1433): Ceres Seq. ID no. 15175767
atgatgataataaagcagtgaatgatgactcttccttcattgtcctctctattcttcttcttcttccctaactctctctgcaataacaacaccatcaacaaccccttcaagccggcctaaaccccattacccaaaactttttcttttttctttccttcaacactctctattggatcatcacatattcaatttcattctcttcaaaaattccccttcaaaaaaatttaaaattaaaaaaaagtgctctttttgtgaattttgagccatttgccaccgacagatttcgatcttctccgtgccaaagttgtaatcttttcgaattttggcgaggtgggtcgatctgatttcgctcgaataattgcgggttcgattttgatctgaaaaaggaaaagagaaaaaaagattgggttatttctgattcaagattttgtccttttttgaaatggtctatttccatagctcaatctctctctgcaagttcgttgatcaatcatctttcatggcgaattcaatttgttctgcggatttcggttcgaaatcgagacaaatcaatcaccttcagaagaatcggagaacccctagttcatcatcatcatcatcatcatcatcgaattcccttcagattccaccctgtgatcgatctcgatcggcaatggttgatgttgtgatgttcattgctgttgtttgtgcctgtggctttttgttcttcccttatgtagagtttttggtgacaaagtgttacgaggttattaagggtgttgtgtttttgattaaggaggaggtttctgtggcaccttggatctatatttccatagggttgagtgttgtgtttgctgcattggccacgtgggctgtggtggcttgcaccactaggaagtgtgggaatcccagttgcaagggtctgaggaaggctgctgagtttgacattcagttggagactgaggattgtgtgaagaatttggcttctgcgtcgtcgaatgtagcgaaagatggtggtggtggaacgaagaagggtctctttgaattgcctcgtgatcaccatagggagctggaggctgagctcaagaagatggcaccaccaaatggaagggctgtgctcgtgctccgggcgaggtgtggatgttctgttggtaggttagaggttccaggaccaaggaagcatcttcgaaagatcaacaagaagtagcagcaatcctgttcgagccgagtaggacacaggagaggacacccttttgagttattggatggaattaaggaaagggatggtaattggatcaaatagaaaatttgtacttcttgtcctatgttcattgatctagtaggaaattagaatgtctttgaataagccccttggcaataagttgtaaggaactatgggccatacagtttagttggttatacctggaaatataaaaaaagaacatttttatttt

SEQ ID NO: 7792 - protein, 247 aa, Glycine max
  misc_feature (1)..(247): Ceres Seq. ID no. 15175768
MVYFHSSISLCKFVDQSSFMANSICSADFGSKSRQINHLQKNRRTPSSSSSSSSSSNSLQIPPCDRSRSAMVDVVMFIAVVCACGFLFFPYVEFLVTKCYEVIKGVVFLIKEEVSVAPWIYISIGLSVVFAALATWAVVACTTRKCGNPSCKGLRKAAEFDIQLETEDCVKNLASASSNVAKDGGGGTKKGLFELPRDHHRELEAELKKMAPPNGRAVLVLRARCGCSVGRLEVPGPRKHLRKINKK

SEQ ID NO: 7793 - protein, 228 aa, Glycine max
  misc_feature (1)..(228): Ceres Seq. ID no. 15175769
MANSICSADFGSKSRQINHLQKNRRTPSSSSSSSSSSNSLQIPPCDRSRSAMVDVVMFIAVVCACGFLFFPYVEFLVTKCYEVIKGVVFLIKEEVSVAPWIYISIGLSVVFAALATWAVVACTTRKCGNPSCKGLRKAAEFDIQLETEDCVKNLASASSNVAKDGGGGTKKGLFELPRDHHRELEAELKKMAPPNGRAVLVLRARCGCSVGRLEVPGPRKHLRKINKK

SEQ ID NO: 7794 - protein, 177 aa, Glycine max
  misc_feature (1)..(177): Ceres Seq. ID no. 15175770
MVDVVMFIAVVCACGFLFFPYVEFLVTKCYEVIKGVVFLIKEEVSVAPWIYISIGLSVVFAALATWAVVACTTRKCGNPSCKGLRKAAEFDIQLETEDCVKNLASASSNVAKDGGGGTKKGLFELPRDHHRELEAELKKMAPPNGRAVLVLRARCGCSVGRLEVPGPRKHLRKINKK

SEQ ID NO: 7795 - DNA, 1925 bp, Glycine max
  misc_feature (1)..(1925): Ceres Seq. ID no. 15175771
ttcgttttcaacaggcagggcatttgggagtgtctttgtttcccttcttgccctgtatgatatgagtgcttgattcgttgtcttcaaatcctgcaaggccagaggaagcaatcaactcaaacgacaccatgtctggaactatgtctccaaaaggttctttcaagaagaaagcaatcaatgcctcaaacatgctgaggaattctttgaccaggaagggtaggcgaagcagtaaggtcatgtccgttgaaatcgaggatgtccacgatgctgaggagttgaaaattgttgacgagttccgtcaagctcttattttggacgaacttcttcctgcaaaacacgatgattatcatatgatgcttagattcctgaaggctaggaaatttgatatcgagaaaacaaagcaaatgtggtctgaaatgctcaaatggaggaaggaatttggtgctgacaccatcacggaggacttcgaattcaaagaacttgatgaagtcttgcaatattatccccaaggccatcatggagtggacaaagatggaagacctgtgtacatagagagattaggccaagtcgatgccacgaagatgatgcaagtcacaaccatggatcgctacatcaaataccacgtaaaggagtttgagaggacatttgatgttaagtttgcagcttgttcaattgctgcaaagaagcacatagatcaaagtacaactatcctggacgtgcagggagtggggcttaaaagcttcagcaaacatgctagggaacttgttactcgccttcagaagattgacggtgacaactatccagagaccttgaatcgcatgttcatcatcaatgcaggttctggatttaggatactgtggaacaccgtaaaatcattccttgatcctaagaccacggcaaaaatcaatgttcttggcaacaagtatgacaccaaattgctagaaataattgatgcaagtgagttgcctgaatttttaggaggcacttgtacatgtgctgatcaaggaggctgtatgcgctctgataagggcccatggaaggatgcagaagtaatgaggatggttcagaatggtgatcacaaatgttcaaaaaaaagtgcctcacaaggcgaggaagagaaagaaaattctgaggaacacaagacttccaaattggaggcaaatcacaccccccagctttctccagttgttgaagaagaggtccctgctactaaaacttcccagcccttatcaccgatggctgataaatctgctgtgaaaaaagttgatgagaaagcttccaagcctaaggacttagcccctacagctgataaaactgcagcatcaactgagttttcgactgtgatgaaacgcatggctgagttggaggagaaaatcgtcaccatcaataataagcccactgctatgccacctgagaaggagcaaatgctgaatgcaactataactcgagccgatgacttggagaaacaacttttggctaccaagaaggctctggaggattcacttgttaagcaagaagagctttcggcttatcttgacaaaaagaagaagaagaagaagaagagatttttcttcttttaaagagcaaatccgtggatgcccaaacaagaggtccagatattaacgggaaattagcttttagtttctgcctttcaggagacttcccaaatgccccccttacatcaatgttcaacatgcgaactagtaaatattcaaaacgatcagaagagaagcatttgctcaaaatatatgaattatgataatcagaattttggtctctattaggataggacttactctctatgtgtagtatatatatatagggctatggcgatctgcacattatgcaaagcctgctctattattatgtacgtacagaatcaatcaatatctagtacaaaattagagagtatgacaatatgtttg

SEQ ID NO: 7796 - protein, 483 aa, Glycine max
  misc_feature (1)..(483): Ceres Seq. ID no. 15175772
MSGTMSPKGSFKKKAINASNMLRNSLTRKGRRSSKVMSVEIEDVHDAEELKIVDEFRQALILDELLPAKHDDYHMMLRFLKARKFDIEKTKQMWSEMLKWRKEFGADTITEDFEFKELDEVLQYYPQGHHGVDKDGRPVYIERLGQVDATKMMQVTTMDRYIKYHVKEFERTFDVKFAACSIAAKKHIDQSTTILDVQGVGLKSFSKHARELVTRLQKIDGDNYPETLNRMFIINAGSGFRILWNTVKSFLDPKTTAKINVLGNKYDTKLLEIIDASELPEFLGGTCTCADQGGCMRSDKGPWKDAEVMRMVQNGDHKCSKKSASQGEEEKENSEEHKTSKLEANHTPQLSPVVEEEVPATKTSQPLSPMADKSAVKKVDEKASKPKDLAPTADKTAASTEFSTVMKRMAELEEKIVTINNKPTAMPPEKEQMLNATITRADDLEKQLLATKKALEDSLVKQEELSAYLDKKKKKKKKRFFFF

SEQ ID NO: 7797 - protein, 479 aa, Glycine max
  misc_feature (1)..(479): Ceres Seq. ID no. 15175773
MSPKGSFKKKAINASNMLRNSLTRKGRRSSKVMSVEIEDVHDAEELKIVDEFRQALILDELLPAKHDDYHMMLRFLKARKFDIEKTKQMWSEMLKWRKEFGADTITEDFEFKELDEVLQYYPQGHHGVDKDGRPVYIERLGQVDATKMMQVTTMDRYIKYHVKEFERTFDVKFAACSIAAKKHIDQSTTILDVQGVGLKSFSKHARELVTRLQKIDGDNYPETLNRMFIINAGSGFRILWNTVKSFLDPKTTAKINVLGNKYDTKLLEIIDASELPEFLGGTCTCADQGGCMRSDKGPWKDAEVMRMVQNGDHKCSKKSASQGEEEKENSEEHKTSKLEANHTPQLSPVVEEEVPATKTSQPLSPMADKSAVKKVDEKASKPKDLAPTADKTAASTEFSTVMKRMAELEEKIVTINNKPTAMPPEKEQMLNATITRADDLEKQLLATKKALEDSLVKQEELSAYLDKKKKKKKKRFFFF

SEQ ID NO: 7798 - protein, 463 aa, Glycine max
  misc_feature (1)..(463): Ceres Seq. ID no. 15175774
MLRNSLTRKGRRSSKVMSVEIEDVHDAEELKIVDEFRQALILDELLPAKHDDYHMMLRFLKARKFDIEKTKQMWSEMLKWRKEFGADTITEDFEFKELDEVLQYYPQGHHGVDKDGRPVYIERLGQVDATKMMQVTTMDRYIKYHVKEFERTFDVKFAACSIAAKKHIDQSTTILDVQGVGLKSFSKHARELVTRLQKIDGDNYPETLNRMFIINAGSGFRILWNTVKSFLDPKTTAKINVLGNKYDTKLLEIIDASELPEFLGGTCTCADQGGCMRSDKGPWKDAEVMRMVQNGDHKCSKKSASQGEEEKENSEEHKTSKLEANHTPQLSPVVEEEVPATKTSQPLSPMADKSAVKKVDEKASKPKDLAPTADKTAASTEFSTVMKRMAELEEKIVTINNKPTAMPPEKEQMLNATITRADDLEKQLLATKKALEDSLVKQEELSAYLDKKKKKKKKRFFFF

SEQ ID NO: 7799 - DNA, 1478 bp, Glycine max
  misc_feature (1)..(1478): Ceres Seq. ID no. 15175775
aacctcactgtgaccccttaaggccttcttcaaccttctaaaacaccaccctcttttgcataacttcaccaaaatgtccctctgctacacttccaatttcatctcactgaaccatcaaaagagcttctccttaaccttctcttcagagtcttctcctcacttcatcaacctatttccggttaagcctcagaaaccacaccaccctattaagttcaccgcagaaaggttcaaactttttgcctctctgacatcatctccatccgttgagacctccccatcaagttataggagcaagagccccaaagatgttaacgtcttggtggtgggttcaactgggtacattggaaagttcgtggtgagagagttagttaagagagggtttaatgttacagccatagctagagagaggagtggaattaagggcagtgttgataaggatcagactttgggtcagttgagaggggccaatgtgtgtttctcagacgtgaccaatttggatgtttttgaggaatctctgaacaggttggggaagtcatttgatgttgtggtgtcatgtcttgctagtagaaatggaggtgtgaaggactcttggaagatagattatgaggcaacaaggaatagccttgttgctggaagaaaacgtggggcttcacattttgtgttgctttcagcaatatgtgtgcagaagccgctcctcgagtttcagcgtgccaagttgaagtttgaggatgagttggtgaagttagctgaggaggatggtggattcacttatagcatagtgaggccaactgcatttttcaagagtttggggggtcaggttgagttagtgaaggatgggaaaccttatgttatgtttggagatgggaaactgtgtgcttgtaagcctataagtgagtctgatttggcttcttttattgtggattgtgtgctgagtgaggataagattaaccaggtgttgccaattggagggcctgggaaggcattgactccattggaacaaggggagatgctgtttaggcttttggggaaggagcctaagttcttgaaagttccaatcgggatcatggatttcgccattggggttcttgactttttggttaaggtctttccttcactggaagatgctgctgagtttgggaagattggaaggtactatgcggcggaaagtatgttgcttctggatcccgagaccggagaatacagtgctgagaaaacacctagctatgggaatgatacattggaagagttttttgcaagggttctcagggagggcatggctggtcaagaactaggtgagcaaacaatattttaagatgattgtggttagatatgtatgaacacaataaggcaaatagagcaaccagttttgtttctgtaaatgtatgtattcagctagagtcactgtaatgtttacaagttcaggcattgttgaaagaaattcaagtctctggaaatgaattgttgaagattcattcttc

SEQ ID NO: 7800 - protein, 412 aa, Glycine max
  misc_feature (1)..(412): Ceres Seq. ID no. 15175776
MSLCYTSNFISLNHQKSFSLTFSSESSPHFINLFPVKPQKPHHPIKFTAERFKLFASLTSSPSVETSPSSYRSKSPKDVNVLVVGSTGYIGKFVVRELVKRGFNVTAIARERSGIKGSVDKDQTLGQLRGANVCFSDVTNLDVFEESLNRLGKSFDVVVSCLASRNGGVKDSWKIDYEATRNSLVAGRKRGASHFVLLSAICVQKPLLEFQRAKLKFEDELVKLAEEDGGFTYSIVRPTAFFKSLGGQVELVKDGKPYVMFGDGKLCACKPISESDLASFIVDCVLSEDKINQVLPIGGPGKALTPLEQGEMLFRLLGKEPKFLKVPIGIMDFAIGVLDFLVKVFPSLEDAAEFGKIGRYYAAESMLLLDPETGEYSAEKTPSYGNDTLEEFFARVLREGMAGQELGEQTIF

SEQ ID NO: 7801 - DNA, 1766 bp, Glycine max
  misc_feature (1)..(1766): Ceres Seq. ID no. 15175785
ggtatcttacttactgctgtctgctaaacttgattttttgtttactctttcttgcttccttcatatttatattatattattattttgcccacatttcttcttcaacgactacactctctctcaaccttcaaagcttcaaactcaaaagaaatggcatccgatcccgagcaacccgctcattcctctttcgcaaaggaagcaaggtcaggtggtgagattgggagtgcaatagagcctctgcttaatggggttcatgactctgaaagctattccgtctctgctgcaattctcccatttctcttcccagctttgggtggcctactatttggctatgatattggtgccacatcttctgcaactatttccattcagtcaccaacactaagtggagtatcttggtacaagttgtcttctgttgaaattggtcttcttactagtggatcattgtatggtgccttaattggctccttgttggccttcaatgttgctgacttcttaggtagaagaaaggagctgattggagctgcagtagtttatcttgttggagctcttgtaacagcattagctcctaattttcttgtattggtgcttgggagacttgtatttggcataggaattggactggcaatgcatgctgctccaatgtacattgcagagacagctccaacaccaatacgtggacaactaatatctctaaaagagttctttatagtacttgggatggttgcaggatatggaattggtagcttgttcgtcgaaaccgtatctgggtggcggtatatgtatggagttagtagtcctgtggcaataatcatgggagttggaatgtggtggctcccagcttctcctagatggttacttttacgtgctatacagggaaaaggggatgttcagaattcaaaagacatagcaattcgtagtttgtgtcagcttcgaggtcaagctttttatgattcagttcctcggcaagtagatgagattctggcagaactttcttatctaggtgaagaaaaagaagctacctttggagaactattccaaggaaaatgcttgaaagccctttggattggttcaggattggtcttgtttcagcagatcacagggcaaccaagtgtgctctactatgctggatcaatctttcagagtgcaggattctccggagcatctgatgcaacccgagtctctattctccttgggtttttcaagttgattatgactggagttgctgttgtcgttgttgataaacttggaaggaggcctttactacttgggggagtttcagggatagtgatctctttattctttctcggttcatattacattttcttggataattcaccagttgttgctgtaattggtctgctgttgtacgttggcagttatcagatttcctttggtccaattggttggttaatgatagcagagattttccccttgcgcctaagaggtcgaggactaagtatagctgtactcgtcaattttggtgcaaatgccctggtgacatttgctttttccccactgaaggcattattgggagctggaattttgttttacacattttgtgtaatagccgtggcatctcttgtattcatatactttgttataccagaaaccaaggggcttacactagaggagatcgaggccaaatgcctctagtcagtcaccttgttttacctctataaatatctgtttttagtactctgttgcaacttgtcttgaatattgtaatgacacatatattatattaataaaaatatgcaatgatg

SEQ ID NO: 7802 - protein, 501 aa, Glycine max
  misc_feature (1)..(501): Ceres Seq. ID no. 15175786
MASDPEQPAHSSFAKEARSGGEIGSAIEPLLNGVHDSESYSVSAAILPFLFPALGGLLFGYDIGATSSATISIQSPTLSGVSWYKLSSVEIGLLTSGSLYGALIGSLLAFNVADFLGRRKELIGAAVVYLVGALVTALAPNFLVLVLGRLVFGIGIGLAMHAAPMYIAETAPTPIRGQLISLKEFFIVLGMVAGYGIGSLFVETVSGWRYMYGVSSPVAIIMGVGMWWLPASPRWLLLRAIQGKGDVQNSKDIAIRSLCQLRGQAFYDSVPRQVDEILAELSYLGEEKEATFGELFQGKCLKALWIGSGLVLFQQITGQPSVLYYAGSIFQSAGFSGASDATRVSILLGFFKLIMTGVAVVVVDKLGRRPLLLGGVSGIVISLFFLGSYYIFLDNSPVVAVIGLLLYVGSYQISFGPIGWLMIAEIFPLRLRGRGLSIAVLVNFGANALVTFAFSPLKALLGAGILFYTFCVIAVASLVFIYFVIPETKGLTLEEIEAKCL

SEQ ID NO: 7803 - protein, 342 aa, Glycine max
  misc_feature (1)..(342): Ceres Seq. ID no. 15175787
MHAAPMYIAETAPTPIRGQLISLKEFFIVLGMVAGYGIGSLFVETVSGWRYMYGVSSPVAIIMGVGMWWLPASPRWLLLRAIQGKGDVQNSKDIAIRSLCQLRGQAFYDSVPRQVDEILAELSYLGEEKEATFGELFQGKCLKALWIGSGLVLFQQITGQPSVLYYAGSIFQSAGFSGASDATRVSILLGFFKLIMTGVAVVVVDKLGRRPLLLGGVSGIVISLFFLGSYYIFLDNSPVVAVIGLLLYVGSYQISFGPIGWLMIAEIFPLRLRGRGLSIAVLVNFGANALVTFAFSPLKALLGAGILFYTFCVIAVASLVFIYFVIPETKGLTLEEIEAKCL

SEQ ID NO: 7804 - protein, 337 aa, Glycine max
  misc_feature (1)..(337): Ceres Seq. ID no. 15175788
MYIAETAPTPIRGQLISLKEFFIVLGMVAGYGIGSLFVETVSGWRYMYGVSSPVAIIMGVGMWWLPASPRWLLLRAIQGKGDVQNSKDIAIRSLCQLRGQAFYDSVPRQVDEILAELSYLGEEKEATFGELFQGKCLKALWIGSGLVLFQQITGQPSVLYYAGSIFQSAGFSGASDATRVSILLGFFKLIMTGVAVVVVDKLGRRPLLLGGVSGIVISLFFLGSYYIFLDNSPVVAVIGLLLYVGSYQISFGPIGWLMIAEIFPLRLRGRGLSIAVLVNFGANALVTFAFSPLKALLGAGILFYTFCVIAVASLVFIYFVIPETKGLTLEEIEAKCL

SEQ ID NO: 7805 - DNA, 1348 bp, Glycine max
  misc_feature (1)..(1348): Ceres Seq. ID no. 15175845
gatgaaattgaaaggcttgaagctgttaggacagaattacaaacccaaattgacaaggaggtgaaggcaaatgaacagctgcaatctcatgtggataaacaaaagaaagccttggaagagcgtcatctagctcttgagcaagacgtagctagactacaggaacagttgcacaaggaaaagaattctcgggtagctcttgagaacaaagcagagcttgaggaattagctctggtagaagcagatcttgccaacttagagtggaaggttgatgagattggggtgaggcttaatgaacttgagcagaattatggaactacttcggattcctctattcaactgcgacagatatcaaatcatgaaagaaaattgaaacgcaagacagatgctgaagttgctgctatgtcacaatctgacagatcaataagtaagggtacggtaatggcacaacaggacactcatattggtggagcagaaaatgatttcgagagaaagcctgattcaccacctttaccaaacaagcacccaccaactagctccaagcgatctggtacaaagggtgaggtgggacgaagtcagactccaaatgaactccaaaatatggataaaggccgagactcaagtcgctattcaatcaatgtggaaaaaggaaaaggatctgaacgtccccaatcacttctatcccccaaactaccatctcctagacttccatctcccagacatccatcccccaacagatttggagggtctgaagctcactctgtgccaaacccagaaaagggtaaagggtcagagccagttcagatttcagacaaatcgcatcaaagttcagagaaactgaaaaaatcagatagccagccagcccatcactcagatggatggaatcaacaaccaaaacacttggagagaggaaggtcagagggtcatcagacttataatgtggataaaggtcgatgattgaaaggctagttttcttctgttctagaacatgatccacatgcagtcagtgtttttgttgtccatgttgggatttgcttatgtctttcaacaatattttgtgtggtttatgaaatacagtgagaagaatccttcttggataaggttgccacaagagcccttatacaaacaagagaagcatttcccttaccccccaaaagcaccatgtgcaaagcataattcaacatttcccatgacataagccgaactgtttgtaaccttacatgctgatttttactagttcagtgagcagcatgttgatttgcatgtacattatcgtatttgtaactgcaacaacatttgagttgtttggcataagctggcaaagcaatatttaggcagataaccttgctcc

SEQ ID NO: 7806 - protein, 317 aa, Glycine max
  misc_feature (1)..(317): Ceres Seq. ID no. 15175846
DEIERLEAVRTELQTQIDKEVKANEQLQSHVDKQKKALEERHLALEQDVARLQEQLHKEKNSRVALENKAELEELALVEADLANLEWKVDEIGVRLNELEQNYGTTSDSSIQLRQISNHERKLKRKTDAEVAAMSQSDRSISKGTVMAQQDTHIGGAENDFERKPDSPPLPNKHPPTSSKRSGTKGEVGRSQTPNELQNMDKGRDSSRYSINVEKGKGSERPQSLLSPKLPSPRLPSPRHPSPNRFGGSEAHSVPNPEKGKGSEPVQISDKSHQSSEKLKKSDSQPAHHSDGWNQQPKHLERGRSEGHQTYNVDKGR

SEQ ID NO: 7807 - protein, 184 aa, Glycine max
  misc_feature (1)..(184): Ceres Seq. ID no. 15175847
MSQSDRSISKGTVMAQQDTHIGGAENDFERKPDSPPLPNKHPPTSSKRSGTKGEVGRSQTPNELQNMDKGRDSSRYSINVEKGKGSERPQSLLSPKLPSPRLPSPRHPSPNRFGGSEAHSVPNPEKGKGSEPVQISDKSHQSSEKLKKSDSQPAHHSDGWNQQPKHLERGRSEGHQTYNVDKGR

SEQ ID NO: 7808 - protein, 171 aa, Glycine max
  misc_feature (1)..(171): Ceres Seq. ID no. 15175848
MAQQDTHIGGAENDFERKPDSPPLPNKHPPTSSKRSGTKGEVGRSQTPNELQNMDKGRDSSRYSINVEKGKGSERPQSLLSPKLPSPRLPSPRHPSPNRFGGSEAHSVPNPEKGKGSEPVQISDKSHQSSEKLKKSDSQPAHHSDGWNQQPKHLERGRSEGHQTYNVDKGR

SEQ ID NO: 7809 - DNA, 1979 bp, Glycine max
  misc_feature (1)..(1979): Ceres Seq. ID no. 15175923
ccggtgagtatcaacaagaatactcataataatatagtggctagcatagagctagtaataatattaatattgttaagctagctctaagccatggctaatgaacgtgatctgttctcggcggagattgtgaaccgtggaattgaatcgtcaggaccaaacgctgggtcgttgacgttttcggtgagggtgagaaggcgcttaccggattttcttcaatcggtgaaccttaagtacgtgaaattgggttaccattatctgataaaccatggcatatacttgttcaccataccggttcttctcgtggtgtttagtgctgaggttggaagcctcagcaaagaggacctatggaagaagctttgggaagacgcgcgttacgaccttgctacggttcttgcttcctttggggtcttcgttttcaccttgtctgtctacttcatgtcgaggccacgtcccatttacctcattgattttgcatgttataaacccgatgatgaactcaaggtgtcaagggagcagttgatggaggtagcaagaaaatcaggcaagttcgacgaagcgagtctggagttccagaagaggatgctgatgtcctccggaatcggcgacgagacctacatcccgaaggccgtcgtggcctccacggagaacacggcgacaatgaaagaggggcgcggcgaggcctccatggtgatgttcggagccctggacgagctgttcgagaaaagccgcgtccgaccaaaggacgtgggcgtcctagtagtgaactgcagcatcttcaacccgacaccatcactctcagcgatgatcataaaccactacaagatgagagggaacattctgagctacaacctcggcggaatggggtgcagcgcggggatcattggtgtggacttggccaaggatattctccaggcgaaccctaataactacgcggtggtggtgagcacggagatggtggggtacaactggtaccaggggaaggacaggtctatgcttatcccgaatagcttcttccgcatggggtgttctgctgttctgctttccaaccgtcgaagggactatagccgcgcaaagtaccgtcttgaacacattgttcgcacgcataagggtgccgatgaccgcagcttcaggtgtgtttaccaagaggaagatgagcaaaaactcaagggactaaagatcagcaaagacttgattgagattggtggtgatgctctaaaaaccaacatcaccacactaggacccttggtgctacccttttctgagcagcttctcttctttgccacttttgtgtggaggcacttatttggcagcaaaaatggtgggaattcaccctcaatgaagaagccttacattcctgactacaaactagcttttgagcacttttgtgtgcatgctgcaagcaagaccattcttgatgagcttcaaaggaacttggaactgagtgacaagaacatcgaagcgtctagaatgacgctgcatcgctttggcaacacctctagcagcagcatttggtatgagttggcttacatggaagcaaaggagagtgttagaagaggagaccgtgtttggcaactcgcatttggctctggcttcaagtgcaacagtgtggtttggcgcgccatgcgccgagtcaccaagccttctaggaacccttggcttgattgcatcaacagatatcctgcacctctcaacaactgaagcagaatttgacggcactagtgttatgaatcttattatcagtgagggtatgcttaggatcaataagggtagtactaatttggtcttcaaaaatgttacagctgttttctgtttctttctcatttaattattcctggcttgaaattctatacttttaattcctcattaggcatatggatgcctccttgtttaatttctctgtttcttcataggatgattgatatcaaagttcatggatggctattacctatggtcaatgctacttgtctcatgttttattc

SEQ ID NO: 7810 - protein, 535 aa, Glycine max
  misc_feature (1)..(535): Ceres Seq. ID no. 15175924
MANERDLFSAEIVNRGIESSGPNAGSLTFSVRVRRRLPDFLQSVNLKYVKLGYHYLINHGIYLFTIPVLLVVFSAEVGSLSKEDLWKKLWEDARYDLATVLASFGVFVFTLSVYFMSRPRPIYLIDFACYKPDDELKVSREQLMEVARKSGKFDEASLEFQKRMLMSSGIGDETYIPKAVVASTENTATMKEGRGEASMVMFGALDELFEKSRVRPKDVGVLVVNCSIFNPTPSLSAMIINHYKMRGNILSYNLGGMGCSAGIIGVDLAKDILQANPNNYAVVVSTEMVGYNWYQGKDRSMLIPNSFFRMGCSAVLLSNRRRDYSRAKYRLEHIVRTHKGADDRSFRCVYQEEDEQKLKGLKISKDLIEIGGDALKTNITTLGPLVLPFSEQLLFFATFVWRHLFGSKNGGNSPSMKKPYIPDYKLAFEHFCVHAASKTILDELQRNLELSDKNIEASRMTLHRFGNTSSSSIWYELAYMEAKESVRRGDRVWQLAFGSGFKCNSVVWRAMRRVTKPSRNPWLDCINRYPAPLNN

SEQ ID NO: 7811 - protein, 420 aa, Glycine max
  misc_feature (1)..(420): Ceres Seq. ID no. 15175925
MSRPRPIYLIDFACYKPDDELKVSREQLMEVARKSGKFDEASLEFQKRMLMSSGIGDETYIPKAVVASTENTATMKEGRGEASMVMFGALDELFEKSRVRPKDVGVLVVNCSIFNPTPSLSAMIINHYKMRGNILSYNLGGMGCSAGIIGVDLAKDILQANPNNYAVVVSTEMVGYNWYQGKDRSMLIPNSFFRMGCSAVLLSNRRRDYSRAKYRLEHIVRTHKGADDRSFRCVYQEEDEQKLKGLKISKDLIEIGGDALKTNITTLGPLVLPFSEQLLFFATFVWRHLFGSKNGGNSPSMKKPYIPDYKLAFEHFCVHAASKTILDELQRNLELSDKNIEASRMTLHRFGNTSSSSIWYELAYMEAKESVRRGDRVWQLAFGSGFKCNSVVWRAMRRVTKPSRNPWLDCINRYPAPLNN

SEQ ID NO: 7812 - protein, 392 aa, Glycine max
  misc_feature (1)..(392): Ceres Seq. ID no. 15175926
MEVARKSGKFDEASLEFQKRMLMSSGIGDETYIPKAVVASTENTATMKEGRGEASMVMFGALDELFEKSRVRPKDVGVLVVNCSIFNPTPSLSAMIINHYKMRGNILSYNLGGMGCSAGIIGVDLAKDILQANPNNYAVVVSTEMVGYNWYQGKDRSMLIPNSFFRMGCSAVLLSNRRRDYSRAKYRLEHIVRTHKGADDRSFRCVYQEEDEQKLKGLKISKDLIEIGGDALKTNITTLGPLVLPFSEQLLFFATFVWRHLFGSKNGGNSPSMKKPYIPDYKLAFEHFCVHAASKTILDELQRNLELSDKNIEASRMTLHRFGNTSSSSIWYELAYMEAKESVRRGDRVWQLAFGSGFKCNSVVWRAMRRVTKPSRNPWLDCINRYPAPLNN

SEQ ID NO: 7813 - DNA, 1492 bp, Glycine max
  misc_feature (1)..(1492): Ceres Seq. ID no. 15175931
gatatgtaaacagtaaaccaaactggactgaggcgagaaggagtagagcatagtatggagcacacagtctcaaactcaagcagtgtcgagcagattctgaatcttctctacgcagccggctacgtcgacgccacaaatcccgatgcgccgccgtctcagaaaatcgccgccggcctctcctggtgcatcgccgccataacaggcgacgacaacacacgtgacatcgaggaatcgtttggattagttggatgcccgcaccctctgcgatcctctcacattcaggatcttgataccgatgctctttttcctgtaattcagtggcttgcgtcacacattcggcaaaatcaagaacactgtgtcaatgaggttcatcatgctgaaaataccattgaagtggatgagtgtagaacttcgattcaggcattaagtggcaacttggatgaactgaatcagcggaagatgaatgttgtgaagcaattatatattctacaagagagaatcaataaggagggtgctgattctgcagtacagaagttgctttctttactgacatctttgaagaatcttgaaaagcaggaaaaatactttcagtccaatcgtgatgctaaacactcagaacttcaagatgatattagtgaattagagaggaaaataacaaatgacagtgataatgagaaccttcctgatgaactacatcattcatttggtgaattagttgaaaaagtcaatttgatgaaaaagcaacttgctgctagactgagggatattgtggtattaagacgacagattgatgacctaccgtgccaatcagaagtcatccagtacgaacgccggctctcagaactgtatgcacaaatttaggttcatgaattgttttgatgaaaaagagtttattattaagaaaagaggaaaagttaagttagtgggaggctaatacttttttttgtttatcaaatcatactcactctggttctcacttaacttctaattgttatgcatgtctttggttttgcctatgcacagggaaaacatcgacaaactcgtaaatactatgctacctacaatgctctcttggaaataaaagaattgatgctaaaggaaacatctttattgaattcgatcatttcccagtttcaagaggcctttagtagcactgatggacgtataaaacttgttcattccatggaaggaattgtcaagggaagtcaacagaagctagaaagggttcatgtaggacttcaagaagaagagagaattcgtaatgatctgaaggataggtatgctgcagcaaccggtgagcacaagcactgctattctctgttgaaagcttttcaggcccaatgtgcgaagaattagaggtttcgatgacaagacaactttgaggttgagttgcacaaagtactgtatcgcgtcaaagcgtagaggtttctctgtaactgtagacgatcccagtaagggtggagaattctccaattgaaatttactttaacgt

SEQ ID NO: 7814 - protein, 268 aa, Glycine max
  misc_feature (1)..(268): Ceres Seq. ID no. 15175932
MEHTVSNSSSVEQILNLLYAAGYVDATNPDAPPSQKIAAGLSWCIAAITGDDNTRDIEESFGLVGCPHPLRSSHIQDLDTDALFPVIQWLASHIRQNQEHCVNEVHHAENTIEVDECRTSIQALSGNLDELNQRKMNVVKQLYILQERINKEGADSAVQKLLSLLTSLKNLEKQEKYFQSNRDAKHSELQDDISELERKITNDSDNENLPDELHHSFGELVEKVNLMKKQLAARLRDIVVLRRQIDDLPCQSEVIQYERRLSELYAQI

SEQ ID NO: 7815 - DNA, 1256 bp, Glycine max
  misc_feature (1)..(1256): Ceres Seq. ID no. 15176047
aaacgataaggtgtgtctcctccgactctctcgtcatcgtctgagcttacctaactccagttaatggcgatgtcgacgactacactcttccatgcacttgttccttccaacacttacaaatccagagctgtctcctcttccttcgtctcagttcctcgctcctcaactccaccttcttcgccgtctctccagttccgctcgcttgtttcagacacgacgtcgatctacggtcggaggaaatttaccggcaatctcagaagagtatccttaaccgtctccgccgccgcagcagctgagcctctcaccgtcctcgtcaccggtgccggtggcagaacagggcaaatcgtgtacaagaagttgaaggagaggtcggatcagttcgtggcgagaggcttggtgaggacgaaagagagcaaggagaagatcggtggagaggacgaagtgttcgtcggtgatattcgagaccctgaatccattgctcctgctgtgcaagggattgatgctttggtcattcttacgagcgctgtaccgaagatgaaacctggttttgatcctagcaaaggagagagacctgagttctactttgaagaaggagcttatcctgaacaggttgattggattggtcagaagaatcagatagatgctgctaaggcagcaggaattaagcagattgttttggtggggtcgatgggaggaacaaacataaacaaccccttgaatagcattggcaatgccaacattctggtttggaagaggaaagctgagcagtacttggctgattccggtattccgtacaccatcatcagggcgggcggtctgcaggacaaagaaggtggcattcgagaattaattgtgggaaaagatgacgagattctagagacagaaatgagaacaattgcaagggctgatgttgctgaagtctgcgttcaggcgttgcagctcgaggaggcaaagtataaagcacttgatctggcctcaaagcctgagggaacaggcaccccaacaaaggatttcaaggcacttttcactcaagttaccgctcggttctgatcttctgttactttgtcttttaagcagagtaataggacaagagactgagagggataataagttcattatgtgagatacacatgtctgaatcggctctttctatatttttcaaggggtctttcccgaagtatctaagtatattttgtatgcaccattcacaaaatcccaaagtcgaaaagatcgggattgatctttgaaagtaaaag

SEQ ID NO: 7816 - protein, 328 aa, Glycine max
  misc_feature (1)..(328): Ceres Seq. ID no. 15176048
MAMSTTTLFHALVPSNTYKSRAVSSSFVSVPRSSTPPSSPSLQFRSLVSDTTSIYGRRKFTGNLRRVSLTVSAAAAAEPLTVLVTGAGGRTGQIVYKKLKERSDQFVARGLVRTKESKEKIGGEDEVFVGDIRDPESIAPAVQGIDALVILTSAVPKMKPGFDPSKGERPEFYFEEGAYPEQVDWIGQKNQIDAAKAAGIKQIVLVGSMGGTNINNPLNSIGNANILVWKRKAEQYLADSGIPYTIIRAGGLQDKEGGIRELIVGKDDEILETEMRTIARADVAEVCVQALQLEEAKYKALDLASKPEGTGTPTKDFKALFTQVTARF

SEQ ID NO: 7817 - protein, 326 aa, Glycine max
  misc_feature (1)..(326): Ceres Seq. ID no. 15176049
MSTTTLFHALVPSNTYKSRAVSSSFVSVPRSSTPPSSPSLQFRSLVSDTTSIYGRRKFTGNLRRVSLTVSAAAAAEPLTVLVTGAGGRTGQIVYKKLKERSDQFVARGLVRTKESKEKIGGEDEVFVGDIRDPESIAPAVQGIDALVILTSAVPKMKPGFDPSKGERPEFYFEEGAYPEQVDWIGQKNQIDAAKAAGIKQIVLVGSMGGTNINNPLNSIGNANILVWKRKAEQYLADSGIPYTIIRAGGLQDKEGGIRELIVGKDDEILETEMRTIARADVAEVCVQALQLEEAKYKALDLASKPEGTGTPTKDFKALFTQVTARF

SEQ ID NO: 7818 - protein, 171 aa, Glycine max
  misc_feature (1)..(171): Ceres Seq. ID no. 15176050
MKPGFDPSKGERPEFYFEEGAYPEQVDWIGQKNQIDAAKAAGIKQIVLVGSMGGTNINNPLNSIGNANILVWKRKAEQYLADSGIPYTIIRAGGLQDKEGGIRELIVGKDDEILETEMRTIARADVAEVCVQALQLEEAKYKALDLASKPEGTGTPTKDFKALFTQVTARF

SEQ ID NO: 7819 - DNA, 1289 bp, Glycine max
  misc_feature (1)..(1289): Ceres Seq. ID no. 15176069
aaataaaattaactcctaaatttttcaacacataaaatggaattctccttccctattcatgatgtgctctccattgaccatgaaggtttcgccatcctgaatgctgcaaccactaaatccacttcccgtctcagcgaaaccccttcctattacaagccctacaccaaaactaaagccgatcccgttaaccaaggcttaacggagatcttggatcgcatgggtgctgccagtagcaaggctcaaggactaaagcaagtgataacaaatcatataaagtttacaacaagtggtgataatagattatatataaaagcagaagagaatagagtatatgggattctcaaagtgggaaagaagaacttgttttacagagactcaagaggaactgtaaaggaacttcaacctctgtgtgtattggacttttatgtgcatgaatcttgtcaaagaagtggtctcggaaaacagatttttgagatgatgttggaaaaagagaatattgatcctagtaaaatagcttatgatcgtccttctccgaaacttattggcttcttgaagaaacactacggacttgtcagctatgtccctcaaaataacaactttgtcgttttcaatgccttttgggataatcccaataagactttccaaggaaatagagctccaactagccatagcaatcatcatgggcatcatcatgaggaaagaaagaataatttgcatagtgatagaggttattcaagaggaactctggcaaatcaagaaagaaattatcataatagaaatggaaatacttcatataacagtcttccccaagagcaagaaagagttatagtaaaagatgatattaaaggtagaggaggtgctaatagtatgaaagatgattttgctgtttcttcgatgaatgataatatgaagtcaacagagacattgataaaagaaacagaggccaaaattcaaaaattgaatttggaaaaacagaaattaatggttccagaagaaagaagacaaaaagaatatcatagtacgactcctccatgggcaaatcatgctgaccatttcaataactataaaacatcaaattgttatggaaatcattacaatagattccaacctttaggtcgacatggaaaataaggaaattataggagagtttttttagataatttatttgtaaaagaaataaatataaatgtttgtttttgacgtatatgataaatattgataagaagatttattgaagcgaaaaaagtatcaataagtatatgcgtatgatttttattactcactacact

SEQ ID NO: 7820 - protein, 364 aa, Glycine max
  misc_feature (1)..(364): Ceres Seq. ID no. 15176070
MEFSFPIHDVLSIDHEGFAILNAATTKSTSRLSETPSYYKPYTKTKADPVNQGLTEILDRMGAASSKAQGLKQVITNHIKFTTSGDNRLYIKAEENRVYGILKVGKKNLFYRDSRGTVKELQPLCVLDFYVHESCQRSGLGKQIFEMMLEKENIDPSKIAYDRPSPKLIGFLKKHYGLVSYVPQNNNFVVFNAFWDNPNKTFQGNRAPTSHSNHHGHHHEERKNNLHSDRGYSRGTLANQERNYHNRNGNTSYNSLPQEQERVIVKDDIKGRGGANSMKDDFAVSSMNDNMKSTETLIKETEAKIQKLNLEKQKLMVPEERRQKEYHSTTPPWANHADHFNNYKTSNCYGNHYNRFQPLGRHGK

SEQ ID NO: 7821 - protein, 304 aa, Glycine max
  misc_feature (1)..(304): Ceres Seq. ID no. 15176071
MGAASSKAQGLKQVITNHIKFTTSGDNRLYIKAEENRVYGILKVGKKNLFYRDSRGTVKELQPLCVLDFYVHESCQRSGLGKQIFEMMLEKENIDPSKIAYDRPSPKLIGFLKKHYGLVSYVPQNNNFVVFNAFWDNPNKTFQGNRAPTSHSNHHGHHHEERKNNLHSDRGYSRGTLANQERNYHNRNGNTSYNSLPQEQERVIVKDDIKGRGGANSMKDDFAVSSMNDNMKSTETLIKETEAKIQKLNLEKQKLMVPEERRQKEYHSTTPPWANHADHFNNYKTSNCYGNHYNRFQPLGRHGK

SEQ ID NO: 7822 - protein, 218 aa, Glycine max
  misc_feature (1)..(218): Ceres Seq. ID no. 15176072
MMLEKENIDPSKIAYDRPSPKLIGFLKKHYGLVSYVPQNNNFVVFNAFWDNPNKTFQGNRAPTSHSNHHGHHHEERKNNLHSDRGYSRGTLANQERNYHNRNGNTSYNSLPQEQERVIVKDDIKGRGGANSMKDDFAVSSMNDNMKSTETLIKETEAKIQKLNLEKQKLMVPEERRQKEYHSTTPPWANHADHFNNYKTSNCYGNHYNRFQPLGRHGK

SEQ ID NO: 7823 - DNA, 1339 bp, Glycine max
  misc_feature (1)..(1339): Ceres Seq. ID no. 15176095
atctaccactctagtctgccacatattaataataataattaataccatgccttaagctatgcctactttggggtttgcactatactatatggacataccattctatatttgcaatcagaatatatggattgctattaaacttataatttgtgatagttggtattttttttagcaatacaaagatcccaatatgataatcatgaatctcagtttttcaacttgaacttgactactttaaatttatgtattgttaggttcccagtggcatatattacacatccaaagactcaattggatactaagccagccccatttatggcagcattttcatcaaaaggaccaaatactatggtgccagagatcctaaagcctgatatcactgcaccaggcgtgtcagttatagcagcctatactgaggcccaaggaccaaccaatcaagtgttcgacaagcgcaggattccgtttaactcagtctcaggcacatcaatgtcatgccctcatgtttcaggcattgtgggactgttgagagccttatatcctacgtggagtaccgctgcaattaaatcagcaatcatgaccacagctacaacactagacaatgaggtggagccactactgaatgctactgatggcaaggcgacaccattcagttacggggcagggcatgttcaaccaaacagagcaatggatcccgggctagtttatgacataacaattgatgattacctcaacttcttatgtgctttaggatacaacgagacacagatctcagtgttcacagaaggtccatataaatgccgcaagaaatttagtctcctcaacctgaactatccctcaatcacagtcccaaaactctctgggtcagtgacagttacaaggacattgaaaaatgttggttctccagggacttacattgctcatgttcaaaacccgtatggaatcaccgtttctgtgaagccaagcatcttgaagttcaaaaatgttggtgaagagaagagctttaaattaaccttcaaggccatgcaaggaaaggccacaaataactacgcgtttggaaaactgatatggtcagatggcaagcattacgtcacgagtccaatagttgtgaaggccctcttaactagaaattgaagtaattggtgcaatttagctcatttgcatttctaattgattgttagcctattctaaattgtatgatatatcttctaaaatagggcttctttgagagttatctctgacattgattgataacaaagaaaccaacaagtggctttctttgggtgtacttttactatgattccaaggagaaataaaacctaacacgtccattctcctagtc

SEQ ID NO: 7824 - protein, 271 aa, Glycine max
  misc_feature (1)..(271): Ceres Seq. ID no. 15176096
MAAFSSKGPNTMVPEILKPDITAPGVSVIAAYTEAQGPTNQVFDKRRIPFNSVSGTSMSCPHVSGIVGLLRALYPTWSTAAIKSAIMTTATTLDNEVEPLLNATDGKATPFSYGAGHVQPNRAMDPGLVYDITIDDYLNFLCALGYNETQISVFTEGPYKCRKKFSLLNLNYPSITVPKLSGSVTVTRTLKNVGSPGTYIAHVQNPYGITVSVKPSILKFKNVGEEKSFKLTFKAMQGKATNNYAFGKLIWSDGKHYVTSPIVVKALLTRN

SEQ ID NO: 7825 - protein, 260 aa, Glycine max
  misc_feature (1)..(260): Ceres Seq. ID no. 15176097
MVPEILKPDITAPGVSVIAAYTEAQGPTNQVFDKRRIPFNSVSGTSMSCPHVSGIVGLLRALYPTWSTAAIKSAIMTTATTLDNEVEPLLNATDGKATPFSYGAGHVQPNRAMDPGLVYDITIDDYLNFLCALGYNETQISVFTEGPYKCRKKFSLLNLNYPSITVPKLSGSVTVTRTLKNVGSPGTYIAHVQNPYGITVSVKPSILKFKNVGEEKSFKLTFKAMQGKATNNYAFGKLIWSDGKHYVTSPIVVKALLTRN

SEQ ID NO: 7826 - protein, 214 aa, Glycine max
  misc_feature (1)..(214): Ceres Seq. ID no. 15176098
MSCPHVSGIVGLLRALYPTWSTAAIKSAIMTTATTLDNEVEPLLNATDGKATPFSYGAGHVQPNRAMDPGLVYDITIDDYLNFLCALGYNETQISVFTEGPYKCRKKFSLLNLNYPSITVPKLSGSVTVTRTLKNVGSPGTYIAHVQNPYGITVSVKPSILKFKNVGEEKSFKLTFKAMQGKATNNYAFGKLIWSDGKHYVTSPIVVKALLTRN

SEQ ID NO: 7827 - DNA, 1697 bp, Glycine max
  misc_feature (1)..(1697): Ceres Seq. ID no. 15176102
gaacgcactttttttatagctcgcttctgtttctcaacctttcaagaagcaatatgaagaaccaacacggttatgtgccacctgcttacatacctttggggccgtcggattcagaggcagtggatgtctctctgcttcagcgttctagtaccaatggatcaaaccaaatgcaggctcagtggtcttctggaatctgtgcttgttgcgatgatatgcagagttgtatgctacttccttaccctgtgacctcattttaatacaaaggttgtattggttgtctttgtccttgctttctctttgggaagaatgcagactttctgggttctggaactttcctgggatcatgtgtgacccattttatattatggagtgtggttaatacagcctgttgcttattaactgatggcttgttttggggattacctggatgccttgtttcatgttatgcttgtggctaccgcaaggctttaaggtcaaagtataatttgccggtaatgctattacaattatgctttgcattgactcttgtacattattttccttctatttttcatttttgttgtggtattccaaacttttgacaattctgtagccacagcgcctggaattcaagttttgtattttgctattgcactgttgcttttcaagagactagttaatgaaatttaattaaaattataaatggttcttaattgcaggttaatcagtctgtgtatttgaaatttaaaatacatctaatatttaaatgagataaaaaaatgaaagaaaatatttctgccttgtggtagatctataaggcagtttgaaggatgatatgcctcaagtcccattgcctgtgcttttctgattaaggaatcagccattttagagataaattaaatatactttttcaacttgctatttattcatatttcacagtactcaaaggtgaaagagcagtttcttgattatgaggaaggcaggtttctcttaaaatgcttctggtactgtgaaacactgctaaacgagcattcgcctaaagtattttcccagttgcataacagttccttgtgtcaatctatactttttaatttgcctatggtagacatatttgagtattttatgtgaattgcccaatctaaaatattggatgtctcaaaacaaatgccgtgatgattctattgtttttatgctgtaatgatgttcttgccttgtaggaagcaccctgtggggattttgttacccatttttgctgccatccttgtgccatttgtcaagagtaccgtgagatacgtgaaagatctggggattgtgaagccacagacttgaagctagctgtagttacagctccgccaattcagacaatgcattctgattctaagcagtaatactactgctgttctctccctgcacaatgaccgtgtatgatctgaagggttgcaaacttgactgaggcctgtggttcactcaaaattacagtcccaagttaatgtagttatactataatgctgatgatcgcgttttctcagttttacctttttaattttcttagagaaaactagaggaatgtcatatagccagttgtacatgaaaattttagtgcgtttaatgcctagttgcattacttttttttagtgtcacctttaccctttatactcttgaaagaaaagtgaaacaacttatgccatggcattacctaatttgttaatttggggatc

SEQ ID NO: 7828 - protein, 84 aa, Glycine max
  misc_feature (1)..(84): Ceres Seq. ID no. 15176103
THFFYSSLLFLNLSRSNMKNQHGYVPPAYIPLGPSDSEAVDVSLLQRSSTNGSNQMQAQWSSGICACCDDMQSCMLLPYPVTSF

SEQ ID NO: 7829 - protein, 67 aa, Glycine max
  misc_feature (1)..(67): Ceres Seq. ID no. 15176104
MKNQHGYVPPAYIPLGPSDSEAVDVSLLQRSSTNGSNQMQAQWSSGICACCDDMQSCMLLPYPVTSF

SEQ ID NO: 7830 - protein, 57 aa, Glycine max
  misc_feature (1)..(57): Ceres Seq. ID no. 15176105
MCHLLTYLWGRRIQRQWMSLCFSVLVPMDQTKCRLSGLLESVLVAMICRVVCYFLTL

SEQ ID NO: 7831 - DNA, 1552 bp, Glycine max
  misc_feature (1)..(1552): Ceres Seq. ID no. 15176106
tctgttttttggagtcagcttcactgcacaggatttatgtgatcgcaacatgggagtttgtttgagcgcccaaattaaagctgaaagcccatataacactgggttcaattcaaagtatgtgagtacggatggaaatgatttcggcagcacaaacgataaggtttcagcaaactcaattcctcaaactcctcggagtgagggtgagatcttgcggtcatccaatttgaagagctttcccttgtcagaacttaagacggccactagaaatttccgtccagatagcgtgttaggagaaggtggttttggatcagtttttaaggggtggatcgatgagaattcattgactgctaccaaacctggcactggcattgttattgctgttaaaagacttaatcaagatggcatccagggtcacagggagtggttggctgaagtcaactatcttggacagctttctcatcctcatctagtgagattgattgggttttgccttgaagatgaacatcgccttctcgtctacgaatttatgccacgtggaagcttggaaaaccatttgttcaggagaggctcatattttcaaccactttcttggagcttacgtttgaaggtagctcttgatgctgccaaagggcttgcatttctccacagtgcagaagcaaaagtgatatatagagattttaagacttcaaatatcttgctggattcaaaatataatgcaaaactttctgattttgggctggcaaaggatggaccaacaggtgacaaaagtcatgtctccattagggtaatgggaacctacggatacgcagcacctgaatatctagccacaggtcatcttactgctaagagcgatgtctatagttttggggttgtcctgctggaaatgttgtctggcaagagggctgttgacaagaatagaccatctggacaacacaatttggtggaatgggctaaaccttacctggcaaacaagcgtaagatatttcgtgtgttggacacccggctcgaaggacaatattcaacagatgatgcctgtaagctagccacccttgccttgcggtgcctatcaatagaatccaagttcaggccaaacatggatgaagtggttacaacattggagcagctgcaagttcctaatgtaaatggaggccatcaaaatgggtctcgtgttcgtagaagaagtgctgatgtgaatagaggctatcaaaatccttctgttaatggatctcgagttcgtagaagaagtgccgatgatattagccctatggagactcccacagcttatccccggccttctgcatcccctctctatacttgatattgcaaacttatcatcatgcatctgttgctggtgatctcatccaccaactcagtcacctcagtagctattagcctattgcactctagtattgtacatatcttatttcacataatgtattcagtattgctagtaccaattaatattttcggagttctgttttaagtgtttgtaactactaaactagatgcgaaggcaggtacattatatttgtatgatagctctgattagctc

SEQ ID NO: 7832 - protein, 438 aa, Glycine max
  misc_feature (1)..(438): Ceres Seq. ID no. 15176107
LFFGVSFTAQDLCDRNMGVCLSAQIKAESPYNTGFNSKYVSTDGNDFGSTNDKVSANSIPQTPRSEGEILRSSNLKSFPLSELKTATRNFRPDSVLGEGGFGSVFKGWIDENSLTATKPGTGIVIAVKRLNQDGIQGHREWLAEVNYLGQLSHPHLVRLIGFCLEDEHRLLVYEFMPRGSLENHLFRRGSYFQPLSWSLRLKVALDAAKGLAFLHSAEAKVIYRDFKTSNILLDSKYNAKLSDFGLAKDGPTGDKSHVSIRVMGTYGYAAPEYLATGHLTAKSDVYSFGVVLLEMLSGKRAVDKNRPSGQHNLVEWAKPYLANKRKIFRVLDTRLEGQYSTDDACKLATLALRCLSIESKFRPNMDEVVTTLEQLQVPNVNGGHQNGSRVRRRSADVNRGYQNPSVNGSRVRRRSADDISPMETPTAYPRPSASPLYT

SEQ ID NO: 7833 - protein, 422 aa, Glycine max
  misc_feature (1)..(422): Ceres Seq. ID no. 15176108
MGVCLSAQIKAESPYNTGFNSKYVSTDGNDFGSTNDKVSANSIPQTPRSEGEILRSSNLKSFPLSELKTATRNFRPDSVLGEGGFGSVFKGWIDENSLTATKPGTGIVIAVKRLNQDGIQGHREWLAEVNYLGQLSHPHLVRLIGFCLEDEHRLLVYEFMPRGSLENHLFRRGSYFQPLSWSLRLKVALDAAKGLAFLHSAEAKVIYRDFKTSNILLDSKYNAKLSDFGLAKDGPTGDKSHVSIRVMGTYGYAAPEYLATGHLTAKSDVYSFGVVLLEMLSGKRAVDKNRPSGQHNLVEWAKPYLANKRKIFRVLDTRLEGQYSTDDACKLATLALRCLSIESKFRPNMDEVVTTLEQLQVPNVNGGHQNGSRVRRRSADVNRGYQNPSVNGSRVRRRSADDISPMETPTAYPRPSASPLYT

SEQ ID NO: 7834 - protein, 263 aa, Glycine max
  misc_feature (1)..(263): Ceres Seq. ID no. 15176109
MPRGSLENHLFRRGSYFQPLSWSLRLKVALDAAKGLAFLHSAEAKVIYRDFKTSNILLDSKYNAKLSDFGLAKDGPTGDKSHVSIRVMGTYGYAAPEYLATGHLTAKSDVYSFGVVLLEMLSGKRAVDKNRPSGQHNLVEWAKPYLANKRKIFRVLDTRLEGQYSTDDACKLATLALRCLSIESKFRPNMDEVVTTLEQLQVPNVNGGHQNGSRVRRRSADVNRGYQNPSVNGSRVRRRSADDISPMETPTAYPRPSASPLYT

SEQ ID NO: 7835 - DNA, 1217 bp, Glycine max
  misc_feature (1)..(1217): Ceres Seq. ID no. 15176204
ggagtgagaatagccatgtctacttcaaagagcgtcagcagttctagtgaagatgacaatgaacttagaagagggccttggactcttgaagaggataatttgctctcccaatatatttctagtcatggagaagggcgatggaatttgctagctaaacgttcaggattaaagcgaactgggaaaagttgcagattaaggtggctaaattatctaaagccagatgtaaaacggggaaatttaaccccacaagagcaacttataatcctcgaactccactcaaagtggggaaacaggtggtcaaaaattgcacaaaatttgccaggcagaacagacaatgaaatcaagaactattggagaactaggattcagaaacaggcaagacatttgaaaattgacactgacagcagagagtttcaggaacttgttaggcgtttctggatgcctagattgcttcaaaaagccaaagaatcatcttcttcagccatgtcaattcaaaaccaggcaactcctatgccttttgatggtgtttctcagcattcaactgttgggaccataccatcacattcacacaccccttggcagggaccttgtatgaatgaagctggtcccacttacatggaccaacatgagcagaactcagactctgaacacaacaatggttcatgcatctccttgtctgagtcagcaaattttccaaaagtgcctcagcattttggacgcaccaccatcacccaatatcatgccttgaataacaatgactttggcaccttcacatatgacggctacaatgtaagcaacaatgtctatgagatggacaacttcaaaacgcctactacaagggtggctgaggatgcgcaatacccaactggtgattgtcaaatggtaggaagcaattgggtaaacagcgattttgcatgtaacatgtggaacatggatgaattgtggcaatttagcaagttacaaaaataagattttagggtttggtttttttggagttaccaagactctatctttggtgatgttattattgttatcatgaactgttgattagctactaccaaattaattaatacagatggtgattgttttctgtacatctgttttgcattactctgttttgcaatttgtattgattgagaaaagtcattaattagtcactagttcaaaacacaaacagttggagattgagtgctaataaagatttcgtaaatataaag

SEQ ID NO: 7836 - protein, 322 aa, Glycine max
  misc_feature (1)..(322): Ceres Seq. ID no. 15176205
GVRIAMSTSKSVSSSSEDDNELRRGPWTLEEDNLLSQYISSHGEGRWNLLAKRSGLKRTGKSCRLRWLNYLKPDVKRGNLTPQEQLIILELHSKWGNRWSKIAQNLPGRTDNEIKNYWRTRIQKQARHLKIDTDSREFQELVRRFWMPRLLQKAKESSSSAMSIQNQATPMPFDGVSQHSTVGTIPSHSHTPWQGPCMNEAGPTYMDQHEQNSDSEHNNGSCISLSESANFPKVPQHFGRTTITQYHALNNNDFGTFTYDGYNVSNNVYEMDNFKTPTTRVAEDAQYPTGDCQMVGSNWVNSDFACNMWNMDELWQFSKLQK

SEQ ID NO: 7837 - protein, 317 aa, Glycine max
  misc_feature (1)..(317): Ceres Seq. ID no. 15176206
MSTSKSVSSSSEDDNELRRGPWTLEEDNLLSQYISSHGEGRWNLLAKRSGLKRTGKSCRLRWLNYLKPDVKRGNLTPQEQLIILELHSKWGNRWSKIAQNLPGRTDNEIKNYWRTRIQKQARHLKIDTDSREFQELVRRFWMPRLLQKAKESSSSAMSIQNQATPMPFDGVSQHSTVGTIPSHSHTPWQGPCMNEAGPTYMDQHEQNSDSEHNNGSCISLSESANFPKVPQHFGRTTITQYHALNNNDFGTFTYDGYNVSNNVYEMDNFKTPTTRVAEDAQYPTGDCQMVGSNWVNSDFACNMWNMDELWQFSKLQK

SEQ ID NO: 7838 - protein, 176 aa, Glycine max
  misc_feature (1)..(176): Ceres Seq. ID no. 15176207
MPRLLQKAKESSSSAMSIQNQATPMPFDGVSQHSTVGTIPSHSHTPWQGPCMNEAGPTYMDQHEQNSDSEHNNGSCISLSESANFPKVPQHFGRTTITQYHALNNNDFGTFTYDGYNVSNNVYEMDNFKTPTTRVAEDAQYPTGDCQMVGSNWVNSDFACNMWNMDELWQFSKLQK

SEQ ID NO: 7839 - DNA, 1290 bp, Glycine max
  misc_feature (1)..(1290): Ceres Seq. ID no. 15176294
gtatggatgtagaagtgtacagaaagactaggaccccacaagagggtcacacgcaagatttctctctatcttctcatccaccatttctccaattggaagcacacgccaacgatcctattgctctactattttcaccactattcagtgttgttcatagccataccattccacaccacaacccttcttcttctaccttgcttttcctattatctatccattgagacccccaaatggcctctgccactgccaccactctcttcacccctaaccccatgttttcaactgaacaccactctctctctccatctccaaccattcccaaatcctttactggcctctgcaagcccttccattcaagggttcccacttccatccccttcttccactgcagaagacccaagttctttgtcagggccacagttataaagtggagatgtccaaagcaaactatccctcccaatgataccggttttcaaaagaaactcctgtatctggaatccatcggtattgactctttcttgcttattgaaaaccatccaacagtgatcacaacctctcttgctgacataagatccaccgtggagtacattacctccttggatttcactgcaattgagtttcggcgtatggttggcatgtgccccgagattctgaccacccaagtctcagacctcatacctgtcttcaccttccttcatcgtgaggttcatgtgcctggctcggatattaagcgtgtaataaatcgtcgtcccaggttgcttgtcagcagtgttagtaagcgacttcgtcctaccctgtacttcctccaaagtattggcatagaagaggtaaacaagcacactgacttgctatcatgtagtgttgaggaaaagttcatgcccaggattgattactttgagaatattgggttttctcgccgtgatgcaacttcaatgttccgaagatttcctcagctattttgttatagtattaaaaataacttggagcctaaatacagttactttgtggtggagatggggagagatctgaaggagctgaaagaattcccacagtatttctcatttagcctagagaataggattaagcctaggcataaacagtgtgtagaaatgggggtgtgttttcctctccctgccttgttaaaaacaagtgaagtgaaatttcaaagtagattagacgtatgtgtaaattcttcaacccccttgaaaacatcccctctgtggtctgctggctgtgatgtttatgacgtatagaataacatttgcattgtatatttaattgcttttgtgc

SEQ ID NO: 7840 - protein, 340 aa, Glycine max
  misc_feature (1)..(340): Ceres Seq. ID no. 15176295
MASATATTLFTPNPMFSTEHHSLSPSPTIPKSFTGLCKPFHSRVPTSIPFFHCRRPKFFVRATVIKWRCPKQTIPPNDTGFQKKLLYLESIGIDSFLLIENHPTVITTSLADIRSTVEYITSLDFTAIEFRRMVGMCPEILTTQVSDLIPVFTFLHREVHVPGSDIKRVINRRPRLLVSSVSKRLRPTLYFLQSIGIEEVNKHTDLLSCSVEEKFMPRIDYFENIGFSRRDATSMFRRFPQLFCYSIKNNLEPKYSYFVVEMGRDLKELKEFPQYFSFSLENRIKPRHKQCVEMGVCFPLPALLKTSEVKFQSRLDVCVNSSTPLKTSPLWSAGCDVYDV

SEQ ID NO: 7841 - protein, 326 aa, Glycine max
  misc_feature (1)..(326): Ceres Seq. ID no. 15176296
MFSTEHHSLSPSPTIPKSFTGLCKPFHSRVPTSIPFFHCRRPKFFVRATVIKWRCPKQTIPPNDTGFQKKLLYLESIGIDSFLLIENHPTVITTSLADIRSTVEYITSLDFTAIEFRRMVGMCPEILTTQVSDLIPVFTFLHREVHVPGSDIKRVINRRPRLLVSSVSKRLRPTLYFLQSIGIEEVNKHTDLLSCSVEEKFMPRIDYFENIGFSRRDATSMFRRFPQLFCYSIKNNLEPKYSYFVVEMGRDLKELKEFPQYFSFSLENRIKPRHKQCVEMGVCFPLPALLKTSEVKFQSRLDVCVNSSTPLKTSPLWSAGCDVYDV

SEQ ID NO: 7842 - protein, 208 aa, Glycine max
  misc_feature (1)..(208): Ceres Seq. ID no. 15176297
MVGMCPEILTTQVSDLIPVFTFLHREVHVPGSDIKRVINRRPRLLVSSVSKRLRPTLYFLQSIGIEEVNKHTDLLSCSVEEKFMPRIDYFENIGFSRRDATSMFRRFPQLFCYSIKNNLEPKYSYFVVEMGRDLKELKEFPQYFSFSLENRIKPRHKQCVEMGVCFPLPALLKTSEVKFQSRLDVCVNSSTPLKTSPLWSAGCDVYDV

SEQ ID NO: 7843 - DNA, 1986 bp, Glycine max
  misc_feature (1)..(1986): Ceres Seq. ID no. 15176298
agatatcgatcgatcaccctctttcataatattcccagctggtcccccaaaaatcaatcaaatggcggcgaaacgattttttgatgattctgatcaagacaacaataataagccaccaggcgataaacggatgagaactacaccaagaccttcttttgcttcggtaataggagaagtggtgatggtgaaaaacttgcagaaccttttctcaggcttggagcccttgcttagaagagtggtgaatgaagagatggagagagtgatgaggcattttagtgtgccacgttcaatattaagtaggtccccttcgttgaggatagaagcagcatcaatggagcaagaatcaaagtatgaactggtgttcagcaagaagctatcggtccctatattcacgggaagcagaatagtggacatagatgggaattccatccacgtgattctggttgacaaaagtggcggtgaagtagtagcggttcccactagtctgggccacccgataaagctagagatagtggtgcttgatggggattttccagctcccaacaacaacaaggaagaatattcatggacgagtgaggagttcaacaaccacatagtgaaggagagaactgggaagaggccattgctcactggagaattgaatctcaccatgagagatgggattgcactaattgaagagattgagttcactgataactctagttggatacgaagcaggaagttcagagttgcagttagggtggctcctgggagtaatcaaactgttcgaattcgtgaaggaatcactgagccatttgttgttaaggatcaccgtggtgaattgtacaagaaacatcacccacctatgctcaacgacgaagtgtggcgcctagagaagattggtaaagacggagctttccacaaaaaattgtccaaagaggggataaacagcgttcaagacttcctcaagttatactttgttgatttccataggctcaaaaagattttgggcgttgggatgtcagataaaatgtgggatgtgacaatcaagcatgcaaagacttgcgagaagggcaacaaatactacgcgtaccgtgggcataattttaccgtctttctgaattccatatgccagttggttagagctgatatcaacggccaaacttttcctggcagagagctaagcaacatgactaggagctatatggaaaaattggtgagagaagcatatgctagatggaatgacttggaagaaattgatgcggctctgttaacccaaggtgaaaccttggaggaatttccaaacaatcatcaggcatcactaatagcatatgatcagaatgactactttggtgataaatctgccgaagttggtaactatgtaccaacccataatgcacaaatgggatgcagcgactggcaagtgaatggaacatttggcacaacatcattcgtgaatggcggcataccttacagcttctcagattcacaatcggacagtgacataaccccctcagttgatgctgccgcaaggtggcattaggaaaattatttagtactttgactttcagctgtaaatacgaattaacagttgaagaatcaaattaggttcagtgacttagtgtgtgaagtcttgttggcccattacataaactgtgtccagcctgccttggcttatattgggctttcttttctttctggttaggcgtagtttattatgaggcccatttcaaggatatgtgcaaagatgaggcctggctcttctgcaaaatatgcaacctgcctttgctgggctaatgttgctatgttttataatttcagctatcacgaaacagaatgatgctttataaatagtgataagataaatgatgcaatcctttgattatactgtatgcattttttgtttatgatttgatttaagagtctcattctgcttttagcttgcaaatgttcatgttctgggactatctattcacacatcacaacaaatgaaattgatccaattcc

SEQ ID NO: 7844 - protein, 506 aa, Glycine max
  misc_feature (1)..(506): Ceres Seq. ID no. 15176299
DIDRSPSFIIFPAGPPKINQMAAKRFFDDSDQDNNNKPPGDKRMRTTPRPSFASVIGEVVMVKNLQNLFSGLEPLLRRVVNEEMERVMRHFSVPRSILSRSPSLRIEAASMEQESKYELVFSKKLSVPIFTGSRIVDIDGNSIHVILVDKSGGEVVAVPTSLGHPIKLEIVVLDGDFPAPNNNKEEYSWTSEEFNNHIVKERTGKRPLLTGELNLTMRDGIALIEEIEFTDNSSWIRSRKFRVAVRVAPGSNQTVRIREGITEPFVVKDHRGELYKKHHPPMLNDEVWRLEKIGKDGAFHKKLSKEGINSVQDFLKLYFVDFHRLKKILGVGMSDKMWDVTIKHAKTCEKGNKYYAYRGHNFTVFLNSICQLVRADINGQTFPGRELSNMTRSYMEKLVREAYARWNDLEEIDAALLTQGETLEEFPNNHQASLIAYDQNDYFGDKSAEVGNYVPTHNAQMGCSDWQVNGTFGTTSFVNGGIPYSFSDSQSDSDITPSVDAAARWH

SEQ ID NO: 7845 - protein, 486 aa, Glycine max
  misc_feature (1)..(486): Ceres Seq. ID no. 15176300
MAAKRFFDDSDQDNNNKPPGDKRMRTTPRPSFASVIGEVVMVKNLQNLFSGLEPLLRRVVNEEMERVMRHFSVPRSILSRSPSLRIEAASMEQESKYELVFSKKLSVPIFTGSRIVDIDGNSIHVILVDKSGGEVVAVPTSLGHPIKLEIVVLDGDFPAPNNNKEEYSWTSEEFNNHIVKERTGKRPLLTGELNLTMRDGIALIEEIEFTDNSSWIRSRKFRVAVRVAPGSNQTVRIREGITEPFVVKDHRGELYKKHHPPMLNDEVWRLEKIGKDGAFHKKLSKEGINSVQDFLKLYFVDFHRLKKILGVGMSDKMWDVTIKHAKTCEKGNKYYAYRGHNFTVFLNSICQLVRADINGQTFPGRELSNMTRSYMEKLVREAYARWNDLEEIDAALLTQGETLEEFPNNHQASLIAYDQNDYFGDKSAEVGNYVPTHNAQMGCSDWQVNGTFGTTSFVNGGIPYSFSDSQSDSDITPSVDAAARWH

SEQ ID NO: 7846 - protein, 463 aa, Glycine max
  misc_feature (1)..(463): Ceres Seq. ID no. 15176301
MRTTPRPSFASVIGEVVMVKNLQNLFSGLEPLLRRVVNEEMERVMRHFSVPRSILSRSPSLRIEAASMEQESKYELVFSKKLSVPIFTGSRIVDIDGNSIHVILVDKSGGEVVAVPTSLGHPIKLEIVVLDGDFPAPNNNKEEYSWTSEEFNNHIVKERTGKRPLLTGELNLTMRDGIALIEEIEFTDNSSWIRSRKFRVAVRVAPGSNQTVRIREGITEPFVVKDHRGELYKKHHPPMLNDEVWRLEKIGKDGAFHKKLSKEGINSVQDFLKLYFVDFHRLKKILGVGMSDKMWDVTIKHAKTCEKGNKYYAYRGHNFTVFLNSICQLVRADINGQTFPGRELSNMTRSYMEKLVREAYARWNDLEEIDAALLTQGETLEEFPNNHQASLIAYDQNDYFGDKSAEVGNYVPTHNAQMGCSDWQVNGTFGTTSFVNGGIPYSFSDSQSDSDITPSVDAAARWH

SEQ ID NO: 7847 - DNA, 2335 bp, Glycine max
  misc_feature (1)..(2335): Ceres Seq. ID no. 15176302
gaagaaaaggttctctccctctctctcttcttctctttctctgcgtgtgtgttcgtgagtggagtggcgtatgtgtagctgcgctctctatcgccggcgctctcgtcggaatttccgttattgatttttccgatcaccggattcgatccaatccctaatccctaatcccgcgattccatcaattgaaaaaattgaatagccattgaaccgtttcgtttcgggggtagcggagatggacgtttacgcgagcagcgacgaagattaccattacgactccgaccacgaggactccgtcgaggcctacgaaaacgacgagaattacgccttgctctcttccaagggcaccactactaaggtgattacaaaggaatcactgctagctgcacagaaggaggatttgcgcagagtgatggacatgctatcggtgagagagcaacatgctcggacgctgcttatttttcatcgttgggatgtggagaatctgtttgaagtgttagtagacaaggggaaatcatttctctttgctgaagctggtgttagtgtggatgaacatcgcaactctgactcacctgttcctcctgcattcatgtgctacatctgtatggaggaagttcctagtagcaaaacaacgagaatggactgcggtcactgcttttgcaacggctgttggatagagcactttattgtcaagataaatgagggtcaaagtaagcgcattagatgcatggaacacaagtgcaattccatatgtgatgatgccgttgtaagaactctactcagtagagagcaccctcatacggcagagaaatatgaacgctttctgcttgaatcttacattgaagacaataagagagttaaatggtgccccagcacacctcattgtgggaatgcaatacgggtcgaggatgatgaactgtgtgaggtagaatgttcatgtggtgtacaattttgttttagttgtttgtcagaagcacactccccttgttcatgtctgatgtgggagctttgggctaagaagtgccgagatgaatcagaaacagttaattggataactgttcatacaaaaccatgtccaaagtgtcacaaaccagtggagaagaatggtggttgtaacttggttagctgtatctgtggccaagcattttgttggttgtgtggtggagctactggccgagagcatacttggtcaagtatagctggtcatagctgtggtcgatacaaagagcaagaaaagacagctgaacgtgcaaagagggatctatatcgttatatgcattatcataaccgatataaagctcacacagactcctttaagattgaaagtaaactgaaagagactatacaagggaagattgccatttcagaagaaaaagattctacactcagagattatagctgggtaaataatggactctccagacttttcagatctaggcgagtcctatcatattcatatgcatttgcattttatatgtttggagatgagctttttaaggatgaaatgacagatgctcaacgggaaataaaacagaacttatttgaggatcaacagcaacagcttgaggcaaatgttgaaaagctctctaaaattttggaggagccttttgaaaccttttcagatgataaggttgttgagataaggatgcagatactcaacctttcaacaattattgacaaactttgtcaaaaaatgtatgaatgcattgagaatgatctattgggttctctcaatcttggcattcatagtattgctccatacaagtcaaagggcatcgagagggcatcagaactttcagttggctggaacaacaaagtcaataatactggtgtaacagaagaacttgatcgaccatctggatcagggagttcagacgataatggatgttcttctcgtaaacgtgctagaaaagagggtcttggaggtggtggtttttttgatctaaacttgccagcagagtttgtagacagaaattgactttgaaggacaccttattatacgtacaggcgtacaggtctaacaacataaaattgctttgctttgctgcctttggaaggaaggaattaatctttttggatttcataccccatttgctttctcatatctttcttttagccagccatgtctctgctgagataaaagatatgtttccaaggtttcttattcctatgccatctacctttctgtttgaaatcctagcgctgtatatagatagccttggggcatttatttgctagtagttttatgtaaatggctaccttgaggacaactaggatgcttttattcctattttatggagttataggtggaggtaacttcactgatttttcttcaaag

SEQ ID NO: 7848 - protein, 580 aa, Glycine max
  misc_feature (1)..(580): Ceres Seq. ID no. 15176303
MDVYASSDEDYHYDSDHEDSVEAYENDENYALLSSKGTTTKVITKESLLAAQKEDLRRVMDMLSVREQHARTLLIFHRWDVENLFEVLVDKGKSFLFAEAGVSVDEHRNSDSPVPPAFMCYICMEEVPSSKTTRMDCGHCFCNGCWIEHFIVKINEGQSKRIRCMEHKCNSICDDAVVRTLLSREHPHTAEKYERFLLESYIEDNKRVKWCPSTPHCGNAIRVEDDELCEVECSCGVQFCFSCLSEAHSPCSCLMWELWAKKCRDESETVNWITVHTKPCPKCHKPVEKNGGCNLVSCICGQAFCWLCGGATGREHTWSSIAGHSCGRYKEQEKTAERAKRDLYRYMHYHNRYKAHTDSFKIESKLKETIQGKIAISEEKDSTLRDYSWVNNGLSRLFRSRRVLSYSYAFAFYMFGDELFKDEMTDAQREIKQNLFEDQQQQLEANVEKLSKILEEPFETFSDDKVVEIRMQILNLSTIIDKLCQKMYECIENDLLGSLNLGIHSIAPYKSKGIERASELSVGWNNKVNNTGVTEELDRPSGSGSSDDNGCSSRKRARKEGLGGGGFFDLNLPAEFVDRN

SEQ ID NO: 7849 - protein, 521 aa, Glycine max
  misc_feature (1)..(521): Ceres Seq. ID no. 15176304
MDMLSVREQHARTLLIFHRWDVENLFEVLVDKGKSFLFAEAGVSVDEHRNSDSPVPPAFMCYICMEEVPSSKTTRMDCGHCFCNGCWIEHFIVKINEGQSKRIRCMEHKCNSICDDAVVRTLLSREHPHTAEKYERFLLESYIEDNKRVKWCPSTPHCGNAIRVEDDELCEVECSCGVQFCFSCLSEAHSPCSCLMWELWAKKCRDESETVNWITVHTKPCPKCHKPVEKNGGCNLVSCICGQAFCWLCGGATGREHTWSSIAGHSCGRYKEQEKTAERAKRDLYRYMHYHNRYKAHTDSFKIESKLKETIQGKIAISEEKDSTLRDYSWVNNGLSRLFRSRRVLSYSYAFAFYMFGDELFKDEMTDAQREIKQNLFEDQQQQLEANVEKLSKILEEPFETFSDDKVVEIRMQILNLSTIIDKLCQKMYECIENDLLGSLNLGIHSIAPYKSKGIERASELSVGWNNKVNNTGVTEELDRPSGSGSSDDNGCSSRKRARKEGLGGGGFFDLNLPAEFVDRN

SEQ ID NO: 7850 - protein, 519 aa, Glycine max
  misc_feature (1)..(519): Ceres Seq. ID no. 15176305
MLSVREQHARTLLIFHRWDVENLFEVLVDKGKSFLFAEAGVSVDEHRNSDSPVPPAFMCYICMEEVPSSKTTRMDCGHCFCNGCWIEHFIVKINEGQSKRIRCMEHKCNSICDDAVVRTLLSREHPHTAEKYERFLLESYIEDNKRVKWCPSTPHCGNAIRVEDDELCEVECSCGVQFCFSCLSEAHSPCSCLMWELWAKKCRDESETVNWITVHTKPCPKCHKPVEKNGGCNLVSCICGQAFCWLCGGATGREHTWSSIAGHSCGRYKEQEKTAERAKRDLYRYMHYHNRYKAHTDSFKIESKLKETIQGKIAISEEKDSTLRDYSWVNNGLSRLFRSRRVLSYSYAFAFYMFGDELFKDEMTDAQREIKQNLFEDQQQQLEANVEKLSKILEEPFETFSDDKVVEIRMQILNLSTIIDKLCQKMYECIENDLLGSLNLGIHSIAPYKSKGIERASELSVGWNNKVNNTGVTEELDRPSGSGSSDDNGCSSRKRARKEGLGGGGFFDLNLPAEFVDRN

SEQ ID NO: 7851 - DNA, 1507 bp, Glycine max
  misc_feature (1)..(1507): Ceres Seq. ID no. 15176313
ccatcagaaccggatccctctcttcttcttgctctagcactcttcactaagtctccacggtagatggagggcgtcgaggagatcgtcatcgccggcgccgggctcgccggcctcgccacggccctggggctgcacaggaaaggggtgaggtgcgtggtgctggagtcgtcggcgacgctgcgggcgtcggggtacgccttcaccacatggaccaacgccttccgcgcgctggatgcgctcggtgtcggggacaagatcagggagcaccatctcctctacgagaggctggtggccttctctgcgtccacgggcgaggctgccgcaaaagtgagcctaaagatgcagggtaaaagcgtgcctcacgagatccggtgcgtgaagcgcaacttcctgctggagacgctggagaacgagctgccggagggcaccatcaggtactcctccaagatggtcgccattgagatcgaggaagagggcaacgtgaagctcctgcacatggccgacggctccaccatcagagccaacgttcttgtggggtgtgacggagtgaactcggtggtggcgaggtggctgggcctgcccaagcccatcctctcggggcggtccgccaccaggggcctcgccgagtacccggacggccacggcttcgggccggagatgctgcagttcatcggccagggcttccgctccggcgtgctcccctgctccgacacctccgtgtactggaacttcacctggtacccgtccccggcggacggggacgcggacgagagtgtggccaagatgcggcggcacgtgctggccaggctgacggccgccaagatcccggcggaggcgctggacgtggtggagcggagcgagatgagcgaggtggtgtcgtcgccgctgcggttccggtcgccgctggcgctggtccggggcagcatctgcaggggcggcgtgtgcgtggccggcgacgcgttcctcccgatgaccccggagctcggccagggcggctgcgcggcgctggaggacggcgtcgtcctcgcccggtgcctcggggaggccttcgccgtcggcgggcacgggagcgccgaggcggccctggagaagtacgcccaggagcggaggtggcgcgccgtccggctggtcactgccgcgtacgttgtcggcttcgtgcagcagagcagcaacccggcgatcaagttcctcagggagaagttcctgtcggggttgctggccagagtgatggtcgacatggccgactacgactgcgggaagctctagtagttctgccattccttccttcacgacggcagaacaagaacgacgagagaaaacgaatcagttaaaacggcatcaatcaaatcgattggatgcctgtatttcgacttttcgagttaaataaagaaaataatttgatacctgataggattattagtctacaatatgtagatgataccctctatttcatggaaaacagtcagaaaatggcaataaaatggaggaagcacgtatagcttaaggc

SEQ ID NO: 7852 - protein, 400 aa, Glycine max
  misc_feature (1)..(400): Ceres Seq. ID no. 15176314
MEGVEEIVIAGAGLAGLATALGLHRKGVRCVVLESSATLRASGYAFTTWTNAFRALDALGVGDKIREHHLLYERLVAFSASTGEAAAKVSLKMQGKSVPHEIRCVKRNFLLETLENELPEGTIRYSSKMVAIEIEEEGNVKLLHMADGSTIRANVLVGCDGVNSVVARWLGLPKPILSGRSATRGLAEYPDGHGFGPEMLQFIGQGFRSGVLPCSDTSVYWNFTWYPSPADGDADESVAKMRRHVLARLTAAKIPAEALDVVERSEMSEVVSSPLRFRSPLALVRGSICRGGVCVAGDAFLPMTPELGQGGCAALEDGVVLARCLGEAFAVGGHGSAEAALEKYAQERRWRAVRLVTAAYVVGFVQQSSNPAIKFLREKFLSGLLARVMVDMADYDCGKL

SEQ ID NO: 7853 - protein, 308 aa, Glycine max
  misc_feature (1)..(308): Ceres Seq. ID no. 15176315
MQGKSVPHEIRCVKRNFLLETLENELPEGTIRYSSKMVAIEIEEEGNVKLLHMADGSTIRANVLVGCDGVNSVVARWLGLPKPILSGRSATRGLAEYPDGHGFGPEMLQFIGQGFRSGVLPCSDTSVYWNFTWYPSPADGDADESVAKMRRHVLARLTAAKIPAEALDVVERSEMSEVVSSPLRFRSPLALVRGSICRGGVCVAGDAFLPMTPELGQGGCAALEDGVVLARCLGEAFAVGGHGSAEAALEKYAQERRWRAVRLVTAAYVVGFVQQSSNPAIKFLREKFLSGLLARVMVDMADYDCGKL

SEQ ID NO: 7854 - protein, 272 aa, Glycine max
  misc_feature (1)..(272): Ceres Seq. ID no. 15176316
MVAIEIEEEGNVKLLHMADGSTIRANVLVGCDGVNSVVARWLGLPKPILSGRSATRGLAEYPDGHGFGPEMLQFIGQGFRSGVLPCSDTSVYWNFTWYPSPADGDADESVAKMRRHVLARLTAAKIPAEALDVVERSEMSEVVSSPLRFRSPLALVRGSICRGGVCVAGDAFLPMTPELGQGGCAALEDGVVLARCLGEAFAVGGHGSAEAALEKYAQERRWRAVRLVTAAYVVGFVQQSSNPAIKFLREKFLSGLLARVMVDMADYDCGKL

SEQ ID NO: 7855 - DNA, 1462 bp, Glycine max
  misc_feature (1)..(1462): Ceres Seq. ID no. 15176325
actagagcagtggaaaccaactcaaattcactcgcgagcatacacgaacacacgacaaaccgtatagatcagtcgtcgaagccagtgtaagcaaacatgcaaccgcagcaggacgccgccgaggacgtggtcattgtcggcgccggcctcgccggtgtcggcgtcgccctgggactccacaggaagggcgtgcggagcgtggtgctggagtcgtcgccggcgcttcggacgtccggcttcgcgttcatgacatggaccaacgccttccgcgcgcttgacgccctcggcgtcggcgacaagatgaggagccaccacctgcaggttcagggggtgcgcgtcatgtctccgactaccggggaagtggtgcgagagctggatctccgggtgcaaggcaaactgggaccccacgaagcccggtgcgtgcagcgtaacgtgctcctccaggcgctggaggaagagcttccggcagacaccatccgctacaactccaggatcgtctccatcgacgacgacaaagaaggcggtggcgatgccaagatcctccatctcgccgacggttcgatgctccgagcaaaggtgctgatcggttgcgacgggatcaactcagtggtggccaaatggctggggctcgccaagccgctggactcggggcgtagagccacgcgggggcacgtcaagtaccccaatggccacggcttccagcccaagttcatgcagttcagcggcaacggcttccgtgccggcctggtgccctgcggcgacacggacgtgtactggttcctgacgtggtcaccttcctgtccggacgggaaggaggacgttgaccatagcccggcggagatgaagcagttcgtcctggccaagctgcggagcatcaaggcacctgacgaggtgctggaagcggtcgagaggagcgagatgaacgacgtcctcgtggcgcccctgaggtaccgcccgccgctgtcgctcctcttcgggagcatcagcaaggggaacgtgtgcgtcgccggcgacgcgctccaccccacgacgccggacctggcacagggcgcgtgcatcgcgctggaggatgccgtcgtcctcgcgcggtgcctcggcgacgccatggcccgcgatggcgacggcactgagacgatcgaggcggctctgcgccggtacgccgggatccggcggtggaggagcgcgcaggtgatcgcggcgtcctacatggtggggcgtgtgcagcagagcgagcacgccgtggtgagatttgcgcgggacaggctgctgtcaggggtgctcgccaaggggctcctcatgacgccggactacgactgtggcacactttgactgcgaggggtctggttctggcagaagccatttgtaaaggggtctggttcgcgacttatggggctggacgaaagcctgtttttccaccagtgacggtcctatgtatccagttgtacgaatacggctttcaagc

SEQ ID NO: 7856 - protein, 410 aa, Glycine max
  misc_feature (1)..(410): Ceres Seq. ID no. 15176326
MQPQQDAAEDVVIVGAGLAGVGVALGLHRKGVRSVVLESSPALRTSGFAFMTWTNAFRALDALGVGDKMRSHHLQVQGVRVMSPTTGEVVRELDLRVQGKLGPHEARCVQRNVLLQALEEELPADTIRYNSRIVSIDDDKEGGGDAKILHLADGSMLRAKVLIGCDGINSVVAKWLGLAKPLDSGRRATRGHVKYPNGHGFQPKFMQFSGNGFRAGLVPCGDTDVYWFLTWSPSCPDGKEDVDHSPAEMKQFVLAKLRSIKAPDEVLEAVERSEMNDVLVAPLRYRPPLSLLFGSISKGNVCVAGDALHPTTPDLAQGACIALEDAVVLARCLGDAMARDGDGTETIEAALRRYAGIRRWRSAQVIAASYMVGRVQQSEHAVVRFARDRLLSGVLAKGLLMTPDYDCGTL

SEQ ID NO: 7857 - protein, 360 aa, Glycine max
  misc_feature (1)..(360): Ceres Seq. ID no. 15176327
MTWTNAFRALDALGVGDKMRSHHLQVQGVRVMSPTTGEVVRELDLRVQGKLGPHEARCVQRNVLLQALEEELPADTIRYNSRIVSIDDDKEGGGDAKILHLADGSMLRAKVLIGCDGINSVVAKWLGLAKPLDSGRRATRGHVKYPNGHGFQPKFMQFSGNGFRAGLVPCGDTDVYWFLTWSPSCPDGKEDVDHSPAEMKQFVLAKLRSIKAPDEVLEAVERSEMNDVLVAPLRYRPPLSLLFGSISKGNVCVAGDALHPTTPDLAQGACIALEDAVVLARCLGDAMARDGDGTETIEAALRRYAGIRRWRSAQVIAASYMVGRVQQSEHAVVRFARDRLLSGVLAKGLLMTPDYDCGTL

SEQ ID NO: 7858 - protein, 342 aa, Glycine max
  misc_feature (1)..(342): Ceres Seq. ID no. 15176328
MRSHHLQVQGVRVMSPTTGEVVRELDLRVQGKLGPHEARCVQRNVLLQALEEELPADTIRYNSRIVSIDDDKEGGGDAKILHLADGSMLRAKVLIGCDGINSVVAKWLGLAKPLDSGRRATRGHVKYPNGHGFQPKFMQFSGNGFRAGLVPCGDTDVYWFLTWSPSCPDGKEDVDHSPAEMKQFVLAKLRSIKAPDEVLEAVERSEMNDVLVAPLRYRPPLSLLFGSISKGNVCVAGDALHPTTPDLAQGACIALEDAVVLARCLGDAMARDGDGTETIEAALRRYAGIRRWRSAQVIAASYMVGRVQQSEHAVVRFARDRLLSGVLAKGLLMTPDYDCGTL

SEQ ID NO: 7859 - DNA, 1227 bp, Glycine max
  misc_feature (1)..(1227): Ceres Seq. ID no. 15176329
attttcatcattaaactccaacaaacgcacggcagttgcattctgagttacgccattcttctctcgtcaatagccccatgaacaaattcctgcttcgaatcaaagccctagttgatttgctctactctgttggagatccagttttgccaaaggagaatttgggtgctactctctaaggtttacctcaagagtttgactctgtaattcctttgattgaaagtcacagtgatgaaattactatcgaagaggttgaaggcctcattgttgctcaggaactgcgattgcagaaatatttcaagaaaacctcatcagactctaccttctctggatctctatcaatttgacacaatctgtttctcagatccctaccacttcttttgatcaaaacagaacatcaattttcctctgatcagaatcaatcttcgccatttacttaatattgtggttctggttggaggctgttttggccatggtaggggccgtggcggttggggttctgttcactgacatgtgcacttcaagtttgggcacactgcttttgttacgtgctggaaactgaaagctgaacttcgagggtcagcacctccagaagaagaagaagaaaactaagggagaaaggaaattttgctattttcattcatgcctgatttggttatttacatagctataggagacaattccaaatcaagctagatacgatattggtgctgctgatgctgaagatgaaatcccgagctgtcctcatgcctaatccttcagatccaacatacatgattcgggctattgcaagtaatgcctcggacaacatttactgcactcttcttgctcatggtgctgttcatggagctatggctggatatactggcttcacagtcgggcctgtgaacagtaaacaggcttatatcccaattgcctgtgtgatggagaaacaaaataaggtcaagctgactgataggatgtgggctagacttcttgcatcgacgaatcaaccaagtttcgttgcctatgatcaagaaagagtcgagaaagatataaataacatgaatattacctctcaaactagatttaataggtattttgattgattgatgcgaattgattagtcagagaatggattatcatttagcatatgggggctgatagtacccattcatttatttgtattttattaattgggcagttgacatgttgaatgaaaatcagaatttaataaatttatataccagc

SEQ ID NO: 7860 - protein, 123 aa, Glycine max
  misc_feature (1)..(123): Ceres Seq. ID no. 15176330
MLKMKSRAVLMPNPSDPTYMIRAIASNASDNIYCTLLAHGAVHGAMAGYTGFTVGPVNSKQAYIPIACVMEKQNKVKLTDRMWARLLASTNQPSFVAYDQERVEKDINNMNITSQTRFNRYFD

SEQ ID NO: 7861 - protein, 120 aa, Glycine max
  misc_feature (1)..(120): Ceres Seq. ID no. 15176331
MKSRAVLMPNPSDPTYMIRAIASNASDNIYCTLLAHGAVHGAMAGYTGFTVGPVNSKQAYIPIACVMEKQNKVKLTDRMWARLLASTNQPSFVAYDQERVEKDINNMNITSQTRFNRYFD

SEQ ID NO: 7862 - protein, 113 aa, Glycine max
  misc_feature (1)..(113): Ceres Seq. ID no. 15176332
MPNPSDPTYMIRAIASNASDNIYCTLLAHGAVHGAMAGYTGFTVGPVNSKQAYIPIACVMEKQNKVKLTDRMWARLLASTNQPSFVAYDQERVEKDINNMNITSQTRFNRYFD

SEQ ID NO: 7863 - DNA, 1304 bp, Glycine max
  misc_feature (1)..(1304): Ceres Seq. ID no. 15176333
atgctctccccgccccttccaggacaagaagaagcccttcgatcgtccggtctagctgtttctgcttatcgatatctggtttatcgcagcagtttggagctgtcggattcgagtagctagcttagctctacaatcgagcgagaagaaggatcgaggagatgagcggcggcggcggcggaggatcggcggcgacgcaggggcagcaggatctgcagctgccgccggggttcagattccatccgacggacgaggagctggtgatgcactacctgtgccggcggtgcgccggcctgcccatctccgtgcccatcatcgccgaggtcgacctctacaagttcgacccatggcagctcccgagaatggcgctctacggcgagaaggagtggtacttcttctccccgcgcgaccgcaagtacccgaacgggtcgcggccgaaccggtcggccggcacgggctactggaaggccaccggcgccgacaagccggtgggcacgcccaagcccctggccatcaagaaggcgctcgtcttctatgccgggaaggcgcccaagggcgacaagaccaactggatcatgcacgagtaccgcctcgccgacgtcgaccgctccgcccgcaagaagaacagcctcaggttggatgactgggtgctttgccggatctacaacaagaaaggcgcctcggagaggccgagcgccggtgaccggaccgcgagcgcgagccccgggcacgcggccgtcggctcgccgccggagcagaaaccggccctgctgccgccatacgcgccgcagccgttctcggacctggcggcgtactacgaggtgaggccgtcggactcgatgccgcgggcgcacgcggactcgagctgctcggaacacgtgctgacggcgtcgtgcgagcggccggaggtgcagagccagcccaagatctccgagtgggagcgcacgttcgccacagccaccccgggcgtcaacccggccggcttgatgctcgacccggcggccgggctccccgccggcgacccgctcctccaggacatcctcatgtactggggcaagccgttctgagaatccggctccgtggctgtacgtgtggtttggcgctgggatgaaatcgatcggggtagcggccggaatctatcggcaggagatactcatagccgttggatggaagatatcagtagtgcacaaggagtcacggacggcggcgatgagacgcgggagccccggtgtgttcgaggagggacgcagagagtactcttggtgtatacggatttgaactaagctgtgtatatgcgattgatttgg

SEQ ID NO: 7864 - protein, 301 aa, Glycine max
  misc_feature (1)..(301): Ceres Seq. ID no. 15176334
MSGGGGGGSAATQGQQDLQLPPGFRFHPTDEELVMHYLCRRCAGLPISVPIIAEVDLYKFDPWQLPRMALYGEKEWYFFSPRDRKYPNGSRPNRSAGTGYWKATGADKPVGTPKPLAIKKALVFYAGKAPKGDKTNWIMHEYRLADVDRSARKKNSLRLDDWVLCRIYNKKGASERPSAGDRTASASPGHAAVGSPPEQKPALLPPYAPQPFSDLAAYYEVRPSDSMPRAHADSSCSEHVLTASCERPEVQSQPKISEWERTFATATPGVNPAGLMLDPAAGLPAGDPLLQDILMYWGKPF

SEQ ID NO: 7865 - protein, 267 aa, Glycine max
  misc_feature (1)..(267): Ceres Seq. ID no. 15176335
MHYLCRRCAGLPISVPIIAEVDLYKFDPWQLPRMALYGEKEWYFFSPRDRKYPNGSRPNRSAGTGYWKATGADKPVGTPKPLAIKKALVFYAGKAPKGDKTNWIMHEYRLADVDRSARKKNSLRLDDWVLCRIYNKKGASERPSAGDRTASASPGHAAVGSPPEQKPALLPPYAPQPFSDLAAYYEVRPSDSMPRAHADSSCSEHVLTASCERPEVQSQPKISEWERTFATATPGVNPAGLMLDPAAGLPAGDPLLQDILMYWGKPF

SEQ ID NO: 7866 - protein, 234 aa, Glycine max
  misc_feature (1)..(234): Ceres Seq. ID no. 15176336
MALYGEKEWYFFSPRDRKYPNGSRPNRSAGTGYWKATGADKPVGTPKPLAIKKALVFYAGKAPKGDKTNWIMHEYRLADVDRSARKKNSLRLDDWVLCRIYNKKGASERPSAGDRTASASPGHAAVGSPPEQKPALLPPYAPQPFSDLAAYYEVRPSDSMPRAHADSSCSEHVLTASCERPEVQSQPKISEWERTFATATPGVNPAGLMLDPAAGLPAGDPLLQDILMYWGKPF

SEQ ID NO: 7867 - DNA, 1437 bp, Glycine max
  misc_feature (1)..(1437): Ceres Seq. ID no. 15176337
ctaatccattaacgtagcttcatctccatcttcctcaattctccaccacttccaccagcaacgactcgccgagagcgacagcgagatgggcagggtggcggccaagcagccagggttcgatggcggcctgagccggttatatcgtcgagccaggcgcgctggaactcggcgacgatgacgcggtggtgcttagcggcagtgagggcgcctctgtagcatgatggtcgccaggctgctccatcagcccgccgctcggcttcacgtgtagcagccgtcgccgacggtgccgctacccgaggcggcctcctccccgtcgaccttctttgcggcgccggtcgggctggtgaggatcggccgcagcttcagcccgtcgagccgctcggccgcagccctaggcttcgacgacgggtggatgcgggccacggtggtggctggcttcgtggtcgtgcaagctacgacctccactttgagccggcgagagaagacggacgcacatgtgccccagcgcgcgaggcagcctaccaaggcccgtagccggtagctcacaggaccgtatcaacaacttgccgtgtacggcgtcctccttcgttctagcctccttggtcggtccatcgactgagcgcaccaccgacgcatgcgaggccgcatccactgtcaccgccatgaggagctgtaggccctctcaggcgcgaacgtcgttgccggaggaaaccagcttgcttgctggcctgcatcccgcgataatggacgacgcgcgcagcctcgcaggacggcggtggtttgtgggacgaagccgacggagaatgggagatgcctgaggctggttcatttgcggcctcctcacggtggccacggccagcagcgacaacgggattgatggtgaaattgtccgtgcccaacgcccacaatctcgccttccacccgcgtttcagcgccgcaagaacgtcgaccgctggtggaacaaggtcttccagcgggaggcctgggcgtacgtcaagaacctgcagcgcctgccgacgtccgacgcagtgcagaaccagcagcagccgcggtccggcgagccgtgcgacggcagtagcaacagcaacaactacgagcgcgaccagtacaccgacgcgagcgacggcagccacagcaactaccagcgcaaccagtccggcgagaaacatacgacgggccgacggcagcaagcacagcagctacaagtgctgagccggtcgggcgacgagtgagagcttggaactgagaacgcgttgatgggcgcatgttgtttgcttattttgtggatgcaggggtttagaagtgcaagtccacagcctgcaaatgtgttttgtttgaactggtactgttttttccctgccgttattgatcgcgatggtctcctggtgtaaagatgtttgctactttcttgatgaaattgaagtctttcttgtgtgc

SEQ ID NO: 7868 - protein, 133 aa, Glycine max
  misc_feature (1)..(133): Ceres Seq. ID no. 15176338
MPEAGSFAASSRWPRPAATTGLMVKLSVPNAHNLAFHPRFSAARTSTAGGTRSSSGRPGRTSRTCSACRRPTQCRTSSSRGPASRATAVATATTTSATSTPTRATAATATTSATSPARNIRRADGSKHSSYKC

SEQ ID NO: 7869 - protein, 111 aa, Glycine max
  misc_feature (1)..(111): Ceres Seq. ID no. 15176339
MVKLSVPNAHNLAFHPRFSAARTSTAGGTRSSSGRPGRTSRTCSACRRPTQCRTSSSRGPASRATAVATATTTSATSTPTRATAATATTSATSPARNIRRADGSKHSSYKC

SEQ ID NO: 7870 - protein, 107 aa, Glycine max
  misc_feature (1)..(107): Ceres Seq. ID no. 15176340
MCPSARGSLPRPVAGSSQDRINNLPCTASSFVLASLVGPSTERTTDACEAASTVTAMRSCRPSQARTSLPEETSLLAGLHPAIMDDARSLAGRRWFVGRSRRRMGDA

SEQ ID NO: 7871 - DNA, 1483 bp, Glycine max
  misc_feature (1)..(1483): Ceres Seq. ID no. 15176357
agcagcaaaaataacccagtggagactaaaaattattccatcttgggccatagtaaggacaaggaagaagtggcatcacattcatcttcaaccaaacaaaatacagatgataatgataacatcgattccaatgcactacctgatagaaaggaagaagagaatatttgtcacagaagagataatctgggaagtctgtggataactcgtttttctccaaaattcactgctcccttgagagaacaacctgccaatgacacagaggcctctactgatcttaaggaagataagggaaataatgatcataaatcaatgtatatgttcaaacccctttcatcttccccagggctcagaaatttagagccaatggcttcaatgtttgcaaggagatttagtgccatcaaacatatcataccaacaaatgcaacagatactaccacacaggtaaatatgttgtgcttgttttgtggaacaaaaggacatcaactctctgattgctcggctattgcagaaaacaagctagaagatctccagaagaatatagattcatatggaggactggaagaacattcttgtctatgcatcaaatgctttcagcccaaccattgggcaatttcatgtcccacttcaatctcaactaggaaacatgaactgaaagctaatgccttggtcaatgattgtggaaaacaaaaacatttaatcccaagcaatgaagagagtgccaggctgttgactgatgaggatgaccgagttttatctggcggttctattaatgatgaaacagatcaacgaacaggccaaaatattaatttgaagctgaaataaaatgaaattataacccataaggtagggtgcaatgcatcattccagaaatactgtggttcgagtttagaggaaaacaaattcagagaaaatcctatatcttctccatccaaattgactgaaaggcagatttcacatgtgccaaagaaaatatttgatgcagtaaaaaaacttcaattgtcccgcactgacatcctgaaatgcatcaatactcatgggtcaatctcacaactagatggttttttcttgcgcctgcggcttggaaagtgggaagaagggctagggggaactggataccatgtggcatacataaatgagacccagtcccagagacagtgcccagagcagaatacaagaaaatgtctctcggtgaaagtggggagtatcaagtgtatggttgaaagtcagtatatatccaatcatgattttcttgaggaagaaatcacggaatggtggtccaacacctcagaagctggtgctgagattccatctgaagaatatctaatagaaaaatttaaaaagaaagaaatgttaggtctctaggcatttattatattaaatgttaatatattcataagcaagtttattctcactcttttagataaaaatttatgtttcctttttattatccaattgattgtatatcaaaggaagcttaaaattg

SEQ ID NO: 7872 - protein, 273 aa, Glycine max
  misc_feature (1)..(273): Ceres Seq. ID no. 15176358
SSKNNPVETKNYSILGHSKDKEEVASHSSSTKQNTDDNDNIDSNALPDRKEEENICHRRDNLGSLWITRFSPKFTAPLREQPANDTEASTDLKEDKGNNDHKSMYMFKPLSSSPGLRNLEPMASMFARRFSAIKHIIPTNATDTTTQVNMLCLFCGTKGHQLSDCSAIAENKLEDLQKNIDSYGGLEEHSCLCIKCFQPNHWAISCPTSISTRKHELKANALVNDCGKQKHLIPSNEESARLLTDEDDRVLSGGSINDETDQRTGQNINLKLK

SEQ ID NO: 7873 - protein, 170 aa, Glycine max
  misc_feature (1)..(170): Ceres Seq. ID no. 15176359
MYMFKPLSSSPGLRNLEPMASMFARRFSAIKHIIPTNATDTTTQVNMLCLFCGTKGHQLSDCSAIAENKLEDLQKNIDSYGGLEEHSCLCIKCFQPNHWAISCPTSISTRKHELKANALVNDCGKQKHLIPSNEESARLLTDEDDRVLSGGSINDETDQRTGQNINLKLK

SEQ ID NO: 7874 - protein, 168 aa, Glycine max
  misc_feature (1)..(168): Ceres Seq. ID no. 15176360
MFKPLSSSPGLRNLEPMASMFARRFSAIKHIIPTNATDTTTQVNMLCLFCGTKGHQLSDCSAIAENKLEDLQKNIDSYGGLEEHSCLCIKCFQPNHWAISCPTSISTRKHELKANALVNDCGKQKHLIPSNEESARLLTDEDDRVLSGGSINDETDQRTGQNINLKLK

SEQ ID NO: 7875 - DNA, 1399 bp, Glycine max
  misc_feature (1)..(1399): Ceres Seq. ID no. 15176363
agaaaatcatacccacgaggtcgcccccaaacacaatctcttcaatgaggaagtccgatttgaggatatcaatcaaaacatgaatgactggaacattcaagaaatccctcaagatcaactatacgttcctgaaacaattaaagataaacacaactttgattacataatcaaaacagtagagaataatattcctctaggacaggatataggggaagaatttcatttactttcaaaaaattcaatttatgaacatagccgtaagtttcaatatctatacattggttgtgtacaagtagccatcaagcccttaattgacatgggcatagatgcagcaattttaatgtgtctaagagatattacgcataataaatttgaagactccttaattggaacggtcgaaaccagtttaggacaaggtccagtatattttaattgttatccaaataagacagtgagtttaatggacagaaatattcttgactctctgttcttaaatatgcactttcatggccttgacatgaaagaaggatcaatcccaacagctttgatttataggatctagtacaaggtcatgaatacttgtgcgtctagagtcctattgcaaccacaaaagggagaaacaaccttatttatcattgatataacaaaagtcaatgtttctttaccaagagtaataaaatgggatgaagtaactctccctgaaaaaaggggtcatggagaaggtcacaccgtctgatccccgacctgctccaattattgaaaaaattaaacatgataactccagaaaggtagaaataaccttcaatagaagaaattcattttcatcaaggatagaagcctctaggtctgaatatgaatcggctagaaggtctttttcagtaagaactcgttcaatccctgtaggattaactagatctgagtcacataaccagttccctacggttaatctccaaggtctagatactacttctagtatacctagagcaacctacaatcaagaacaggaggatgaccaaaagtctatttaatccccaacttactcttctatggaactttatgatgttatctgacaactttagcattgataaggaaccacaatagagatggtttttccaaaattttaagggaacaaatagacaacagatccaagacaagttctatgaatttgtcgaaagagtaaaaatcaatattcttttctttgattggttccatgcttacaccattatagaagatatagattacccatggaaacaagatatcataggtgatccaacaacaaatgtcataacaaactggcaattgaaagacgacgagttaatccaagcagatttaccccctgcaactcagtatcaacttcccaatatcaaagatagtagtaataaacctgtcatggcaattc

SEQ ID NO: 7876 - protein, 186 aa, Glycine max
  misc_feature (1)..(186): Ceres Seq. ID no. 15176364
ENHTHEVAPKHNLFNEEVRFEDINQNMNDWNIQEIPQDQLYVPETIKDKHNFDYIIKTVENNIPLGQDIGEEFHLLSKNSIYEHSRKFQYLYIGCVQVAIKPLIDMGIDAAILMCLRDITHNKFEDSLIGTVETSLGQGPVYFNCYPNKTVSLMDRNILDSLFLNMHFHGLDMKEGSIPTALIYRI

SEQ ID NO: 7877 - protein, 160 aa, Glycine max
  misc_feature (1)..(160): Ceres Seq. ID no. 15176365
MNDWNIQEIPQDQLYVPETIKDKHNFDYIIKTVENNIPLGQDIGEEFHLLSKNSIYEHSRKFQYLYIGCVQVAIKPLIDMGIDAAILMCLRDITHNKFEDSLIGTVETSLGQGPVYFNCYPNKTVSLMDRNILDSLFLNMHFHGLDMKEGSIPTALIYRI

SEQ ID NO: 7878 - protein, 104 aa, Glycine max
  misc_feature (1)..(104): Ceres Seq. ID no. 15176366
MEKVTPSDPRPAPIIEKIKHDNSRKVEITFNRRNSFSSRIEASRSEYESARRSFSVRTRSIPVGLTRSESHNQFPTVNLQGLDTTSSIPRATYNQEQEDDQKSI

SEQ ID NO: 7879 - DNA, 1896 bp, Glycine max
  misc_feature (1)..(1896): Ceres Seq. ID no. 15176403
agcttttctgcgatcaatggagttcgacccgatcccaatcggttcgtgctccaaagaacaccagatgatctataaggagtggttcaattacgctgattcagatagcgatggccgcattacggggagtgatgccaccaagtttttcgccatgtccaatttgccccgcgaagatcttaagcaggtgtgggctattgcagattcaaagcgacaaggatatcttggtttcactgaatttatcattgctatgcagctagtttctttggctcaatctgggcactcaataacacccgatctgctgactagtgatgttgattttacaaatggaaaacctccctcaatggagggtttggacgtattactagttaagaaaaagcataaacaaaaagaggttgatgcaaatggtagttctcaattgcagccatcaccatcaagtaattggttttcttcaaagtcaacaaaaaaggtgcctctttcctctgtgacatcaataattgacggcttgaagagactctacattcagaagttgaagccattagaagttacttaccgttttaatgattttgtatccccattactgacaaatagtgactttgatgccaaaccaatggttatgcttttgggtcagtactcaactggtaaaacaacatttatcaaacatctgcttaaaagtagttatccaggagcacatattggacctgagccaacaactgataggtttgttgttgtcatgtctggatctgatgagagaagcgttcctggaaatactgttgctgtccaagcagacatgccatttagtggtcttacaacttttggcacagcatttttgtcaaaatttgtgtgttcacagatgcctcatcctctactggaacacatcacatttgttgacactccgggagttctatctggagaaaagcaacgcacacaacgagcatatgattttacgggtgtaacatcttggtttgctgctaagtgtgatttgattctccttctgtttgatcctcacaaacttgacatcagtgatgagttcaatcgtgtgatatcatccttacgggggcatgatgacaaaatccgagtggttttgaacaaggcagaccaagttgatacccaacaattgatgagggtttatggagccttaatgtggtcacttgggaaggtgctgaagacacctgaagtaatgcgagtgtatattggctccttcaatgacaagcctgtaaatgatgctgccactggtccacttgggaaggaactctttgaaaaggaacaggatgatctactctcggatctgaaagatgtaccaaaagcagcttgtgatcgaagaatcaatgagtttgtaaaacgggcccgagcagccaagatacatgcttacattatcagccatcttaaaaaggagatgcctgctatgataggcaaagctaaagctcaacaaaagctcatcgataatttggcagctgaatttggaaaggtacaaagggagttccatttacctcctggcgattttccaaatgtagagtttttcagagagagattgagtggttacaatattgataagtttgaaaaattgaaaccaaaaatgacacaagcagttgatgacatgttagcttacgacattcctaatctcttgaagaattttaggaatccctatgattaaatttctgagcaattgagtcggtgctataattagattagttagagtgacatttgtagcgtacaaattttacgggatctttatgcaatgtatgtgtgtcatgagatctttatgtgccatccggtggcctttcttttctagtaggaagttttattatttaatatatgtttttgtatttatgtatattttgttatctacaatcaagtgtcaagacagaaaataaagggaaaacacaattacttgtttgcatc

SEQ ID NO: 7880 - protein, 548 aa, Glycine max
  misc_feature (1)..(548): Ceres Seq. ID no. 15176404
AFLRSMEFDPIPIGSCSKEHQMIYKEWFNYADSDSDGRITGSDATKFFAMSNLPREDLKQVWAIADSKRQGYLGFTEFIIAMQLVSLAQSGHSITPDLLTSDVDFTNGKPPSMEGLDVLLVKKKHKQKEVDANGSSQLQPSPSSNWFSSKSTKKVPLSSVTSIIDGLKRLYIQKLKPLEVTYRFNDFVSPLLTNSDFDAKPMVMLLGQYSTGKTTFIKHLLKSSYPGAHIGPEPTTDRFVVVMSGSDERSVPGNTVAVQADMPFSGLTTFGTAFLSKFVCSQMPHPLLEHITFVDTPGVLSGEKQRTQRAYDFTGVTSWFAAKCDLILLLFDPHKLDISDEFNRVISSLRGHDDKIRVVLNKADQVDTQQLMRVYGALMWSLGKVLKTPEVMRVYIGSFNDKPVNDAATGPLGKELFEKEQDDLLSDLKDVPKAACDRRINEFVKRARAAKIHAYIISHLKKEMPAMIGKAKAQQKLIDNLAAEFGKVQREFHLPPGDFPNVEFFRERLSGYNIDKFEKLKPKMTQAVDDMLAYDIPNLLKNFRNPYD

SEQ ID NO: 7881 - protein, 543 aa, Glycine max
  misc_feature (1)..(543): Ceres Seq. ID no. 15176405
MEFDPIPIGSCSKEHQMIYKEWFNYADSDSDGRITGSDATKFFAMSNLPREDLKQVWAIADSKRQGYLGFTEFIIAMQLVSLAQSGHSITPDLLTSDVDFTNGKPPSMEGLDVLLVKKKHKQKEVDANGSSQLQPSPSSNWFSSKSTKKVPLSSVTSIIDGLKRLYIQKLKPLEVTYRFNDFVSPLLTNSDFDAKPMVMLLGQYSTGKTTFIKHLLKSSYPGAHIGPEPTTDRFVVVMSGSDERSVPGNTVAVQADMPFSGLTTFGTAFLSKFVCSQMPHPLLEHITFVDTPGVLSGEKQRTQRAYDFTGVTSWFAAKCDLILLLFDPHKLDISDEFNRVISSLRGHDDKIRVVLNKADQVDTQQLMRVYGALMWSLGKVLKTPEVMRVYIGSFNDKPVNDAATGPLGKELFEKEQDDLLSDLKDVPKAACDRRINEFVKRARAAKIHAYIISHLKKEMPAMIGKAKAQQKLIDNLAAEFGKVQREFHLPPGDFPNVEFFRERLSGYNIDKFEKLKPKMTQAVDDMLAYDIPNLLKNFRNPYD

SEQ ID NO: 7882 - protein, 527 aa, Glycine max
  misc_feature (1)..(527): Ceres Seq. ID no. 15176406
MIYKEWFNYADSDSDGRITGSDATKFFAMSNLPREDLKQVWAIADSKRQGYLGFTEFIIAMQLVSLAQSGHSITPDLLTSDVDFTNGKPPSMEGLDVLLVKKKHKQKEVDANGSSQLQPSPSSNWFSSKSTKKVPLSSVTSIIDGLKRLYIQKLKPLEVTYRFNDFVSPLLTNSDFDAKPMVMLLGQYSTGKTTFIKHLLKSSYPGAHIGPEPTTDRFVVVMSGSDERSVPGNTVAVQADMPFSGLTTFGTAFLSKFVCSQMPHPLLEHITFVDTPGVLSGEKQRTQRAYDFTGVTSWFAAKCDLILLLFDPHKLDISDEFNRVISSLRGHDDKIRVVLNKADQVDTQQLMRVYGALMWSLGKVLKTPEVMRVYIGSFNDKPVNDAATGPLGKELFEKEQDDLLSDLKDVPKAACDRRINEFVKRARAAKIHAYIISHLKKEMPAMIGKAKAQQKLIDNLAAEFGKVQREFHLPPGDFPNVEFFRERLSGYNIDKFEKLKPKMTQAVDDMLAYDIPNLLKNFRNPYD

SEQ ID NO: 7883 - DNA, 1221 bp, Glycine max
  misc_feature (1)..(1221): Ceres Seq. ID no. 15176407
gttcttcctaaaacaaatcgtgtaaaggcaaagtacagacaaagttagttagaaattgaaagggaaagggaaacgaaaatgagtagtagggtttggtgtgtggtgatggtatcagcgttggcgttgatgttacaatggcacgaagcattcagctcctacgctggctccgcaagtgcgatcatcgacccttccaaggtcaaacaagtttcgtggaaaccgagagctttcgtttacgagggttttctgacggaattggaatgcgatcacttgatttccatcgccaaatcggagctcaagagatccgcggtggccgataatttgtccggcgagagcaagttgagcgaagtcagaacgagctccggcatgttcattcccaagaacaaggatctgattgttgctggtattgaagacaagatttcatcatggacctttcttccaaaagaaaatggagaagacatacaagtattaagatatgagcacgggcagaaatatgatcctcattatgattactttgctgataaagttaatatagctcggggtggacaccgagttgcgacagttctcatgtatctcactgatgtaaccaaaggtggtgagacagtgttccctgatgcagaggaatctccacgtcacaaaggttctgaaacaaatgaaaatctctctgagtgtgcccaaaaaggaatagcagtgaaaccacgaagaggggatgcacttcttttctttagtctctacccaaatgctatcccagacacactgagtctacatgcaggatgccctgtaattgaaggtgagaaatggtcagcaacaaaatggattcatgtggactcatttgacaaggtggtgggagatggaggggattgcaatgataagcacgaaaactgtgagagatgggctacccttggagaatgtactagtaatcccgaatatatggttggatctccaggccttcctggctactgcatgaaaagttgcaaggaatgttagaagtgttactgaatgctttccagattccacatggtatttttgacgttgactcaaatttcaattggttctcagatttttattatgtattttctttttttgtgaattgtattgtattctgtctcattataattagctctcagatagtgttctagtgcatggtcacacttcaagaggtacatttcgtcggatactttgtatgtaaaactacaaaaaaggaagtatacgttgttttatccc

SEQ ID NO: 7884 - protein, 301 aa, Glycine max
  misc_feature (1)..(301): Ceres Seq. ID no. 15176408
MSSRVWCVVMVSALALMLQWHEAFSSYAGSASAIIDPSKVKQVSWKPRAFVYEGFLTELECDHLISIAKSELKRSAVADNLSGESKLSEVRTSSGMFIPKNKDLIVAGIEDKISSWTFLPKENGEDIQVLRYEHGQKYDPHYDYFADKVNIARGGHRVATVLMYLTDVTKGGETVFPDAEESPRHKGSETNENLSECAQKGIAVKPRRGDALLFFSLYPNAIPDTLSLHAGCPVIEGEKWSATKWIHVDSFDKVVGDGGDCNDKHENCERWATLGECTSNPEYMVGSPGLPGYCMKSCKEC

SEQ ID NO: 7885 - protein, 292 aa, Glycine max
  misc_feature (1)..(292): Ceres Seq. ID no. 15176409
MVSALALMLQWHEAFSSYAGSASAIIDPSKVKQVSWKPRAFVYEGFLTELECDHLISIAKSELKRSAVADNLSGESKLSEVRTSSGMFIPKNKDLIVAGIEDKISSWTFLPKENGEDIQVLRYEHGQKYDPHYDYFADKVNIARGGHRVATVLMYLTDVTKGGETVFPDAEESPRHKGSETNENLSECAQKGIAVKPRRGDALLFFSLYPNAIPDTLSLHAGCPVIEGEKWSATKWIHVDSFDKVVGDGGDCNDKHENCERWATLGECTSNPEYMVGSPGLPGYCMKSCKEC

SEQ ID NO: 7886 - protein, 285 aa, Glycine max
  misc_feature (1)..(285): Ceres Seq. ID no. 15176410
MLQWHEAFSSYAGSASAIIDPSKVKQVSWKPRAFVYEGFLTELECDHLISIAKSELKRSAVADNLSGESKLSEVRTSSGMFIPKNKDLIVAGIEDKISSWTFLPKENGEDIQVLRYEHGQKYDPHYDYFADKVNIARGGHRVATVLMYLTDVTKGGETVFPDAEESPRHKGSETNENLSECAQKGIAVKPRRGDALLFFSLYPNAIPDTLSLHAGCPVIEGEKWSATKWIHVDSFDKVVGDGGDCNDKHENCERWATLGECTSNPEYMVGSPGLPGYCMKSCKEC

SEQ ID NO: 7887 - DNA, 1784 bp, Glycine max
  misc_feature (1)..(1784): Ceres Seq. ID no. 15176411
gatactgtgaaaaacacatacacacaataatagctctctctgattaagttgtcactcacgcacagaaacacagaaagaagatgatggcgaacaaattgcaaggggcaattgttagctgccattccagaacaaggcagttgtcgatagatgagaaagggcgcgccatctccgctgtgctcactactcatcaggaaccctttaagactaaggttcctgagttgacaattagccatgtgcccccacctacaccctccatcaagaacaaagacttcatcatcccctccaccactagtggaaagtttggtaggtttggtggcaagtttgtacctgagacacttgtagcttctttgacccagctcgaagcagagttcaaaaacgccctccgtgatcatgcttttcaggcagagctagcggaggcattaagagactatgcggggagagagacacctctgtatcatgcaaagcgattgccggagtattacaagagcgtgaataatgggaaggggcctgacatatacttaaagagagaggatctcaaccacagtggctctcacaagatgaacaacgctcttgctcaagccatgattgctaagcgcatgggctgcaaaagcgtcgtcaccgccactggctctggacaacatggccttgcaacagctgcagcttgcgcaaaacttgctttggactgcaccgtcttcatggccgacaaagacatccacagacaatattcaaatgtgaggttgatcaagttgttgggagctcaggttgaagcagtagatggagggttcacagatgcagcatcagaggcgtttcggtattgggtaggggatttggaaaacaggtaccacttgagtggctcagcggtgggaccacacccgtgtccaaccatggttcgggagtttcagtcagtgatagggaaagaaacgaggatgcaagcattggaaaaatggggtgggaagccagatgttcttgttgccagcgtagggactgggtcaaacgctttgggtctgtttcatgagtttatagcagacaaagatgtgaggttcgttggagttgaggctgggggtttgggcttggagagtggaaagcattcttcaacgttgaccacaggagaagtgggtgcgtaccatggagccatcagctatttactgcaggaccaagatggtcaaattattcatccacattccatcgctgctgggatggagtatccaggagttggtccagagttaagcttccttaaagaaagcgggcgtgcggaattctgcgttgcaaatgatgaagaggctcttgatgcgtaccaaagactatgcaaattagagggcatatttccctctttggaggccgcacatgcattggctatcttagataaattggtccctactctatgcaatggtactaaggttgttgtgaattgtagtgggcgaggagataaggatgcagcaatagtcttcaatcggggaatatatatttgacaaggaataacaaagatggatgaagacctgtgttaaataacgatttgacctagcttacgatgaatactataaatgctatatataaataaaaactacacgattcatacgttgttaaaggctaggaagtggcctcggtaaataattattttcaccgtcattaactatcatcagatatttattcatgttactgtgaaaaagggattaaaggaaagtattaaactctttagagagatttgtgtaagaagatattcagtgacaaatctttatcttgtaaaaagaaagaaatgataatgaaaatattcaattaaaaaaaat

SEQ ID NO: 7888 - protein, 462 aa, Glycine max
  misc_feature (1)..(462): Ceres Seq. ID no. 15176412
MMANKLQGAIVSCHSRTRQLSIDEKGRAISAVLTTHQEPFKTKVPELTISHVPPPTPSIKNKDFIIPSTTSGKFGRFGGKFVPETLVASLTQLEAEFKNALRDHAFQAELAEALRDYAGRETPLYHAKRLPEYYKSVNNGKGPDIYLKREDLNHSGSHKMNNALAQAMIAKRMGCKSVVTATGSGQHGLATAAACAKLALDCTVFMADKDIHRQYSNVRLIKLLGAQVEAVDGGFTDAASEAFRYWVGDLENRYHLSGSAVGPHPCPTMVREFQSVIGKETRMQALEKWGGKPDVLVASVGTGSNALGLFHEFIADKDVRFVGVEAGGLGLESGKHSSTLTTGEVGAYHGAISYLLQDQDGQIIHPHSIAAGMEYPGVGPELSFLKESGRAEFCVANDEEALDAYQRLCKLEGIFPSLEAAHALAILDKLVPTLCNGTKVVVNCSGRGDKDAAIVFNRGIYI

SEQ ID NO: 7889 - protein, 461 aa, Glycine max
  misc_feature (1)..(461): Ceres Seq. ID no. 15176413
MANKLQGAIVSCHSRTRQLSIDEKGRAISAVLTTHQEPFKTKVPELTISHVPPPTPSIKNKDFIIPSTTSGKFGRFGGKFVPETLVASLTQLEAEFKNALRDHAFQAELAEALRDYAGRETPLYHAKRLPEYYKSVNNGKGPDIYLKREDLNHSGSHKMNNALAQAMIAKRMGCKSVVTATGSGQHGLATAAACAKLALDCTVFMADKDIHRQYSNVRLIKLLGAQVEAVDGGFTDAASEAFRYWVGDLENRYHLSGSAVGPHPCPTMVREFQSVIGKETRMQALEKWGGKPDVLVASVGTGSNALGLFHEFIADKDVRFVGVEAGGLGLESGKHSSTLTTGEVGAYHGAISYLLQDQDGQIIHPHSIAAGMEYPGVGPELSFLKESGRAEFCVANDEEALDAYQRLCKLEGIFPSLEAAHALAILDKLVPTLCNGTKVVVNCSGRGDKDAAIVFNRGIYI

SEQ ID NO: 7890 - protein, 303 aa, Glycine max
  misc_feature (1)..(303): Ceres Seq. ID no. 15176414
MNNALAQAMIAKRMGCKSVVTATGSGQHGLATAAACAKLALDCTVFMADKDIHRQYSNVRLIKLLGAQVEAVDGGFTDAASEAFRYWVGDLENRYHLSGSAVGPHPCPTMVREFQSVIGKETRMQALEKWGGKPDVLVASVGTGSNALGLFHEFIADKDVRFVGVEAGGLGLESGKHSSTLTTGEVGAYHGAISYLLQDQDGQIIHPHSIAAGMEYPGVGPELSFLKESGRAEFCVANDEEALDAYQRLCKLEGIFPSLEAAHALAILDKLVPTLCNGTKVVVNCSGRGDKDAAIVFNRGIYI

SEQ ID NO: 7891 - DNA, 1201 bp, Glycine max
  misc_feature (1)..(1201): Ceres Seq. ID no. 15176415
tgttaacctaattaagcttgctttaagttttatttgattggctttatgtgacttcaataaaagctcaattactcaagtgctgtttgtttgtttttttattttttttgccagctggttgatttgatgcatgcaaattcacaatgcgtttgtaacccctattttggttttattaaaggagattttgggttttcaagttattaggagcttgaacacaagagtataatatcatcatatatctcaatatctcatgctctcttcaaagttctgatctacgatttcatttgttcactttggtgctttctttaatagcaattgttggggacataactccattggatggaggttctaaagcagaaaagaatcaacgagaacaggcaacactagatcatatgtgtaaagtacttggaggaggatgtacaagtactttcttttcactatacatgagtttgttaatgagataataatgaaaattcacaactcttggtctttaaaaggtgagttacatattgatgcaaaggcatttcctctttaatttggaaattttcatatacaacatgtcattcttggtcattgtagtagtgtctgaaattggttgacaagctagctagttgttaaaacttaattaaaactattctgtattagtttcattatattttgccattgttgtagtctctcttagtcaggagttcgacttgtagtttgaatgatgtgataagaagagaaagaaacataagccatttgtacttgggcacacttgcaccaattatattaattatttttgtcttcctccgttaacagcgatagtcagttttacttgtgccttgaggaggaggaggagtaattttataccaagttgttcagtatcttatctaaagtttgttgagtttgctttggatgaaaccaaacgtcacactcacttgatcccttcgcctttacaggaaaagttcagtttcatgaattccaaggatgttaaagggagtcttagtatgctatcatttgaagctacaaaaattaggcttctacgaagattgatcattgagacagaaacaatgcaagtggtttttttaatgcccatcaattatcaaattgatatatggttggtatctactagtgtcttaacaaaatatgcctttgtgtagtaccttgtaatctattacaacaataacaatttcaaaatttgactttgtatttatttgtgccg

SEQ ID NO: 7892 - protein, 61 aa, Glycine max
  misc_feature (1)..(61): Ceres Seq. ID no. 15176416
MNSKDVKGSLSMLSFEATKIRLLRRLIIETETMQVVFLMPINYQIDIWLVSTSVLTKYAFV

SEQ ID NO: 7893 - protein, 50 aa, Glycine max
  misc_feature (1)..(50): Ceres Seq. ID no. 15176417
MLSFEATKIRLLRRLIIETETMQVVFLMPINYQIDIWLVSTSVLTKYAFV

SEQ ID NO: 7894 - protein, 39 aa, Glycine max
  misc_feature (1)..(39): Ceres Seq. ID no. 15176418
MYKYFLFTIHEFVNEIIMKIHNSWSLKGELHIDAKAFPL

SEQ ID NO: 7895 - DNA, 1575 bp, Glycine max
  misc_feature (1)..(1575): Ceres Seq. ID no. 15176440
gatacacaagaatctcacccccacagtttctggcaccaacatggatcaagagaccgaaccacaacctctgacctcaaagatctcaacagttgtaccagcaaccccgcgaggcgacgaggacggcgcgtaccacctcagcaacatggacctgctcatgaagctgcactacatcagagccgtttatttcttcatcaacgacgcagcgcaagggctctcgatttatgacctcaagaaacccatgttcccgctcctcgaccaggtcgtgcaactctcgggtcggatccgggtttctgaatcgggtcggcccttcttgaagtgcaacgatgctggtgttcgcatcgctgagtaccaccacgaccacacccttggggagtggtttcagaaaaatgggtgctcccttcaaggtctcgtccatgatcatgttcttggccctgaccttggcttctctcctttggtttttgtcaagttcacttggttcaaatgtggagggctctctctaggactcagctggtcccatgttctaggagacgctttttcagccttcagcttcatcaccaagtggagtcaaatactggcgggtcacgcgccgccaaaaatccttccaatgtcaccaactctcaaagaaatccaaaccccacacaataataattcggttaatgcgaataatgggaatcacttttctgtcaaaacagccacaaccatagaagaactttggctcgctacaaacggcataaaaatggttactcacactttccacgtcactgccaaacaacttaaccgtttggtgtcatccacgttcttttcatgtgaccaaaacaaagccaccaaaacctcgtatttcgagattctttcggcgttggtgtggaaacacattgctggcatgagggaagacaccgagccaaaggttgtaacaatttgcacacgtggcatggctaatatcgaattccccaccaatggtttggtgttgagcgttgttgaagccaacgtggcagttggacaatctgacgtgtccgatttggcgaagctgattggcgaggaaaaaagggttgagaatgttgttgtggaaaagttagtggaagagagccaagggaaaggggattttgtggtttatggggcgaatttgacgtttgtggatttggaagaaggtgacatgtacgaggttgtgctgaatggacacaaaccggtcgtgacgaattgcagcatccatggagtgggtgatcaaggtgttgttttggtgcttccgggacttgaagatgaagaaaatgggaggaatattggaagaatggtgactgtttctttgcctgaaaaagaagttgaccagctcaaagagaagctgagaggagaatggggtcctgagtcacttccattctgatagtccaaagcgtatcaactcactgctttcataagtgcaattacgagaaaattaatagctagttaagattgtgaggcatgcaaaatgataataacattattgataaaatgttataagttgattttgtaaagtgtacttttatccctttaaataaattttatggagtgcatgtttgatttgatgttagagaattgattttaaat

SEQ ID NO: 7896 - protein, 456 aa, Glycine max
  misc_feature (1)..(456): Ceres Seq. ID no. 15176441
IHKNLTPTVSGTNMDQETEPQPLTSKISTVVPATPRGDEDGAYHLSNMDLLMKLHYIRAVYFFINDAAQGLSIYDLKKPMFPLLDQVVQLSGRIRVSESGRPFLKCNDAGVRIAEYHHDHTLGEWFQKNGCSLQGLVHDHVLGPDLGFSPLVFVKFTWFKCGGLSLGLSWSHVLGDAFSAFSFITKWSQILAGHAPPKILPMSPTLKEIQTPHNNNSVNANNGNHFSVKTATTIEELWLATNGIKMVTHTFHVTAKQLNRLVSSTFFSCDQNKATKTSYFEILSALVWKHIAGMREDTEPKVVTICTRGMANIEFPTNGLVLSVVEANVAVGQSDVSDLAKLIGEEKRVENVVVEKLVEESQGKGDFVVYGANLTFVDLEEGDMYEVVLNGHKPVVTNCSIHGVGDQGVVLVLPGLEDEENGRNIGRMVTVSLPEKEVDQLKEKLRGEWGPESLPF

SEQ ID NO: 7897 - protein, 443 aa, Glycine max
  misc_feature (1)..(443): Ceres Seq. ID no. 15176442
MDQETEPQPLTSKISTVVPATPRGDEDGAYHLSNMDLLMKLHYIRAVYFFINDAAQGLSIYDLKKPMFPLLDQVVQLSGRIRVSESGRPFLKCNDAGVRIAEYHHDHTLGEWFQKNGCSLQGLVHDHVLGPDLGFSPLVFVKFTWFKCGGLSLGLSWSHVLGDAFSAFSFITKWSQILAGHAPPKILPMSPTLKEIQTPHNNNSVNANNGNHFSVKTATTIEELWLATNGIKMVTHTFHVTAKQLNRLVSSTFFSCDQNKATKTSYFEILSALVWKHIAGMREDTEPKVVTICTRGMANIEFPTNGLVLSVVEANVAVGQSDVSDLAKLIGEEKRVENVVVEKLVEESQGKGDFVVYGANLTFVDLEEGDMYEVVLNGHKPVVTNCSIHGVGDQGVVLVLPGLEDEENGRNIGRMVTVSLPEKEVDQLKEKLRGEWGPESLPF

SEQ ID NO: 7898 - protein, 409 aa, Glycine max
  misc_feature (1)..(409): Ceres Seq. ID no. 15176443
MDLLMKLHYIRAVYFFINDAAQGLSIYDLKKPMFPLLDQVVQLSGRIRVSESGRPFLKCNDAGVRIAEYHHDHTLGEWFQKNGCSLQGLVHDHVLGPDLGFSPLVFVKFTWFKCGGLSLGLSWSHVLGDAFSAFSFITKWSQILAGHAPPKILPMSPTLKEIQTPHNNNSVNANNGNHFSVKTATTIEELWLATNGIKMVTHTFHVTAKQLNRLVSSTFFSCDQNKATKTSYFEILSALVWKHIAGMREDTEPKVVTICTRGMANIEFPTNGLVLSVVEANVAVGQSDVSDLAKLIGEEKRVENVVVEKLVEESQGKGDFVVYGANLTFVDLEEGDMYEVVLNGHKPVVTNCSIHGVGDQGVVLVLPGLEDEENGRNIGRMVTVSLPEKEVDQLKEKLRGEWGPESLPF

SEQ ID NO: 7899 - DNA, 1818 bp, Glycine max
  misc_feature (1)..(1818): Ceres Seq. ID no. 15176444
aacaacaatggcaagaaaaactttagcttggtccttgcttctagggatggcttgttccatagttattggttcatatgaggagagctttcctactaggacattttctagtaacaactatcatgaagcaatacaaagattgcagtcatttaaggcctctctaacaagacatgattccattgcttcagcctcatcttccttatcaaccttctcaagcccttcttctgctccttctccttctctctcacttcagggcgtgaacaatccacgcgtgtaccgtgtgacgtcttatggtgcagatccaacgggtaattcggatagcactgaagcactccttgcagccatagaagatgcagccaagggtcctagtgaaggatatttgatggaaggcatcagagaccttggaggtgctcagattaatcttgagggtggaaattacttgatcagccggtcactcaagttgccggtggccggggtggggaaccttatgatacatggagggactataagagcctcagataattttccagaagacggctatatcattgatttgtcaccctcttctaatggaagaaacagtttaccatcctacaattttgagttcataactctcaaggaactcttgctggactcaaacttcaggggtggaggcatttcagtcataaactcacttaggactaacatagacaattgttacatcacacatttcaccaccaatggaattttagtccaaagtggtcatgaaacatacatcaggaactctttcctcggccagcatataactgctggcggcgacaaaaatgagaggaacttctcaggcactggaataaccctccagggtaatgacaatgctgtcactgatgttgtaattttctctgctgctataggaataatggttactggtcaagctaatgccttttctggtgtacattgttacaataaggccactggctttggaggcactggaatttatttgaaactaccaggtttgacccaaaccaggattgtgaattcttacatggattacactagtattgtggcggaagacccggttcaactccatatctccagcagtttcttccttggtgatgccaatattgtcctaaagtccaagaatggaattgtgaatggtgttgatattgttgataacatgttctcaggttcaaatcagggtgttgaaattgttcagcttgaccaatcaaatagtcctttccaacaaattgatcaagttattgttgatagaaacattgcaagggggatgaagttaaaggccacagttgccaaaatgtctatgcaagggaatggaacctcttggagtgttgattttaacaatgttttgctttttcctaacctcataaagaatgttcagtactctttaagctcctcaggcagcaccttccccaatcatgctctgaggaacgtgtccgagaatcgtgttgtgattgaaacaaatgaagcagtggctgccaatgtttttgttacggtggatcaaagtgcgttaagttgaagaaggtctgaaggtggtgaccaaaaagtttggtcaagagtcttgactcgaaggaattgtgcataccgagttgtgaactctttctttggatcaacttaaagtaaccatagtaccatatactaaacactgctatagatttagaagatgtagattgactgaaccacacattatacagtaactgaatgaaaagtattgtattgataaaagatatactctttctatagtttgtttttgtaaaacaggtcctaggttgaatcaaaaccagcatcttgttctcattatacagaataaaaaaaatgagagaattttattat

SEQ ID NO: 7900 - protein, 500 aa, Glycine max
  misc_feature (1)..(500): Ceres Seq. ID no. 15176445
TTMARKTLAWSLLLGMACSIVIGSYEESFPTRTFSSNNYHEAIQRLQSFKASLTRHDSIASASSSLSTFSSPSSAPSPSLSLQGVNNPRVYRVTSYGADPTGNSDSTEALLAAIEDAAKGPSEGYLMEGIRDLGGAQINLEGGNYLISRSLKLPVAGVGNLMIHGGTIRASDNFPEDGYIIDLSPSSNGRNSLPSYNFEFITLKELLLDSNFRGGGISVINSLRTNIDNCYITHFTTNGILVQSGHETYIRNSFLGQHITAGGDKNERNFSGTGITLQGNDNAVTDVVIFSAAIGIMVTGQANAFSGVHCYNKATGFGGTGIYLKLPGLTQTRIVNSYMDYTSIVAEDPVQLHISSSFFLGDANIVLKSKNGIVNGVDIVDNMFSGSNQGVEIVQLDQSNSPFQQIDQVIVDRNIARGMKLKATVAKMSMQGNGTSWSVDFNNVLLFPNLIKNVQYSLSSSGSTFPNHALRNVSENRVVIETNEAVAANVFVTVDQSALS

SEQ ID NO: 7901 - protein, 498 aa, Glycine max
  misc_feature (1)..(498): Ceres Seq. ID no. 15176446
MARKTLAWSLLLGMACSIVIGSYEESFPTRTFSSNNYHEAIQRLQSFKASLTRHDSIASASSSLSTFSSPSSAPSPSLSLQGVNNPRVYRVTSYGADPTGNSDSTEALLAAIEDAAKGPSEGYLMEGIRDLGGAQINLEGGNYLISRSLKLPVAGVGNLMIHGGTIRASDNFPEDGYIIDLSPSSNGRNSLPSYNFEFITLKELLLDSNFRGGGISVINSLRTNIDNCYITHFTTNGILVQSGHETYIRNSFLGQHITAGGDKNERNFSGTGITLQGNDNAVTDVVIFSAAIGIMVTGQANAFSGVHCYNKATGFGGTGIYLKLPGLTQTRIVNSYMDYTSIVAEDPVQLHISSSFFLGDANIVLKSKNGIVNGVDIVDNMFSGSNQGVEIVQLDQSNSPFQQIDQVIVDRNIARGMKLKATVAKMSMQGNGTSWSVDFNNVLLFPNLIKNVQYSLSSSGSTFPNHALRNVSENRVVIETNEAVAANVFVTVDQSALS

SEQ ID NO: 7902 - protein, 485 aa, Glycine max
  misc_feature (1)..(485): Ceres Seq. ID no. 15176447
MACSIVIGSYEESFPTRTFSSNNYHEAIQRLQSFKASLTRHDSIASASSSLSTFSSPSSAPSPSLSLQGVNNPRVYRVTSYGADPTGNSDSTEALLAAIEDAAKGPSEGYLMEGIRDLGGAQINLEGGNYLISRSLKLPVAGVGNLMIHGGTIRASDNFPEDGYIIDLSPSSNGRNSLPSYNFEFITLKELLLDSNFRGGGISVINSLRTNIDNCYITHFTTNGILVQSGHETYIRNSFLGQHITAGGDKNERNFSGTGITLQGNDNAVTDVVIFSAAIGIMVTGQANAFSGVHCYNKATGFGGTGIYLKLPGLTQTRIVNSYMDYTSIVAEDPVQLHISSSFFLGDANIVLKSKNGIVNGVDIVDNMFSGSNQGVEIVQLDQSNSPFQQIDQVIVDRNIARGMKLKATVAKMSMQGNGTSWSVDFNNVLLFPNLIKNVQYSLSSSGSTFPNHALRNVSENRVVIETNEAVAANVFVTVDQSALS

SEQ ID NO: 7903 - DNA, 1236 bp, Glycine max
  misc_feature (1)..(1236): Ceres Seq. ID no. 15176452
aatagagcaacagtcactgagagtggagcttaagcaaaagcaaagttacttagtcaaacgaggtcagagttcttgtgccaagtgtgcgaatgcagaaattcgctacaacagaagagttccaggttcacatggtttgcttcaccgcccctttatttattcaatgctagctgttgcagctgtttgtgtatgtgtttgtgtgttcttccgtggtcgccctttcgtaggctcagttgctcccttcagttgggaaaatctggattatggcacaatgtaatgctgctggtgggatacccaattgttcgtttttttcccctcatatggaaaaactgcttctgtgggaaaatggggaattttgtgtcaagagcccaatgtaaacatatcatgtggtgatgtagagttgtggagagatgttaggcagatccgggagaaacaacaaagtatggctgccttgtgtatagagattctgacttgaatgctgcatattttctttaatgcctgagtttaaggatataacaagctatgacctgaatgtttatcgattggtgttggaagttctgagtaggggaaatcttcagcttttttggcctgattaaacttgacattccaaatttaagttggaatggaatgtggaattgtggccacaaagcacaaacaattatgaaagcagtaagcattgggaataaagagaattgtggtgagtaaatgttggttattgctggtgaaggtcaatacctgggttcgttgcctccttcccaacacgataaaccaataaaagttccatgctttatttttccggttaattgttctgttattttaagtcaaagttacaagtccaaggtgttctgatgcattagttttcgacactgtaaagtttgatttgaggttactgatcatagggtggggggtattattatatgattaaaaagtgtaatatatttcaagttatatctgatttaattaacgtttcagattcgttttctgtttgttccgagattcagattgttatcccgtcagcctactacatccttccaatgcaagacgttcaagttagtgggacactaggggtgtgcaatgagaaatgatgaatgcttgactagtcaagagttttttttttatttctatcagtgtttattttctgtgactcgtagtttggtgtaactgataacagagtccgagggagtaactgatgcatttatgtatgtataatagataatgagatcttccgttagatttcag

SEQ ID NO: 7904 - protein, 90 aa, Glycine max
  misc_feature (1)..(90): Ceres Seq. ID no. 15176453
IEQQSLRVELKQKQSYLVKRGQSSCAKCANAEIRYNRRVPGSHGLLHRPFIYSMLAVAAVCVCVCVFFRGRPFVGSVAPFSWENLDYGTM

SEQ ID NO: 7905 - protein, 67 aa, Glycine max
  misc_feature (1)..(67): Ceres Seq. ID no. 15176454
MCLCVLPWSPFRRLSCSLQLGKSGLWHNVMLLVGYPIVRFFPLIWKNCFCGKMGNFVSRAQCKHIMW

SEQ ID NO: 7906 - protein, 55 aa, Glycine max
  misc_feature (1)..(55): Ceres Seq. ID no. 15176455
MIKKCNIFQVISDLINVSDSFSVCSEIQIVIPSAYYILPMQDVQVSGTLGVCNEK

SEQ ID NO: 7907 - protein, 37 aa, Glycine max
  misc_feature (1)..(37): Ceres Seq. ID no. 15176456
MLAVAAVCVCVCVFFRGRPFVGSVAPFSWENLDYGTM

SEQ ID NO: 7908 - DNA, 1202 bp, Glycine max
  misc_feature (1)..(1202): Ceres Seq. ID no. 15176487
gaacaaaaggagtagataaggaactcttgtgaagtctatacttgtcttagcattgttttcactcttgtttcttcatctgaatcaagtaagaagagcatggaggtggatttcaagtctccttcccttgaaaaaacagaagctgagcctcaagtagaagaaaacatgcgctttcacaagtctcttcaggttcatatataactatatatgcacatgtactctgttgtataatatttgtatgtaatctatttctttctgttgttctagtattcttctacagtttttctatgaagttctgtgttttggttatggtggttttaggagctaagagaatcgcagtctcagttgcaccatgctgcagattattgtgaaacaactttcttgaaaagtgaagctaagagagatgtgttggaaaatacaaaagaatacatatgcagggccatggttactgttgttgatcatcttgggaacgtctcggctaatcttgatgaccttatttctcaaacaaatgcattttctgaggctgagtctagaatccggtgcctcaaacaaagacttttctcatgtgaacaatatgctgataagcttgcgctcacaaaaatgagatggagggagaaagtgccaagactccatacacgatatttatcatcaccacccatccttgagagatcaagcagcgagaaattaagagattctaaaactgaagatacctcaaaattagatgataaacacatactagaaaagcatgaggatttgccactctttttgtacacccaaaagccacatggagataagaatttgaagccaaccagctttactacattgaaggagcataatttgaccatggtggtaccgattcgggatggtttgtcagtcttaacaaaagtttcaaatcctacatttcatttccaaggttccccgaaggttgcacgccatagaagatccttgcatggcagtgacatcttatggttcatacggcgtacaaaaagaatccaataaaaaacaatgttgcctattgcttcatgtgctattagccttaagtactcatggtggtggtctatcattttcatgtggcagttcaatgttagttgtttgattcaggaaccaaacattatttacaaatatttatattttgaggcactttgaagtagttatttatgtaattttggtaggaaacgtcatcatggttataatgatttagattt

SEQ ID NO: 7909 - protein, 185 aa, Glycine max
  misc_feature (1)..(185): Ceres Seq. ID no. 15176488
MVTVVDHLGNVSANLDDLISQTNAFSEAESRIRCLKQRLFSCEQYADKLALTKMRWREKVPRLHTRYLSSPPILERSSSEKLRDSKTEDTSKLDDKHILEKHEDLPLFLYTQKPHGDKNLKPTSFTTLKEHNLTMVVPIRDGLSVLTKVSNPTFHFQGSPKVARHRRSLHGSDILWFIRRTKRIQ

SEQ ID NO: 7910 - protein, 132 aa, Glycine max
  misc_feature (1)..(132): Ceres Seq. ID no. 15176489
MRWREKVPRLHTRYLSSPPILERSSSEKLRDSKTEDTSKLDDKHILEKHEDLPLFLYTQKPHGDKNLKPTSFTTLKEHNLTMVVPIRDGLSVLTKVSNPTFHFQGSPKVARHRRSLHGSDILWFIRRTKRIQ

SEQ ID NO: 7911 - DNA, 1630 bp, Glycine max
  misc_feature (1)..(1630): Ceres Seq. ID no. 15176579
gaaatttatactgactttagatgctcttcaatcattgttatttctatcagcagcagcatctgttagtgggttgaaaacgttagagaggaactttgcaacaagcatggagacagcctcagactatggagcattcacagagaaattcactttaccaccaaattctgcaccagctcttcctctcaaatcactcacctttgcagtgaaagagattttcgacacggaaggatacgtgaccggcttcgggaatcctgactgggcaaggactcatccggtggctacctctactgctccaacagctctggctctcctcagagcaggtgccacttgtgttggtaaaactgtcatggatgaaatggcttacagtataaatggagagaatatacattatggcacacctagaaatccttgtgcaccagaccgggttcctggaggatcttctagtggctctgctgttgcagttggtgcaaagcttgtggatttctcattaggaactgatactggaggaagtgtaagagtacctgcatcatactgtgggatttttggttttcgtccttctcatggtgctgtctcagaatcaggagtaatccctatgtcgcaaagttttgataccgtgggatggtttgccagggatccaatgattttgagcagagtaggaggtgtaattctacagttaccagatgtagctccaccaattagacctacttccattatcattgcagaggactgtttccagctttcaagcactccatttgatgtagttacaggaactgtcatcaaagcggtagagaagttatatggaggggatgtattgaagcctgaaatccttggagactatgtgaaaaccaatgttccaagtttgaaacatttcatgagtaaagataatacagaccaaatatataacattccatcactggctgcactttcaagtgccatgcggttgcttcaaaggtttgaattcaagaataaccatggtgaatggatcagtgcagttaaacctgatttaggtcctggaatatcagaacgtgtatcagatgccctaaggacaacgggggagaacattgatatctgttattctataaaaagggaactacacgatgctctttcggctcttcttggggactttggtgttctaatgatccccacagttccaggtcctcccccaaaactacaaacaaatacatccgacttagaaatttttcgtgcaagggcttttagcctgctgtccattgctggagtatcaggattttgtcaggtaagcataccgctagggatgtataataaccttcccctatcaatttctctggtggccagacatggtgcagataaatttttgcttcaccttgttgagagtctttatgacagcattgaagatagaaagcagcatatcatagagcacaaactttaatctgactgcaaggatgtagatatgctttgagtatgcctactatgccaaaagctgggagagaagcgaattatggacataaatcaaagaagggatattgtataaaggaaatttttgctgatctatatcctgtttctttcagatattatgagttcaattattcattaaatcatatcattttgattgtgctagcttgggtacgaaagcaaaaaagccacattggaattc

SEQ ID NO: 7912 - protein, 467 aa, Glycine max
  misc_feature (1)..(467): Ceres Seq. ID no. 15176580
KFILTLDALQSLLFLSAAASVSGLKTLERNFATSMETASDYGAFTEKFTLPPNSAPALPLKSLTFAVKEIFDTEGYVTGFGNPDWARTHPVATSTAPTALALLRAGATCVGKTVMDEMAYSINGENIHYGTPRNPCAPDRVPGGSSSGSAVAVGAKLVDFSLGTDTGGSVRVPASYCGIFGFRPSHGAVSESGVIPMSQSFDTVGWFARDPMILSRVGGVILQLPDVAPPIRPTSIIIAEDCFQLSSTPFDVVTGTVIKAVEKLYGGDVLKPEILGDYVKTNVPSLKHFMSKDNTDQIYNIPSLAALSSAMRLLQRFEFKNNHGEWISAVKPDLGPGISERVSDALRTTGENIDICYSIKRELHDALSALLGDFGVLMIPTVPGPPPKLQTNTSDLEIFRARAFSLLSIAGVSGFCQVSIPLGMYNNLPLSISLVARHGADKFLLHLVESLYDSIEDRKQHIIEHKL

SEQ ID NO: 7913 - protein, 433 aa, Glycine max
  misc_feature (1)..(433): Ceres Seq. ID no. 15176581
METASDYGAFTEKFTLPPNSAPALPLKSLTFAVKEIFDTEGYVTGFGNPDWARTHPVATSTAPTALALLRAGATCVGKTVMDEMAYSINGENIHYGTPRNPCAPDRVPGGSSSGSAVAVGAKLVDFSLGTDTGGSVRVPASYCGIFGFRPSHGAVSESGVIPMSQSFDTVGWFARDPMILSRVGGVILQLPDVAPPIRPTSIIIAEDCFQLSSTPFDVVTGTVIKAVEKLYGGDVLKPEILGDYVKTNVPSLKHFMSKDNTDQIYNIPSLAALSSAMRLLQRFEFKNNHGEWISAVKPDLGPGISERVSDALRTTGENIDICYSIKRELHDALSALLGDFGVLMIPTVPGPPPKLQTNTSDLEIFRARAFSLLSIAGVSGFCQVSIPLGMYNNLPLSISLVARHGADKFLLHLVESLYDSIEDRKQHIIEHKL

SEQ ID NO: 7914 - protein, 353 aa, Glycine max
  misc_feature (1)..(353): Ceres Seq. ID no. 15176582
MDEMAYSINGENIHYGTPRNPCAPDRVPGGSSSGSAVAVGAKLVDFSLGTDTGGSVRVPASYCGIFGFRPSHGAVSESGVIPMSQSFDTVGWFARDPMILSRVGGVILQLPDVAPPIRPTSIIIAEDCFQLSSTPFDVVTGTVIKAVEKLYGGDVLKPEILGDYVKTNVPSLKHFMSKDNTDQIYNIPSLAALSSAMRLLQRFEFKNNHGEWISAVKPDLGPGISERVSDALRTTGENIDICYSIKRELHDALSALLGDFGVLMIPTVPGPPPKLQTNTSDLEIFRARAFSLLSIAGVSGFCQVSIPLGMYNNLPLSISLVARHGADKFLLHLVESLYDSIEDRKQHIIEHKL

SEQ ID NO: 7915 - DNA, 1270 bp, Glycine max
  misc_feature (1)..(1270): Ceres Seq. ID no. 15176584
aaaacattgatgtttgctcatgtgagtccggaagcagattcatttggtgaaacagtgagtactctaaagtttgctcagcgggtttccactgtggaactgggggcagcccgtatgaacaaagaaagcagcgaggttatgcatcttaaagaacaggttgagaaccttaagattgcattggcaaccaaggaagctcagagagtaatgttccaaagaattaaagaaccacacactccattagagaagccaagactggtgtctgagaaaactccattgcgcccacgaagacttagcattgagaactgcagcgctgtaaagactgataaatccgtgaatcatgaggatagaagtggagccaaatcaccacttttgttacctcgttcgagaagattaagtttggaaggaggttcaaaaactatcaagaaagatagtctaccaaaagtatcagatgatacagtaagcaaagctttacagtacgagtcagtgtctcgacagaaatatcacccaatgcaagatccagaatcagtatcaaaactaaacggccatttcagcagtggcaattccaggtcagagttgcataccagaacccctcgaagtcctacaagcatttcctatcaaacgagattgataaaagtaaaaggtgggatgcaagttcatcctcttaaactgcctcaaacacctgaaccaccagtgctggatggaaatgatgcacatggcacgaaggtgatgggtagcacaaatggaaaaggatcccagataagaaaatccttgagaacaattgggaaactgataaatggccctgataagaggagccaacaaaataatatggttgaagtcaagtcacccatcaagggcactggtcatacaaatcatgtaaaatcaccaatttcagctgctgagaaaactaaaaagaggcaatctctaacggggactcaaccaccactgttaaataactcccgtagatcttcacttggagggaagccagtagtagcatatgacaaggacggaaatgctagaactcctccttcccattcagacaccaagactgcaaaacggtggctgtagatcattgcttcgactcaaagcacgccaacattgctgacttagtttaggacaagcagattttggtttaggacaatgtacaaaaagggcaacaaagtatttgtagaatactcagatatgatatttcagtgaggctatctgccttttccaaaggggcattcttgtaataacaaattcaagaaacagaaacaaattaaaaaaattcatgttc

SEQ ID NO: 7916 - protein, 353 aa, Glycine max
  misc_feature (1)..(353): Ceres Seq. ID no. 15176585
KTLMFAHVSPEADSFGETVSTLKFAQRVSTVELGAARMNKESSEVMHLKEQVENLKIALATKEAQRVMFQRIKEPHTPLEKPRLVSEKTPLRPRRLSIENCSAVKTDKSVNHEDRSGAKSPLLLPRSRRLSLEGGSKTIKKDSLPKVSDDTVSKALQYESVSRQKYHPMQDPESVSKLNGHFSSGNSRSELHTRTPRSPTSISYQTRLIKVKGGMQVHPLKLPQTPEPPVLDGNDAHGTKVMGSTNGKGSQIRKSLRTIGKLINGPDKRSQQNNMVEVKSPIKGTGHTNHVKSPISAAEKTKKRQSLTGTQPPLLNNSRRSSLGGKPVVAYDKDGNARTPPSHSDTKTAKRWL

SEQ ID NO: 7917 - protein, 350 aa, Glycine max
  misc_feature (1)..(350): Ceres Seq. ID no. 15176586
MFAHVSPEADSFGETVSTLKFAQRVSTVELGAARMNKESSEVMHLKEQVENLKIALATKEAQRVMFQRIKEPHTPLEKPRLVSEKTPLRPRRLSIENCSAVKTDKSVNHEDRSGAKSPLLLPRSRRLSLEGGSKTIKKDSLPKVSDDTVSKALQYESVSRQKYHPMQDPESVSKLNGHFSSGNSRSELHTRTPRSPTSISYQTRLIKVKGGMQVHPLKLPQTPEPPVLDGNDAHGTKVMGSTNGKGSQIRKSLRTIGKLINGPDKRSQQNNMVEVKSPIKGTGHTNHVKSPISAAEKTKKRQSLTGTQPPLLNNSRRSSLGGKPVVAYDKDGNARTPPSHSDTKTAKRWL

SEQ ID NO: 7918 - protein, 316 aa, Glycine max
  misc_feature (1)..(316): Ceres Seq. ID no. 15176587
MNKESSEVMHLKEQVENLKIALATKEAQRVMFQRIKEPHTPLEKPRLVSEKTPLRPRRLSIENCSAVKTDKSVNHEDRSGAKSPLLLPRSRRLSLEGGSKTIKKDSLPKVSDDTVSKALQYESVSRQKYHPMQDPESVSKLNGHFSSGNSRSELHTRTPRSPTSISYQTRLIKVKGGMQVHPLKLPQTPEPPVLDGNDAHGTKVMGSTNGKGSQIRKSLRTIGKLINGPDKRSQQNNMVEVKSPIKGTGHTNHVKSPISAAEKTKKRQSLTGTQPPLLNNSRRSSLGGKPVVAYDKDGNARTPPSHSDTKTAKRWL

SEQ ID NO: 7919 - DNA, 1397 bp, Glycine max
  misc_feature (1)..(1397): Ceres Seq. ID no. 15176635
acaccaacacatccattcattgtcttaatgttagcaatgtcttcctctttctccatccatttcttcctcctcctctcaatagcccttttctcagtttgttgcttagcagcatctcaagctcccaccaccaaatcacacccctatatccttcccattaagaaagaccccgcaacaaatttgtactacacttcagttggcattggaactcctaggcacaactttgatttagtcattgatctttctggtgaaaacttatggtacgattgtgacactcattacaactcatcatcctacagacctatagcttgtggctcaaagcaatgccccgaaattggatgtgttggttgcaatggccccttcaaaccaggttgcacaaacaatacatgccctgctaatgtaatcaaccaattagccaaattcatttacagtggtggcttaggtgaggatttcatattcattcgtcaaaacaaagtgtctggtttgctttctagttgtattgacaccgatgcattcccatcattctccgacgatgagttacctctatttggcttacccaataacaccaaaggaatcataggcctttcaaagtcacaacttgcattaccaattcagcttgcatcggcaaataaggtgccatatccgtggagggtgttccttcaaaggaatacttcattgatgtgaaagctgttcagattgatggaaatgttgtgaacttaaagccttcccttttagctattgacaacaagggaaatgggggaaccaaactcagcaccatgagtcctttcactgaattacaaacaactgtctacaagactttcattcgagatttcatcaagaaggcttcggacagaagattaaagagggtggcatcagtggcaccatttgaggcatgttatgattcaaccagcattagaaattcctcaactggactagttgtgccaactattgatctagtgctgcgaggtggagtgcagtggactatttatggagccaattcaatggttatggcaaagaaaaatgtagcatgtcttgcaattgttgatggagggacagagcctagaatgtcgttcgttaaagcttcaattgttatcggtggatatcagttggaggacaatcttttggagtttgatgtggcttcctccaaattaagcttcagctcatcgctgttgctccacaatgccacatgttcacgtacttgaatgtcatagccttatagccttattacgtgttgaaattagccactttcaattatctagtagcttctatatctttcaatattaatattatataataaaatatttaattaagtttgctatgttgtaagcaaaaacacatccgtgtttcatttgtagtagtagcatttatttttatgcttgacgggactgtgatcccaaagc

SEQ ID NO: 7920 - protein, 226 aa, Glycine max
  misc_feature (1)..(226): Ceres Seq. ID no. 15176636
TPTHPFIVLMLAMSSSFSIHFFLLLSIALFSVCCLAASQAPTTKSHPYILPIKKDPATNLYYTSVGIGTPRHNFDLVIDLSGENLWYDCDTHYNSSSYRPIACGSKQCPEIGCVGCNGPFKPGCTNNTCPANVINQLAKFIYSGGLGEDFIFIRQNKVSGLLSSCIDTDAFPSFSDDELPLFGLPNNTKGIIGLSKSQLALPIQLASANKVPYPWRVFLQRNTSLM

SEQ ID NO: 7921 - protein, 217 aa, Glycine max
  misc_feature (1)..(217): Ceres Seq. ID no. 15176637
MLAMSSSFSIHFFLLLSIALFSVCCLAASQAPTTKSHPYILPIKKDPATNLYYTSVGIGTPRHNFDLVIDLSGENLWYDCDTHYNSSSYRPIACGSKQCPEIGCVGCNGPFKPGCTNNTCPANVINQLAKFIYSGGLGEDFIFIRQNKVSGLLSSCIDTDAFPSFSDDELPLFGLPNNTKGIIGLSKSQLALPIQLASANKVPYPWRVFLQRNTSLM

SEQ ID NO: 7922 - protein, 214 aa, Glycine max
  misc_feature (1)..(214): Ceres Seq. ID no. 15176638
MSSSFSIHFFLLLSIALFSVCCLAASQAPTTKSHPYILPIKKDPATNLYYTSVGIGTPRHNFDLVIDLSGENLWYDCDTHYNSSSYRPIACGSKQCPEIGCVGCNGPFKPGCTNNTCPANVINQLAKFIYSGGLGEDFIFIRQNKVSGLLSSCIDTDAFPSFSDDELPLFGLPNNTKGIIGLSKSQLALPIQLASANKVPYPWRVFLQRNTSLM

SEQ ID NO: 7923 - DNA, 945 bp, Glycine max
  misc_feature (1)..(945): Ceres Seq. ID no. 15176643
ataaaatattaattatttagttaaaaggccaatcctttattcacaatggctgaggaacaaactactcaagttgccgaactcggtgaagaacaaaagaacttccaagctcaattcaagcttttcggtaagttcgactactccgaaatcaaggttgaagatgtctgcttcaaggattacatcgccgtcagcaacatcaagtcccaagtcttcatcccccacactgctggtagatggcaaatcaagaaattcagaaaggcccaatgccccatcgtcgaaagactcattggctctatcatgttccacggaagaaacactggtaagaagaacctcgccatcagaatcgtcaagcacgctttcgaaatcatccacatcatgactggcaagaaccccatccaagtcttcatcgaagccgtccaaaacggtggtgccagagaaggctctaccagaatcggtactggtggtgtcgtcagaagacaagccgtcgacgtttccccccttaagagagctaacctctccatctacttcatgaccgtcggtgccagaaaggccgctttcaagagcatgaagtccatcgctgaatgcttggctgatgaaatcatgaactgcgccaagaactcccccaactccactgccatcagaaagagagatgataccgaaagcgtgcttgacgattctgatggcgaggttcttcttaccagtgtttcttccgtggaacatgatagagccaatgagtctttcgacgatggggcattgggcctttctgaatttcttgatttgcctcttctgtgtaggggatggagttttttggattcttatatacttgcagatgtactcgggctttattgattctgatagcagacattttccctccatttttcatccatggttctcgagtgtttgaaccccccttccttttctgctttgaattaaagattcgtgttttat

SEQ ID NO: 7924 - protein, 266 aa, Glycine max
  misc_feature (1)..(266): Ceres Seq. ID no. 15176644
MAEEQTTQVAELGEEQKNFQAQFKLFGKFDYSEIKVEDVCFKDYIAVSNIKSQVFIPHTAGRWQIKKFRKAQCPIVERLIGSIMFHGRNTGKKNLAIRIVKHAFEIIHIMTGKNPIQVFIEAVQNGGAREGSTRIGTGGVVRRQAVDVSPLKRANLSIYFMTVGARKAAFKSMKSIAECLADEIMNCAKNSPNSTAIRKRDDTESVLDDSDGEVLLTSVSSVEHDRANESFDDGALGLSEFLDLPLLCRGWSFLDSYILADVLGLY

SEQ ID NO: 7925 - protein, 183 aa, Glycine max
  misc_feature (1)..(183): Ceres Seq. ID no. 15176645
MFHGRNTGKKNLAIRIVKHAFEIIHIMTGKNPIQVFIEAVQNGGAREGSTRIGTGGVVRRQAVDVSPLKRANLSIYFMTVGARKAAFKSMKSIAECLADEIMNCAKNSPNSTAIRKRDDTESVLDDSDGEVLLTSVSSVEHDRANESFDDGALGLSEFLDLPLLCRGWSFLDSYILADVLGLY

SEQ ID NO: 7926 - protein, 157 aa, Glycine max
  misc_feature (1)..(157): Ceres Seq. ID no. 15176646
MTGKNPIQVFIEAVQNGGAREGSTRIGTGGVVRRQAVDVSPLKRANLSIYFMTVGARKAAFKSMKSIAECLADEIMNCAKNSPNSTAIRKRDDTESVLDDSDGEVLLTSVSSVEHDRANESFDDGALGLSEFLDLPLLCRGWSFLDSYILADVLGLY

SEQ ID NO: 7927 - DNA, 468 bp, Glycine max
  misc_feature (1)..(468): Ceres Seq. ID no. 15176681
atgatgcttctcgctcacaacgccggcggcaaagagaggacggaagagaactggaagtggctgttcaaagaaacaggtttcgcccgttacaacatcatcaagatcaacgctcttccttccatcattgaggcgtttccaatctaacgaagaggaagccactacacttcatgtgcgtggttttatgttgcatgtgttgttattattattaacagctatgtgatcttcgtgtgatgtggttttcatccctacccgtgttatgtttgtgtattaaataaaagtatgaagcgccccaccaccaagtaatatgggttatatacgtgttccatatataccaagagagtggtgcgtggttgtgaagaatctatatattgctattaatgaatgagtactttggtgtgcaaaacttgctttctgtgatgttttctctcctcactccatatatatatataatcctttgctcaagttcag

SEQ ID NO: 7928 - protein, 47 aa, Glycine max
  misc_feature (1)..(47): Ceres Seq. ID no. 15176682
MMLLAHNAGGKERTEENWKWLFKETGFARYNIIKINALPSIIEAFPI

SEQ ID NO: 7929 - protein, 46 aa, Glycine max
  misc_feature (1)..(46): Ceres Seq. ID no. 15176683
MLLAHNAGGKERTEENWKWLFKETGFARYNIIKINALPSIIEAFPI

SEQ ID NO: 7930 - protein, 41 aa, Glycine max
  misc_feature (1)..(41): Ceres Seq. ID no. 15176684
DASRSQRRRQREDGRELEVAVQRNRFRPLQHHQDQRSSFHH

SEQ ID NO: 7931 - DNA, 1407 bp, Glycine max
  misc_feature (1)..(1407): Ceres Seq. ID no. 15176751
aagacttgtatatgtctcccaggtaagtaagctcctcatcacatatctaaaacaaacccttccaaaaccaagacaatacttcaaaggttcattccaatggcatcctcgtcaagttttgttcatttggtaaatctaggtttagttttagtactacttggctttattgtccctagaagtgaagccaggccaagagcattctttgtgtttggagattcgcttgttgacaatggaaacaacaactatttgcaaaccattgctcgtgctaatgcccctccttatggaattgactacccaactcatagagcaactggacgcttctctaacggcttcaacattcctgattttatcagtcaggaacttggtgctgagtctacaatgccttacttgagcccggacttaacgagagagaatctcttagttggtgccaattttgcttccgctggcgttggaatccttaacgatacaggagatcagtttatgaacataattaaaatgcatcaacaactagaatattttaaagagtaccaacaacgactgagtgctctaattggtgtcccacgaactaaaagactcgtgaatcaagcgttgattctcatcaccgttggtggcaatgactttgtaaacaactacttcctagtggattctactgcaaggtctcgtcaatattcactcccggactatgtcaagtttctcatcactcgctatagcaagcacttgcagaggctatatgatctgggagctcggcgagttcttgtgacagggacagggccattgggttgtgcccctgcagaattggctatgcgaggcaaaaatggagaatgttctgctgatctacaacgtgctgcagcattgtacaaccctcaattagagcaaatgctacttgaactcaacaagaaacttggcagcgacgttttcattgctgcaaatacagcactcatgcacaatgactacatcaccaatcccaatgcttatggatttaatacatcaaaagtagcttgttgtggacaaggaccctacaatggtatggggctatgcttgccagtctccaacctatgccccaaccgagaattgcatgcattttgggatccattccatccaactgaaaaggcaaacaaacttgttgtagaacaaattatgtcaggttctacaaagtatatgaagcctatgaacctcagcacaattctggccttggatgctcgagcacattcgtgaagattaattacaaattaacctaataatgaatagtttgttatcactaacttggtcctcaatgccaatgcatgatagctcttactgtaattggatttgttgtttgtatggaatcaattaacttgtgtaattttcgtaatgtatccatgattggagcttgaaatctcatcaagctattacttaattgttttgactttc

SEQ ID NO: 7932 - protein, 371 aa, Glycine max
  misc_feature (1)..(371): Ceres Seq. ID no. 15176752
MASSSSFVHLVNLGLVLVLLGFIVPRSEARPRAFFVFGDSLVDNGNNNYLQTIARANAPPYGIDYPTHRATGRFSNGFNIPDFISQELGAESTMPYLSPDLTRENLLVGANFASAGVGILNDTGDQFMNIIKMHQQLEYFKEYQQRLSALIGVPRTKRLVNQALILITVGGNDFVNNYFLVDSTARSRQYSLPDYVKFLITRYSKHLQRLYDLGARRVLVTGTGPLGCAPAELAMRGKNGECSADLQRAAALYNPQLEQMLLELNKKLGSDVFIAANTALMHNDYITNPNAYGFNTSKVACCGQGPYNGMGLCLPVSNLCPNRELHAFWDPFHPTEKANKLVVEQIMSGSTKYMKPMNLSTILALDARAHS

SEQ ID NO: 7933 - protein, 278 aa, Glycine max
  misc_feature (1)..(278): Ceres Seq. ID no. 15176753
MPYLSPDLTRENLLVGANFASAGVGILNDTGDQFMNIIKMHQQLEYFKEYQQRLSALIGVPRTKRLVNQALILITVGGNDFVNNYFLVDSTARSRQYSLPDYVKFLITRYSKHLQRLYDLGARRVLVTGTGPLGCAPAELAMRGKNGECSADLQRAAALYNPQLEQMLLELNKKLGSDVFIAANTALMHNDYITNPNAYGFNTSKVACCGQGPYNGMGLCLPVSNLCPNRELHAFWDPFHPTEKANKLVVEQIMSGSTKYMKPMNLSTILALDARAHS

SEQ ID NO: 7934 - protein, 244 aa, Glycine max
  misc_feature (1)..(244): Ceres Seq. ID no. 15176754
MNIIKMHQQLEYFKEYQQRLSALIGVPRTKRLVNQALILITVGGNDFVNNYFLVDSTARSRQYSLPDYVKFLITRYSKHLQRLYDLGARRVLVTGTGPLGCAPAELAMRGKNGECSADLQRAAALYNPQLEQMLLELNKKLGSDVFIAANTALMHNDYITNPNAYGFNTSKVACCGQGPYNGMGLCLPVSNLCPNRELHAFWDPFHPTEKANKLVVEQIMSGSTKYMKPMNLSTILALDARAHS

SEQ ID NO: 7935 - DNA, 2255 bp, Glycine max
  misc_feature (1)..(2255): Ceres Seq. ID no. 15176771
gaattaagattgcattgcattaggctttcacaacacctcagcgtcactgtaccagttggaaatggagacaataacagagaacggatcagatggtgtgagtttggcaagaaatacatccaacaacgcccgtcgagggttgccaatgatccaaacaaacatgaagccaacggattcggaattccaagtgtgccacgacgacagcaccccgccggtcagagcccaaaccattcacgagctccattctctgcagaagaaaaagtcaaccccttccactcccctctcagcaacgcaaggccccttcgccactgtttccgatgaggaacgccagaaacagcaactccaatcaatcagtgcgtcgttggcgtcgttgacgagggagtcagggcctaaggtggtgaaaggagacccagccactaaggcagagaaggggacacatgttcatcaccatccgcaaccacattactttgcttcaacggcgtttgatgtcagtgacagtgcgctcaaattcacccacgtcctctacaatctctcccccgctgagctgtatgagcaagcgattaagcacgagaaaggatcattcataacggcaacgggagcgttagctacactttctggagcaaaaacgggacgctctccccgagacaaacgggttgtcagggacgacaccaccgagcatgacctctggtggggaaagggctcgcccaatattgaaatggacgaacataccttcttaatcaacagagaaagagcagttgattacttgaactcccttgaaaaggtttatgtgaatgatcaatttctgaattgggatccagaacacagaatcaaagtccggatagtatctgcaagagcttatcactccctatttatgcacaatatgtgcatccgacccactcctgaagagctagaggaatttggaactccagacttcactatatacaatgcaggacagttcccttgtaatcgttacacacactacatgacttcatcaactagtattgacatcaacattgcaaggaaagaaatggtcatccttggcacacaatatgctggggaaatgaagaaaggtctctttggtttaatgcactacctcatgcccaagcgcaatattctctccctacattctgggtgcaatatgggcaaagatggcgatgttgcactcttttttggattatcaggtactggaaagacaactctgtctaccgatcataaccggtacttaattggagatgatgagcattgctggagtgaaaatggagtggcaaatattgaagggggttgctatgcaaagtgtgtcgatctttcaaaggataaagaaccagacatctggaatgccatcaaatttgggacagtactcgaaaatgttgtttttgatgagcatactcgagaggtagatttctctgacaaatctgtgaccgagaacactcgtgcagcatatcctattgagtacatacccaatgctaagataccgtgtgttgctccccatgcaaagaatgtcatccttctagcttgtgatgcatttggggtgctccccccagtaagcaagctgagcttggcccaaacaatgtaccatttcatcagtggctacacagccctggttgctgggacagaggatggtataaaagaaccacaggctacattctctgcttgtttcggggcagcgtttataatgatgcaccctaccaaatatgcagcaatgctagccgaaaagatgcagaagcatggggctactggatggcttgtcaatactggctggtcaggaggaagttatggattaggcaatcggattaagttagcgtatactaggaaaatcattgatgctattcactctgggagccttttgaatgcacagtacactaagactgaagtgtttgggcttgagatcccaacagcactagagggagtcccttctgaaatcttggaccctgtgaatacttggtctgacaagaaggcctatcaagatacacgcttgaaactagcaagcttattcaagaagaattttgatggattcacgacctacaagataggaggggatcagaagttgactgaagagattgtctctgctggtcctatattctgatgagagcatttcctatttagcgaaaaaaaaaatgaagtccaaaagcattcggttgattatttctacttaaaggttttcactgtatttagcttgcttgactataagacgatccctttattattgacacttacgagacaatacacaaatctgttattttgcgagcgtttaattattc

SEQ ID NO: 7936 - protein, 672 aa, Glycine max
  misc_feature (1)..(672): Ceres Seq. ID no. 15176772
METITENGSDGVSLARNTSNNARRGLPMIQTNMKPTDSEFQVCHDDSTPPVRAQTIHELHSLQKKKSTPSTPLSATQGPFATVSDEERQKQQLQSISASLASLTRESGPKVVKGDPATKAEKGTHVHHHPQPHYFASTAFDVSDSALKFTHVLYNLSPAELYEQAIKHEKGSFITATGALATLSGAKTGRSPRDKRVVRDDTTEHDLWWGKGSPNIEMDEHTFLINRERAVDYLNSLEKVYVNDQFLNWDPEHRIKVRIVSARAYHSLFMHNMCIRPTPEELEEFGTPDFTIYNAGQFPCNRYTHYMTSSTSIDINIARKEMVILGTQYAGEMKKGLFGLMHYLMPKRNILSLHSGCNMGKDGDVALFFGLSGTGKTTLSTDHNRYLIGDDEHCWSENGVANIEGGCYAKCVDLSKDKEPDIWNAIKFGTVLENVVFDEHTREVDFSDKSVTENTRAAYPIEYIPNAKIPCVAPHAKNVILLACDAFGVLPPVSKLSLAQTMYHFISGYTALVAGTEDGIKEPQATFSACFGAAFIMMHPTKYAAMLAEKMQKHGATGWLVNTGWSGGSYGLGNRIKLAYTRKIIDAIHSGSLLNAQYTKTEVFGLEIPTALEGVPSEILDPVNTWSDKKAYQDTRLKLASLFKKNFDGFTTYKIGGDQKLTEEIVSAGPIF

SEQ ID NO: 7937 - protein, 645 aa, Glycine max
  misc_feature (1)..(645): Ceres Seq. ID no. 15176773
MIQTNMKPTDSEFQVCHDDSTPPVRAQTIHELHSLQKKKSTPSTPLSATQGPFATVSDEERQKQQLQSISASLASLTRESGPKVVKGDPATKAEKGTHVHHHPQPHYFASTAFDVSDSALKFTHVLYNLSPAELYEQAIKHEKGSFITATGALATLSGAKTGRSPRDKRVVRDDTTEHDLWWGKGSPNIEMDEHTFLINRERAVDYLNSLEKVYVNDQFLNWDPEHRIKVRIVSARAYHSLFMHNMCIRPTPEELEEFGTPDFTIYNAGQFPCNRYTHYMTSSTSIDINIARKEMVILGTQYAGEMKKGLFGLMHYLMPKRNILSLHSGCNMGKDGDVALFFGLSGTGKTTLSTDHNRYLIGDDEHCWSENGVANIEGGCYAKCVDLSKDKEPDIWNAIKFGTVLENVVFDEHTREVDFSDKSVTENTRAAYPIEYIPNAKIPCVAPHAKNVILLACDAFGVLPPVSKLSLAQTMYHFISGYTALVAGTEDGIKEPQATFSACFGAAFIMMHPTKYAAMLAEKMQKHGATGWLVNTGWSGGSYGLGNRIKLAYTRKIIDAIHSGSLLNAQYTKTEVFGLEIPTALEGVPSEILDPVNTWSDKKAYQDTRLKLASLFKKNFDGFTTYKIGGDQKLTEEIVSAGPIF

SEQ ID NO: 7938 - protein, 640 aa, Glycine max
  misc_feature (1)..(640): Ceres Seq. ID no. 15176774
MKPTDSEFQVCHDDSTPPVRAQTIHELHSLQKKKSTPSTPLSATQGPFATVSDEERQKQQLQSISASLASLTRESGPKVVKGDPATKAEKGTHVHHHPQPHYFASTAFDVSDSALKFTHVLYNLSPAELYEQAIKHEKGSFITATGALATLSGAKTGRSPRDKRVVRDDTTEHDLWWGKGSPNIEMDEHTFLINRERAVDYLNSLEKVYVNDQFLNWDPEHRIKVRIVSARAYHSLFMHNMCIRPTPEELEEFGTPDFTIYNAGQFPCNRYTHYMTSSTSIDINIARKEMVILGTQYAGEMKKGLFGLMHYLMPKRNILSLHSGCNMGKDGDVALFFGLSGTGKTTLSTDHNRYLIGDDEHCWSENGVANIEGGCYAKCVDLSKDKEPDIWNAIKFGTVLENVVFDEHTREVDFSDKSVTENTRAAYPIEYIPNAKIPCVAPHAKNVILLACDAFGVLPPVSKLSLAQTMYHFISGYTALVAGTEDGIKEPQATFSACFGAAFIMMHPTKYAAMLAEKMQKHGATGWLVNTGWSGGSYGLGNRIKLAYTRKIIDAIHSGSLLNAQYTKTEVFGLEIPTALEGVPSEILDPVNTWSDKKAYQDTRLKLASLFKKNFDGFTTYKIGGDQKLTEEIVSAGPIF

SEQ ID NO: 7939 - DNA, 1687 bp, Glycine max
  misc_feature (1)..(1687): Ceres Seq. ID no. 15176831
agtgtatcaagaagttactgggtcagtatcaggatccatatgaagaagacattgaagctttgtgcaagctaatgagtactattggggagatgattgatcatccaaaagccaaggaacatatggatgcatattttgaaaggatgaaattattatcaaacaacatgaatttatcttctagggtgaggttcatgttgaaagattccattgatttgagaaagaataaatggcaacaaaggaggaaagtagaaggtccaaagaagattgaggaggtacacagggatgccgctcaggagaggcaggcccaagctggtaggtcaggtcgtggtcttggcaacaatcaatcagctagacggaatcccatggattttggtccacgaggatcttctatgctgtcttctcccaattctcaaatgggtggactgcgtggtcttcctactcaagttcgtgggtatggtgcttttcaggatgctcgatttgaggaacgacaatcttatgaggctaggaccttggcagttccattgcctcaaagaccctcaggagatgattctataaacttggggccccaaggtggtcttgctaggggaatgtctacgagaggatcaacagcaatttccaatttaccaatatctgatgtgcttcctgtccatggagactctcatagaatgaatacaggtcttaatggtcacagcaatttatcagagcgcacaccatatagctcaagggaggatcatgtttcaagatatggtactgataggtcttcagggccatctgcttatgatcaatcaagtgctccagagcataatgtaaaccatggcaacagaggcttgaggagtgaagatcggaatcttgaacctcttgctcatttgcaagggtcaatagtctctcagaatgcttcttcagagaagatttggccagaagaacgactgagggacatgtccttgtcagcaataagggaatactacagtgctagagatgagaacgaacttgctttatgtgtcaaagatttgaactctccgagcttccatccttccatggtttctctatgggtcacggattcatttgagagaaaggacgcagaaagagatcttttggccaaactacttgtcaaccttgtgaaatctcagcatggcactttgaatcaagaccagctcatcaaagggtttgaatctgttctcagtacattggaggatgctgttaatgatgcccccagagcagcagagtttcttggccgaatttttgcgatagccataacagagagtgtagttactttgaaggacattgggcagttaatacatgatggtggagaggagccaggtagtctcttagaagttggacttgcagctgatgttctgggaagcacgttggaggtaattcaaagcgagaagggggatgcggttctaaacaagatctgttcaggctctaacttgaggttggaaactttccggccacctaatgctaaaacatcaaggaagttggaaaaatttatttagatggtagtgacgctcattgtattttttatttttttttgtagagggtaaaaattagttggctcgtgcttttttgggggtagtactcaattttgcagagaatggttttctctgtgagatgggtcggtagagttttatctatgggattttctttgttttaaattatttttcggacatcagaaattttaggcgtttttgct

SEQ ID NO: 7940 - protein, 495 aa, Glycine max
  misc_feature (1)..(495): Ceres Seq. ID no. 15176832
CIKKLLGQYQDPYEEDIEALCKLMSTIGEMIDHPKAKEHMDAYFERMKLLSNNMNLSSRVRFMLKDSIDLRKNKWQQRRKVEGPKKIEEVHRDAAQERQAQAGRSGRGLGNNQSARRNPMDFGPRGSSMLSSPNSQMGGLRGLPTQVRGYGAFQDARFEERQSYEARTLAVPLPQRPSGDDSINLGPQGGLARGMSTRGSTAISNLPISDVLPVHGDSHRMNTGLNGHSNLSERTPYSSREDHVSRYGTDRSSGPSAYDQSSAPEHNVNHGNRGLRSEDRNLEPLAHLQGSIVSQNASSEKIWPEERLRDMSLSAIREYYSARDENELALCVKDLNSPSFHPSMVSLWVTDSFERKDAERDLLAKLLVNLVKSQHGTLNQDQLIKGFESVLSTLEDAVNDAPRAAEFLGRIFAIAITESVVTLKDIGQLIHDGGEEPGSLLEVGLAADVLGSTLEVIQSEKGDAVLNKICSGSNLRLETFRPPNAKTSRKLEKFI

SEQ ID NO: 7941 - protein, 472 aa, Glycine max
  misc_feature (1)..(472): Ceres Seq. ID no. 15176833
MSTIGEMIDHPKAKEHMDAYFERMKLLSNNMNLSSRVRFMLKDSIDLRKNKWQQRRKVEGPKKIEEVHRDAAQERQAQAGRSGRGLGNNQSARRNPMDFGPRGSSMLSSPNSQMGGLRGLPTQVRGYGAFQDARFEERQSYEARTLAVPLPQRPSGDDSINLGPQGGLARGMSTRGSTAISNLPISDVLPVHGDSHRMNTGLNGHSNLSERTPYSSREDHVSRYGTDRSSGPSAYDQSSAPEHNVNHGNRGLRSEDRNLEPLAHLQGSIVSQNASSEKIWPEERLRDMSLSAIREYYSARDENELALCVKDLNSPSFHPSMVSLWVTDSFERKDAERDLLAKLLVNLVKSQHGTLNQDQLIKGFESVLSTLEDAVNDAPRAAEFLGRIFAIAITESVVTLKDIGQLIHDGGEEPGSLLEVGLAADVLGSTLEVIQSEKGDAVLNKICSGSNLRLETFRPPNAKTSRKLEKFI

SEQ ID NO: 7942 - protein, 466 aa, Glycine max
  misc_feature (1)..(466): Ceres Seq. ID no. 15176834
MIDHPKAKEHMDAYFERMKLLSNNMNLSSRVRFMLKDSIDLRKNKWQQRRKVEGPKKIEEVHRDAAQERQAQAGRSGRGLGNNQSARRNPMDFGPRGSSMLSSPNSQMGGLRGLPTQVRGYGAFQDARFEERQSYEARTLAVPLPQRPSGDDSINLGPQGGLARGMSTRGSTAISNLPISDVLPVHGDSHRMNTGLNGHSNLSERTPYSSREDHVSRYGTDRSSGPSAYDQSSAPEHNVNHGNRGLRSEDRNLEPLAHLQGSIVSQNASSEKIWPEERLRDMSLSAIREYYSARDENELALCVKDLNSPSFHPSMVSLWVTDSFERKDAERDLLAKLLVNLVKSQHGTLNQDQLIKGFESVLSTLEDAVNDAPRAAEFLGRIFAIAITESVVTLKDIGQLIHDGGEEPGSLLEVGLAADVLGSTLEVIQSEKGDAVLNKICSGSNLRLETFRPPNAKTSRKLEKFI

SEQ ID NO: 7943 - DNA, 934 bp, Glycine max
  misc_feature (1)..(934): Ceres Seq. ID no. 15176839
agaattcacaaagtgatttccacaaagccatttagaatgcgaatcagttggcttaactctcgaagcaacagtgaattgggcccaatagattgggtaggtgctggtttttacaaaacatgtggggatttcaggactggcagacatgaaataactgaatcgttaaattccttttcgcacaaggtaaggtggacaaaaggcaccagaggagttgttcgcatctttcctgggaagggggaggtctgggctctctatagaaactggtctcctgattggaatgaaaatactccagatgaagtgatacacaagtatgatatggtggaagtggttgaagatttcaatgaagaggaaggtttattggtcacaccacttgttaaagttgatggttttaggacagtgtttcacaggcgcagccatgatcaggcaagaaagattcctaaagtggagatatttcaattctctcatcaggttcctaattacttgcttactgggcaagaagctcataatgctccaaagggctgtcgagagttggatccagcagctactcctttagaccttcttcagacaacagctgaagaggcattggataatgtcggaaaatcaaaggaagacacttaccccgggtcacctgaaaaccatgctgctggtaagggggagaatgcttcaaaacctactagagaagatatgttagacgaggatggtaaacaggtaaagtatgatagatgaccctgcacagtatagaaaagtgatgactgataatgcaaataggcttaagaaattaaattcaagattggtgaaaatatagtatgataggttactctgcattttgtaagcctgaccccaacaatttaatagtgttttcttgtctcataattggatggaagggattagcagcatttgggttttgctatataattttgagacttgttattcgttt

SEQ ID NO: 7944 - protein, 240 aa, Glycine max
  misc_feature (1)..(240): Ceres Seq. ID no. 15176840
RIHKVISTKPFRMRISWLNSRSNSELGPIDWVGAGFYKTCGDFRTGRHEITESLNSFSHKVRWTKGTRGVVRIFPGKGEVWALYRNWSPDWNENTPDEVIHKYDMVEVVEDFNEEEGLLVTPLVKVDGFRTVFHRRSHDQARKIPKVEIFQFSHQVPNYLLTGQEAHNAPKGCRELDPAATPLDLLQTTAEEALDNVGKSKEDTYPGSPENHAAGKGENASKPTREDMLDEDGKQVKYDR

SEQ ID NO: 7945 - protein, 228 aa, Glycine max
  misc_feature (1)..(228): Ceres Seq. ID no. 15176841
MRISWLNSRSNSELGPIDWVGAGFYKTCGDFRTGRHEITESLNSFSHKVRWTKGTRGVVRIFPGKGEVWALYRNWSPDWNENTPDEVIHKYDMVEVVEDFNEEEGLLVTPLVKVDGFRTVFHRRSHDQARKIPKVEIFQFSHQVPNYLLTGQEAHNAPKGCRELDPAATPLDLLQTTAEEALDNVGKSKEDTYPGSPENHAAGKGENASKPTREDMLDEDGKQVKYDR

SEQ ID NO: 7946 - protein, 136 aa, Glycine max
  misc_feature (1)..(136): Ceres Seq. ID no. 15176842
MVEVVEDFNEEEGLLVTPLVKVDGFRTVFHRRSHDQARKIPKVEIFQFSHQVPNYLLTGQEAHNAPKGCRELDPAATPLDLLQTTAEEALDNVGKSKEDTYPGSPENHAAGKGENASKPTREDMLDEDGKQVKYDR

SEQ ID NO: 7947 - DNA, 979 bp, Glycine max
  misc_feature (1)..(979): Ceres Seq. ID no. 15176881
aattgttctgctccttttttttagtggtaagaatagaacaagctaaggaacattggaatcttttgccatgacccaaagtgggacctgtgaccggtgcacaggctaagctaactaaaataccacttagcctggtaaacctaaccaacatgaaacattttcaataagatcaaaactttcaaactagttatgcttaaaatctattgaaatttcaacagagtattatttcttgtgatttcaactaccaaaatgatcaaaacctattaagatctataaacaagacacaaaatatacaccagtttaatttgaaagtgtttaatacagccccaaaataacaatactgatttcctagtaacctgcaacttaactgattgatgatttggaaaaaggaataagaggtgagttacatatactctatgaggagataataatcataatgaataggaagggggaaattaaaataactcctgagtagtttgcaactatataaactagattgtaacatcttaaatcaatggaagcattttttatctaatcacaattttaatgagttcatttataatgccccttgatctaaatgagtgtgacacatctcaacttggactgggttgattttttttctttttcctcctttgctttattaatcctaatttacgatacttattatagctttgctttatatcgggtaacaggccacaggaatggttacaatgatgaaggaactacaaataccaatggtgggaagtcatcatcttggcattgatgacactaggaacatagcaagagtactgcagcacatgctactagatggtgcactcgtccagattactgcaaggaggaatcctagatctcttagagatgtcaagtttcttttcaagaaccgtattggatagtgtacttctcaatggactatgtaactttttctaatacttttaatcgtggaattagttaactcaatgaacagattatagattataatttc

SEQ ID NO: 7948 - protein, 63 aa, Glycine max
  misc_feature (1)..(63): Ceres Seq. ID no. 15176882
MVTMMKELQIPMVGSHHLGIDDTRNIARVLQHMLLDGALVQITARRNPRSLRDVKFLFKNRIG

SEQ ID NO: 7949 - protein, 61 aa, Glycine max
  misc_feature (1)..(61): Ceres Seq. ID no. 15176883
MSVTHLNLDWVDFFSFSSFALLILIYDTYYSFALYRVTGHRNGYNDEGTTNTNGGKSSSWH

SEQ ID NO: 7950 - protein, 60 aa, Glycine max
  misc_feature (1)..(60): Ceres Seq. ID no. 15176884
MMKELQIPMVGSHHLGIDDTRNIARVLQHMLLDGALVQITARRNPRSLRDVKFLFKNRIG

SEQ ID NO: 7951 - DNA, 695 bp, Glycine max
  misc_feature (1)..(695): Ceres Seq. ID no. 15176891
gatttgagttgcggcacaaagcattcactgtgtcggaaaaagaagaagagaaaaaagatgagcgacggaggaaaacgacaaggtggaagagcgttgccgccgccgccaagaggccctccgcctcctcccccctctcgccctcgcctcgaacccgtcgatcgcgaaaagacatgtccgttactgctgcgagtgttcactaagattgggagtcaccattccatggaagactttgccgtcagaggcaaagagcccaaagacgaggttcagatttacacctggaaggacgctactctccgagaactcaccgatcttgtcaaagaagttgctccggctgcaaggagaagaaacgccaaactctccttcgcctttgtattccccgacaaaaacggccgtttcaaagttcaagaggtgggcaagacattatcttatggaaatggaagattagatgatggcaaggctttagccgaacttggttttgaaatcggtgactacttggatgtggctattctgtagtttattatggatacttgcatgtggctggttatgtttgaaggccttgaaacacttattttagagttaagaagactgtaatcgtggaaatgtttagctgttaatgtttacatgaactaaaaagaggtccagtttctctggttgcaaaaatgatagattgaagatttctaatgcctatatttttt

SEQ ID NO: 7952 - protein, 170 aa, Glycine max
  misc_feature (1)..(170): Ceres Seq. ID no. 15176892
DLSCGTKHSLCRKKKKRKKMSDGGKRQGGRALPPPPRGPPPPPPSRPRLEPVDREKTCPLLLRVFTKIGSHHSMEDFAVRGKEPKDEVQIYTWKDATLRELTDLVKEVAPAARRRNAKLSFAFVFPDKNGRFKVQEVGKTLSYGNGRLDDGKALAELGFEIGDYLDVAIL

SEQ ID NO: 7953 - protein, 151 aa, Glycine max
  misc_feature (1)..(151): Ceres Seq. ID no. 15176893
MSDGGKRQGGRALPPPPRGPPPPPPSRPRLEPVDREKTCPLLLRVFTKIGSHHSMEDFAVRGKEPKDEVQIYTWKDATLRELTDLVKEVAPAARRRNAKLSFAFVFPDKNGRFKVQEVGKTLSYGNGRLDDGKALAELGFEIGDYLDVAIL

SEQ ID NO: 7954 - protein, 97 aa, Glycine max
  misc_feature (1)..(97): Ceres Seq. ID no. 15176894
MEDFAVRGKEPKDEVQIYTWKDATLRELTDLVKEVAPAARRRNAKLSFAFVFPDKNGRFKVQEVGKTLSYGNGRLDDGKALAELGFEIGDYLDVAIL

SEQ ID NO: 7955 - DNA, 1352 bp, Glycine max
  misc_feature (1)..(1352): Ceres Seq. ID no. 15176919
gagttagttagtttagttgggtgagggaaagaaaagccacttcaaatttcagccccataccatactcattaaagtccacacacacagagcaacactgcactgtgtggaaacgaaacatggcaagagtggtggcactccaacagaaccaactatctttctctaccttagcttcctctctttctgacttcagtggaaccagacttcaaactcaacttcagttcaagagaaagcaatgccatccaaaagggtctttctacgtctccgcatcgagcaccaagaaaatcctaataatgggaggcaccaggtttattggtgtgtttttgtctaggctccttgtcaaagagggtcaccaggtgactttattcacaagaggtaaagcgcctgtcactcaacagttgccaggtgaatcagacagtgattatgctgatttttcttccaagatcttgcatttgaaaggagacaggaaggacttcgactttgtaaaatccagtctctcagcagagggatttgatgttgtttatgacataaatggacgcgaggcagatgaagttgaacccatactggatgctctgcctaatctggagcagtttatttactgctcttctgccggtgtctatctcaaatctgatctattacctcacgcagagactgatgcagttgatcctaagagcagacacaagggaaagcttgagacagagagtttgctacaagcaaggggtgttaattggacatctataaggccagtctacatctatggacccttgaactacaaccctgttgaagagtggttcttccatagattgaaagcgggacgcccaattcctatccccggctcaggaatacagataacccaacttggtcatgttaaggatttggcaaaagcttttatccaggttcttggtaatgagaaggccagcaaggaagtattcaacatctcgggagataagtatgtcacatttgatggattagcaagagcatgtgctaaggctggtgggttcccagagccagagatcattcactacaaccctaaagattttgattttgggaaaaagaaatcatttccattccgtgaccagcatttctttgcatcagttgagaaagcaaagagcgtgcttggattggaacctgaatttggacttgtagagggtctagcagactcgtacaacctggactttggtagaggaacatatcggaaagaggctgatttctcaacagatgacataattcttggcaagagtcttgttagcgtataaacttttctatttcaattttaagtatttcacttgtatttagaaaagctgttcggatttgctacattatgaagtcgtgaaatattcatgagcttttcgttc

SEQ ID NO: 7956 - protein, 378 aa, Glycine max
  misc_feature (1)..(378): Ceres Seq. ID no. 15176920
MARVVALQQNQLSFSTLASSLSDFSGTRLQTQLQFKRKQCHPKGSFYVSASSTKKILIMGGTRFIGVFLSRLLVKEGHQVTLFTRGKAPVTQQLPGESDSDYADFSSKILHLKGDRKDFDFVKSSLSAEGFDVVYDINGREADEVEPILDALPNLEQFIYCSSAGVYLKSDLLPHAETDAVDPKSRHKGKLETESLLQARGVNWTSIRPVYIYGPLNYNPVEEWFFHRLKAGRPIPIPGSGIQITQLGHVKDLAKAFIQVLGNEKASKEVFNISGDKYVTFDGLARACAKAGGFPEPEIIHYNPKDFDFGKKKSFPFRDQHFFASVEKAKSVLGLEPEFGLVEGLADSYNLDFGRGTYRKEADFSTDDIILGKSLVSV

SEQ ID NO: 7957 - protein, 320 aa, Glycine max
  misc_feature (1)..(320): Ceres Seq. ID no. 15176921
MGGTRFIGVFLSRLLVKEGHQVTLFTRGKAPVTQQLPGESDSDYADFSSKILHLKGDRKDFDFVKSSLSAEGFDVVYDINGREADEVEPILDALPNLEQFIYCSSAGVYLKSDLLPHAETDAVDPKSRHKGKLETESLLQARGVNWTSIRPVYIYGPLNYNPVEEWFFHRLKAGRPIPIPGSGIQITQLGHVKDLAKAFIQVLGNEKASKEVFNISGDKYVTFDGLARACAKAGGFPEPEIIHYNPKDFDFGKKKSFPFRDQHFFASVEKAKSVLGLEPEFGLVEGLADSYNLDFGRGTYRKEADFSTDDIILGKSLVSV

SEQ ID NO: 7958 - DNA, 2160 bp, Glycine max
  misc_feature (1)..(2160): Ceres Seq. ID no. 15176922
ggcatttccataaattccactctcaagattcatatctgattctgaagctcgaaattgagaatggcgtcttctctctctactacctcttttctctgcacacactctctgaaatccccaacgctgaaacctctcacaaagcctcattgcttcgctcgttttcgtgctcgagttcgagttccacccaaagcttcttcgcaaaacaacaatgccgataatgattctgttgaaactccgtccctccaaccctcttcccctaaaccaccatataattcctcttcttcgctgcttcgtcatttcagtaatggctggtttaaatttgatgaacttgggatggagatagtgctcattgctctgcctgctgctttggctttggcggctgatcctattgcctcattgattgacacagcgttcgttggccatataggggcagttgaattggctgcagttggggtttcagcttctgtgtttaatctagtgtcaaaagcattcaatgttcctttacttaatgttactacatcctttgttgcggaggagcaggcactgattaggaaggaggaagagtccattctgagtgatgaaaatggaaaggaccaaagcaagaagctccttccttcagtatcaacttctttagcacttgctgcaactcttggaattgctgaaactgtggtgcttacgcttggctctggcattcttatgaatatcatgggtatacctgctgattctccgatgcgtggacctgctgagcagtttcttacattgagggcctttggtgctccagcaattgtgctcgcattagctgcacaaggcacctttcgtggatttttggatacaaagacacctctatatgctgttggtgtgggaaactttcttaatgccatattggatccaatattgatatttctttttggtcttggcattggtggtgctgcagttgctaccgttatctctgaatatttaatagctttcattctgctatggaaattgagtgacaaagtgctgctaatcccttccgaatttgatgggagaaaattttttagctatctgaaatccggtggtcttgtttctgctaggactttggctgtgtttataactgtgacactgtcaacatccgtggcagctcagcagggccctatacctatggcaggccatcaaatttgcatgcaagtctggttgtcggtttctttgctcaatgatgctttggcgcttgctggtcaggcacttcttgcccgtaattactccctgggaaactatgagcaagcacgccttgttatatatagagtgatacagattggtttaggagcaggaatcattttgtcaataatcttattctttgggtttggagcgttttctagtttatttagcacagattctgaagttctggatgttgcttggtcaggtatatggtttgttgctggatctcaaccagtgaatgctttggcatttgttattgatgggatttattatggggtatcagactttggatatgctgcttactcgatggttctagttggactagtttcttcaactttccttctggtggcggctccagtagggcttcctggagtctggactggattgtttattttcatggctttgcgtgttctagctggagtttggaggttgagcagtaaaagtgggccttgggatacaatctggtatagagatggagcagaagattgaccaacatgcattcagtactcagaagttccaacattcactcctcaggttaaaaaaccattttcagaatgatcagaaaatgattctctcaagagctctcttatatgagggcactaaattcctgcaaagagaatccagtatcactgcaggactatagtaaattattgaaatgtagcagccaattactgctaaccgattgccaaaatcttgctgattcaagtattgattgaatggccaatagaacagggagggagaaaattattgaatgaccagcctacagcttagagggtagtctttttgaccctctgttttttgttggaaatttgtatttattaggaaattgcacaattttgtatattttcattgctaaaggtagctgcaatgcatgtaagaataagtactctgacttgtccattgcagctattcaagttagttaggtgtgtactgtgtagtaattacaattttttaatagttttttacgtt

SEQ ID NO: 7959 - protein, 539 aa, Glycine max
  misc_feature (1)..(539): Ceres Seq. ID no. 15176923
MASSLSTTSFLCTHSLKSPTLKPLTKPHCFARFRARVRVPPKASSQNNNADNDSVETPSLQPSSPKPPYNSSSSLLRHFSNGWFKFDELGMEIVLIALPAALALAADPIASLIDTAFVGHIGAVELAAVGVSASVFNLVSKAFNVPLLNVTTSFVAEEQALIRKEEESILSDENGKDQSKKLLPSVSTSLALAATLGIAETVVLTLGSGILMNIMGIPADSPMRGPAEQFLTLRAFGAPAIVLALAAQGTFRGFLDTKTPLYAVGVGNFLNAILDPILIFLFGLGIGGAAVATVISEYLIAFILLWKLSDKVLLIPSEFDGRKFFSYLKSGGLVSARTLAVFITVTLSTSVAAQQGPIPMAGHQICMQVWLSVSLLNDALALAGQALLARNYSLGNYEQARLVIYRVIQIGLGAGIILSIILFFGFGAFSSLFSTDSEVLDVAWSGIWFVAGSQPVNALAFVIDGIYYGVSDFGYAAYSMVLVGLVSSTFLLVAAPVGLPGVWTGLFIFMALRVLAGVWRLSSKSGPWDTIWYRDGAED

SEQ ID NO: 7960 - protein, 449 aa, Glycine max
  misc_feature (1)..(449): Ceres Seq. ID no. 15176924
MEIVLIALPAALALAADPIASLIDTAFVGHIGAVELAAVGVSASVFNLVSKAFNVPLLNVTTSFVAEEQALIRKEEESILSDENGKDQSKKLLPSVSTSLALAATLGIAETVVLTLGSGILMNIMGIPADSPMRGPAEQFLTLRAFGAPAIVLALAAQGTFRGFLDTKTPLYAVGVGNFLNAILDPILIFLFGLGIGGAAVATVISEYLIAFILLWKLSDKVLLIPSEFDGRKFFSYLKSGGLVSARTLAVFITVTLSTSVAAQQGPIPMAGHQICMQVWLSVSLLNDALALAGQALLARNYSLGNYEQARLVIYRVIQIGLGAGIILSIILFFGFGAFSSLFSTDSEVLDVAWSGIWFVAGSQPVNALAFVIDGIYYGVSDFGYAAYSMVLVGLVSSTFLLVAAPVGLPGVWTGLFIFMALRVLAGVWRLSSKSGPWDTIWYRDGAED

SEQ ID NO: 7961 - protein, 328 aa, Glycine max
  misc_feature (1)..(328): Ceres Seq. ID no. 15176925
MNIMGIPADSPMRGPAEQFLTLRAFGAPAIVLALAAQGTFRGFLDTKTPLYAVGVGNFLNAILDPILIFLFGLGIGGAAVATVISEYLIAFILLWKLSDKVLLIPSEFDGRKFFSYLKSGGLVSARTLAVFITVTLSTSVAAQQGPIPMAGHQICMQVWLSVSLLNDALALAGQALLARNYSLGNYEQARLVIYRVIQIGLGAGIILSIILFFGFGAFSSLFSTDSEVLDVAWSGIWFVAGSQPVNALAFVIDGIYYGVSDFGYAAYSMVLVGLVSSTFLLVAAPVGLPGVWTGLFIFMALRVLAGVWRLSSKSGPWDTIWYRDGAED

SEQ ID NO: 7962 - DNA, 1518 bp, Glycine max
  misc_feature (1)..(1518): Ceres Seq. ID no. 15176959
attcatttctctgcaatggatatggatctctagcattcgcattcatcccctccttttctccatgcctccgtcttcacccgttattttcttgtcctgaatgcattcccagaatgttgtagagatggaaggcaagacagaaattcgtatgacatcagctgctgcctttgttgaaggggggattcaagaatcctgtgatgatgcttgcagcatatgccttgaggagttttgtgcaagtgatccttcgacggtcactacctgcaagcatgagtttcacctgcagtgcattctcgaatggtgtcagagaagctcccagtgtcctatttgctggcaacctattagcttgaaggatcctactagtcaagaattgtttgaggcagtagagcaggagagaagctggagggctaccccttcaagaaatgctgctatttttcatcacccagcctttggtgattttgaattgcagcatttgcgcatgaatgcaaatgatgctgactttgaagagagaattattcaacatttagctgctgctgcaacgatgaggagagtgaaccagcttggtcggagggaagggcagcaaactcgttcatcacctcatgttcatccacacttcttagtgttctctaatcagcctattgcgccttcatcaggtcttgatccagtttccagaggggaaaatgacccaacagcaattcctaatagaagtccatctgccccaataacatctgatggaaatgaagcatcgcagcagatcctgcaccttcaaactcaaagctcttcttcagcttctggatctcctgtcatggctacaaatcgccaaggaatttactctaatgatagaggctctactgctcgttcttctccagtggtccaagatagagcagaatcatctgaattgcagtcattttctgattctctgcggtccagacttaatgcggtgtccatgagatacaaagagtcaatctcaaagggcactaggggatggaaggagaggctgttctcgcatagttcttccatgtcagaacttggttcagaaacaaggaggagagagatgaaagctggaattgctagtgtatcccgattgatggaatcccttgaaactagtgaaaataatagagctgtgggtacttctttgtcaaatcaaaatcatatagaggatagttccatgggaggggtgagcaaccagaacaatgttgaagctagtggagagaaatcttcacatgatgacaatactccagctgcatgttctgctagttcacatttaaattgagctcttttttgtttctgttaattcatctttcctcagcatctcatatttgaaggtaagctttgatctttgtctaaacattcagaacagaattaacagatctgccttccatttattaactaaatagctgctttggttcctattatagatgtcaccaatagctgttttgctttagtttgagagccctgtctctcctcaacacctccccaactgtcaaaattgatcccctctctacattacaacatggtttctct

SEQ ID NO: 7963 - protein, 389 aa, Glycine max
  misc_feature (1)..(389): Ceres Seq. ID no. 15176960
MHSQNVVEMEGKTEIRMTSAAAFVEGGIQESCDDACSICLEEFCASDPSTVTTCKHEFHLQCILEWCQRSSQCPICWQPISLKDPTSQELFEAVEQERSWRATPSRNAAIFHHPAFGDFELQHLRMNANDADFEERIIQHLAAAATMRRVNQLGRREGQQTRSSPHVHPHFLVFSNQPIAPSSGLDPVSRGENDPTAIPNRSPSAPITSDGNEASQQILHLQTQSSSSASGSPVMATNRQGIYSNDRGSTARSSPVVQDRAESSELQSFSDSLRSRLNAVSMRYKESISKGTRGWKERLFSHSSSMSELGSETRRREMKAGIASVSRLMESLETSENNRAVGTSLSNQNHIEDSSMGGVSNQNNVEASGEKSSHDDNTPAACSASSHLN

SEQ ID NO: 7964 - protein, 381 aa, Glycine max
  misc_feature (1)..(381): Ceres Seq. ID no. 15176961
MEGKTEIRMTSAAAFVEGGIQESCDDACSICLEEFCASDPSTVTTCKHEFHLQCILEWCQRSSQCPICWQPISLKDPTSQELFEAVEQERSWRATPSRNAAIFHHPAFGDFELQHLRMNANDADFEERIIQHLAAAATMRRVNQLGRREGQQTRSSPHVHPHFLVFSNQPIAPSSGLDPVSRGENDPTAIPNRSPSAPITSDGNEASQQILHLQTQSSSSASGSPVMATNRQGIYSNDRGSTARSSPVVQDRAESSELQSFSDSLRSRLNAVSMRYKESISKGTRGWKERLFSHSSSMSELGSETRRREMKAGIASVSRLMESLETSENNRAVGTSLSNQNHIEDSSMGGVSNQNNVEASGEKSSHDDNTPAACSASSHLN

SEQ ID NO: 7965 - protein, 373 aa, Glycine max
  misc_feature (1)..(373): Ceres Seq. ID no. 15176962
MTSAAAFVEGGIQESCDDACSICLEEFCASDPSTVTTCKHEFHLQCILEWCQRSSQCPICWQPISLKDPTSQELFEAVEQERSWRATPSRNAAIFHHPAFGDFELQHLRMNANDADFEERIIQHLAAAATMRRVNQLGRREGQQTRSSPHVHPHFLVFSNQPIAPSSGLDPVSRGENDPTAIPNRSPSAPITSDGNEASQQILHLQTQSSSSASGSPVMATNRQGIYSNDRGSTARSSPVVQDRAESSELQSFSDSLRSRLNAVSMRYKESISKGTRGWKERLFSHSSSMSELGSETRRREMKAGIASVSRLMESLETSENNRAVGTSLSNQNHIEDSSMGGVSNQNNVEASGEKSSHDDNTPAACSASSHLN

SEQ ID NO: 7966 - DNA, 1549 bp, Glycine max
  misc_feature (1)..(1549): Ceres Seq. ID no. 15176963
tttcaccaaacaatttaaccttttgggattgttggtgatacaactattttttcaaacacatccctccattggtagtttggtacttctattttcacttcaatgtagcttgcagttgcagtgtttaatattccaactatttgcaattaccatttcctttcctacatttagtatccttaggatttagtccatgtatgctatacctttccaaccaacattagtggtgtgttgaaaatcagaatataatctgtatttattgtaataatagcggtttataggcatgtgatatctgatttagaggaaacaaaatatcctctatttatgtatgagtaatgtaacaagcctatatgaactcgcatttgttgtgtattcaaacacacggtattcaacctagtcatgtctttgttttctctctcttaacatggtattcagagcctgacagaggcattcctcgaaaatcagaaccgtgactacccagtggacccactgtccccggagacaaattttttttgcccaccgtgttcttccctggtctataataatacatgttcatctctgaaatgtttcaattttgtatttcatgacaggaaaatcaaccattcttagattgctattcagattctttgatcctcattctggaagtataaagatagatgatcaaaatattcgggaggtaacccttgagagtttgcggaagtccattggtgttgttccacaagatactgtacttttcaatgatacaatatttcataacattcactatggtcggctatcagcaacaaaagaggaggtctatgaagctgctcaacaagcagcaattcataacactatcatgaattttcctgataaatattcaactgttgtgggagagcgaggactaaagttaagtggtggtgagaagcaacgtgttgccctagctcgtgcgttcttaaaagcacctgcaatactgttgtgtgatgaagctacaagtgctcttgacagcacaacagaagcagagattttaagtgcattaaagtcagtagcaaataatcggacttccatattcattgctcacaggcttaccacagcaatgcagtgtgacgagatcattgttttggaaaatgggaaggtgattgagcaaggaccccatgaagtgctcttatcaaaagcaggaagatatgcacagctgtggggacagcaaaataacactgttgatgcaattgatacagccatcaagctagaagcataaaatgatagaaacctttctcccttcctcttgctgagaaaaaaaaatgcataatacaatgttaatagcccattattacaattttgaaatttaatgattcctagcctgttgtgagctttctttagtctgtatattattacaatcgtattgttagctagaccaattaatgcatagatcctttgccgggttatgcagtttgatacattctttgtaaccacatataagttctcggccatgatgaatgaggcttgatgagctttctgcaaagagcaagagtttgtattattggaattcaattatagattgtgtgggtatgtattgttgcac

SEQ ID NO: 7967 - protein, 215 aa, Glycine max
  misc_feature (1)..(215): Ceres Seq. ID no. 15176964
MTGKSTILRLLFRFFDPHSGSIKIDDQNIREVTLESLRKSIGVVPQDTVLFNDTIFHNIHYGRLSATKEEVYEAAQQAAIHNTIMNFPDKYSTVVGERGLKLSGGEKQRVALARAFLKAPAILLCDEATSALDSTTEAEILSALKSVANNRTSIFIAHRLTTAMQCDEIIVLENGKVIEQGPHEVLLSKAGRYAQLWGQQNNTVDAIDTAIKLEA

SEQ ID NO: 7968 - protein, 131 aa, Glycine max
  misc_feature (1)..(131): Ceres Seq. ID no. 15176965
MNFPDKYSTVVGERGLKLSGGEKQRVALARAFLKAPAILLCDEATSALDSTTEAEILSALKSVANNRTSIFIAHRLTTAMQCDEIIVLENGKVIEQGPHEVLLSKAGRYAQLWGQQNNTVDAIDTAIKLEA

SEQ ID NO: 7969 - DNA, 1427 bp, Glycine max
  misc_feature (1)..(1427): Ceres Seq. ID no. 15176973
ttataatataatattcattattcaaaaacgcataatttataattaatatatattcattaaagttttatctcactaatttacctaataaaaacttactaattagataaaactttctaactagataacatcaccaagaatcccctaaaatggttacatctaaattttgtagtagtaaggcactgctattttctttgaatggaaatgaggattacgaatataatttgactattttaatgatattcggtgcattgactattgttaaggaaaagtttgggttgaccaaaccattgattttttgcgactgtaattttattcgtgcgtgtgtcattgatgacgtgagtttcattgttgctgtctaatttgtcgtctagcgtaaactcaagaaacttcttggttcttaatatttgcgcgttacgtgcccaacttgttagtgtgcaaattatgcatgagaattatatttgctggatatcacaaaacaacttagttgcttgaaacagtggtgactgacgccgaagttatattagcttattgtatattcacaatttggtgttggctttttattcggtattaattattatattaccaacaagtagtatttagaaagttgagatgtcaaatgtgtgataattaggtattcagtagctatgtcaagaaggaagtagatgtaaaatatggtattagctagtattaagtattaaccatccatatcatgacacaaggtttagtgcgtttggtttattagataaaaagtagaaataaaaaaatttcacttttatttccattcattatcacaaaaagaaaaagaatttaattagaacagtttcgattccaactcatctatcttttaatttcagaattgtctgattcatgttaactgatgatgaaggtttttatttatttttaggtgaaaagatatcaccaatagaagtggatgctgttcttctttcacatccagaaattgctcaagcagttgcttttggagtgcctgatgccaagtatggagaggaggtataatttatttttggtttttacacaaatgtgctcaaaagttgagtaaatgaccattttttattagttctttgaagtttgtattcatcatatcttttttaacttttgatagatatattgtgctgtcatcccaagagaaggatcaaacgttgatgaggcagaggtgctaagatttagcaagaccaatcttgcatccttcaaagtaccaaaaaaggtcttcattactgattctttacccaaaactgccacaggcaagattttgcgccgtcttgtggcagaacactttgtctctcaaatttgagcaactcaaatccccagtcttttgatgcttacatatatgcctgggcaaaaatgatctttcctacaggatacaataatagagattctagtttccaatgattcttgttcaattcctttgc

SEQ ID NO: 7970 - protein, 70 aa, Glycine max
  misc_feature (1)..(70): Ceres Seq. ID no. 15176974
MVTSKFCSSKALLFSLNGNEDYEYNLTILMIFGALTIVKEKFGLTKPLIFCDCNFIRACVIDDVSFIVAV

SEQ ID NO: 7971 - protein, 48 aa, Glycine max
  misc_feature (1)..(48): Ceres Seq. ID no. 15176975
MLTDDEGFYLFLGEKISPIEVDAVLLSHPEIAQAVAFGVPDAKYGEEV

SEQ ID NO: 7972 - protein, 41 aa, Glycine max
  misc_feature (1)..(41): Ceres Seq. ID no. 15176976
MIFGALTIVKEKFGLTKPLIFCDCNFIRACVIDDVSFIVAV

SEQ ID NO: 7973 - DNA, 1380 bp, Glycine max
  misc_feature (1)..(1380): Ceres Seq. ID no. 15177022
actaaaatacactaattgcctctctctttccctttcttcttcttctccgtcttcttcacactgagttgactgagtcttcgtaactcgctctctactgtctcagctactcatcgcattctctgcatttatcctccgatcacattttctctctcttcgttcgactatagctgacagggatgtcggagaaagctcttagggatctcaatacaattcttggaactgaaaggaagaatgaggactccagtaaggcatgtttatccaagccttctgttgacaatgctgttgaaaatattgaagaatggcaaaagaaaaataatagtccctccttggtttctccagctgttaatggaaatctggctgtgactgctaattctggtgcggaggttgtaaatccagaagtagaatatattgaatctgagaacttgaatgatgtagacgatattgatacttgtctcaagaccctattagctggacttgactcaaaggattgggtcctggtttgtgacacactgaataacgtacgtcgattgtctatatttcataaggaagcaatgcttgatatgctgggggatgtgatcacatctattgcaaagtcactgaaaagtcctagaagtgctgtttgcaaaactgccattatgacatctgcagacattttcagtgcatataatgatcttataatagattcattggaccctctgctagtacaacttcttctcaagtcttcacaagacaaacgctttgtatgtgaggcagctgaaaaagccttgatatcaatgactatttggatttcccctatttctttattgccaaaattgcaaccataccttaagaacaagaatcctcgtatccgtgcaaaagcatcaatgtgcttttctcggagtgttcctcagctgggtgcagaaggcataaagacatatgggattgacaaattgatccaagtagctgcatctcagttgagtgaccagctcccagagtccagggaagcggcccgaactctacttctcgagcttcaaaatgtgtatgagaaatctcatgatctcatcaagccagctactcctactgtcaataatgagcatactgtgaatgaggagaatccagaggtgagttcttgggaaagcttctgtcagtcaaaactttctcctcttagtgctcaagctgtacttcgtgtaaccaccagtatcgctcgggagggtcttgtttcatgacacgcacattaaacctcactttgcggctttcatcatttccttgtttgcttatcattttcttctgtaaatacagtgcgacaattgagatgattgagttgagttgtcgtcgaagcacgtattgagcccaagatttataatgtgtattctattattttccccctagctgttgttacct

SEQ ID NO: 7974 - protein, 342 aa, Glycine max
  misc_feature (1)..(342): Ceres Seq. ID no. 15177023
MSEKALRDLNTILGTERKNEDSSKACLSKPSVDNAVENIEEWQKKNNSPSLVSPAVNGNLAVTANSGAEVVNPEVEYIESENLNDVDDIDTCLKTLLAGLDSKDWVLVCDTLNNVRRLSIFHKEAMLDMLGDVITSIAKSLKSPRSAVCKTAIMTSADIFSAYNDLIIDSLDPLLVQLLLKSSQDKRFVCEAAEKALISMTIWISPISLLPKLQPYLKNKNPRIRAKASMCFSRSVPQLGAEGIKTYGIDKLIQVAASQLSDQLPESREAARTLLLELQNVYEKSHDLIKPATPTVNNEHTVNEENPEVSSWESFCQSKLSPLSAQAVLRVTTSIAREGLVS

SEQ ID NO: 7975 - protein, 217 aa, Glycine max
  misc_feature (1)..(217): Ceres Seq. ID no. 15177024
MLDMLGDVITSIAKSLKSPRSAVCKTAIMTSADIFSAYNDLIIDSLDPLLVQLLLKSSQDKRFVCEAAEKALISMTIWISPISLLPKLQPYLKNKNPRIRAKASMCFSRSVPQLGAEGIKTYGIDKLIQVAASQLSDQLPESREAARTLLLELQNVYEKSHDLIKPATPTVNNEHTVNEENPEVSSWESFCQSKLSPLSAQAVLRVTTSIAREGLVS

SEQ ID NO: 7976 - protein, 214 aa, Glycine max
  misc_feature (1)..(214): Ceres Seq. ID no. 15177025
MLGDVITSIAKSLKSPRSAVCKTAIMTSADIFSAYNDLIIDSLDPLLVQLLLKSSQDKRFVCEAAEKALISMTIWISPISLLPKLQPYLKNKNPRIRAKASMCFSRSVPQLGAEGIKTYGIDKLIQVAASQLSDQLPESREAARTLLLELQNVYEKSHDLIKPATPTVNNEHTVNEENPEVSSWESFCQSKLSPLSAQAVLRVTTSIAREGLVS

SEQ ID NO: 7977 - DNA, 1594 bp, Glycine max
  misc_feature (1)..(1594): Ceres Seq. ID no. 15177037
tcgcgcccacaagcaaaacagagagaaaaaagaaagcagaaatgggatcattcccaaaagcaaaacccaacaacactcacaccgacaccaacaccaacacccataacagggttatgggttttctcctagttttctttccggaagagaataacaatacaacaccaaccattgctaccaaaagtaccaaacccaaccttgtatcttcttctccctctccacattccttgaagagaattagttccagttccaacaatgcccttctctccaaagcccagtccactatctcaatatgcttcctcctcctcttcactaccctccttctcttcacactctccacattcgaacccacacaccacaaacctcgctccataccccccaaatccaaactccgcaaaaacacctcctcaagcgacgtcgctttcccctccactgcgctccagcgtatgggcacgctctaccgcagaggcacccgagccatgaacgacatcgtcgtttgccacgtacccgaagacactactcacgacgaattccgaatcttcctcagactcctccaccgctccggcctcacttccaaatccgacgtcgtcttcatcttcgtctctgcctcctcttcaaccactttcgctcacattgtccacgaagagaacacctcattcctctcgctcattaacctccacgctcagttgaactcgactcagtgggccaaaccgtccgagtcgaacttcgacgcgactcgtttcttgaaagctcccaagaaaggagaaccgctctggggaaagaaaattcggacgaattatagtggctcggaaggtgagttgagtcgggcgagttatgggtcggtgcttagttttgatgccaacgaactcgatccagagaactcgttggctggttttttggaccgagttccactcagtttgagaaggtgggcctgttaccccatgttattcgggcgcgtgaggaggaactttaaacacgtgacccttgtggatgtaaaaaatgtggtcatttttaatgacccactcggacgagtcaggaaccagagtcccgagtcggttttcgtgtaccctaatgcaaaacacggtaggaactccgagaggactcagtcgcatcacccggttaactcagtgattctgatgggcggcgcccgcgggatccggcgcgtgtcgcacgccatgctcgttgcgattgttcgggccgcaatgcagccgcacaagaggaagaactcggtgtccgactcggcgattctgagtcaactcgtaaggaacaagtttgcattgaggaacgttcacttaattgtctcgggggagtcgattccggaagcgagttcactcgctgggtcaacatcgttttcggattgtgcaataattcagcggggtacgggtaattattatgacctcaattctattgttaagaagcaaatttgttcttctgtgatggattcttttgtttataacagtgattgtaagcatctggtaaaagtagaacaataatgagaaaataggggggaaaattaacgagaaaattcgtgtatttattgaacttacttgtactagtagttttatagtagcataaattttcccaccgtctctcctct

SEQ ID NO: 7978 - protein, 495 aa, Glycine max
  misc_feature (1)..(495): Ceres Seq. ID no. 15177038
APTSKTERKKKAEMGSFPKAKPNNTHTDTNTNTHNRVMGFLLVFFPEENNNTTPTIATKSTKPNLVSSSPSPHSLKRISSSSNNALLSKAQSTISICFLLLFTTLLLFTLSTFEPTHHKPRSIPPKSKLRKNTSSSDVAFPSTALQRMGTLYRRGTRAMNDIVVCHVPEDTTHDEFRIFLRLLHRSGLTSKSDVVFIFVSASSSTTFAHIVHEENTSFLSLINLHAQLNSTQWAKPSESNFDATRFLKAPKKGEPLWGKKIRTNYSGSEGELSRASYGSVLSFDANELDPENSLAGFLDRVPLSLRRWACYPMLFGRVRRNFKHVTLVDVKNVVIFNDPLGRVRNQSPESVFVYPNAKHGRNSERTQSHHPVNSVILMGGARGIRRVSHAMLVAIVRAAMQPHKRKNSVSDSAILSQLVRNKFALRNVHLIVSGESIPEASSLAGSTSFSDCAIIQRGTGNYYDLNSIVKKQICSSVMDSFVYNSDCKHLVKVEQ

SEQ ID NO: 7979 - protein, 482 aa, Glycine max
  misc_feature (1)..(482): Ceres Seq. ID no. 15177039
MGSFPKAKPNNTHTDTNTNTHNRVMGFLLVFFPEENNNTTPTIATKSTKPNLVSSSPSPHSLKRISSSSNNALLSKAQSTISICFLLLFTTLLLFTLSTFEPTHHKPRSIPPKSKLRKNTSSSDVAFPSTALQRMGTLYRRGTRAMNDIVVCHVPEDTTHDEFRIFLRLLHRSGLTSKSDVVFIFVSASSSTTFAHIVHEENTSFLSLINLHAQLNSTQWAKPSESNFDATRFLKAPKKGEPLWGKKIRTNYSGSEGELSRASYGSVLSFDANELDPENSLAGFLDRVPLSLRRWACYPMLFGRVRRNFKHVTLVDVKNVVIFNDPLGRVRNQSPESVFVYPNAKHGRNSERTQSHHPVNSVILMGGARGIRRVSHAMLVAIVRAAMQPHKRKNSVSDSAILSQLVRNKFALRNVHLIVSGESIPEASSLAGSTSFSDCAIIQRGTGNYYDLNSIVKKQICSSVMDSFVYNSDCKHLVKVEQ

SEQ ID NO: 7980 - protein, 458 aa, Glycine max
  misc_feature (1)..(458): Ceres Seq. ID no. 15177040
MGFLLVFFPEENNNTTPTIATKSTKPNLVSSSPSPHSLKRISSSSNNALLSKAQSTISICFLLLFTTLLLFTLSTFEPTHHKPRSIPPKSKLRKNTSSSDVAFPSTALQRMGTLYRRGTRAMNDIVVCHVPEDTTHDEFRIFLRLLHRSGLTSKSDVVFIFVSASSSTTFAHIVHEENTSFLSLINLHAQLNSTQWAKPSESNFDATRFLKAPKKGEPLWGKKIRTNYSGSEGELSRASYGSVLSFDANELDPENSLAGFLDRVPLSLRRWACYPMLFGRVRRNFKHVTLVDVKNVVIFNDPLGRVRNQSPESVFVYPNAKHGRNSERTQSHHPVNSVILMGGARGIRRVSHAMLVAIVRAAMQPHKRKNSVSDSAILSQLVRNKFALRNVHLIVSGESIPEASSLAGSTSFSDCAIIQRGTGNYYDLNSIVKKQICSSVMDSFVYNSDCKHLVKVEQ

SEQ ID NO: 7981 - DNA, 1780 bp, Glycine max
  misc_feature (1)..(1780): Ceres Seq. ID no. 15177043
ctctctgaactctgaacaccgaaaatccgccatggattttcgcatctatggcgtcacgatccttctcttcctcttcccaaccctcacattctcaatctcacagggtcagataaactcaaactcaatccttgtcgctctgttggactcccattacaccgaactcgctgagcttgtggaaaaagccatgcttttgcagactctggagaacactgtcatgaacaacagcaacaacatcacaatcttcgctcccagaaacgaagccctcgaacgcgatctcgaccccgatttcaagcgtttcctcctcgaaccccgcaatctccattccctccaaaccctcctgttgtcccacatcgtccccaaaagaatcaccaaacccgaattcaaaaccgggtcgacccgacacagaactttagcgtctcaccaccacctcactctccaagccctgaatttgactcactggaatgttgagtcttcccgggttattaacccgaattcggtaacccgacccgacggagtgatccacggcatcgacactctcctcatccctcgctcagtccaagacgaattcaaccgtcgccggaatctgatctccatcgccgcggtaaaacccgaaccatccccggaggtcgacccgcgaacccaccggttaaagaaaccggcgccggcatcgccggcgggggccccgccggcgctcccgatctacgacgcgatggcgccggggccatcgcttgcaccggcgccagcgccgggtccgggtgggtctcacaagcacttcaatggggaaaagcaagtaaaagatttcatcgagacgttactccactacggcggctacaacgagatggcggatattctggtaaacctaacgtccctggcgacggagatgggaaggttggtttcggagggttacgttttgacggtgttagctcctaacgacgaggccatggcgaagttagcgacggagcaattaagtgaaccgggttcgcccgaacagattatgtactatcacttgatacccgagtatcagaccgaggagagcatgtacaatgccgtcagaaggttcgggaaggtccgttacgacacgttacggttgccgcacaaggtcacggcgcaggaggctgacggctccgttaagttcggccacggggacacgtctgcttacttgttcgaccccgatatttacacggatggacggatctccgttcagggaattgacggcgttctgtttccgcctcaggaggaagaagccgccgggcccgttacccgagcccagcccgctaaggtcgtcgtcaagcaaagaagaggaaaattgttggaaacagcatgttggatgcttggaagctttggacagaactctagattcatctcttgtcaatgaagagctcttatctggatgctagcaagactagttaagaacgaaaaccctgcacaggaaattccaaagatgtaaaaagtcaacggaatatgaaggccaggttacttgaaatgggttaatagcagcagctgctatggatttggttttcccacgtttttgtgatggtctttttttctttctccttctcgatttttcttcttgtggatttgggtcttggacttgagaacaaaagtttctcaagtctagtgaaaacaatatatagtgcaatttagattcagttaggaggttgtgttggtgggatgagaaggttttatgtaataagatggcagtgaaatctgtgcccgattcagtaagtaattttacaaaaatggaaatacagtaataatcaataaaatgattcttttctgt

SEQ ID NO: 7982 - protein, 457 aa, Glycine max
  misc_feature (1)..(457): Ceres Seq. ID no. 15177044
SLNSEHRKSAMDFRIYGVTILLFLFPTLTFSISQGQINSNSILVALLDSHYTELAELVEKAMLLQTLENTVMNNSNNITIFAPRNEALERDLDPDFKRFLLEPRNLHSLQTLLLSHIVPKRITKPEFKTGSTRHRTLASHHHLTLQALNLTHWNVESSRVINPNSVTRPDGVIHGIDTLLIPRSVQDEFNRRRNLISIAAVKPEPSPEVDPRTHRLKKPAPASPAGAPPALPIYDAMAPGPSLAPAPAPGPGGSHKHFNGEKQVKDFIETLLHYGGYNEMADILVNLTSLATEMGRLVSEGYVLTVLAPNDEAMAKLATEQLSEPGSPEQIMYYHLIPEYQTEESMYNAVRRFGKVRYDTLRLPHKVTAQEADGSVKFGHGDTSAYLFDPDIYTDGRISVQGIDGVLFPPQEEEAAGPVTRAQPAKVVVKQRRGKLLETACWMLGSFGQNSRFISCQ

SEQ ID NO: 7983 - protein, 447 aa, Glycine max
  misc_feature (1)..(447): Ceres Seq. ID no. 15177045
MDFRIYGVTILLFLFPTLTFSISQGQINSNSILVALLDSHYTELAELVEKAMLLQTLENTVMNNSNNITIFAPRNEALERDLDPDFKRFLLEPRNLHSLQTLLLSHIVPKRITKPEFKTGSTRHRTLASHHHLTLQALNLTHWNVESSRVINPNSVTRPDGVIHGIDTLLIPRSVQDEFNRRRNLISIAAVKPEPSPEVDPRTHRLKKPAPASPAGAPPALPIYDAMAPGPSLAPAPAPGPGGSHKHFNGEKQVKDFIETLLHYGGYNEMADILVNLTSLATEMGRLVSEGYVLTVLAPNDEAMAKLATEQLSEPGSPEQIMYYHLIPEYQTEESMYNAVRRFGKVRYDTLRLPHKVTAQEADGSVKFGHGDTSAYLFDPDIYTDGRISVQGIDGVLFPPQEEEAAGPVTRAQPAKVVVKQRRGKLLETACWMLGSFGQNSRFISCQ

SEQ ID NO: 7984 - protein, 396 aa, Glycine max
  misc_feature (1)..(396): Ceres Seq. ID no. 15177046
MLLQTLENTVMNNSNNITIFAPRNEALERDLDPDFKRFLLEPRNLHSLQTLLLSHIVPKRITKPEFKTGSTRHRTLASHHHLTLQALNLTHWNVESSRVINPNSVTRPDGVIHGIDTLLIPRSVQDEFNRRRNLISIAAVKPEPSPEVDPRTHRLKKPAPASPAGAPPALPIYDAMAPGPSLAPAPAPGPGGSHKHFNGEKQVKDFIETLLHYGGYNEMADILVNLTSLATEMGRLVSEGYVLTVLAPNDEAMAKLATEQLSEPGSPEQIMYYHLIPEYQTEESMYNAVRRFGKVRYDTLRLPHKVTAQEADGSVKFGHGDTSAYLFDPDIYTDGRISVQGIDGVLFPPQEEEAAGPVTRAQPAKVVVKQRRGKLLETACWMLGSFGQNSRFISCQ

SEQ ID NO: 7985 - DNA, 1338 bp, Glycine max
  misc_feature (1)..(1338): Ceres Seq. ID no. 15177059
ataacataacttgcctcttcccccaagacccaagttttctcttttcctcataaccccctctctccctaccaaatttcaatttcctctttcctcccttaggttatggatccattggggaaacgccctgccgccgaggacgattccctaatttccgattgcgagagcggggtttccgctggagacacgccgccgccgttcgtcgaaaacgccgacctcgtccggaccagattcgttcgtggcctcgtcgcgcactgcttcaaacccgaggttctggcagttcgcagaaacgtgtgttcctccgtcatggccctggcgcgtcaacattcctttcacgtcttcgcgcgtgccgtggccgaattgcgcggcggcaatgccaacgtgaagttcgcctggtacggtgcgtccagtaaggaagagataaatgacatcattcagcacggtttcggtcacgctcacagtaacggcctgcgtctctctccacaagattctccacttgaaagtgtgaagagttccgttgtggacgaagacggtttgaggcacttgttgctgtgccgcgttatcttggggaagacggaggtggttccacgtggctcctaccaatgccgttcgagttctcaagagtttgattctggggtggatgatctttccaatcccaaggagtatgttatttggtgtaaccagatcaacactcatgttttgcccgaatatgttttgagtttcagacttccttcaccattgaaagggattgtgaagattggggaacctttgaggccttcttcgccgtggatggcattcccagctttgatttcgatgctttcgaagattttgcctccgtccgaggttgcctccattgccaagtttcacaaggattatagagaaaagaggatttctcgacatgagctgatacagaaagtgagagtaatagcaggcgacaaattgctactttccgtcatcaaatctttcagagccaagaaaatacctgcaaactttaaagatgacaaggcgaaagaatggcaagcggacagccagcagcttgaacggaatgattgttcatatgggagttctattagctattacaggaagtgaatagaatacttgaagaaacacaatgctcatactaaccaaaacttacattgagggtgcaagtgcaaccactgcttaagaagtagagcgtcatttgagaccttttaaattgtttttagggtgatatactgatataggtgatttgttttgatgttgacggacgatagtgtagcaaaagaaatcactttctctttctggttggttacagttactggttgaaataaatatacttcggttcggacgtttatcatagtt

SEQ ID NO: 7986 - protein, 327 aa, Glycine max
  misc_feature (1)..(327): Ceres Seq. ID no. 15177060
MDPLGKRPAAEDDSLISDCESGVSAGDTPPPFVENADLVRTRFVRGLVAHCFKPEVLAVRRNVCSSVMALARQHSFHVFARAVAELRGGNANVKFAWYGASSKEEINDIIQHGFGHAHSNGLRLSPQDSPLESVKSSVVDEDGLRHLLLCRVILGKTEVVPRGSYQCRSSSQEFDSGVDDLSNPKEYVIWCNQINTHVLPEYVLSFRLPSPLKGIVKIGEPLRPSSPWMAFPALISMLSKILPPSEVASIAKFHKDYREKRISRHELIQKVRVIAGDKLLLSVIKSFRAKKIPANFKDDKAKEWQADSQQLERNDCSYGSSISYYRK

SEQ ID NO: 7987 - protein, 260 aa, Glycine max
  misc_feature (1)..(260): Ceres Seq. ID no. 15177061
MALARQHSFHVFARAVAELRGGNANVKFAWYGASSKEEINDIIQHGFGHAHSNGLRLSPQDSPLESVKSSVVDEDGLRHLLLCRVILGKTEVVPRGSYQCRSSSQEFDSGVDDLSNPKEYVIWCNQINTHVLPEYVLSFRLPSPLKGIVKIGEPLRPSSPWMAFPALISMLSKILPPSEVASIAKFHKDYREKRISRHELIQKVRVIAGDKLLLSVIKSFRAKKIPANFKDDKAKEWQADSQQLERNDCSYGSSISYYRK

SEQ ID NO: 7988 - DNA, 1194 bp, Glycine max
  misc_feature (1)..(1194): Ceres Seq. ID no. 15177071
gaaaaacctcgtcctttcccctgcttcgttttcaaaacttttgcgaaatttctatcttcttcaccttgctctcaccttctgggtaatgtttgaaacttggtgttagctgagctgtttgacaaaaatgaatattgcacaagttacagcatggcagcctgggatttgtgtgaaaaatatgtctcagttgcaccggcttcaatctaaaccatgtgttataccaaagagttttggtcctctcacttgtgttctactgagcttaagagcaagacaatcgtttagctcgaaatgttggcccattttacaatctcggaaacctcttcatatttgcttagccggtggaaaagggatgatgggaaatgatgagaattccccatggaaatctattgagaaagctattggaaaatttaagggagaatcatcaatagaggatgtattacggcgccaaattgaaaagggtgtatattatgacagtggtggtggtggagtgaaaccaccaggaggcgggaacagtggtggtggccctgatggctctggtgaatcagaagaagaaagccttgctgggatgtgggaagaaaatatccaagtgattttagcgacccttggctttatatttctgtacatttatattctcactggggaggaactcacaaagctagctagagactatatcaagtatctatttgggggaagccagagtgtccgactgaaaaatgccatgtatcaatggggacaactctatgaaagcatgacagctcagaaagaagaggaagacgagtattggttgcagaaggccattctggatacaccaacttggtggcacgaccctgctgattaccgtgaagcccttaaaaactacttgctatcaggtacagatgaggccattgccaccaggaattacttagaattagattcagatgcagacgttaggtattgcttggaatcagatgacgaagaagatgaagatgaagatcaatatcaatataaagatgattatgaagaaaagtttgcctagagtccggagcaacttctattgctctccatctattttcccctcctcaagtttaataaagctttgtatacgttgtatcatcatgcttgtagtgtattgccctttcttgcatttgtttttcccacaatactaatggaatcatgacaacaatttgacttttatatgaactgaagttgtttctctat

SEQ ID NO: 7989 - protein, 295 aa, Glycine max
  misc_feature (1)..(295): Ceres Seq. ID no. 15177072
MNIAQVTAWQPGICVKNMSQLHRLQSKPCVIPKSFGPLTCVLLSLRARQSFSSKCWPILQSRKPLHICLAGGKGMMGNDENSPWKSIEKAIGKFKGESSIEDVLRRQIEKGVYYDSGGGGVKPPGGGNSGGGPDGSGESEEESLAGMWEENIQVILATLGFIFLYIYILTGEELTKLARDYIKYLFGGSQSVRLKNAMYQWGQLYESMTAQKEEEDEYWLQKAILDTPTWWHDPADYREALKNYLLSGTDEAIATRNYLELDSDADVRYCLESDDEEDEDEDQYQYKDDYEEKFA

SEQ ID NO: 7990 - protein, 278 aa, Glycine max
  misc_feature (1)..(278): Ceres Seq. ID no. 15177073
MSQLHRLQSKPCVIPKSFGPLTCVLLSLRARQSFSSKCWPILQSRKPLHICLAGGKGMMGNDENSPWKSIEKAIGKFKGESSIEDVLRRQIEKGVYYDSGGGGVKPPGGGNSGGGPDGSGESEEESLAGMWEENIQVILATLGFIFLYIYILTGEELTKLARDYIKYLFGGSQSVRLKNAMYQWGQLYESMTAQKEEEDEYWLQKAILDTPTWWHDPADYREALKNYLLSGTDEAIATRNYLELDSDADVRYCLESDDEEDEDEDQYQYKDDYEEKFA

SEQ ID NO: 7991 - protein, 221 aa, Glycine max
  misc_feature (1)..(221): Ceres Seq. ID no. 15177074
MMGNDENSPWKSIEKAIGKFKGESSIEDVLRRQIEKGVYYDSGGGGVKPPGGGNSGGGPDGSGESEEESLAGMWEENIQVILATLGFIFLYIYILTGEELTKLARDYIKYLFGGSQSVRLKNAMYQWGQLYESMTAQKEEEDEYWLQKAILDTPTWWHDPADYREALKNYLLSGTDEAIATRNYLELDSDADVRYCLESDDEEDEDEDQYQYKDDYEEKFA

SEQ ID NO: 7992 - DNA, 1173 bp, Glycine max
  misc_feature (1)..(1173): Ceres Seq. ID no. 15177083
aaaccaatgcaaagcaatccatttgagcttcacaaaactaccactccaacgtgtgctcctctctcaagtgtgtgtccgtgtgctagtagcctacagcaccgtttctctcgggaggtactccatatacacgttgattaacacgtatacacatccttcaacgacaatcatggtcggcgctcaagagcaagggctgaagctgctggtgccgcggagcggcgtgagcatatatgccatccgcgtccagatgccgcttgccatgaagggtctggcctacgactacctccccaaggaccccgggtgcaagagcgacctactcctcgcgtccaaccccgtgcacaagacgctgcccgtcctcatccacggcggcaggcccgtctgcgagtcgctcatcatcatggagtacctcgacaacgcattccccggcaacggcgcctccatcctccccgccgacccctaccgccgcgccgtcgctcgcttctgggccgcctacatcgacaacaaggtttgttcccttccctctcgtctagctagctagtttgagcttgaagaattggagttgcatcccagaggggctgttttgttgccacagatgttcccttcgtgcatcggcattctcagtacggcgaagcagcaggagaaagccgacaaggtggaggagaccttggcggcgttcgggctcctagaagccgccctggcagagtgctccaaagaaggggaggcggaggcagaggcgccgtttttcggtggtggctccatcgggttcctggacattgcgctcgggtgctatattccctggttcgaagcgataggccgccttgctggcatgccgccgttcctagacgcaacgaggacaccaaagcttgctgcgtgggcggggcggttcagggccgccgagccggtcattgccctgctgactgcggtggacaaggtggaggagtacatcactaaggtgctttatccaaagtggaacgtcgcggtcacagttggtaactaattaaagatggtgtctttccattgccggcgggggattgtgtcgatccaataattactctgccattgccggagcaggcgtgcactctcttcgatctgagttgttgacatgctgttgcgtgaatacattgaagcttcgtcatcttgcatctctctgtcaagaacgtttccaaatgcaatctt

SEQ ID NO: 7993 - protein, 177 aa, Glycine max
  misc_feature (1)..(177): Ceres Seq. ID no. 15177084
NQCKAIHLSFTKLPLQRVLLSQVCVRVLVAYSTVSLGRYSIYTLINTYTHPSTTIMVGAQEQGLKLLVPRSGVSIYAIRVQMPLAMKGLAYDYLPKDPGCKSDLLLASNPVHKTLPVLIHGGRPVCESLIIMEYLDNAFPGNGASILPADPYRRAVARFWAAYIDNKVCSLPSRLAS

SEQ ID NO: 7994 - protein, 134 aa, Glycine max
  misc_feature (1)..(134): Ceres Seq. ID no. 15177085
MFPSCIGILSTAKQQEKADKVEETLAAFGLLEAALAECSKEGEAEAEAPFFGGGSIGFLDIALGCYIPWFEAIGRLAGMPPFLDATRTPKLAAWAGRFRAAEPVIALLTAVDKVEEYITKVLYPKWNVAVTVGN

SEQ ID NO: 7995 - protein, 122 aa, Glycine max
  misc_feature (1)..(122): Ceres Seq. ID no. 15177086
MVGAQEQGLKLLVPRSGVSIYAIRVQMPLAMKGLAYDYLPKDPGCKSDLLLASNPVHKTLPVLIHGGRPVCESLIIMEYLDNAFPGNGASILPADPYRRAVARFWAAYIDNKVCSLPSRLAS

SEQ ID NO: 7996 - DNA, 1294 bp, Glycine max
  misc_feature (1)..(1294): Ceres Seq. ID no. 15177087
ccactcactgggcatcttcttcttcctcctcgttctgcatatcacacaagctagctagcagctgctgtcattgatcaaccttcgggagcccaagagagaacttcagcccttcaacaatggagcccatccctctcctgacgccgtacaagatgggccagctcaacctcgcccaccggatcgtcctggccccgctcacccgccagcgctcctacggcaacgtgccgcagccgcacgccgccttgtactactcccagcgcgcctccgccggcgggttgctcatcaccgaggccaccggggtctccgacacggcccaggggtaccgcgatacaccgggcgtctggacggcggagcacgtcgaggcatggaagccaattgtcgatgcagtgcacgccaagggcgcgctcatcttctgccagatctggcacgtcggccgcgtgtccacctatgagtaccagcccggcggtgccgcgccgctgtcgtgcacggacaagggggtgggcccgcaaatgagctatgacgggaggctggaggagttcgcgccgccgaggaggctcaaggtggaggagataccggccatcgtcgacgacttcaggaaggcggccaggaacgccatcgacgctggttttgacggtgtggagatccacggggcgaatgggtacctaattgagcagttcctcaaggacagtgcgaatgaccgcaccgacgagtatggtggcagcatcgagaaccggtgtcgctttgctctcgaggtggtggatgccgtcgtgaaggaggtcggtggccaccgtgtgggcatccgcctctcccccttcaccgactacatggactgccacgactctgacccgcacgccctcgcgctccacatgtccaccaaactcaacaactacaacatcatctatctccacatggtcgagccgaggatggccatcgttgatggacgaagggtggtcccgaagcgcttgctgccatacagggaggcgttcaagggtacatttatggccaatggcgggtacgaccgcgaggaagggggcaaggtggtcgctgatgggtacactgatttggtctccttcgggcgatcgttcttggcgaatccagacctgccaaagaggtttgagatcggcgcagagctgaacaagtatgataggatgaccttctacatctctgaccccgtcatcggctacactgactaccccttcctcgattaatagttgatgggggttctttgttcagtgatgcaactaattgtaccacacatcattaataaaatgtatcgtgcaagtgttgtgttttatcc

SEQ ID NO: 7997 - protein, 362 aa, Glycine max
  misc_feature (1)..(362): Ceres Seq. ID no. 15177088
MEPIPLLTPYKMGQLNLAHRIVLAPLTRQRSYGNVPQPHAALYYSQRASAGGLLITEATGVSDTAQGYRDTPGVWTAEHVEAWKPIVDAVHAKGALIFCQIWHVGRVSTYEYQPGGAAPLSCTDKGVGPQMSYDGRLEEFAPPRRLKVEEIPAIVDDFRKAARNAIDAGFDGVEIHGANGYLIEQFLKDSANDRTDEYGGSIENRCRFALEVVDAVVKEVGGHRVGIRLSPFTDYMDCHDSDPHALALHMSTKLNNYNIIYLHMVEPRMAIVDGRRVVPKRLLPYREAFKGTFMANGGYDREEGGKVVADGYTDLVSFGRSFLANPDLPKRFEIGAELNKYDRMTFYISDPVIGYTDYPFLD

SEQ ID NO: 7998 - protein, 351 aa, Glycine max
  misc_feature (1)..(351): Ceres Seq. ID no. 15177089
MGQLNLAHRIVLAPLTRQRSYGNVPQPHAALYYSQRASAGGLLITEATGVSDTAQGYRDTPGVWTAEHVEAWKPIVDAVHAKGALIFCQIWHVGRVSTYEYQPGGAAPLSCTDKGVGPQMSYDGRLEEFAPPRRLKVEEIPAIVDDFRKAARNAIDAGFDGVEIHGANGYLIEQFLKDSANDRTDEYGGSIENRCRFALEVVDAVVKEVGGHRVGIRLSPFTDYMDCHDSDPHALALHMSTKLNNYNIIYLHMVEPRMAIVDGRRVVPKRLLPYREAFKGTFMANGGYDREEGGKVVADGYTDLVSFGRSFLANPDLPKRFEIGAELNKYDRMTFYISDPVIGYTDYPFLD

SEQ ID NO: 7999 - protein, 232 aa, Glycine max
  misc_feature (1)..(232): Ceres Seq. ID no. 15177090
MSYDGRLEEFAPPRRLKVEEIPAIVDDFRKAARNAIDAGFDGVEIHGANGYLIEQFLKDSANDRTDEYGGSIENRCRFALEVVDAVVKEVGGHRVGIRLSPFTDYMDCHDSDPHALALHMSTKLNNYNIIYLHMVEPRMAIVDGRRVVPKRLLPYREAFKGTFMANGGYDREEGGKVVADGYTDLVSFGRSFLANPDLPKRFEIGAELNKYDRMTFYISDPVIGYTDYPFLD

SEQ ID NO: 8000 - DNA, 1021 bp, Glycine max
  misc_feature (1)..(1021): Ceres Seq. ID no. 15177112
gtgacagaaatgagcaacgaaatccggttcttcgagctaaacactggagctaatatcccttcactagggctgggaacttggctggctgatcctggtgttgttggtgatgttatagctcatgccgtcgaggttggttatcgccatattgattgtgctcaaatttacggcaatcaggaggagattggtttagcattaaagaagttatttgaagagggtgtagtcaagcgagaagatttatggatcacctctaaactctggtgtacagatcatgctccagaagatgtaccagaagctctggacagaacattgagagacttgcaacttgattatatagatttataccttattcactggccaattcgaatgaagaagggttcagtgggctttaaggctgaaaacattgtgccatcagacatacctaacacttggaaggcaatggaagctttgaataaaagtggcaaggctagagctataggtgtaagcaatttctcaactaagaagttgggagaattgcttgagtatgctcgtgttactcctgcggttaaccagtcagagtgtcatcctgcatggaggcaggacaagttgaaggccttttgcaaatctaagggtgtccacttctctggatattcacctttgggttcccctgcctggcttgaaggtgatttccttaaccatccagttataaatatgatcgcaaagaaattaggaaagactccagcacaggtagctcttcgatggggactgcaaatgggccatagtgtgcttcccaagagttctaatccagcaaggataaaggaaaactttgatatttttgactggtccattcctgaggacatgcttgataaattttttgagattcaacaggaaagattactcaaggctagcttcttccatgaaccaaatgggggttacttaccagaagacgaattgtgggatgggggtatatgaaaagtcggttgaatgattagttaaaaaagtggatggaataaaagaaacgcatcttctgtttggggtgttaggc

SEQ ID NO: 8001 - protein, 315 aa, Glycine max
  misc_feature (1)..(315): Ceres Seq. ID no. 15177113
VTEMSNEIRFFELNTGANIPSLGLGTWLADPGVVGDVIAHAVEVGYRHIDCAQIYGNQEEIGLALKKLFEEGVVKREDLWITSKLWCTDHAPEDVPEALDRTLRDLQLDYIDLYLIHWPIRMKKGSVGFKAENIVPSDIPNTWKAMEALNKSGKARAIGVSNFSTKKLGELLEYARVTPAVNQSECHPAWRQDKLKAFCKSKGVHFSGYSPLGSPAWLEGDFLNHPVINMIAKKLGKTPAQVALRWGLQMGHSVLPKSSNPARIKENFDIFDWSIPEDMLDKFFEIQQERLLKASFFHEPNGGYLPEDELWDGGI

SEQ ID NO: 8002 - protein, 312 aa, Glycine max
  misc_feature (1)..(312): Ceres Seq. ID no. 15177114
MSNEIRFFELNTGANIPSLGLGTWLADPGVVGDVIAHAVEVGYRHIDCAQIYGNQEEIGLALKKLFEEGVVKREDLWITSKLWCTDHAPEDVPEALDRTLRDLQLDYIDLYLIHWPIRMKKGSVGFKAENIVPSDIPNTWKAMEALNKSGKARAIGVSNFSTKKLGELLEYARVTPAVNQSECHPAWRQDKLKAFCKSKGVHFSGYSPLGSPAWLEGDFLNHPVINMIAKKLGKTPAQVALRWGLQMGHSVLPKSSNPARIKENFDIFDWSIPEDMLDKFFEIQQERLLKASFFHEPNGGYLPEDELWDGGI

SEQ ID NO: 8003 - protein, 194 aa, Glycine max
  misc_feature (1)..(194): Ceres Seq. ID no. 15177115
MKKGSVGFKAENIVPSDIPNTWKAMEALNKSGKARAIGVSNFSTKKLGELLEYARVTPAVNQSECHPAWRQDKLKAFCKSKGVHFSGYSPLGSPAWLEGDFLNHPVINMIAKKLGKTPAQVALRWGLQMGHSVLPKSSNPARIKENFDIFDWSIPEDMLDKFFEIQQERLLKASFFHEPNGGYLPEDELWDGGI

SEQ ID NO: 8004 - DNA, 2095 bp, Glycine max
  misc_feature (1)..(2095): Ceres Seq. ID no. 15177141
gttacaaaatacattaaatcacaactttaccatccaccaccctctctcctatggacaacctcgaatctagaatctctattggactcactttcaatgatgtcctccttgtcccccaatactccactgtcaattctcgctctgaaattgacctccgcactagattctccaagaacgtccctcttaatgtccccattgtctcttctcctatggacactgtcactgaaactgacatggccattgaaatggcaagatggggaggtttgggtattgttcacagatataatactatcgaagatcaagccaacatgatctctcaagtcaagagagctgaaagcttcgtcatcactactccttatactatcagtcaatctactaccgttagagctgtccaagctctttccaaggcttacagagtccaaactttccttgttactgatgatactcataagcctaatgaacttgctgatcctgtccaaaagcataaactcgtcggtatccttactggcagagatcttagaatcgctttgaacggtgatcaacttgtcgaagagattatgacccctagagaaagactcactactacttatgatcccgaaatctccctcaaggaagccaagagccttatgattaacaatagagttgaaaaacttcccattattactgagaagaatgacgtcttgggtcttattactcttcgtgatattatccttagagaacaaagacctttggctaatcttgatacttttggtagattgagagttggtgctgctgttggtgccaaggatgattatcttgaaagagccaagaagcttattgatgtcggaactgatgttcttgtcgttgatattgctaatggacatgctcaattatgtattgatgctgtcgaaagattgaaggaacaattcactgtcgatgttgttgctggatctattgcttccagagaaggtgctgaaaatctcatcaaggctggtgctgacggtatccgttgcggtattggaagtggtgctatttgcacaactagacttgttgctggctctggtgtccctcaattatctgctatctttgatgctgcctccgtttgtaatgaagctggtgttcctttaatctctgatggtggtaatggtaacagtggtaacatgtgcaaagctcttgctgctggtgctgattgcgtcatggttggaagacttattgctggttgtgatgaaagccctggtcaagttcttctcaaggatggtaagagagtcaagatctacagaggtatggctggctatggtgctaacttgtccaaggctcaaagaactaacgctgctgaacctcactctttgaacttcactcctgaaggtgttgaaggatatatcccatactgtggacctttgaaggatgtcttgaaccaattcgctcaaggaatcaagagtggtatgagctactgtggatctcatgagattatggagatgaagaagaaggctaaattcatcagattaagtcaaagcgctatagttgaaagtggcgttcatgacattaacaagttgtaaatttggaacatgagctttttggtaagagtgtctttggttattggttagaagaggttggattaactacttaaaaatcgttgtttttataaaaatacaaaaagaataaaaaaagcgatttgtgttttttttttcttgcttataaatatgttatcatggctgtaaatctgctttgatgatcattgcttattgatcgattcaaaagaatagatgagattcccttccctctgtcggtctcttaaggacgcttgaatgcaagaattaatgaaattgaacacatcacatcaaatgaaatgaagtcttctccctctcctctgcaattcataaaaacaacctgaaaacagccatagacatcatagaagcaatagactctctccctctaattaataattcgtgaaacacataatgaagcaatcaatacatttcttccaaaagctcttccaaaaaaacatcaaatcattataataaaacacacaaattcaataaattcatatattactaagtttctttttattttcaatatataaaaacacttcatcgtatttctcgacttttttcaatttatg

SEQ ID NO: 8005 - protein, 493 aa, Glycine max
  misc_feature (1)..(493): Ceres Seq. ID no. 15177142
MDNLESRISIGLTFNDVLLVPQYSTVNSRSEIDLRTRFSKNVPLNVPIVSSPMDTVTETDMAIEMARWGGLGIVHRYNTIEDQANMISQVKRAESFVITTPYTISQSTTVRAVQALSKAYRVQTFLVTDDTHKPNELADPVQKHKLVGILTGRDLRIALNGDQLVEEIMTPRERLTTTYDPEISLKEAKSLMINNRVEKLPIITEKNDVLGLITLRDIILREQRPLANLDTFGRLRVGAAVGAKDDYLERAKKLIDVGTDVLVVDIANGHAQLCIDAVERLKEQFTVDVVAGSIASREGAENLIKAGADGIRCGIGSGAICTTRLVAGSGVPQLSAIFDAASVCNEAGVPLISDGGNGNSGNMCKALAAGADCVMVGRLIAGCDESPGQVLLKDGKRVKIYRGMAGYGANLSKAQRTNAAEPHSLNFTPEGVEGYIPYCGPLKDVLNQFAQGIKSGMSYCGSHEIMEMKKKAKFIRLSQSAIVESGVHDINKL

SEQ ID NO: 8006 - protein, 441 aa, Glycine max
  misc_feature (1)..(441): Ceres Seq. ID no. 15177143
MDTVTETDMAIEMARWGGLGIVHRYNTIEDQANMISQVKRAESFVITTPYTISQSTTVRAVQALSKAYRVQTFLVTDDTHKPNELADPVQKHKLVGILTGRDLRIALNGDQLVEEIMTPRERLTTTYDPEISLKEAKSLMINNRVEKLPIITEKNDVLGLITLRDIILREQRPLANLDTFGRLRVGAAVGAKDDYLERAKKLIDVGTDVLVVDIANGHAQLCIDAVERLKEQFTVDVVAGSIASREGAENLIKAGADGIRCGIGSGAICTTRLVAGSGVPQLSAIFDAASVCNEAGVPLISDGGNGNSGNMCKALAAGADCVMVGRLIAGCDESPGQVLLKDGKRVKIYRGMAGYGANLSKAQRTNAAEPHSLNFTPEGVEGYIPYCGPLKDVLNQFAQGIKSGMSYCGSHEIMEMKKKAKFIRLSQSAIVESGVHDINKL

SEQ ID NO: 8007 - protein, 433 aa, Glycine max
  misc_feature (1)..(433): Ceres Seq. ID no. 15177144
MAIEMARWGGLGIVHRYNTIEDQANMISQVKRAESFVITTPYTISQSTTVRAVQALSKAYRVQTFLVTDDTHKPNELADPVQKHKLVGILTGRDLRIALNGDQLVEEIMTPRERLTTTYDPEISLKEAKSLMINNRVEKLPIITEKNDVLGLITLRDIILREQRPLANLDTFGRLRVGAAVGAKDDYLERAKKLIDVGTDVLVVDIANGHAQLCIDAVERLKEQFTVDVVAGSIASREGAENLIKAGADGIRCGIGSGAICTTRLVAGSGVPQLSAIFDAASVCNEAGVPLISDGGNGNSGNMCKALAAGADCVMVGRLIAGCDESPGQVLLKDGKRVKIYRGMAGYGANLSKAQRTNAAEPHSLNFTPEGVEGYIPYCGPLKDVLNQFAQGIKSGMSYCGSHEIMEMKKKAKFIRLSQSAIVESGVHDINKL

SEQ ID NO: 8008 - DNA, 1418 bp, Glycine max
  misc_feature (1)..(1418): Ceres Seq. ID no. 15177221
gataggtacattgtcagacatctctgccaatgacgcttattattctagtattttaagaattttcagtcaaaagtgacatgatcctgcaatcatcaaacacatctttttaaggctcaatttaaaagttcaagaggtgtcatcaggcgttgagatagaaaagaaaacatgaggggaaaggcaggttcaggaaagaccattttgtttgtatgcattgcatgctttcttgcgggaaccctcttcaatggccagatgtggacacgcccctccaaccatgaaaatgaaaatacactactacgtctaccacccagacctgattgtgatcataagcgaaaactgattgaaggcaaacctggtgatgtaatggaggaagtcgtaaagactcatcaagctatcaagtcactggataaggcagtttcgacactggaaatggaactgacagcaagccaaactggtgggcggcaacggtcttctaaccacagtgtacagaaggcttttgtggtgattggtattaacacagcatttagcagcaaaaggcgaagagactcgatacgccaaacatggttatctaaacgaaatcagctgaaggaattagagaaagagaagggcattgttgtaaggttcgtgatcgggcacagtacaacaccgggtggcattcttgataaagcaattgatgcagaagaggcagaacacaaggacttcctcaggttagaccatgttgagggctaccatgagctatccaccaagactcgcctctacttttccactattacttctatgtgggatgctgatttctatgtcaaggtcgacgatgatatccatttaaatctaggtatgttagtgagtacacttgctaagtaccgatcaagacccaggatttatattggttgcatgaaatctggtcctgttctatatcaaaaaggagtaaagtatcatgaggctgagaactggaagtttggagaggaaggaaacaagtattttaggcatgccactggccaaatatatgccatctccaaggatctcgctacttatatatccatcaattggcccatattgcacagatacgcaaatgaagacgtatctttaggttcatggttattgggcctagaagttgaacatgtcgatgaacgctctatgtgttgcgggacccctccagattgtgattggaaggcaaggacgggaaatgtgtgcgtggcatccttcgactggtcatgcagtggtatctgtaagtcggtagagagaatgagagatatacacaaaacttgtggggagggtgacggagctgtttggaacgttgacctttaattctcaaattgagacatagaaaatcttatagctttactacttttgcattaagaggaattgaatccattttccttatattttaatgaaatttgagggacaatatctatactaaaaag

SEQ ID NO: 8009 - protein, 378 aa, Glycine max
  misc_feature (1)..(378): Ceres Seq. ID no. 15177222
MRGKAGSGKTILFVCIACFLAGTLFNGQMWTRPSNHENENTLLRLPPRPDCDHKRKLIEGKPGDVMEEVVKTHQAIKSLDKAVSTLEMELTASQTGGRQRSSNHSVQKAFVVIGINTAFSSKRRRDSIRQTWLSKRNQLKELEKEKGIVVRFVIGHSTTPGGILDKAIDAEEAEHKDFLRLDHVEGYHELSTKTRLYFSTITSMWDADFYVKVDDDIHLNLGMLVSTLAKYRSRPRIYIGCMKSGPVLYQKGVKYHEAENWKFGEEGNKYFRHATGQIYAISKDLATYISINWPILHRYANEDVSLGSWLLGLEVEHVDERSMCCGTPPDCDWKARTGNVCVASFDWSCSGICKSVERMRDIHKTCGEGDGAVWNVDL

SEQ ID NO: 8010 - protein, 350 aa, Glycine max
  misc_feature (1)..(350): Ceres Seq. ID no. 15177223
MWTRPSNHENENTLLRLPPRPDCDHKRKLIEGKPGDVMEEVVKTHQAIKSLDKAVSTLEMELTASQTGGRQRSSNHSVQKAFVVIGINTAFSSKRRRDSIRQTWLSKRNQLKELEKEKGIVVRFVIGHSTTPGGILDKAIDAEEAEHKDFLRLDHVEGYHELSTKTRLYFSTITSMWDADFYVKVDDDIHLNLGMLVSTLAKYRSRPRIYIGCMKSGPVLYQKGVKYHEAENWKFGEEGNKYFRHATGQIYAISKDLATYISINWPILHRYANEDVSLGSWLLGLEVEHVDERSMCCGTPPDCDWKARTGNVCVASFDWSCSGICKSVERMRDIHKTCGEGDGAVWNVDL

SEQ ID NO: 8011 - protein, 313 aa, Glycine max
  misc_feature (1)..(313): Ceres Seq. ID no. 15177224
MEEVVKTHQAIKSLDKAVSTLEMELTASQTGGRQRSSNHSVQKAFVVIGINTAFSSKRRRDSIRQTWLSKRNQLKELEKEKGIVVRFVIGHSTTPGGILDKAIDAEEAEHKDFLRLDHVEGYHELSTKTRLYFSTITSMWDADFYVKVDDDIHLNLGMLVSTLAKYRSRPRIYIGCMKSGPVLYQKGVKYHEAENWKFGEEGNKYFRHATGQIYAISKDLATYISINWPILHRYANEDVSLGSWLLGLEVEHVDERSMCCGTPPDCDWKARTGNVCVASFDWSCSGICKSVERMRDIHKTCGEGDGAVWNVDL

SEQ ID NO: 8012 - DNA, 1188 bp, Glycine max
  misc_feature (1)..(1188): Ceres Seq. ID no. 15177225
ctgctcaatttgtgagattccaaagcaattctttgctgccaacacaatggattcaagagcttacatccttagagtcaccattgcaattctttgcatctcaatgctagcttccactcttttccctgtgtgtgatgctataaatcatggaagagcaataaggggtcacaaaatccgtagaagctccccaatcaaatctttaaagaaactgaaaataaaatctttaagacatttaaacaagtacacaccatttgattcatttgggtactcagactttgattcatatgggtactcaaactttgatgattcatatggctctccctcttccctacccttaccacctttcaattcactagcaccacatccacaacctacaccatcaagttccattgctcctccaaatttggcacctccaagcataggtggcaactcctctctcccagcactctcaccagttccaagctcacctcatggtgctgtctttgggccaccaaacccaagaagcatgccaccacctccttatcccttaagcccaccaaagcatgctccaagcctaagcccaccaaagagtgctccaagcctaaacccaccaccactagtgtacctcccacctgttgtgttcccaccacccccttcaccttctacgcaccgcaaaaagccgccacaatacgcactttggtgtgtggcaaagcccacggttcctgacccaataattcaggaggccatggactatgcctgtgggtctggtgcggattgcaagtcaattcagcccaatggaatgtgcttccagcccaacactttgctggcccatgcttcgtatgccttcaatagctactggcagaacactaagattggtggaggcacgtgtgattttggtggaactgccatgctagtcactgttgatccaagctatgacaaatgcaacttcatgttgacttagctgcccttgccatatagcacatgtttggagacataatgttcagtgttcaaatattctctctcatcccaacatggatttttgatgtaacaataataattaattccctggcccataagttattggagctacgtaggttgtctttcccccctttcttctcggattattatagctgtcgtatttggaagtatcttatcttttttgtaataatctcattatttttatcgccatttcattatcatgttcgttttgtt

SEQ ID NO: 8013 - protein, 311 aa, Glycine max
  misc_feature (1)..(311): Ceres Seq. ID no. 15177226
CSICEIPKQFFAANTMDSRAYILRVTIAILCISMLASTLFPVCDAINHGRAIRGHKIRRSSPIKSLKKLKIKSLRHLNKYTPFDSFGYSDFDSYGYSNFDDSYGSPSSLPLPPFNSLAPHPQPTPSSSIAPPNLAPPSIGGNSSLPALSPVPSSPHGAVFGPPNPRSMPPPPYPLSPPKHAPSLSPPKSAPSLNPPPLVYLPPVVFPPPPSPSTHRKKPPQYALWCVAKPTVPDPIIQEAMDYACGSGADCKSIQPNGMCFQPNTLLAHASYAFNSYWQNTKIGGGTCDFGGTAMLVTVDPSYDKCNFMLT

SEQ ID NO: 8014 - protein, 296 aa, Glycine max
  misc_feature (1)..(296): Ceres Seq. ID no. 15177227
MDSRAYILRVTIAILCISMLASTLFPVCDAINHGRAIRGHKIRRSSPIKSLKKLKIKSLRHLNKYTPFDSFGYSDFDSYGYSNFDDSYGSPSSLPLPPFNSLAPHPQPTPSSSIAPPNLAPPSIGGNSSLPALSPVPSSPHGAVFGPPNPRSMPPPPYPLSPPKHAPSLSPPKSAPSLNPPPLVYLPPVVFPPPPSPSTHRKKPPQYALWCVAKPTVPDPIIQEAMDYACGSGADCKSIQPNGMCFQPNTLLAHASYAFNSYWQNTKIGGGTCDFGGTAMLVTVDPSYDKCNFMLT

SEQ ID NO: 8015 - protein, 278 aa, Glycine max
  misc_feature (1)..(278): Ceres Seq. ID no. 15177228
MLASTLFPVCDAINHGRAIRGHKIRRSSPIKSLKKLKIKSLRHLNKYTPFDSFGYSDFDSYGYSNFDDSYGSPSSLPLPPFNSLAPHPQPTPSSSIAPPNLAPPSIGGNSSLPALSPVPSSPHGAVFGPPNPRSMPPPPYPLSPPKHAPSLSPPKSAPSLNPPPLVYLPPVVFPPPPSPSTHRKKPPQYALWCVAKPTVPDPIIQEAMDYACGSGADCKSIQPNGMCFQPNTLLAHASYAFNSYWQNTKIGGGTCDFGGTAMLVTVDPSYDKCNFMLT

SEQ ID NO: 8016 - DNA, 1275 bp, Glycine max
  misc_feature (1)..(1275): Ceres Seq. ID no. 15177246
agtgaaggcagaagaagaagattcctggattgattgtgaagatggctgagtcggacaacgactcgggaggggcgcagaacgcgggaaacagtggaaacttgagcgagttgtcgcctcgggaacaggaccggtttctccccatagcgaacgtgagcaggatcatgaagaaggccttgccggcgaacgcgaagatctcgaaggacgcgaaggagacggtgcaggaatgcgtgtcggagttcatcagcttcataacgggtgaggcgtcggacaagtgccagagggagaagcgcaagaccatcaacggcgacgatcttctctgggccatgacaaccctgggattcgaagagtacgtggagcctctgaagatttacctccagcgcttccgcgagatggagggagagaagaccgtggccgcccgcgactcttctaaggactcggcctccgcctcctcctatcatcagggacacgtgtacggctcccctgcctaccatcatcaagtgcctgggcccacttatcctgcccctggtagacccagatgacgtgctcctctattcgccactccctagactttttatattatattatttaattaaactctcttctccactcaacctttgcaagatcactgggttggttagtcttgttacttgttactgtttctctctatcatacctatactcactcttcctcctcatctattatttacatccaatgcaaattctcaaatattcctttttcaaaaaaaaaaaaaaaaaaaaaaaaaaaaaaaaaaaatagatagctccttcaattagggtttttgtgatctgcaagctacgatgggtaagggaacggggagtttcggtaagagaaggaacaagacccacaccctctgtgtgaggtgtggccgccgcagtttccacctccagaagagtcgttgcgccgcgtgcgctttccccgctgcgcgcaccaggaaatataactggagcgtgaaggccattaggagaaagaccaccggaactggaaggatgaggtacttgcgtaacgtgccccgtagatttaagagtggcttcagagacggtaccgaagctgcacccaggaagagaggagctgctgcctctacctaagctttgaataatagcaatttttgctgggtcagtgaattatataggatttaatgtttctatgttgatgccgagctctttggaacacgtttctttctgtcgttttaatttcatttaatatgtagtggctttgtatttcgacgtgaggattgcaaggaatttttgttttttc

SEQ ID NO: 8017 - protein, 165 aa, Glycine max
  misc_feature (1)..(165): Ceres Seq. ID no. 15177247
MAESDNDSGGAQNAGNSGNLSELSPREQDRFLPIANVSRIMKKALPANAKISKDAKETVQECVSEFISFITGEASDKCQREKRKTINGDDLLWAMTTLGFEEYVEPLKIYLQRFREMEGEKTVAARDSSKDSASASSYHQGHVYGSPAYHHQVPGPTYPAPGRPR

SEQ ID NO: 8018 - protein, 125 aa, Glycine max
  misc_feature (1)..(125): Ceres Seq. ID no. 15177248
MKKALPANAKISKDAKETVQECVSEFISFITGEASDKCQREKRKTINGDDLLWAMTTLGFEEYVEPLKIYLQRFREMEGEKTVAARDSSKDSASASSYHQGHVYGSPAYHHQVPGPTYPAPGRPR

SEQ ID NO: 8019 - protein, 95 aa, Glycine max
  misc_feature (1)..(95): Ceres Seq. ID no. 15177249
MGKGTGSFGKRRNKTHTLCVRCGRRSFHLQKSRCAACAFPAARTRKYNWSVKAIRRKTTGTGRMRYLRNVPRRFKSGFRDGTEAAPRKRGAAAST

SEQ ID NO: 8020 - DNA, 1790 bp, Glycine max
  misc_feature (1)..(1790): Ceres Seq. ID no. 15177258
actctgcttcctctctccaaagcctgaaagaaaaaaaaaatcatctttctctttctcatattttctctgtgtgtgaatttgttgttctttcacaatggaacaacctccttcctcgtctcttcaggtggagacagcacaacaaccgggacctagtcctctccgaaaaatgttcgctgtctcgtcaatcgccgcgggaattcaattcgggtgggccctacagctctctcttctgacaccgtacgtccagaccctcggcgtccctcacgcatgggcgtcgttcatttggctctgcggcccaatctctgggctgcttgtgcagcccattgtagggtacagcagcgatcgatgcagatcccgcttcggtcgccgccgtcccttcatcttcgtcggagccatcgccgtcgcaattgctgtgttcctcatcggttatgcagccgatataggacacgcggcgggcgatgacctcacgaagaagacccgtccacgcgcggtggtggtctttgtggtcggcttctggatcctggacgtggccaacaacatgctccagggtccatgccgcgccttcctcggtgacctcgccgccggggaccaccgcaagacgaggaccgccaacgccttcttctcgttcttcatggccatcggaaacgtcctcggctacgcagccggctcctacgacaaactccaccgcgccttcaaattcacacaaaccgaagcgtgtgacgtgttctgtgcaaacctcaagagctgcttcttcttctcaattgtcctcctcctggttctttgtttcgttgtgctcatttgcgtcgacgacccacaattcacgccacgtggcgatgacaacaatggcgaaaacgacggcgtttcggggtcgtgctttggtgaactctgggctgcgtttaaaggtctaaagaggccaatgtggttgttgatggtagtgaccgctataaactgggtggcgtggtttccgtacatgctgttcgatactgattggatggggcgtgaggtgtacggtggtaaggtgggggagaaagcatacgattcgggagtgcataagggggcgttggggcttatgctgaactctgtcgttttggcattgatgtcgttgacggtggaaccgttgggtcgtttcgttgggggagttaagtggctatggggaatcgttaacgtaattctcgccgtttgcatggcaatgacggtggttatcacaagggctgcagaacatgaacggaaaaacggcgtttctgctgttgggcatccctcagttggtgtgcaagtggctgcattgactttcttctccgcccttggtgttcctcttgctattactttcagcgtcccctttgcactggcatctatatactcctccacttcaggagcaggccaaggtttatccttgggcgtcctcaatgttgcaattgtcgtgccacagatgatagtatcggctataagtggacagtgggataagtggtttggtggtggcaacttgccggcgtttgtgttgggtgccgtggcggccgccgtgagtgccgtgttagcggttgttctgctgccaacaccaaagccagcagatgtggccaaggttacttccgtcactgctgggagtttccattagtatatattatagagttttacatgcatgggacaatattagatggagacttttaatttaaatttggtgagtgtgtatcatttaggtattagacccatcaaataactctttagggtgggcttaagttttatccttgttttgtctaataaatatatgtacaacaacattaaaaaattaaaaatcc

SEQ ID NO: 8021 - protein, 504 aa, Glycine max
  misc_feature (1)..(504): Ceres Seq. ID no. 15177259
MEQPPSSSLQVETAQQPGPSPLRKMFAVSSIAAGIQFGWALQLSLLTPYVQTLGVPHAWASFIWLCGPISGLLVQPIVGYSSDRCRSRFGRRRPFIFVGAIAVAIAVFLIGYAADIGHAAGDDLTKKTRPRAVVVFVVGFWILDVANNMLQGPCRAFLGDLAAGDHRKTRTANAFFSFFMAIGNVLGYAAGSYDKLHRAFKFTQTEACDVFCANLKSCFFFSIVLLLVLCFVVLICVDDPQFTPRGDDNNGENDGVSGSCFGELWAAFKGLKRPMWLLMVVTAINWVAWFPYMLFDTDWMGREVYGGKVGEKAYDSGVHKGALGLMLNSVVLALMSLTVEPLGRFVGGVKWLWGIVNVILAVCMAMTVVITRAAEHERKNGVSAVGHPSVGVQVAALTFFSALGVPLAITFSVPFALASIYSSTSGAGQGLSLGVLNVAIVVPQMIVSAISGQWDKWFGGGNLPAFVLGAVAAAVSAVLAVVLLPTPKPADVAKVTSVTAGSFH

SEQ ID NO: 8022 - protein, 480 aa, Glycine max
  misc_feature (1)..(480): Ceres Seq. ID no. 15177260
MFAVSSIAAGIQFGWALQLSLLTPYVQTLGVPHAWASFIWLCGPISGLLVQPIVGYSSDRCRSRFGRRRPFIFVGAIAVAIAVFLIGYAADIGHAAGDDLTKKTRPRAVVVFVVGFWILDVANNMLQGPCRAFLGDLAAGDHRKTRTANAFFSFFMAIGNVLGYAAGSYDKLHRAFKFTQTEACDVFCANLKSCFFFSIVLLLVLCFVVLICVDDPQFTPRGDDNNGENDGVSGSCFGELWAAFKGLKRPMWLLMVVTAINWVAWFPYMLFDTDWMGREVYGGKVGEKAYDSGVHKGALGLMLNSVVLALMSLTVEPLGRFVGGVKWLWGIVNVILAVCMAMTVVITRAAEHERKNGVSAVGHPSVGVQVAALTFFSALGVPLAITFSVPFALASIYSSTSGAGQGLSLGVLNVAIVVPQMIVSAISGQWDKWFGGGNLPAFVLGAVAAAVSAVLAVVLLPTPKPADVAKVTSVTAGSFH

SEQ ID NO: 8023 - protein, 356 aa, Glycine max
  misc_feature (1)..(356): Ceres Seq. ID no. 15177261
MLQGPCRAFLGDLAAGDHRKTRTANAFFSFFMAIGNVLGYAAGSYDKLHRAFKFTQTEACDVFCANLKSCFFFSIVLLLVLCFVVLICVDDPQFTPRGDDNNGENDGVSGSCFGELWAAFKGLKRPMWLLMVVTAINWVAWFPYMLFDTDWMGREVYGGKVGEKAYDSGVHKGALGLMLNSVVLALMSLTVEPLGRFVGGVKWLWGIVNVILAVCMAMTVVITRAAEHERKNGVSAVGHPSVGVQVAALTFFSALGVPLAITFSVPFALASIYSSTSGAGQGLSLGVLNVAIVVPQMIVSAISGQWDKWFGGGNLPAFVLGAVAAAVSAVLAVVLLPTPKPADVAKVTSVTAGSFH

SEQ ID NO: 8024 - DNA, 1534 bp, Glycine max
  misc_feature (1)..(1534): Ceres Seq. ID no. 15177270
accttctttatctctcaaaagagagacacaacaaaaggaaccagagtggattaattagggacatgagaacaaggagaggagcgtgttactctggagtagtctcaaggatgtgttccgatgcgagggtttccaagaaaaaaaacaaggatctgcacatgcacatgcatatgcatatgcatgtccccgccggagactccattatttacagccggaaaaggcagaagaaaacgccggagaaaaccgccggcgctgattacgaatttttcgagtctttgccggacgacctcgtaatctccatcttctgcaaacttagttccaccgccactaaaccttccgatttcgtcaatattttaatcacgtgcaaaagattaaacagattagcacttcattcgcttgtattatccaaagcctcgccgaaaactttcactattaaagcaagagattggtgcgattcggcacacaaattcctcaaacactgtgccgatgccggaaacgttgaagcttgctatactttaggcatgattcggttctactgtttgcaaaaccgagggagcggcgcgtcgtttatggcgaaggcggccattaactctcacgcgcgggctctgtatgcgctggccgtgattcagttcaacggcagcggtggcacgaagagcgacaaggacctacgcgccggcgtggcgctgtgcgccagagcggcgtttcttggccacgtcgatgcgatgcgcgaactcggccactgcctgcaggacggttacggcgtgcggcagaacatcgccgagggacggcggttcctcgtgcaggcaaacgcgcgcgagctcgccgccgtgctgtctaccggcgccgccgcgcgcacctggctgagttggaatcttcagccgcagcagctccggcaggggtccgggtgtccgcttctcagcgatttcggatgcaacgtaccggcgccggaggtgcaccccgcgagcctgttcatggcggagtggttcgccgcgcggggcggttcgccgggaccggggctgagactctgttctcacgcggggtgcgggaggcccgagacgaggaagcacgagtttcgaaggtgttctgtgtgcggcgtggtgaattattgctcacgcgcgtgccaagcgcttgattggaagttccggcacaaggcggagtgctcccccgtgcaacggtggctcgaggaggacggcgaagatgtcggtaacgacgacggtgacggagaggtggaggttatggtagatagttagacaatttttacaacagtaacggtaacggaagtcgctttggacggaaaaatgaatatttttggcgaagtgaaagaaaaaaaggaattacttgtgatgatttattcgccgtctcaaaaaggtagaaaagagtatatggcttcttttcttttttccttgtataggtcgaaaattctcccgaaaaaaacgagaggagattatttttctttttttattttattttgcaatttcggagtttaaagttaatttagaaattcaatgctaaaactaagaggttactagttactgct

SEQ ID NO: 8025 - protein, 414 aa, Glycine max
  misc_feature (1)..(414): Ceres Seq. ID no. 15177271
LLYLSKERHNKRNQSGLIRDMRTRRGACYSGVVSRMCSDARVSKKKNKDLHMHMHMHMHVPAGDSIIYSRKRQKKTPEKTAGADYEFFESLPDDLVISIFCKLSSTATKPSDFVNILITCKRLNRLALHSLVLSKASPKTFTIKARDWCDSAHKFLKHCADAGNVEACYTLGMIRFYCLQNRGSGASFMAKAAINSHARALYALAVIQFNGSGGTKSDKDLRAGVALCARAAFLGHVDAMRELGHCLQDGYGVRQNIAEGRRFLVQANARELAAVLSTGAAARTWLSWNLQPQQLRQGSGCPLLSDFGCNVPAPEVHPASLFMAEWFAARGGSPGPGLRLCSHAGCGRPETRKHEFRRCSVCGVVNYCSRACQALDWKFRHKAECSPVQRWLEEDGEDVGNDDGDGEVEVMVDS

SEQ ID NO: 8026 - protein, 394 aa, Glycine max
  misc_feature (1)..(394): Ceres Seq. ID no. 15177272
MRTRRGACYSGVVSRMCSDARVSKKKNKDLHMHMHMHMHVPAGDSIIYSRKRQKKTPEKTAGADYEFFESLPDDLVISIFCKLSSTATKPSDFVNILITCKRLNRLALHSLVLSKASPKTFTIKARDWCDSAHKFLKHCADAGNVEACYTLGMIRFYCLQNRGSGASFMAKAAINSHARALYALAVIQFNGSGGTKSDKDLRAGVALCARAAFLGHVDAMRELGHCLQDGYGVRQNIAEGRRFLVQANARELAAVLSTGAAARTWLSWNLQPQQLRQGSGCPLLSDFGCNVPAPEVHPASLFMAEWFAARGGSPGPGLRLCSHAGCGRPETRKHEFRRCSVCGVVNYCSRACQALDWKFRHKAECSPVQRWLEEDGEDVGNDDGDGEVEVMVDS

SEQ ID NO: 8027 - protein, 379 aa, Glycine max
  misc_feature (1)..(379): Ceres Seq. ID no. 15177273
MCSDARVSKKKNKDLHMHMHMHMHVPAGDSIIYSRKRQKKTPEKTAGADYEFFESLPDDLVISIFCKLSSTATKPSDFVNILITCKRLNRLALHSLVLSKASPKTFTIKARDWCDSAHKFLKHCADAGNVEACYTLGMIRFYCLQNRGSGASFMAKAAINSHARALYALAVIQFNGSGGTKSDKDLRAGVALCARAAFLGHVDAMRELGHCLQDGYGVRQNIAEGRRFLVQANARELAAVLSTGAAARTWLSWNLQPQQLRQGSGCPLLSDFGCNVPAPEVHPASLFMAEWFAARGGSPGPGLRLCSHAGCGRPETRKHEFRRCSVCGVVNYCSRACQALDWKFRHKAECSPVQRWLEEDGEDVGNDDGDGEVEVMVDS

SEQ ID NO: 8028 - DNA, 2222 bp, Glycine max
  misc_feature (1)..(2222): Ceres Seq. ID no. 15177274
ctgatgtttcaatagggtttcgaatttttctctgtttccctctgagactctctctatgctttggttttctcagatttttccaaattcgcggctcttccaggttgaatttggtagttttttcaatctagggttagggttttgtgcgtgctagtcaatggtttgttgcgtgcaaatttcatgaagagtgttatttatatttccgtacccgcttcagtttcttcgtaggttctgttgcagtgagaattgggcactttctcctttcgattttccggtcgaatcaagcatcaaaatctgagatttttcttttttgcaagtggtttttttagatttggggtagattttttttttgttttctttttattttgggcttcgtagtgcattgaattggcgcggcattcactggaatttgcgacgtgggagctggagaagctgcgatgaagtgtggtgcttggagggtattcttaaagtagcactcaattcgaggtttaatgtttggtcagagcatggattctgcaaggaatgcgggtggtgtggcagggacagtgctaattcccatgcgttttgtgtggccatatggaggaaggagtgtgtttctcagtggttctttcacaaggtggttggagcttctaccgatgtcgccagtggaaggttgtccaactgtgtttcaagtgatttataacttgccacccgggtaccatcagtacaagttttttgttgatggagaatggcgccatgatgaacatcaaccttatgtacctggagattatgggatagtcaacactgtcttcttggccactgatcctaactacatacctgttttacccccagacgttgcttctggaaatagcatggatgtggataatgatgcttttcgacgaatggtccgtctgaccgatggaacactgagtgaggtgctgccaagaatatcagatactgatgtacagatctcccgtcagcgtatttctgcatttctatcttcacacaccgcttatgaattacttcctgagtcaggcaaggttgttgctttggatgttgatctacccgtgaaacaggcatttcatatattgcatgagcagggaattttcatggctcctctttgggacttctgcaaagggcaatttgttggtgttcttagtgctttggattttattttaattttaagagagctggggaatcatggatctaatctgacagaagaggagcttgaaacacataccatatcagcttggaaagaaggaaagtcgtacttaaatagacagaacaatggacatggaactatgttttcaagacgatttatccatgcaggaccatatgataatctgaaagatattgccatgaagatcttgcaaaaggaggtttcaacagttcctattatccattcatcttctgaagatgcttcatttccacagttactacatcttgcttcactttcaggaatacttaaatgcatttgtaggtattttaggcactgctctagttccctgcctgtacttcaacttccaatctgtgcaatacctgtgggcacgtgggtgcccaaaattggggaatcaaatcggcagcctctagcaatgttgagaccaaccgcttctcttgcgtcagccctaaatttattagttcaagcccaagtaagctcaataccaatagttgatgataatgactcattactggatatatattgtcggagtgacataacagctttggcaaagaacagagcatatgcacatattaatcttgatgaaatgacagttcatcaggctttgcagttgggccaggacgcatatagtccctatgagcttagaagtcaaagatgtcagatgtgtttgcgttctgatcctctgcataaagtgatggaacgcttggcaaatccaggtgtcaggcggcttgtcatcgtggaagctggcagcaagcgtgtagaaggcattgtttcattgagggacatattcaagttcttcattggtgattagttttggattggtgaatggaaaagtaaaatggtatgtgctgtggttatgatactagagcatccatacaaccagccaccatcacttgtccaaccattgaaagtgctttctacacggtgattttatctctcatttcattgtaatacaattggattggcctcttgctttattgccttttttaagattttaggctgagaaagaggcctgtaaattcagagtatttgattgccccaaatttattcatctctccccattcgtatt

SEQ ID NO: 8029 - protein, 491 aa, Glycine max
  misc_feature (1)..(491): Ceres Seq. ID no. 15177275
MFGQSMDSARNAGGVAGTVLIPMRFVWPYGGRSVFLSGSFTRWLELLPMSPVEGCPTVFQVIYNLPPGYHQYKFFVDGEWRHDEHQPYVPGDYGIVNTVFLATDPNYIPVLPPDVASGNSMDVDNDAFRRMVRLTDGTLSEVLPRISDTDVQISRQRISAFLSSHTAYELLPESGKVVALDVDLPVKQAFHILHEQGIFMAPLWDFCKGQFVGVLSALDFILILRELGNHGSNLTEEELETHTISAWKEGKSYLNRQNNGHGTMFSRRFIHAGPYDNLKDIAMKILQKEVSTVPIIHSSSEDASFPQLLHLASLSGILKCICRYFRHCSSSLPVLQLPICAIPVGTWVPKIGESNRQPLAMLRPTASLASALNLLVQAQVSSIPIVDDNDSLLDIYCRSDITALAKNRAYAHINLDEMTVHQALQLGQDAYSPYELRSQRCQMCLRSDPLHKVMERLANPGVRRLVIVEAGSKRVEGIVSLRDIFKFFIGD

SEQ ID NO: 8030 - protein, 486 aa, Glycine max
  misc_feature (1)..(486): Ceres Seq. ID no. 15177276
MDSARNAGGVAGTVLIPMRFVWPYGGRSVFLSGSFTRWLELLPMSPVEGCPTVFQVIYNLPPGYHQYKFFVDGEWRHDEHQPYVPGDYGIVNTVFLATDPNYIPVLPPDVASGNSMDVDNDAFRRMVRLTDGTLSEVLPRISDTDVQISRQRISAFLSSHTAYELLPESGKVVALDVDLPVKQAFHILHEQGIFMAPLWDFCKGQFVGVLSALDFILILRELGNHGSNLTEEELETHTISAWKEGKSYLNRQNNGHGTMFSRRFIHAGPYDNLKDIAMKILQKEVSTVPIIHSSSEDASFPQLLHLASLSGILKCICRYFRHCSSSLPVLQLPICAIPVGTWVPKIGESNRQPLAMLRPTASLASALNLLVQAQVSSIPIVDDNDSLLDIYCRSDITALAKNRAYAHINLDEMTVHQALQLGQDAYSPYELRSQRCQMCLRSDPLHKVMERLANPGVRRLVIVEAGSKRVEGIVSLRDIFKFFIGD

SEQ ID NO: 8031 - protein, 469 aa, Glycine max
  misc_feature (1)..(469): Ceres Seq. ID no. 15177277
MRFVWPYGGRSVFLSGSFTRWLELLPMSPVEGCPTVFQVIYNLPPGYHQYKFFVDGEWRHDEHQPYVPGDYGIVNTVFLATDPNYIPVLPPDVASGNSMDVDNDAFRRMVRLTDGTLSEVLPRISDTDVQISRQRISAFLSSHTAYELLPESGKVVALDVDLPVKQAFHILHEQGIFMAPLWDFCKGQFVGVLSALDFILILRELGNHGSNLTEEELETHTISAWKEGKSYLNRQNNGHGTMFSRRFIHAGPYDNLKDIAMKILQKEVSTVPIIHSSSEDASFPQLLHLASLSGILKCICRYFRHCSSSLPVLQLPICAIPVGTWVPKIGESNRQPLAMLRPTASLASALNLLVQAQVSSIPIVDDNDSLLDIYCRSDITALAKNRAYAHINLDEMTVHQALQLGQDAYSPYELRSQRCQMCLRSDPLHKVMERLANPGVRRLVIVEAGSKRVEGIVSLRDIFKFFIGD

SEQ ID NO: 8032 - DNA, 1552 bp, Glycine max
  misc_feature (1)..(1552): Ceres Seq. ID no. 15177285
aacataagaaaattattggtctctgttctctacctcaccccccaccgcactcgtcttgtctcaaacaaatgcaacaaccacttattcttatagttactatggactaggaacaagatttgattctcattctgatatcagattcagatttttttaaaagagactcacgctggcggtgaagaacgtttctgcggcggcggcggaggaggaggaacaggttaacatgactctgatttccaattccgacgtcgaaagccacgccgacgtccaaatccccgacaccgcgcatcaaattagcaccgattcatggtttcaagtggggttcgtgctgacgacgggcatcaacagcgcctatgtgcttggatattcagggaccatcatggttcccctgggttgggcagggggtgtggttggtttgattctcgccaccgcaatatcactctacgcgaatgctcttattgctaggctccatgaatatggaggaacaaggcatattcgatatagagatcttgctggatttatttatggtagaaaggcttattccctcacatgggctctacagtatgtcaaccttttcatgataaatgccggctacatcattttggctggttcggctttaaaggccacctatgttctattcagggaagacgatgggatgaagcttccgtattttataggcattgctggatttgtgtgtgcaatgtttgccatttgcattccccatctttcagctctcggaatttggctgggattttcgacagtcttcagcctagtatacattgttatagcatttgtactgtcaattaaagatggtataaaatcaccacctcgtgattatagcattccggggacatcaaccagtaaaatatccacaacaattggggcgtctgctaatcttgtgttcgcatataatacaggaatgcttcctgagatacaggcgacaatcaggcagccagtagtcaagaacatgatgaaagccctgtattttcagtttactgttggagttctgccattatatctggtaacctttgcaggatactgggcttatggatcttcaacagctacctatttgatgagtgatgtcaatggtccagtttgggctaaggctatggccaatattgcagcctttcttcaatcagtcattgcattgcatatatttgcaagtccaatgtatgagtatttggataccaaatatgggatcaaagggagtgccctggcttttaagaacttgtcatttcgagtcttggtaagaggtggctacctgactttgaacacatttgtatcagctctattgccctttcttggagatttcatgagcctcactggagctatcagcacatttccccttacctttattcttgcaaaccatatgtaccttgtggcaaatgcgaacaaactaacatccatccaaaagctctggcattggatcaatatttgtttctttgccttcatgtctgttgcggcaactattgcagccctgcggcttattgatttagactccaaaacgtaccatgtttttgcggatatatgattaaatgcattatattctatcagc

SEQ ID NO: 8033 - protein, 435 aa, Glycine max
  misc_feature (1)..(435): Ceres Seq. ID no. 15177286
MTLISNSDVESHADVQIPDTAHQISTDSWFQVGFVLTTGINSAYVLGYSGTIMVPLGWAGGVVGLILATAISLYANALIARLHEYGGTRHIRYRDLAGFIYGRKAYSLTWALQYVNLFMINAGYIILAGSALKATYVLFREDDGMKLPYFIGIAGFVCAMFAICIPHLSALGIWLGFSTVFSLVYIVIAFVLSIKDGIKSPPRDYSIPGTSTSKISTTIGASANLVFAYNTGMLPEIQATIRQPVVKNMMKALYFQFTVGVLPLYLVTFAGYWAYGSSTATYLMSDVNGPVWAKAMANIAAFLQSVIALHIFASPMYEYLDTKYGIKGSALAFKNLSFRVLVRGGYLTLNTFVSALLPFLGDFMSLTGAISTFPLTFILANHMYLVANANKLTSIQKLWHWINICFFAFMSVAATIAALRLIDLDSKTYHVFADI

SEQ ID NO: 8034 - protein, 383 aa, Glycine max
  misc_feature (1)..(383): Ceres Seq. ID no. 15177287
MVPLGWAGGVVGLILATAISLYANALIARLHEYGGTRHIRYRDLAGFIYGRKAYSLTWALQYVNLFMINAGYIILAGSALKATYVLFREDDGMKLPYFIGIAGFVCAMFAICIPHLSALGIWLGFSTVFSLVYIVIAFVLSIKDGIKSPPRDYSIPGTSTSKISTTIGASANLVFAYNTGMLPEIQATIRQPVVKNMMKALYFQFTVGVLPLYLVTFAGYWAYGSSTATYLMSDVNGPVWAKAMANIAAFLQSVIALHIFASPMYEYLDTKYGIKGSALAFKNLSFRVLVRGGYLTLNTFVSALLPFLGDFMSLTGAISTFPLTFILANHMYLVANANKLTSIQKLWHWINICFFAFMSVAATIAALRLIDLDSKTYHVFADI

SEQ ID NO: 8035 - protein, 317 aa, Glycine max
  misc_feature (1)..(317): Ceres Seq. ID no. 15177288
MINAGYIILAGSALKATYVLFREDDGMKLPYFIGIAGFVCAMFAICIPHLSALGIWLGFSTVFSLVYIVIAFVLSIKDGIKSPPRDYSIPGTSTSKISTTIGASANLVFAYNTGMLPEIQATIRQPVVKNMMKALYFQFTVGVLPLYLVTFAGYWAYGSSTATYLMSDVNGPVWAKAMANIAAFLQSVIALHIFASPMYEYLDTKYGIKGSALAFKNLSFRVLVRGGYLTLNTFVSALLPFLGDFMSLTGAISTFPLTFILANHMYLVANANKLTSIQKLWHWINICFFAFMSVAATIAALRLIDLDSKTYHVFADI

SEQ ID NO: 8036 - DNA, 985 bp, Glycine max
  misc_feature (1)..(985): Ceres Seq. ID no. 15177289
attattcctcttccatctctattctccataacacccaccacaccacttgtgaaaaacctcattaatatcacacactgacatgtatctctgagctccaatccaatacaagaccacaccttgtcgtgtcggacgaaccttggtgtctgtttttttttttttttcattattttctccgaagagatgaggaagggcagaggtggaggcgcctcggcggcggcggtggatgtgaacggatccattttaaaggagcctcggtaccggggcgtgaggaagagaccgtgggggagattcgccgcggagatcagagacccgttgaagaaagccagggtttggttgggaaccttcgattctgccgaggatgctgctcgtgcctacgacgccgccgctcggactctccgaggtcccaaggccaaaacaaatttcccccctctctcacctttttgctatccacaccccaccaccgatcctttcttctacactggtttccacgatcaacaccaccaccacaacaacaacaaccttaacaaccctcaaagacccacttcaagtggcatgagtagcaccgttgagtccttcagtgggccccgccctcccaccaccaccactaccaccacaaccacaactgcgacgccgtttttgactgctacgcggagatacccgcgcactccccctcttgtccctgaagactgccacagtgactgcgactcttcctcctccgtcgttgacgacggcgacgacaacatcgtttcgtcgtcgtttcgacctcccttgccgtttgatctcaacgcgctgccgtttgatgatgctgccgcggatgatgatctacgccgcaccgcgctttgtctctgatgatgattatcgtgcgatgatgatttttaatttctcatttttttacttgatttttttgttattgctatgcagaagaaatatatatttaaaatgatgatcagatgtaagattatggtaatatgatcttaattctgtg

SEQ ID NO: 8037 - protein, 222 aa, Glycine max
  misc_feature (1)..(222): Ceres Seq. ID no. 15177290
MRKGRGGGASAAAVDVNGSILKEPRYRGVRKRPWGRFAAEIRDPLKKARVWLGTFDSAEDAARAYDAAARTLRGPKAKTNFPPLSPFCYPHPTTDPFFYTGFHDQHHHHNNNNLNNPQRPTSSGMSSTVESFSGPRPPTTTTTTTTTTATPFLTATRRYPRTPPLVPEDCHSDCDSSSSVVDDGDDNIVSSSFRPPLPFDLNALPFDDAAADDDLRRTALCL

SEQ ID NO: 8038 - DNA, 1233 bp, Glycine max
  misc_feature (1)..(1233): Ceres Seq. ID no. 15177312
gatgaaaggcatgttctacacttgttctacttatacgttatctttacatatcagtgtaaagaaatcatgatttgttcctaattaaacctctcaatttaaatatctccctcctttcccatcccacactcccccaccgtttaccgtataggccatcaatctcttcttcttcttcttcttcttcttcttcttccataatggacccttgtccttcatccaacacgaacaccgtgaacgggttctacacgttcgtgagccggggaatggaggagctggagcgagccttcttagccaacaacagcttcatctccctccagttcctccagaaggtcctctccctcctccgttccctccacacccaactcaccctcctcgtccacaagctccacctccccctcggcgacaagtggctcgacgagtacatggacgagacctccaagctctgggagacctctcacctcctcaaatccgccatctccaacttcgaacctttctactcccagggcttcaaccttctctcctccctcgactcatcccacccccaggtagtgagggctatatcagggtgcagaagggaggctttgggtttggaggagcagaaccgcgctctgatggagactcgggtccacacgctgtgtctgcgtctggacgagagggtatccgtggagtccaagctcaacggcttcaacggcttcaggggcgttctctacgcaatgaggaacgtgagttcgatgcttttaatgatcctgctgcacggtttagtgtactgctggccggagacctcggagttggtctcgggagggtacgagggggggaggatgttcctgggatcggcggcgaggctaaggcagagggtggccgcggagatgcgcggcgccgccgggccggggattttgctttacgagtttaggagggctagggtggctgtggaggagctgagaggggaattggaggaggcggagggtggtgttagggagagagtggagagtgttagggtgtgttttggggtgctcagatctggggctgagaacattgtttgccagcttgatgatttctttgatgagattgtcgaggggaggaagaaactcttggatttttgcagtcataggtaaataaatggtagtaaatagtttttagaaagaagaaaaaaaatgttctcctttcttgtttgatcgattaaagaggggcatgtagttgaaaaaaaaaatgaaaagctaaaatgtttttcctttgtgc

SEQ ID NO: 8039 - protein, 304 aa, Glycine max
  misc_feature (1)..(304): Ceres Seq. ID no. 15177313
MDPCPSSNTNTVNGFYTFVSRGMEELERAFLANNSFISLQFLQKVLSLLRSLHTQLTLLVHKLHLPLGDKWLDEYMDETSKLWETSHLLKSAISNFEPFYSQGFNLLSSLDSSHPQVVRAISGCRREALGLEEQNRALMETRVHTLCLRLDERVSVESKLNGFNGFRGVLYAMRNVSSMLLMILLHGLVYCWPETSELVSGGYEGGRMFLGSAARLRQRVAAEMRGAAGPGILLYEFRRARVAVEELRGELEEAEGGVRERVESVRVCFGVLRSGAENIVCQLDDFFDEIVEGRKKLLDFCSHR

SEQ ID NO: 8040 - protein, 282 aa, Glycine max
  misc_feature (1)..(282): Ceres Seq. ID no. 15177314
MEELERAFLANNSFISLQFLQKVLSLLRSLHTQLTLLVHKLHLPLGDKWLDEYMDETSKLWETSHLLKSAISNFEPFYSQGFNLLSSLDSSHPQVVRAISGCRREALGLEEQNRALMETRVHTLCLRLDERVSVESKLNGFNGFRGVLYAMRNVSSMLLMILLHGLVYCWPETSELVSGGYEGGRMFLGSAARLRQRVAAEMRGAAGPGILLYEFRRARVAVEELRGELEEAEGGVRERVESVRVCFGVLRSGAENIVCQLDDFFDEIVEGRKKLLDFCSHR

SEQ ID NO: 8041 - protein, 229 aa, Glycine max
  misc_feature (1)..(229): Ceres Seq. ID no. 15177315
MDETSKLWETSHLLKSAISNFEPFYSQGFNLLSSLDSSHPQVVRAISGCRREALGLEEQNRALMETRVHTLCLRLDERVSVESKLNGFNGFRGVLYAMRNVSSMLLMILLHGLVYCWPETSELVSGGYEGGRMFLGSAARLRQRVAAEMRGAAGPGILLYEFRRARVAVEELRGELEEAEGGVRERVESVRVCFGVLRSGAENIVCQLDDFFDEIVEGRKKLLDFCSHR

SEQ ID NO: 8042 - DNA, 1647 bp, Glycine max
  misc_feature (1)..(1647): Ceres Seq. ID no. 15177316
atctcctcttcctcctcaatcctacttaattgctttgtttctccttttaatttctatatatttctctctcttctggaaacaattactttaaggatgagtaaacaagacttgttgaaagttcagagctgtgttctcaaggttaatatccactgcgatggctgtgagcaaaaagtcaagaaactgctgcagaaaatcgatggggtttattctgtgagagtagatgcagatgaagggaaagtggtagtggcaggagatgtggatccagcgaaactggtaaaaaagctaaagaggggagggaagcatgctgagatatgccagaaccagaaaggaggaatgatgtgtaatcagattcagaactatcctatcaatccccaattccagaacatgcaacttggtattgggggaaaggacaacaataataatcacaagggtcagaaagagaaaggtactgctgcggctgctggtcaactagtacacttccctattcttaaaggggttcaggatctcaaggtacctgccaaggaacaaaagtctgtcaagttcaacttgccagaggaggatgaatttgatgccagtgatgatggttatgatgaggatggattaggccatggacatccaatgcagaacaagatcatgcccatgatgattaatcacaaccataaagacaattctggtgggagtaggaatattaatggaagtgttaagaaagctgacgtcattgatcaggcaatgctgttcaagggcaaaggtggaaatttcgatgaggcagaagctgacaatgatggaggaaagaaaggtagtagtagccaaaaagatgaaatcaagaagggggatttggataagcctaaggcagtcggtgaggtagattttcataagaaaaagaatgggaaaagtgagaatggattacttggtcggtttctaggctttgggaaaaagagcaagaaaggagaattagaagaaacaacttataccaataagagcaagaaccaaaacagtggtgctgaaaataagaaaggcaaggaagggaaattggaggatcatggtaacaatgactttgattttcatgattacgatgatacccctcctcatcccaaaaatggcaaaagtggtaagggtagtaacaatgtcaaagaaggccagatgggcccgggcccaataatgggtaataatcttccaatgcgtcatcagatggagaatattcaagcagtacaaggacttccggcgatgaatggtgatggtggctattatcaaggggtgcaaatgcaacatgctccatacaataaccttcagcagcactacatgggtatgatgatgaaccagcatcaacatcagcaagcaaatatgaacaacaacatgtacccaacacccatgatgtatggtaggccgcatccatctatgaactacatgccaccacctcctatgccatctcacccaattgccgatcctattactcataccttcagtgatgagaatgttgagagctgcagtatcatgtaattaattaattaattactagtgacaacttgcttttctgctctatgattcggtctttagggagttcattaaattttgtgtaggacggaaaatgtgggatgtttaggattatattattatattatatataaataaatagtatattgtttgcac

SEQ ID NO: 8043 - protein, 498 aa, Glycine max
  misc_feature (1)..(498): Ceres Seq. ID no. 15177317
ISSSSSILLNCFVSPFNFYIFLSLLETITLRMSKQDLLKVQSCVLKVNIHCDGCEQKVKKLLQKIDGVYSVRVDADEGKVVVAGDVDPAKLVKKLKRGGKHAEICQNQKGGMMCNQIQNYPINPQFQNMQLGIGGKDNNNNHKGQKEKGTAAAAGQLVHFPILKGVQDLKVPAKEQKSVKFNLPEEDEFDASDDGYDEDGLGHGHPMQNKIMPMMINHNHKDNSGGSRNINGSVKKADVIDQAMLFKGKGGNFDEAEADNDGGKKGSSSQKDEIKKGDLDKPKAVGEVDFHKKKNGKSENGLLGRFLGFGKKSKKGELEETTYTNKSKNQNSGAENKKGKEGKLEDHGNNDFDFHDYDDTPPHPKNGKSGKGSNNVKEGQMGPGPIMGNNLPMRHQMENIQAVQGLPAMNGDGGYYQGVQMQHAPYNNLQQHYMGMMMNQHQHQQANMNNNMYPTPMMYGRPHPSMNYMPPPPMPSHPIADPITHTFSDENVESCSIM

SEQ ID NO: 8044 - protein, 467 aa, Glycine max
  misc_feature (1)..(467): Ceres Seq. ID no. 15177318
MSKQDLLKVQSCVLKVNIHCDGCEQKVKKLLQKIDGVYSVRVDADEGKVVVAGDVDPAKLVKKLKRGGKHAEICQNQKGGMMCNQIQNYPINPQFQNMQLGIGGKDNNNNHKGQKEKGTAAAAGQLVHFPILKGVQDLKVPAKEQKSVKFNLPEEDEFDASDDGYDEDGLGHGHPMQNKIMPMMINHNHKDNSGGSRNINGSVKKADVIDQAMLFKGKGGNFDEAEADNDGGKKGSSSQKDEIKKGDLDKPKAVGEVDFHKKKNGKSENGLLGRFLGFGKKSKKGELEETTYTNKSKNQNSGAENKKGKEGKLEDHGNNDFDFHDYDDTPPHPKNGKSGKGSNNVKEGQMGPGPIMGNNLPMRHQMENIQAVQGLPAMNGDGGYYQGVQMQHAPYNNLQQHYMGMMMNQHQHQQANMNNNMYPTPMMYGRPHPSMNYMPPPPMPSHPIADPITHTFSDENVESCSIM

SEQ ID NO: 8045 - protein, 387 aa, Glycine max
  misc_feature (1)..(387): Ceres Seq. ID no. 15177319
MMCNQIQNYPINPQFQNMQLGIGGKDNNNNHKGQKEKGTAAAAGQLVHFPILKGVQDLKVPAKEQKSVKFNLPEEDEFDASDDGYDEDGLGHGHPMQNKIMPMMINHNHKDNSGGSRNINGSVKKADVIDQAMLFKGKGGNFDEAEADNDGGKKGSSSQKDEIKKGDLDKPKAVGEVDFHKKKNGKSENGLLGRFLGFGKKSKKGELEETTYTNKSKNQNSGAENKKGKEGKLEDHGNNDFDFHDYDDTPPHPKNGKSGKGSNNVKEGQMGPGPIMGNNLPMRHQMENIQAVQGLPAMNGDGGYYQGVQMQHAPYNNLQQHYMGMMMNQHQHQQANMNNNMYPTPMMYGRPHPSMNYMPPPPMPSHPIADPITHTFSDENVESCSIM

SEQ ID NO: 8046 - DNA, 1687 bp, Glycine max
  misc_feature (1)..(1687): Ceres Seq. ID no. 15177320
atcatctatatacttgtacccgatcaatgaattagcctataaagaccaagtattccttggagttgttgtataaccaggcttatatattagctattaatcttcagttgacatgcacatccaaatgtcttctttcctcttagcttcgcttgcacttttgttttgcatctcctccttggagaagagctttgcctttcaagcaacaaaggaaagcaacaatcttcgtcaatatcattttgttcacctcaactctctttttccatcatcttcttgcagctcttctgccaaaggtcctaaaaggaaagcatcattagaagtggtgcacaaacatggcccatgctcccaactaaatcatagtggcaaagcagaggctacaatatcacacaatgatattatgaacctagacaatgaaagggtaaagtatattcagtccaggctctctaagaatttgggtggagaaaatagagtgaaggaattggattcaactaccctacccgccaagtctggtagacttattgggtctgcagactattatgttgttgttggtcttggtacacccaagagggacttgtcactcatttttgacacaggtagttatcttacatggactcagtgtgaaccctgtgctggttcttgctacaagcagcaagatccaatctttgatccatcaaagtcttcatcgtataccaatatcaaatgcacatcttcgctctgcactcaattccgttctgcgggatgctcctcatccacagatgcatcatgcatatatgacgtcaaatacggtgacaattccatctcccgcggcttcttgagtcaggagcgccttaccatcaccgccaccgacatcgtccacgacttcctctttggctgtggccaagacaacgagggcctcttcaggggcaccgccggcctcatgggcctcagccgccaccccatttcctttgtccaacaaacctcctcaatttacaacaaaattttctcctactgtctcccctccacccccagctcccttggccacctcaccttcggcgcttccgccgccaccaatgctaacctcaaatacactcccttttccacaatctccggcgaaaactccttctacggtctcgacatcgtcggcatctccgttggcggcaccaaactccctgctgtctcctcctccaccttctccgccggtggctccatcatcgactccggcaccgtgatcacgcggttgcctccgaccgcgtacgccgcgctccggtcggcatttcggcagtttatgatgaagtaccccgttgcctatgggacccgcctacttgacacgtgttatgatttcagtgggtataaggagatttcagttccgaggatagattttgaatttgccggtggcgtcaaggtggagttgccattggtggggatactctatggggaaagtgcgcaacaactgtgtttggcttttgctgcaaatgggaatggcaatgatattacgatatttgggaatgtgcaacaaaagacactagaggtcgtgtatgatgttgagggtgggaggatagggtttggtgctgctgggtgcaactgaagttagtttgattaatagtggtgttaattaaacatgctttgggcttgttagggaggaagaaatcttaattggctctggcatttttaattactattgttgttgttactggaaagtactctaaaacatatg

SEQ ID NO: 8047 - protein, 482 aa, Glycine max
  misc_feature (1)..(482): Ceres Seq. ID no. 15177321
MHIQMSSFLLASLALLFCISSLEKSFAFQATKESNNLRQYHFVHLNSLFPSSSCSSSAKGPKRKASLEVVHKHGPCSQLNHSGKAEATISHNDIMNLDNERVKYIQSRLSKNLGGENRVKELDSTTLPAKSGRLIGSADYYVVVGLGTPKRDLSLIFDTGSYLTWTQCEPCAGSCYKQQDPIFDPSKSSSYTNIKCTSSLCTQFRSAGCSSSTDASCIYDVKYGDNSISRGFLSQERLTITATDIVHDFLFGCGQDNEGLFRGTAGLMGLSRHPISFVQQTSSIYNKIFSYCLPSTPSSLGHLTFGASAATNANLKYTPFSTISGENSFYGLDIVGISVGGTKLPAVSSSTFSAGGSIIDSGTVITRLPPTAYAALRSAFRQFMMKYPVAYGTRLLDTCYDFSGYKEISVPRIDFEFAGGVKVELPLVGILYGESAQQLCLAFAANGNGNDITIFGNVQQKTLEVVYDVEGGRIGFGAAGCN

SEQ ID NO: 8048 - protein, 478 aa, Glycine max
  misc_feature (1)..(478): Ceres Seq. ID no. 15177322
MSSFLLASLALLFCISSLEKSFAFQATKESNNLRQYHFVHLNSLFPSSSCSSSAKGPKRKASLEVVHKHGPCSQLNHSGKAEATISHNDIMNLDNERVKYIQSRLSKNLGGENRVKELDSTTLPAKSGRLIGSADYYVVVGLGTPKRDLSLIFDTGSYLTWTQCEPCAGSCYKQQDPIFDPSKSSSYTNIKCTSSLCTQFRSAGCSSSTDASCIYDVKYGDNSISRGFLSQERLTITATDIVHDFLFGCGQDNEGLFRGTAGLMGLSRHPISFVQQTSSIYNKIFSYCLPSTPSSLGHLTFGASAATNANLKYTPFSTISGENSFYGLDIVGISVGGTKLPAVSSSTFSAGGSIIDSGTVITRLPPTAYAALRSAFRQFMMKYPVAYGTRLLDTCYDFSGYKEISVPRIDFEFAGGVKVELPLVGILYGESAQQLCLAFAANGNGNDITIFGNVQQKTLEVVYDVEGGRIGFGAAGCN

SEQ ID NO: 8049 - protein, 388 aa, Glycine max
  misc_feature (1)..(388): Ceres Seq. ID no. 15177323
MNLDNERVKYIQSRLSKNLGGENRVKELDSTTLPAKSGRLIGSADYYVVVGLGTPKRDLSLIFDTGSYLTWTQCEPCAGSCYKQQDPIFDPSKSSSYTNIKCTSSLCTQFRSAGCSSSTDASCIYDVKYGDNSISRGFLSQERLTITATDIVHDFLFGCGQDNEGLFRGTAGLMGLSRHPISFVQQTSSIYNKIFSYCLPSTPSSLGHLTFGASAATNANLKYTPFSTISGENSFYGLDIVGISVGGTKLPAVSSSTFSAGGSIIDSGTVITRLPPTAYAALRSAFRQFMMKYPVAYGTRLLDTCYDFSGYKEISVPRIDFEFAGGVKVELPLVGILYGESAQQLCLAFAANGNGNDITIFGNVQQKTLEVVYDVEGGRIGFGAAGCN

SEQ ID NO: 8050 - DNA, 1582 bp, Glycine max
  misc_feature (1)..(1582): Ceres Seq. ID no. 15177324
gaatagtaaaactcccacttttaactccctttctccgccgtcgcatcgttgctgtcatacaccgctgcccccgcccatgttgcacctccttcctccatttttcagtttttctccactgtgcatcagaatccacttttcatgtattctagagcgttcaatttgaagagttgcatttgagaaatggcatcggctttgatctcgcgttcttcgcgtaggtttctcaaaccttgttcttcttcggtatctctttaccctgccatcttcaatcctgtgatttcttctcaacaatcggcaagccaaaacccctctcaaaatcccccattcaagctaccccagctccaaagtttcaattttgagttccgtaaaactactgggtctctctcaagtttccaccttgttgcgcacgtgtccacgtggccttccaaggagaacaagaaccaccaaagtggtggtaatgtgagtagtagttgggttgaattgtacttgcctaggaaggttcagccctatgctcgccttgctcgccttgataagccaattgggacatggttgcttctatggccttgtatgtggtcaattaccctggctactaccccaggtcaccttcctgattttaaaatgttggctctgtttggatgtggggctttgcttttaagaggtgccggatgtactattaatgatctccttgatcgtgatattgatacaatggtagaacggacaaagttgagacctgtggcaagtggtcttttgacaccatttcaaggactttgttttcttggttttcaattacttttgggtcttgggattcttctacaactgaataattatagccgtgttttgggtgcctcatccttgttgcttgtcttctcctatcccctcatgaagaggtttacattttggcctcaagcctttcttgggttgacctttaactggggggctttgttaggatgggcagcaattaaaggaagtctggatccatctattgtgctgccactctatgcctctggagtattttggactcttgtgtatgatactatctacgcacatcaggacaaagaagatgacctgaaagtgggagttaaatcaacagctttgcgctttggtgattcaacaaaggagtggattacggggtttgggattgcatgccttggtggtcttgctgttagtggatttaatgctgaaataggctggccatattatgcatctctagcagttgcgtctggacacttgggctggcaaatatggacagtcgacctttcttcacgcgctgactgcaataggaaatttgtttcaaataagtggtttggagctatcatatttggtggaattctggctggaagactttcatcctagcggtacattttcccttacagtatacacacacacacatgaacaatcaaacattgttcgcatatcaaaactctggaccttagaatgttgtatctgattacgttttctttttttccttctatagaacatgtttgcagagccaattaatttatggctgagctttattcattgcatgatgaagcttattctttttagttattttttgggaactaattgttgaaacatggttgctggc

SEQ ID NO: 8051 - protein, 389 aa, Glycine max
  misc_feature (1)..(389): Ceres Seq. ID no. 15177325
MASALISRSSRRFLKPCSSSVSLYPAIFNPVISSQQSASQNPSQNPPFKLPQLQSFNFEFRKTTGSLSSFHLVAHVSTWPSKENKNHQSGGNVSSSWVELYLPRKVQPYARLARLDKPIGTWLLLWPCMWSITLATTPGHLPDFKMLALFGCGALLLRGAGCTINDLLDRDIDTMVERTKLRPVASGLLTPFQGLCFLGFQLLLGLGILLQLNNYSRVLGASSLLLVFSYPLMKRFTFWPQAFLGLTFNWGALLGWAAIKGSLDPSIVLPLYASGVFWTLVYDTIYAHQDKEDDLKVGVKSTALRFGDSTKEWITGFGIACLGGLAVSGFNAEIGWPYYASLAVASGHLGWQIWTVDLSSRADCNRKFVSNKWFGAIIFGGILAGRLSS

SEQ ID NO: 8052 - protein, 261 aa, Glycine max
  misc_feature (1)..(261): Ceres Seq. ID no. 15177326
MWSITLATTPGHLPDFKMLALFGCGALLLRGAGCTINDLLDRDIDTMVERTKLRPVASGLLTPFQGLCFLGFQLLLGLGILLQLNNYSRVLGASSLLLVFSYPLMKRFTFWPQAFLGLTFNWGALLGWAAIKGSLDPSIVLPLYASGVFWTLVYDTIYAHQDKEDDLKVGVKSTALRFGDSTKEWITGFGIACLGGLAVSGFNAEIGWPYYASLAVASGHLGWQIWTVDLSSRADCNRKFVSNKWFGAIIFGGILAGRLSS

SEQ ID NO: 8053 - protein, 244 aa, Glycine max
  misc_feature (1)..(244): Ceres Seq. ID no. 15177327
MLALFGCGALLLRGAGCTINDLLDRDIDTMVERTKLRPVASGLLTPFQGLCFLGFQLLLGLGILLQLNNYSRVLGASSLLLVFSYPLMKRFTFWPQAFLGLTFNWGALLGWAAIKGSLDPSIVLPLYASGVFWTLVYDTIYAHQDKEDDLKVGVKSTALRFGDSTKEWITGFGIACLGGLAVSGFNAEIGWPYYASLAVASGHLGWQIWTVDLSSRADCNRKFVSNKWFGAIIFGGILAGRLSS

SEQ ID NO: 8054 - DNA, 1461 bp, Glycine max
  misc_feature (1)..(1461): Ceres Seq. ID no. 15177336
aaaaaattagttgcgacttgcgagcaacaaaatgagtgttccaatggagacggagctctcaaccgaccaaaacggcgcttcttcccaacactcactttccgttcccgaggacaaagttcttgtccctgtcgaggtaaccctaaaactttccagcacagctaaaatcgacgacgttcgttccgccgttgaggggatgttagaaaagaggagtttgagctataacgatggacccattccggtgcctcttgatgacgcgtttctagcagataacgtgcaaagaatttgtgtttgtggatgtgatactgatgaggggatgcacaatgataatgttcttttgttctggcaagtcaagcctgttgtacatgtctttcagcttagcgaggaagggccatgtgaggatataagctctgatggccaatcttccagcttcaatgaatggattcttcctgcaaaagaatttgacggcatgtgggaaagcttaatatacgaatctggtctaaagcaacggttattacgatatgcagcaagtgctttgctctttactgaaaaaggggttgatccattccttgtttcatggaaccgcataattttgttacatggaccacctgggactggaaagacgtcgttatgtaaagcattagctcagaaattatcaattcgattcaattcgagatacccacaggcccagcttgttgaagtgaatgcacattctttgttcagtaaatggttctctgaaagtggcaagctggtagcgaaacttttccaaaagattcaagaaatggtagaggaagaaagcaatctagtatttgtattgattgatgaagtcgaaagccttgccgctgctagaaaagctgctttatctggttctgaaccttctgattctattcgggttgtcaatgcattactaactcagatggacaagttaaaatcatcgccaaatgtgataattctaaccacctccaacataactgcggctattgatattgcttttgttgatcgagctgatatcaaagcatatgttggtcccccaactcttcaagctcggtatgaaatattaaggtcctgcttacaggaaatgatgcgtacagggatattgactagtttacaggattgtaagaacgccatgcttcctcattacgctagtgcgaaagataggttgaacactctagattttcatgaggacgctacattcatgcaactgtgcaaacaactacttgaaactgcagaggcatgtgagggaatgagtggaaggtcgttgagaaagcttccatttttggcacatgctgcgcttgcaaatccttttgaatgcaaccctattaagttcttatgtacaatggtagaaacagcaaagagggagcgttctgagcttcctgactaaagtaactaaaatttcaattgaaaatgtgtaaatcaaaagtgtaacgattgcgtctactgcattttagtgcgataagtgttgat

SEQ ID NO: 8055 - protein, 448 aa, Glycine max
  misc_feature (1)..(448): Ceres Seq. ID no. 15177337
MSVPMETELSTDQNGASSQHSLSVPEDKVLVPVEVTLKLSSTAKIDDVRSAVEGMLEKRSLSYNDGPIPVPLDDAFLADNVQRICVCGCDTDEGMHNDNVLLFWQVKPVVHVFQLSEEGPCEDISSDGQSSSFNEWILPAKEFDGMWESLIYESGLKQRLLRYAASALLFTEKGVDPFLVSWNRIILLHGPPGTGKTSLCKALAQKLSIRFNSRYPQAQLVEVNAHSLFSKWFSESGKLVAKLFQKIQEMVEEESNLVFVLIDEVESLAAARKAALSGSEPSDSIRVVNALLTQMDKLKSSPNVIILTTSNITAAIDIAFVDRADIKAYVGPPTLQARYEILRSCLQEMMRTGILTSLQDCKNAMLPHYASAKDRLNTLDFHEDATFMQLCKQLLETAEACEGMSGRSLRKLPFLAHAALANPFECNPIKFLCTMVETAKRERSELPD

SEQ ID NO: 8056 - protein, 444 aa, Glycine max
  misc_feature (1)..(444): Ceres Seq. ID no. 15177338
METELSTDQNGASSQHSLSVPEDKVLVPVEVTLKLSSTAKIDDVRSAVEGMLEKRSLSYNDGPIPVPLDDAFLADNVQRICVCGCDTDEGMHNDNVLLFWQVKPVVHVFQLSEEGPCEDISSDGQSSSFNEWILPAKEFDGMWESLIYESGLKQRLLRYAASALLFTEKGVDPFLVSWNRIILLHGPPGTGKTSLCKALAQKLSIRFNSRYPQAQLVEVNAHSLFSKWFSESGKLVAKLFQKIQEMVEEESNLVFVLIDEVESLAAARKAALSGSEPSDSIRVVNALLTQMDKLKSSPNVIILTTSNITAAIDIAFVDRADIKAYVGPPTLQARYEILRSCLQEMMRTGILTSLQDCKNAMLPHYASAKDRLNTLDFHEDATFMQLCKQLLETAEACEGMSGRSLRKLPFLAHAALANPFECNPIKFLCTMVETAKRERSELPD

SEQ ID NO: 8057 - protein, 394 aa, Glycine max
  misc_feature (1)..(394): Ceres Seq. ID no. 15177339
MLEKRSLSYNDGPIPVPLDDAFLADNVQRICVCGCDTDEGMHNDNVLLFWQVKPVVHVFQLSEEGPCEDISSDGQSSSFNEWILPAKEFDGMWESLIYESGLKQRLLRYAASALLFTEKGVDPFLVSWNRIILLHGPPGTGKTSLCKALAQKLSIRFNSRYPQAQLVEVNAHSLFSKWFSESGKLVAKLFQKIQEMVEEESNLVFVLIDEVESLAAARKAALSGSEPSDSIRVVNALLTQMDKLKSSPNVIILTTSNITAAIDIAFVDRADIKAYVGPPTLQARYEILRSCLQEMMRTGILTSLQDCKNAMLPHYASAKDRLNTLDFHEDATFMQLCKQLLETAEACEGMSGRSLRKLPFLAHAALANPFECNPIKFLCTMVETAKRERSELPD

SEQ ID NO: 8058 - DNA, 635 bp, Glycine max
  misc_feature (1)..(635): Ceres Seq. ID no. 15177340
actaaaatttggatttttaactttggaggacgaatttctgaacgactatttaaaaaaaaatattcgaagtctccgggggatgcattcattgtcttcaattttttttttcgtgtcgttactttcatctctaactactcttcttctgcatcatttctctgttgcagcaccggttacgaaaattcgtggaaccgatttctggtgttgagctgcgattgcatgtggaaatcgatttctggatcaatgcattggacgaacgattggagtaggacatgagtttggaggattatatcagcttacacctccgattgcctgtgtctcatctgcatctccagctctcacacatctatgccttggggacccgagtctggagagattgcgtctgttagttcgcagtttttctaatgttaagtcctttcagtgcgacttgtgtcagctaggtaaacatactcgtaccagttatggtcttcatgtcaataagtgtgctgcgtcaccttttgccttagttcactctgatatttggggtcctagtagagtttgttctacattagaatatttttattttgtcacttttattgatgacttttcttgttgtacttgggtctttctaatgaagaatcgttttgatgttttttttt

SEQ ID NO: 8059 - protein, 90 aa, Glycine max
  misc_feature (1)..(90): Ceres Seq. ID no. 15177341
TKIWIFNFGGRISERLFKKKYSKSPGDAFIVFNFFFRVVTFISNYSSSASFLCCSTGYENSWNRFLVLSCDCMWKSISGSMHWTNDWSRT

SEQ ID NO: 8060 - protein, 67 aa, Glycine max
  misc_feature (1)..(67): Ceres Seq. ID no. 15177342
LKFGFLTLEDEFLNDYLKKNIRSLRGMHSLSSIFFFVSLLSSLTTLLLHHFSVAAPVTKIRGTDFWC

SEQ ID NO: 8061 - DNA, 1975 bp, Glycine max
  misc_feature (1)..(1975): Ceres Seq. ID no. 15177343
atcattcacacacgttttgcactttttcctctctctctctctctctaaaatacttcttttctttctctcagactctgaaactctttttctctctctgtttctaaggccaaagaagaacaacaccttcaccgccacctaaactaacaacagcagcataagatttgaaggtaataaacaattgatggatgagtattctcgtaaaagaggtgtagatgggatggtattccctagaaaggggatgggccatgtatttagagatactgctaatactagagatcgaaatggtcaaatttgtagtcgattgggttgcagtagcagagccaatcttcccaaagttgctcacgtcagatcttctgaaaaaggtaaatctttgaggccttcatttcagtcctcttcaagtagcaaggatgcaattggaagttcctctagaactactagttacccagcaaaacgacttatagaacctcggaaaacattatcctctcagtttgaggcacattcatctgaaactagtagtgtacaggacggaccagaattttcagtgcccatccctccaacagaagaaattcggagagggcctctagttgaaggagaaagtacagagtctagtaatgcaatattgatggaagtaggaagttccagtgcagtatcaaatactagatctcaaagagctggattgcgtgcgcaagaaattaaaagcactggtgcagtgaggcgggctgtttccagcaggtatgggttgagaaacctcaaatgcaactctatatctgacgtcgtcccagctggttgttcaccgttggattcaagccttaatagaaggaaggatacaataaaaaagggaaactgtgaagggggaaatagttccactgttagggggaaaaatatcactgggtcttcactggaaggacggaattctggctccagaaatggcatatctatatccgattcaagaagatctagaaatgttccttctcaccggagcaccagcgtggcatcagtaagaactcaaagatcaattagtggtcaagccaggggaaggttttgtagccaaggaaacgaaaaccctgtggcaagcagtgattcccctcttaacattcccctttcacctcattctggtgatcttgatgctcctggcttttcatatcatacttctatggagactcctctaagtggctcaagctcttatggtagaccaggcaatagcagtgagcagttaagtggtgttatgcctgcatctcctgcagaagatgacaacactcattctctaataaatagggatagctttcgacattacaacatgggtggtattgcagaggtgttattggcacttgagaggattgaacaagatgcagagctaacccatgagcaaattcttttgttggaggccaacttgttcctcagtggattaaacttttatgatcaccacagagacatgcggttggatattgataacatgtcctatgaggaacttttagctctagaagagagaatgggaactgtgagcaccgctctgccggaggaagcacttgcagaatgtctgaaaagaagtaaatatcagtctgcacctttagatgatgcagatgagagttgtaatgaggataaggatgatatcaaatgctgcatttgccaggaggaatatgttgttggagatgaagttggggatctgcaatgtgaacatagatttcatgtggtttgcatacaggagtggatgcggcttaagaactggtgccctgtttgtaaagtatctgcagcactgtccaattcatttttacctcattgattgcattgttccttttcttttacttttcattttgtacaaaatacagatacagatgctcctcacctcatcttattgatccatatgtacatacatagccaatgtctccatccataaaaactaataacctaagccaccggcttgatggacactggaacttgctatcctgcgcatgaaaatagtcccatctttttgttt

SEQ ID NO: 8062 - protein, 532 aa, Glycine max
  misc_feature (1)..(532): Ceres Seq. ID no. 15177344
MDEYSRKRGVDGMVFPRKGMGHVFRDTANTRDRNGQICSRLGCSSRANLPKVAHVRSSEKGKSLRPSFQSSSSSKDAIGSSSRTTSYPAKRLIEPRKTLSSQFEAHSSETSSVQDGPEFSVPIPPTEEIRRGPLVEGESTESSNAILMEVGSSSAVSNTRSQRAGLRAQEIKSTGAVRRAVSSRYGLRNLKCNSISDVVPAGCSPLDSSLNRRKDTIKKGNCEGGNSSTVRGKNITGSSLEGRNSGSRNGISISDSRRSRNVPSHRSTSVASVRTQRSISGQARGRFCSQGNENPVASSDSPLNIPLSPHSGDLDAPGFSYHTSMETPLSGSSSYGRPGNSSEQLSGVMPASPAEDDNTHSLINRDSFRHYNMGGIAEVLLALERIEQDAELTHEQILLLEANLFLSGLNFYDHHRDMRLDIDNMSYEELLALEERMGTVSTALPEEALAECLKRSKYQSAPLDDADESCNEDKDDIKCCICQEEYVVGDEVGDLQCEHRFHVVCIQEWMRLKNWCPVCKVSAALSNSFLPH

SEQ ID NO: 8063 - protein, 520 aa, Glycine max
  misc_feature (1)..(520): Ceres Seq. ID no. 15177345
MVFPRKGMGHVFRDTANTRDRNGQICSRLGCSSRANLPKVAHVRSSEKGKSLRPSFQSSSSSKDAIGSSSRTTSYPAKRLIEPRKTLSSQFEAHSSETSSVQDGPEFSVPIPPTEEIRRGPLVEGESTESSNAILMEVGSSSAVSNTRSQRAGLRAQEIKSTGAVRRAVSSRYGLRNLKCNSISDVVPAGCSPLDSSLNRRKDTIKKGNCEGGNSSTVRGKNITGSSLEGRNSGSRNGISISDSRRSRNVPSHRSTSVASVRTQRSISGQARGRFCSQGNENPVASSDSPLNIPLSPHSGDLDAPGFSYHTSMETPLSGSSSYGRPGNSSEQLSGVMPASPAEDDNTHSLINRDSFRHYNMGGIAEVLLALERIEQDAELTHEQILLLEANLFLSGLNFYDHHRDMRLDIDNMSYEELLALEERMGTVSTALPEEALAECLKRSKYQSAPLDDADESCNEDKDDIKCCICQEEYVVGDEVGDLQCEHRFHVVCIQEWMRLKNWCPVCKVSAALSNSFLPH

SEQ ID NO: 8064 - protein, 513 aa, Glycine max
  misc_feature (1)..(513): Ceres Seq. ID no. 15177346
MGHVFRDTANTRDRNGQICSRLGCSSRANLPKVAHVRSSEKGKSLRPSFQSSSSSKDAIGSSSRTTSYPAKRLIEPRKTLSSQFEAHSSETSSVQDGPEFSVPIPPTEEIRRGPLVEGESTESSNAILMEVGSSSAVSNTRSQRAGLRAQEIKSTGAVRRAVSSRYGLRNLKCNSISDVVPAGCSPLDSSLNRRKDTIKKGNCEGGNSSTVRGKNITGSSLEGRNSGSRNGISISDSRRSRNVPSHRSTSVASVRTQRSISGQARGRFCSQGNENPVASSDSPLNIPLSPHSGDLDAPGFSYHTSMETPLSGSSSYGRPGNSSEQLSGVMPASPAEDDNTHSLINRDSFRHYNMGGIAEVLLALERIEQDAELTHEQILLLEANLFLSGLNFYDHHRDMRLDIDNMSYEELLALEERMGTVSTALPEEALAECLKRSKYQSAPLDDADESCNEDKDDIKCCICQEEYVVGDEVGDLQCEHRFHVVCIQEWMRLKNWCPVCKVSAALSNSFLPH

SEQ ID NO: 8065 - DNA, 1486 bp, Glycine max
  misc_feature (1)..(1486): Ceres Seq. ID no. 15177361
aaaccgaatatttcaaaacttgttctactttttattatcactgttgcatttatttcagatatttagtatttgcctacaagtttgttctttagtttaaacacagacaagacgactctttatggcggctataaccaatttgaacttttcttccttgtgtaaaaaaaggttttgtgtgcgtttgtgcgtgttggagttggctttttgaagtgggtgcatgctgaagttatatgtgtatgtgaaagatgaagaacaatagagataaagaaaagggtaacgacgttgaccagagttacagacagcatcacacgttgtcaatgccaatgatgttttctggtttgaacagagagaaggagatgtcagccatgatctctgctttgacacatgtggtttgtggagaagatgagcatcatggtgctgattactctcttcttaatcacaatattaataatactaatagtgcagttgttggtgatgatgattttactgtaacatcaaatatggcttctggttctatgccaccttcttctacttgttcatctcaaggtggcaactctgttctcaagagaagacgggaatatgataatacaaatgatttctcacgtggaggttcattccctgctatttcaacaattgctgaaagttcaagcacggtaacaagaagaacggcgaatacagtatacgattacgaatacagaacagagaacgtgaaagtagtggaggaagaaccgaggagaaaatacagaggagtgagacagaggccatggggaaaatgggctgcggaaataagagaccctttcaaagctactagggtgtggttaggaacatttgaaaccgctgaggacgcagccagagcctacgatcaagcttcattgcgtttcagaggcaacaaagccaaactcaacttccctgaaaacgttagactcagacaacaacaagaacctccgttgaacttgaaccctccaccacctaatcatggggctattttgtcaattccttcaaccactgttcacactgaggctcttcagggttcacttggttcaagcaatttttatgagcattcttattcgcatcttcatgagtttcccgtgagtctctacgatcagattgcagagtcaacatctactactatggcttctcatcatcttcaatttttgccgccagcttcttcctcaactatgactatgacatctccgcaggcaccaccttcgatttatcctacgcatccagcggcatggtcttctggttatagttataatagctcttcttctgcttcggggtgatgtaaattgcgttttatttcaagtctctctcgtttttgccccttgtattgtatcattgttactctcctctgttttttgcatttgcaccacgaccatttccatccaggagtggttttttgtgaccatgttattatgatcaagcaaatcatataattcacagttaacagtttagtatctgtgtataatagagttttatttatcctccc

SEQ ID NO: 8066 - protein, 345 aa, Glycine max
  misc_feature (1)..(345): Ceres Seq. ID no. 15177362
MKNNRDKEKGNDVDQSYRQHHTLSMPMMFSGLNREKEMSAMISALTHVVCGEDEHHGADYSLLNHNINNTNSAVVGDDDFTVTSNMASGSMPPSSTCSSQGGNSVLKRRREYDNTNDFSRGGSFPAISTIAESSSTVTRRTANTVYDYEYRTENVKVVEEEPRRKYRGVRQRPWGKWAAEIRDPFKATRVWLGTFETAEDAARAYDQASLRFRGNKAKLNFPENVRLRQQQEPPLNLNPPPPNHGAILSIPSTTVHTEALQGSLGSSNFYEHSYSHLHEFPVSLYDQIAESTSTTMASHHLQFLPPASSSTMTMTSPQAPPSIYPTHPAAWSSGYSYNSSSSASG

SEQ ID NO: 8067 - protein, 321 aa, Glycine max
  misc_feature (1)..(321): Ceres Seq. ID no. 15177363
MPMMFSGLNREKEMSAMISALTHVVCGEDEHHGADYSLLNHNINNTNSAVVGDDDFTVTSNMASGSMPPSSTCSSQGGNSVLKRRREYDNTNDFSRGGSFPAISTIAESSSTVTRRTANTVYDYEYRTENVKVVEEEPRRKYRGVRQRPWGKWAAEIRDPFKATRVWLGTFETAEDAARAYDQASLRFRGNKAKLNFPENVRLRQQQEPPLNLNPPPPNHGAILSIPSTTVHTEALQGSLGSSNFYEHSYSHLHEFPVSLYDQIAESTSTTMASHHLQFLPPASSSTMTMTSPQAPPSIYPTHPAAWSSGYSYNSSSSASG

SEQ ID NO: 8068 - protein, 319 aa, Glycine max
  misc_feature (1)..(319): Ceres Seq. ID no. 15177364
MMFSGLNREKEMSAMISALTHVVCGEDEHHGADYSLLNHNINNTNSAVVGDDDFTVTSNMASGSMPPSSTCSSQGGNSVLKRRREYDNTNDFSRGGSFPAISTIAESSSTVTRRTANTVYDYEYRTENVKVVEEEPRRKYRGVRQRPWGKWAAEIRDPFKATRVWLGTFETAEDAARAYDQASLRFRGNKAKLNFPENVRLRQQQEPPLNLNPPPPNHGAILSIPSTTVHTEALQGSLGSSNFYEHSYSHLHEFPVSLYDQIAESTSTTMASHHLQFLPPASSSTMTMTSPQAPPSIYPTHPAAWSSGYSYNSSSSASG

SEQ ID NO: 8069 - DNA, 1526 bp, Glycine max
  misc_feature (1)..(1526): Ceres Seq. ID no. 15177368
atatatatgtactcctttgtttagtaaccgaccgtgtgcgagagagagagagagagagagagacggctatattcgcgcctcggtctctttatttctccgccaacgacaccaccgcatctttctctctttccgttcccttctctctccgatctgcattttgcattctcttccgatgccgatattctccaattcctcgccctgctgcaccgccgccgccgccgcagtggttaactcctccaaccggaagaccagattcgtctctccttcttggaggaattgcaaggtcacatctccaattttacggctctccgagaatgacaaattcaatgtgtctcggttagctcctagccactctaggcggtcagttaaggaccggaacatatcaatggcattagtgggcgaaactgttggagttggacaaaagggacaggtggccggctcctctagcatcttggcatatgatttgattcagggggcacttgtaagatggagttctgttatggacaggtctttacctgagccaccaacggctgtttttctgcatggaatcctaggttgcaggaaaaactggggaacttttgctaggagattggctcaagagtttcctacatggcagtttcttttagtagacctgcgatgtcatggcgattcagcatcaatccagaagaaagatccccatactgttgcatctgctgctatggatgttttaaaactggttcgagatctgagaataacgccccgtgtgttagttggtcatagttttggggggaaagttgttttgagcatggtagaccaagctgcaaagcctcttgctcggccagtgagagcttggattctggatgcaacccctggaaaagttcgagcaggtggagatggagaagatcatccagaagaactcatatcctttctaagtacactgccaaaggaggtcccttcaaagcggcatgttgtcagagctcttattcaacatggattttccaatgatgtggcgcagtgggttgtgactaacctgcgaccttctggctctcctggttcacaatcatcaagcttctcatgggtgtttgacctaagggggattgcagaaatgtatcaatcctatgaagaaacaaatttgtggaaaattgttgaagatgtacctcgtggggtgcatgtgaactttttgaaagcagaaagaagcttacatagatgggctcttgaagaccttcagcggatccatgcagctgaagagcttgctgttgaggaaggagggggagttgaaatgcatgtccttgaagatgctggccactgggtgcatactgataacccggatggactctttaggatactgtcatcatctttccaattccagggaggcaaaacctgagtttacaaatgtgctctcttgtaatttctatttatacgtggattgccttaacagtttgatgccattccttcttcccattttttgtctagttatcccctttgtatatgctattattttttttaatcttcttgtacatcaccgtaatatatattttttaatcgcg

SEQ ID NO: 8070 - protein, 453 aa, Glycine max
  misc_feature (1)..(453): Ceres Seq. ID no. 15177369
YICTPLFSNRPCARERERERDGYIRASVSLFLRQRHHRIFLSFRSLLSPICILHSLPMPIFSNSSPCCTAAAAAVVNSSNRKTRFVSPSWRNCKVTSPILRLSENDKFNVSRLAPSHSRRSVKDRNISMALVGETVGVGQKGQVAGSSSILAYDLIQGALVRWSSVMDRSLPEPPTAVFLHGILGCRKNWGTFARRLAQEFPTWQFLLVDLRCHGDSASIQKKDPHTVASAAMDVLKLVRDLRITPRVLVGHSFGGKVVLSMVDQAAKPLARPVRAWILDATPGKVRAGGDGEDHPEELISFLSTLPKEVPSKRHVVRALIQHGFSNDVAQWVVTNLRPSGSPGSQSSSFSWVFDLRGIAEMYQSYEETNLWKIVEDVPRGVHVNFLKAERSLHRWALEDLQRIHAAEELAVEEGGGVEMHVLEDAGHWVHTDNPDGLFRILSSSFQFQGGKT

SEQ ID NO: 8071 - protein, 396 aa, Glycine max
  misc_feature (1)..(396): Ceres Seq. ID no. 15177370
MPIFSNSSPCCTAAAAAVVNSSNRKTRFVSPSWRNCKVTSPILRLSENDKFNVSRLAPSHSRRSVKDRNISMALVGETVGVGQKGQVAGSSSILAYDLIQGALVRWSSVMDRSLPEPPTAVFLHGILGCRKNWGTFARRLAQEFPTWQFLLVDLRCHGDSASIQKKDPHTVASAAMDVLKLVRDLRITPRVLVGHSFGGKVVLSMVDQAAKPLARPVRAWILDATPGKVRAGGDGEDHPEELISFLSTLPKEVPSKRHVVRALIQHGFSNDVAQWVVTNLRPSGSPGSQSSSFSWVFDLRGIAEMYQSYEETNLWKIVEDVPRGVHVNFLKAERSLHRWALEDLQRIHAAEELAVEEGGGVEMHVLEDAGHWVHTDNPDGLFRILSSSFQFQGGKT

SEQ ID NO: 8072 - protein, 325 aa, Glycine max
  misc_feature (1)..(325): Ceres Seq. ID no. 15177371
MALVGETVGVGQKGQVAGSSSILAYDLIQGALVRWSSVMDRSLPEPPTAVFLHGILGCRKNWGTFARRLAQEFPTWQFLLVDLRCHGDSASIQKKDPHTVASAAMDVLKLVRDLRITPRVLVGHSFGGKVVLSMVDQAAKPLARPVRAWILDATPGKVRAGGDGEDHPEELISFLSTLPKEVPSKRHVVRALIQHGFSNDVAQWVVTNLRPSGSPGSQSSSFSWVFDLRGIAEMYQSYEETNLWKIVEDVPRGVHVNFLKAERSLHRWALEDLQRIHAAEELAVEEGGGVEMHVLEDAGHWVHTDNPDGLFRILSSSFQFQGGKT

SEQ ID NO: 8073 - DNA, 1288 bp, Glycine max
  misc_feature (1)..(1288): Ceres Seq. ID no. 15177430
ttattttgtcccgctccacttatgtcggatcaggcaaatatgctgcacattggactggtgacaatcagggaacatgggagaacttgaggtactcaatatccacaatgctcaattttggcatatttggggtgccaatggtgggttcagatatatgtggcttctatccacagcccactgaagaattatgcaatagatggattgaagtaggtgctttctacccgttttcaagggatcatgcaaactactactcccctagacaggagctttaccaatggcaatcagtagctgagtctgctagaaatgctttgggcataaggtataagctactcccattcctttacaccttgaactatgaagctcatgtcagtggagccccaattgctagacctcttttcttctcatttccaacttacaccgaatgctacggcctaagcacccagttcttgctaggaagcagtctcatggtttctccagtgcttgagcagggaaaaacacaagtgaaagcactctttccacctggtagctggtacagtttgcttgattggacacacaccattacatcaaaggacggagtctatattaccctcgacgctcctcttcatgttgtcaatgtgcatttgtatcagaacaccattcttcctatgcagcagggcggaatggtctctaaggaagctagagcgacacccttcaccctcatcgtaaccttcccatcggacgccacccaaggagaggctaaggggaaccttttcctcgacaacgatgagttgcctgacatgaaccttggaaatggctattcaacctatgttgatctccatgcaactgtggaccaaggagctgtgaaagtttggtcagaagtccaagagggcaagtttgccttggacaagggttggattattgattctatatctgtgttgggattagaaggaagtggagcagtgtcttcacttgagatagatggaaagcctctaatgggtggctcgaatgtgaatgttactacatcagcacatgagcacttgaacagtgagggagaaggagaaaagaagactgtgatggttgctttgaggggcttgagcatccctgtgggtaaaaactttgccatgacatggaaaatggggtgataggttgagtggtctcatatctaatttatcattttgaaactttgttatgttcttttttctttgctacaattcttgtaggcgttgtgagggagaagagatgtgctagaattatgctcgtccttttccaatttaacaagccaaggcaacaatggcgtatgggttgaaatctt

SEQ ID NO: 8074 - protein, 371 aa, Glycine max
  misc_feature (1)..(371): Ceres Seq. ID no. 15177431
ILSRSTYVGSGKYAAHWTGDNQGTWENLRYSISTMLNFGIFGVPMVGSDICGFYPQPTEELCNRWIEVGAFYPFSRDHANYYSPRQELYQWQSVAESARNALGIRYKLLPFLYTLNYEAHVSGAPIARPLFFSFPTYTECYGLSTQFLLGSSLMVSPVLEQGKTQVKALFPPGSWYSLLDWTHTITSKDGVYITLDAPLHVVNVHLYQNTILPMQQGGMVSKEARATPFTLIVTFPSDATQGEAKGNLFLDNDELPDMNLGNGYSTYVDLHATVDQGAVKVWSEVQEGKFALDKGWIIDSISVLGLEGSGAVSSLEIDGKPLMGGSNVNVTTSAHEHLNSEGEGEKKTVMVALRGLSIPVGKNFAMTWKMG

SEQ ID NO: 8075 - protein, 337 aa, Glycine max
  misc_feature (1)..(337): Ceres Seq. ID no. 15177432
MLNFGIFGVPMVGSDICGFYPQPTEELCNRWIEVGAFYPFSRDHANYYSPRQELYQWQSVAESARNALGIRYKLLPFLYTLNYEAHVSGAPIARPLFFSFPTYTECYGLSTQFLLGSSLMVSPVLEQGKTQVKALFPPGSWYSLLDWTHTITSKDGVYITLDAPLHVVNVHLYQNTILPMQQGGMVSKEARATPFTLIVTFPSDATQGEAKGNLFLDNDELPDMNLGNGYSTYVDLHATVDQGAVKVWSEVQEGKFALDKGWIIDSISVLGLEGSGAVSSLEIDGKPLMGGSNVNVTTSAHEHLNSEGEGEKKTVMVALRGLSIPVGKNFAMTWKMG

SEQ ID NO: 8076 - protein, 327 aa, Glycine max
  misc_feature (1)..(327): Ceres Seq. ID no. 15177433
MVGSDICGFYPQPTEELCNRWIEVGAFYPFSRDHANYYSPRQELYQWQSVAESARNALGIRYKLLPFLYTLNYEAHVSGAPIARPLFFSFPTYTECYGLSTQFLLGSSLMVSPVLEQGKTQVKALFPPGSWYSLLDWTHTITSKDGVYITLDAPLHVVNVHLYQNTILPMQQGGMVSKEARATPFTLIVTFPSDATQGEAKGNLFLDNDELPDMNLGNGYSTYVDLHATVDQGAVKVWSEVQEGKFALDKGWIIDSISVLGLEGSGAVSSLEIDGKPLMGGSNVNVTTSAHEHLNSEGEGEKKTVMVALRGLSIPVGKNFAMTWKMG

SEQ ID NO: 8077 - DNA, 1524 bp, Glycine max
  misc_feature (1)..(1524): Ceres Seq. ID no. 15177434
ataccatcattactttttgcgttaggtttcgtatttatgtttactattgggggattatcaggtgtggttcttgctaacgcatcacttgatattgctttccacgatacttactacgtagttgctcatttccactacgtgttaagtatgggtgccgtatttgccttatttagtggatgatacttctgaatccctaaaatattagggttagattataacttactatattctaaagctcacttctgagttctatttactggagttaatttaactttcttccctcaacacttcttaggattacaaggtatgccacgtagaattagtgattaccctgacgcctttacaggttgaaacttcattagtagtattggttcacttatctctgttgctgctactgtgttattcttacacatagtatacttacaacttgttaaagggaaagctatatttggttacccttgagcagttcctcaactatttagtgattacttaagaatacttaaagataaatgtgctccagggttagagtgagcattaagtaatccacctaaacctcacgcatttactagcttaccattacaaagtagtacaatcttatcttctatttttgccgcaattagcactttatttgctgtttctagtgaattcgtatgtgatgcacctagagcgtgaggattatacttccaagatagtgctagtccacaaatggaagctttaatcgaattacatgataacattatgtattacttagttgctattttatttagtgttggttgaatacaaggagctattattaaaaattttgatagcgcaaaatcacctataagtaataaataccttaaccacggtacattaatagaattaatttgaacaattacacctgctctaatattagtattaattgctttcccttctttcaaactattatacttaatggatgaagttactgatccttcactatctgtattagcagaagggcaccaatgatactgaagttacgagtacccagatttcttaaatagtgatggagactttgtagaatttgattcttacttagtatctgaatctgacttagaagaaggggctttaagaatgttagaagtagataatagagttattcttcctgaaattacacacactagatttattcttactgctgctgatgtaatccattcatttgctataccagcattaggtgttaaatgtgatgcatacccaggtagattaaatcaattctctgttttaattaacagattaggaacattctacggtcaatgttcagaaatatgtggtattttacacagttctatgccaattgttgtagaatctgtatcactagaaaaattcttatcatgattacaagaacaataataagtaatttacaataagaaattactgagtctcttaaagataaaagggctttagacaaaaaagtttaaagtctgaactttacaaagatttaaccattttttttactttaatttgaatacctaaatttcttaatgtaaaaattaaaattagttaagc

SEQ ID NO: 8078 - protein, 87 aa, Glycine max
  misc_feature (1)..(87): Ceres Seq. ID no. 15177435
MLEVDNRVILPEITHTRFILTAADVIHSFAIPALGVKCDAYPGRLNQFSVLINRLGTFYGQCSEICGILHSSMPIVVESVSLEKFLS

SEQ ID NO: 8079 - protein, 58 aa, Glycine max
  misc_feature (1)..(58): Ceres Seq. ID no. 15177436
IPSLLFALGFVFMFTIGGLSGVVLANASLDIAFHDTYYVVAHFHYVLSMGAVFALFSG

SEQ ID NO: 8080 - protein, 46 aa, Glycine max
  misc_feature (1)..(46): Ceres Seq. ID no. 15177437
MFTIGGLSGVVLANASLDIAFHDTYYVVAHFHYVLSMGAVFALFSG

SEQ ID NO: 8081 - DNA, 1431 bp, Glycine max
  misc_feature (1)..(1431): Ceres Seq. ID no. 15177561
attaatttttttgggttaaatttctatgcacttttactctcaaccaatcagaaaatcattgttggtatgacttttaagatagttattgtaaaagtcaataaacttaccatataactatgtgattggataacaatgtaaaaaccatttacactataagtgcatacactatttagtatttactatttactcaatcaagtttaatttctatgcacagtcaatgtaaaaattttacatggtcaatcaatcataaattatggtttgcgcttttaagataattattatagaagtctttcaaacttatcatactatcaaaacgcatacactacttacccagtctttgtattattaaatgtatagttttctgaattcttatttgcttttatcctatgcagatatcagtctggaagaagacgaatttgatatttttgttcttcctattgaggaaacttatactccccttctactccttcaccctgttttgcatcatactacccttgaccatgttcatacccgagtctgaactacccctttgggtgatatgttatgtccccatcatcatgtctttcctaaacatccttccatccccaaaatctatccctttcctagttccttatcttctgtttgagaacaccatgtcagtcacaaagttcaatgccatgatttctggattgtttcagctaggaagtgcttatgagtgggtagtgacaaagaagacagggagatcctcagagtcagatttgttggccttggctgagagagagtcaaagtcttcaaatgaagaaaagattctaagaagacactcagagtctggcttggagttattaggcaaacttaagcaatcagaagtaccttcaaagaaaaaaagaaacaagctctataggaaggagctagcacttgcacttcttttgctcacagcatctgcaagaagtcttttgtcagcacatggtgttcacttctattttttgctcttccaaggattgtcatttctcataatgggtctggacttgattggtgagcaagtgagctgaaataactaataaggattggaaattgttttacttgtttttgacaccaatacttttggttgaatccagattttagttgaagttcattaagatacaatcgtaagattacatagcagctggcaagacaatgaaatatatagattaaagttgattgtcccatcataaaatataaaaaataatgataataataagcattgaggatcatagacaaaaacaaatgcaattttttttaatttcttttcccatttttgtgtagactttgtcagggagtgatgatttattgcctttttttttgtggattttcacttatgtaaagctttaggattgagagaatattgttggaacataactgtatctattgtctttcagaatagattgtgaaatgagtaacccctactgtattaag

SEQ ID NO: 8082 - protein, 213 aa, Glycine max
  misc_feature (1)..(213): Ceres Seq. ID no. 15177562
MQISVWKKTNLIFLFFLLRKLILPFYSFTLFCIILPLTMFIPESELPLWVICYVPIIMSFLNILPSPKSIPFLVPYLLFENTMSVTKFNAMISGLFQLGSAYEWVVTKKTGRSSESDLLALAERESKSSNEEKILRRHSESGLELLGKLKQSEVPSKKKRNKLYRKELALALLLLTASARSLLSAHGVHFYFLLFQGLSFLIMGLDLIGEQVS

SEQ ID NO: 8083 - protein, 175 aa, Glycine max
  misc_feature (1)..(175): Ceres Seq. ID no. 15177563
MFIPESELPLWVICYVPIIMSFLNILPSPKSIPFLVPYLLFENTMSVTKFNAMISGLFQLGSAYEWVVTKKTGRSSESDLLALAERESKSSNEEKILRRHSESGLELLGKLKQSEVPSKKKRNKLYRKELALALLLLTASARSLLSAHGVHFYFLLFQGLSFLIMGLDLIGEQVS

SEQ ID NO: 8084 - protein, 156 aa, Glycine max
  misc_feature (1)..(156): Ceres Seq. ID no. 15177564
MSFLNILPSPKSIPFLVPYLLFENTMSVTKFNAMISGLFQLGSAYEWVVTKKTGRSSESDLLALAERESKSSNEEKILRRHSESGLELLGKLKQSEVPSKKKRNKLYRKELALALLLLTASARSLLSAHGVHFYFLLFQGLSFLIMGLDLIGEQVS

SEQ ID NO: 8085 - DNA, 1261 bp, Glycine max
  misc_feature (1)..(1261): Ceres Seq. ID no. 15177596
gaagtgtcagctcttccatcctacttcaccctctcacaataaaatcattgcaatagagaagtcccttaaataaatctgaatttccctgctttgcttcaccaccccccttgcttgcgtgggtagaaatgcaagaagcagggctgggaatgggaatgggaatgatgagcggagaagtatccgccgccggggaccaccaccgtcaagtgaaggcggagatagccaaccacccactctatgaacagcttctatctgcacacgtgtcatgcctccgcgtcgccacacctatcgatcagttgccgctcatcgacggacagttatcgcagtcccaccatctcctccgctcttatgcctcacaccattcccattccctctcgccccatgaccgacaagaactcgacaacttcatggcacaatatttgattgtgttatgtacgttcaaagagcagcttcagcaacatgtgagggtgcatgccgtggaggctgtgatggcctgccgtgatattgaaagtaccttgcaagctctgacaggagtcagtttgggagaaggaacaggtgcaacaatgtcagatgatgaagatgatttgcagatggatggctctttagatcagtctagcgctgacgggcatgacatgatgggatttggtccattgcttcctacagaatctgaaaggtccctgatggaaagagttcgtcaggagcttaagattgagctcaagcagggttttaagtcaagaattgaagatgttagggaggaaatattaaggaagcggagagctgggaaattaccaggtgacacaacatcggttttaaaggcctggtggcagcaacatgctaagtggccctacccaactgaagatgacaaggcaaaacttgtggaggagacagggttgcagctgaagcaaatcaataattggttcatcaatcaaaggaaacgcaactggcacagcaactctcaatcggttaactctctgaagtccaagcgcaagagagagtatgcccactaaggattccagtctggtgcagaagataacaggtgatgcactacaacataagatggcttacaatagtgatggttgtaaattcttggaatacataacggatacaaactattcttgttgtgcacggtcgcctccatttctttcaagtgtttttttatttgtaaatttgtttgctatgatttgactggctgaagaagtatttttagcagctgaaagcctgaaagtgtttcctatacttgatatgtttgcatgtactattatgt

SEQ ID NO: 8086 - protein, 292 aa, Glycine max
  misc_feature (1)..(292): Ceres Seq. ID no. 15177597
MQEAGLGMGMGMMSGEVSAAGDHHRQVKAEIANHPLYEQLLSAHVSCLRVATPIDQLPLIDGQLSQSHHLLRSYASHHSHSLSPHDRQELDNFMAQYLIVLCTFKEQLQQHVRVHAVEAVMACRDIESTLQALTGVSLGEGTGATMSDDEDDLQMDGSLDQSSADGHDMMGFGPLLPTESERSLMERVRQELKIELKQGFKSRIEDVREEILRKRRAGKLPGDTTSVLKAWWQQHAKWPYPTEDDKAKLVEETGLQLKQINNWFINQRKRNWHSNSQSVNSLKSKRKREYAH

SEQ ID NO: 8087 - protein, 285 aa, Glycine max
  misc_feature (1)..(285): Ceres Seq. ID no. 15177598
MGMGMMSGEVSAAGDHHRQVKAEIANHPLYEQLLSAHVSCLRVATPIDQLPLIDGQLSQSHHLLRSYASHHSHSLSPHDRQELDNFMAQYLIVLCTFKEQLQQHVRVHAVEAVMACRDIESTLQALTGVSLGEGTGATMSDDEDDLQMDGSLDQSSADGHDMMGFGPLLPTESERSLMERVRQELKIELKQGFKSRIEDVREEILRKRRAGKLPGDTTSVLKAWWQQHAKWPYPTEDDKAKLVEETGLQLKQINNWFINQRKRNWHSNSQSVNSLKSKRKREYAH

SEQ ID NO: 8088 - protein, 283 aa, Glycine max
  misc_feature (1)..(283): Ceres Seq. ID no. 15177599
MGMMSGEVSAAGDHHRQVKAEIANHPLYEQLLSAHVSCLRVATPIDQLPLIDGQLSQSHHLLRSYASHHSHSLSPHDRQELDNFMAQYLIVLCTFKEQLQQHVRVHAVEAVMACRDIESTLQALTGVSLGEGTGATMSDDEDDLQMDGSLDQSSADGHDMMGFGPLLPTESERSLMERVRQELKIELKQGFKSRIEDVREEILRKRRAGKLPGDTTSVLKAWWQQHAKWPYPTEDDKAKLVEETGLQLKQINNWFINQRKRNWHSNSQSVNSLKSKRKREYAH

SEQ ID NO: 8089 - DNA, 1508 bp, Glycine max
  misc_feature (1)..(1508): Ceres Seq. ID no. 15177652
attcgcactcacactagcacgcaacctgtttgttcgtaaattcggccactccaaagtatatgcaccacaaacaacaacaccatcttaatcttctccacccaaagcgcaacttgcaaaaattacataaattcctagcccaaaaacttgatcagtaaacaaacatgggaagttccgtgcgtgtaaaagaagcatctgtggttacaccttctgagcccactccatcgagtgtgttggctctatcagctcttgattcgcaactcttccttcgtttcaccatagagtatctcttggtctacaacccttgccctggcctggaccaggctgccaccacggcccgtttaaaagcagcattagcccaagcactggttccctactaccccttcgcgggccgggtcaggaccagacccgatggaccgggcctggaggtggtttgcggagcccaaggcgcggtgttcatagaagcctccgctgaccgttacaatgttaacgacttcgagaaagcgcctaaagcagttgcgcactggaggtcgctcttgtcgctccacgtggcagacgttctcaaaggatcgccgccgctggtcgttcagctgacgtggctcggcgacggcgccgccgcaatcggcgtggggatcaaccactgcatctgcgacgggattgggagcgcggagtttctaaaccacttcgccgagttagccaacgagaaacgcgagttgttattattagctcagaggcccaaacataaacctatttgggagcgtcaccttctgaagccaacgcgtgggaagcagacgcgggtagactcggagagtcaccccgagttcaaccgagtcccggatttatgcaacttcatgaacaaagtctcgacggggcttaaaccgacctcggtgaccttcgacaagaggagactaaacgagatgaagagactcgcgagtagcacgagtgaaccaggcgagacggtgtgttacacgtcgttcgaggtgctggcggcgcacgtgtggagaagctgggcgagagcaataaggtttccgccgaatcagaagttgaagctggtgttcagtataaacgtgaggaacagggttaaaccgggtttaccagaggggtattatgggaatgcgtttgttttggggtgtgcggagacgagagcgaaggagctggaggaaagagggatagggttcgggtcgggtttggtgaagcgggcgaaggagagggttgggaatgagcacgtgaggggcgtgatggggatggtgtgggagagaaaagcgtgccctgacccggttggggtgctcatagtgtcgcagtggtccaggctgggtttggagaacattgacctgggtatgggcaagcttcttcacgtcggacccgtgtgctgcgataggtactgcttgtttttgccggtcagagatcagtgtctcagtgtcaaggtcatgctggctgttcccactcacgcccttcacaattaccagctttttatgcgtaataattgatatataaattatcttactcatttt

SEQ ID NO: 8090 - protein, 440 aa, Glycine max
  misc_feature (1)..(440): Ceres Seq. ID no. 15177653
MGSSVRVKEASVVTPSEPTPSSVLALSALDSQLFLRFTIEYLLVYNPCPGLDQAATTARLKAALAQALVPYYPFAGRVRTRPDGPGLEVVCGAQGAVFIEASADRYNVNDFEKAPKAVAHWRSLLSLHVADVLKGSPPLVVQLTWLGDGAAAIGVGINHCICDGIGSAEFLNHFAELANEKRELLLLAQRPKHKPIWERHLLKPTRGKQTRVDSESHPEFNRVPDLCNFMNKVSTGLKPTSVTFDKRRLNEMKRLASSTSEPGETVCYTSFEVLAAHVWRSWARAIRFPPNQKLKLVFSINVRNRVKPGLPEGYYGNAFVLGCAETRAKELEERGIGFGSGLVKRAKERVGNEHVRGVMGMVWERKACPDPVGVLIVSQWSRLGLENIDLGMGKLLHVGPVCCDRYCLFLPVRDQCLSVKVMLAVPTHALHNYQLFMRNN

SEQ ID NO: 8091 - DNA, 1251 bp, Glycine max
  misc_feature (1)..(1251): Ceres Seq. ID no. 15177654
atcgactgctccaaatggccgaggtaattttgaatctaatcgtggaatccatgatgcctgatgggaatcattgcagccaaaagacatcataccagttcctggtttccttgattgtcttagaagaacaaacagccttgcatatcttttggtggtgagttaggtctttcttgaatgtacccatgaaatcaggctatcaacacggtggagttgatattactcacactaaggcctttctaacatcactgtcagctatggtggctgagaccacaactttccccatagatttgatcaagaccaggctccaactccatggcgagtcactttcctcgagtcaccccactagtgcatttcgagtaggcttgggcattattcgtgaacaaggtgcccttggcctttacagtggcctgtcaccagcaattattagacacatgttctactcgcctattcgaattgttgggtatgagaacctgagaaatgttgtttctgttgataatgcttcgttctctatcgttggcaaggctgtagttggtggaatctctggtgtcttggctcaggttatagccagcccagctgatcttgtcaaggtgaggatgcaagctgatggccaaagggtgagccaaggtcttcaaccccggtattcggggccatttgatgctctaaacaaaattgttcgtgctgaaggatttcaaggattgtggaagggtgtttttcctaatatccaaagagccttcttagtgaacatgggagaattagcctgttatgatcatgctaaacaatttgttattagaagtaggatagctgatgacaatgtttttgcccacacttttgcttccatcatgtcaggtttagcggcaacgtctttgagctgcccggctgatgttgtgaagactagaatgatgaatcaggcagctaaaaaggaagggaaagtcttatataatagctcttatgattgcttggtgaagacaattaaagttgaaggaataagagcattgtggaaaggattcttccccacatgggcaaggcttggcccatggcaatttgtgttctgggtttcctatgagaagttcaggaaatttgcagggctctcttctttctaatataacattttatttatttatttatactagcactcattcatccataataaattcacaagtcacagcctacagggtactaacacccagatttatatttttctcaacttttagctcagtgtatacttttttgagataaactacattactctttcct

SEQ ID NO: 8092 - protein, 305 aa, Glycine max
  misc_feature (1)..(305): Ceres Seq. ID no. 15177655
MKSGYQHGGVDITHTKAFLTSLSAMVAETTTFPIDLIKTRLQLHGESLSSSHPTSAFRVGLGIIREQGALGLYSGLSPAIIRHMFYSPIRIVGYENLRNVVSVDNASFSIVGKAVVGGISGVLAQVIASPADLVKVRMQADGQRVSQGLQPRYSGPFDALNKIVRAEGFQGLWKGVFPNIQRAFLVNMGELACYDHAKQFVIRSRIADDNVFAHTFASIMSGLAATSLSCPADVVKTRMMNQAAKKEGKVLYNSSYDCLVKTIKVEGIRALWKGFFPTWARLGPWQFVFWVSYEKFRKFAGLSSF

SEQ ID NO: 8093 - protein, 281 aa, Glycine max
  misc_feature (1)..(281): Ceres Seq. ID no. 15177656
MVAETTTFPIDLIKTRLQLHGESLSSSHPTSAFRVGLGIIREQGALGLYSGLSPAIIRHMFYSPIRIVGYENLRNVVSVDNASFSIVGKAVVGGISGVLAQVIASPADLVKVRMQADGQRVSQGLQPRYSGPFDALNKIVRAEGFQGLWKGVFPNIQRAFLVNMGELACYDHAKQFVIRSRIADDNVFAHTFASIMSGLAATSLSCPADVVKTRMMNQAAKKEGKVLYNSSYDCLVKTIKVEGIRALWKGFFPTWARLGPWQFVFWVSYEKFRKFAGLSSF

SEQ ID NO: 8094 - protein, 222 aa, Glycine max
  misc_feature (1)..(222): Ceres Seq. ID no. 15177657
MFYSPIRIVGYENLRNVVSVDNASFSIVGKAVVGGISGVLAQVIASPADLVKVRMQADGQRVSQGLQPRYSGPFDALNKIVRAEGFQGLWKGVFPNIQRAFLVNMGELACYDHAKQFVIRSRIADDNVFAHTFASIMSGLAATSLSCPADVVKTRMMNQAAKKEGKVLYNSSYDCLVKTIKVEGIRALWKGFFPTWARLGPWQFVFWVSYEKFRKFAGLSSF

SEQ ID NO: 8095 - DNA, 1053 bp, Glycine max
  misc_feature (1)..(1053): Ceres Seq. ID no. 15177670
atactttccttttgacatatacacagacactcccattgatgttgcaatggagatggtgaaggaattggagatcacagatttgaagccttctgatattgcaaatatgattgaaggagagatatctgtgctgctgccaaataagaggaatagtaactgttcagttatcacgatgacgacgacaacgaatcatcatttccactctgcctcttctcgttcatcatcccaaggatcaatatcaggctcagacagtagagctgatgacttattgaatggagattattggctccatggtgatgtacttgatgatgccagttcaatatgctcctcacatgggacatattccaactcaaacttttgttcagtggatgagcaggaggaaaaccataaggcttctacaagaaaagataaacatctcatcataaagagtcacatgtgcacaagattttcccctaatgaagaccccatcactttgaaccagtgcaaagttttggcaggaccacaagcaccttctactagcaaaaacaagaggatgatggacaatcgtagactaacaaggaacaagtcattgattgatacaaggagccagctactacacagatcactggttgaggaggtgaacaaaagaaggctattcaacacagttggagccgtggaaaatattggatttgtgacaccttatgaggttaccaacaaaaagtcacatccagcatgcggtgcttttgatgtgaactcttctagaagtagcaagagagaaaactttaatagagagaaatttttttagaaatggttgtctcttgagctttggagtcaaagaggagaaaatggataacttctgtgtcatggactagagaaaatgataaggctgatgtgctatggagttattattacacttacaaagaataatggtactatttggaaaaaatcgttgggccatagatatacctaaattattgtattattagggtgttcgatttcaaatgggtgtaaatagaaatacatggaatcctatctcccttaaaatggatcttaataattcaaaaaagattaatcttt

SEQ ID NO: 8096 - protein, 259 aa, Glycine max
  misc_feature (1)..(259): Ceres Seq. ID no. 15177671
YFPFDIYTDTPIDVAMEMVKELEITDLKPSDIANMIEGEISVLLPNKRNSNCSVITMTTTTNHHFHSASSRSSSQGSISGSDSRADDLLNGDYWLHGDVLDDASSICSSHGTYSNSNFCSVDEQEENHKASTRKDKHLIIKSHMCTRFSPNEDPITLNQCKVLAGPQAPSTSKNKRMMDNRRLTRNKSLIDTRSQLLHRSLVEEVNKRRLFNTVGAVENIGFVTPYEVTNKKSHPACGAFDVNSSRSSKRENFNREKFF

SEQ ID NO: 8097 - protein, 244 aa, Glycine max
  misc_feature (1)..(244): Ceres Seq. ID no. 15177672
MEMVKELEITDLKPSDIANMIEGEISVLLPNKRNSNCSVITMTTTTNHHFHSASSRSSSQGSISGSDSRADDLLNGDYWLHGDVLDDASSICSSHGTYSNSNFCSVDEQEENHKASTRKDKHLIIKSHMCTRFSPNEDPITLNQCKVLAGPQAPSTSKNKRMMDNRRLTRNKSLIDTRSQLLHRSLVEEVNKRRLFNTVGAVENIGFVTPYEVTNKKSHPACGAFDVNSSRSSKRENFNREKFF

SEQ ID NO: 8098 - protein, 242 aa, Glycine max
  misc_feature (1)..(242): Ceres Seq. ID no. 15177673
MVKELEITDLKPSDIANMIEGEISVLLPNKRNSNCSVITMTTTTNHHFHSASSRSSSQGSISGSDSRADDLLNGDYWLHGDVLDDASSICSSHGTYSNSNFCSVDEQEENHKASTRKDKHLIIKSHMCTRFSPNEDPITLNQCKVLAGPQAPSTSKNKRMMDNRRLTRNKSLIDTRSQLLHRSLVEEVNKRRLFNTVGAVENIGFVTPYEVTNKKSHPACGAFDVNSSRSSKRENFNREKFF

SEQ ID NO: 8099 - DNA, 1566 bp, Glycine max
  misc_feature (1)..(1566): Ceres Seq. ID no. 15177676
aatagcatatgaagagagagaagaagtgaagataagcacagagagtgtcatctactcacctctactaccataaaaaaagaaaaacaaaaagccttcagagtcgactattcatcctttcttattcttaattaccgtgccttatccacccccaactatatttcagccagccgcggcgacacaacaacgccgacaccctcatttccactaccaactattctctctcgttctctgatttctgaaatccctcacccatggcttcctcttccctctctctctcactctctctcaccctttgccttgtttccactctctgctacgctcacacatcttccctaaccctacctgtgacaaaagaccattcaacacaccaatacctaacaatcctctcttatggcacccctgttgagtctgcaaaatttgtgcttgatctcggaggctcactcctctgggctgattgtgcatccagaaccaccccatcttccaccctcgcccccattttccaccgttcaattcgctgcctcacagcaaagggtcctgaaattgagacccacaggtggctctcgagtcttgcaaatcctatagatcaagatcagccatgtcaaattacagcagagaacagcatcacggggaaaagggtcaccgaaggagagcttgtggaagacctagtgattcatcgttctcacgagcttctcttcacgtgctcgcccacttttcttttgaatggtttagccactgatgctaaaggcattataggtcttgataaatctcgtatttctttctcatcacaagtttttcactcacttaaaatccagagaaaaatcactctgtgcctttctcccacttctggtgttattcaatttggaaaaatgacgcataaatcccaaactgaatctgaaattttcagatctcttactttcacaccccttgtcgcaaaccaagacccgacacagacccagtcttcaatcaacgttaattccgtcaaaatcaacggcaaaaaggttgcttttgacacccccttaggtgggggcgcgcagctgagcacggtcgtgccttacaccactctccaaacctcgatctatgataacttcgaaagcgcttatttgaaagccgcttcgtctatggacatgaaaagggtcgatccagtttccccctttgggctttgcttcgaatccaatggcgttggaagctcccaagtggggcccaacgtgccgatcattgatctggtgctgcagagcgagatggtgaagtggagcatatacggaagaaactctatggtgcaggtgagcgacgatgttatgtgcttagggtttgttgatggaggtgagaatcccagaaattcaattgtgattggagggtttcaattggaggatgtgttggtgcagattgattttgatacttccatggtgggatttagtccttcccttctcacgaagcaagctagttgctctgatttccaaccatagtttcaaaccatagttttctggtgaatggtgataatagctttttgttatctataccacataatttttcttagattaagatgagtttcgaagagttttaaagggt

SEQ ID NO: 8100 - protein, 403 aa, Glycine max
  misc_feature (1)..(403): Ceres Seq. ID no. 15177677
MASSSLSLSLSLTLCLVSTLCYAHTSSLTLPVTKDHSTHQYLTILSYGTPVESAKFVLDLGGSLLWADCASRTTPSSTLAPIFHRSIRCLTAKGPEIETHRWLSSLANPIDQDQPCQITAENSITGKRVTEGELVEDLVIHRSHELLFTCSPTFLLNGLATDAKGIIGLDKSRISFSSQVFHSLKIQRKITLCLSPTSGVIQFGKMTHKSQTESEIFRSLTFTPLVANQDPTQTQSSINVNSVKINGKKVAFDTPLGGGAQLSTVVPYTTLQTSIYDNFESAYLKAASSMDMKRVDPVSPFGLCFESNGVGSSQVGPNVPIIDLVLQSEMVKWSIYGRNSMVQVSDDVMCLGFVDGGENPRNSIVIGGFQLEDVLVQIDFDTSMVGFSPSLLTKQASCSDFQP

SEQ ID NO: 8101 - DNA, 1657 bp, Glycine max
  misc_feature (1)..(1657): Ceres Seq. ID no. 15177692
gcttcctttcttttaacactcctctatctattactgctccatctcttttattgctctgaaacgcctcctaccatccaacttttattgttctttcaatattgctgcctaaaccctatgcacttacagactctttcccactttctttctctctttttcgtcttgtactaccatgttagacactgctgaacgtgattctgaggtgagtttggagaccgtctattcttccacacttggaagctcaatgagcagcgagagcatttgtagcaccagtttcagccgtctttccttcgatctcctccctccctctccggagactctctccatcaagcctcaccgctcctccgacttcgcctactccgccgccttccgccgcaaagccgcacttaccttccgcgacttccacctcctccgccgcatcggcgccggcgacatcggcaccgtctacctatgccgcctccacaacagcaaccaattgaagaatcaggatgaagacgaagaagatgtttcttgtttatacgccatgaaagtggtggacaaagacgcagtggcattgaagaagaagtcgcagagagcggaaatggagaaaaaaatcctcaagatgctcgaccacccgttcctccctacgctctacgccgagttcgaagcttctcatttctcttgcatcgtcatggagttttgttccggtggagacttgcactccctgcgcttcaagcaccctcacaaccgtttccctctctcctccgcaagattttatgcggcggaggtgctggtggcgttggaatacctccacatgctgggaatcatctacagagatttaaagcctgagaacgtgttggttagatcagacggtcacatcatgctttctgatttcgatctttctctttactcagaggcaatcccagccgttgaatcctccccagattccttaccatcttcaaatgcattaccattaccttacgcttacactcgctcgcattcttttatgagtccattctcctgcttctcaaaccggtcgcgcgaggttcgaactattgaaccgaatcggctttttgttgccgaaccggtttcggctcggtcctgttcctttgttgggacccacgagtacgtctcgccgaaggtcgcttctggccggtcgcacgggaacgccgtggactggtggtcgtttggagtatttatctacgagctcatctacggtcgcacgccgtatgcgggtccatcgaaagaggctacgctgcggaacatcgtaaagaaaccactggcgttccccacggccacaccaacgagcaatcttgaactgcacgcgcgggatttgatatccggcttgctgaacaaggatccggcgcgccggctcggctcgaagcgcggcgccgctgacgtcaaaaagcaccccttctttaaagggctcaacttggcgctgattcgcatgcagacgccgcccgaagtgcctggctccagaagaaggaccaaaacgacgtcgctgtaccccgtgaagggtaacggcaacaacaaccataaacaacaacagacggcgtcgtttgatttttacttctaaaaaaatactacgatgaaagttttgtgccacgtctccagtgacctattgtatattggagctgtcctttttttttatatatatatatggaataaaaatatttatagt

SEQ ID NO: 8102 - protein, 460 aa, Glycine max
  misc_feature (1)..(460): Ceres Seq. ID no. 15177693
MLDTAERDSEVSLETVYSSTLGSSMSSESICSTSFSRLSFDLLPPSPETLSIKPHRSSDFAYSAAFRRKAALTFRDFHLLRRIGAGDIGTVYLCRLHNSNQLKNQDEDEEDVSCLYAMKVVDKDAVALKKKSQRAEMEKKILKMLDHPFLPTLYAEFEASHFSCIVMEFCSGGDLHSLRFKHPHNRFPLSSARFYAAEVLVALEYLHMLGIIYRDLKPENVLVRSDGHIMLSDFDLSLYSEAIPAVESSPDSLPSSNALPLPYAYTRSHSFMSPFSCFSNRSREVRTIEPNRLFVAEPVSARSCSFVGTHEYVSPKVASGRSHGNAVDWWSFGVFIYELIYGRTPYAGPSKEATLRNIVKKPLAFPTATPTSNLELHARDLISGLLNKDPARRLGSKRGAADVKKHPFFKGLNLALIRMQTPPEVPGSRRRTKTTSLYPVKGNGNNNHKQQQTASFDFYF

SEQ ID NO: 8103 - protein, 436 aa, Glycine max
  misc_feature (1)..(436): Ceres Seq. ID no. 15177694
MSSESICSTSFSRLSFDLLPPSPETLSIKPHRSSDFAYSAAFRRKAALTFRDFHLLRRIGAGDIGTVYLCRLHNSNQLKNQDEDEEDVSCLYAMKVVDKDAVALKKKSQRAEMEKKILKMLDHPFLPTLYAEFEASHFSCIVMEFCSGGDLHSLRFKHPHNRFPLSSARFYAAEVLVALEYLHMLGIIYRDLKPENVLVRSDGHIMLSDFDLSLYSEAIPAVESSPDSLPSSNALPLPYAYTRSHSFMSPFSCFSNRSREVRTIEPNRLFVAEPVSARSCSFVGTHEYVSPKVASGRSHGNAVDWWSFGVFIYELIYGRTPYAGPSKEATLRNIVKKPLAFPTATPTSNLELHARDLISGLLNKDPARRLGSKRGAADVKKHPFFKGLNLALIRMQTPPEVPGSRRRTKTTSLYPVKGNGNNNHKQQQTASFDFYF

SEQ ID NO: 8104 - protein, 343 aa, Glycine max
  misc_feature (1)..(343): Ceres Seq. ID no. 15177695
MKVVDKDAVALKKKSQRAEMEKKILKMLDHPFLPTLYAEFEASHFSCIVMEFCSGGDLHSLRFKHPHNRFPLSSARFYAAEVLVALEYLHMLGIIYRDLKPENVLVRSDGHIMLSDFDLSLYSEAIPAVESSPDSLPSSNALPLPYAYTRSHSFMSPFSCFSNRSREVRTIEPNRLFVAEPVSARSCSFVGTHEYVSPKVASGRSHGNAVDWWSFGVFIYELIYGRTPYAGPSKEATLRNIVKKPLAFPTATPTSNLELHARDLISGLLNKDPARRLGSKRGAADVKKHPFFKGLNLALIRMQTPPEVPGSRRRTKTTSLYPVKGNGNNNHKQQQTASFDFYF

SEQ ID NO: 8105 - DNA, 844 bp, Glycine max
  misc_feature (1)..(844): Ceres Seq. ID no. 15177714
agaagcaaagggttattatccgtatcaacccgccattgaaacgggtttgatgcttttgggtgaagtgagtggtgcaactttggatcctactattacacacatggcttattacaaatcgctgagttccatcactgtgtcggatattgaatcccatggaattgcaagagaagacgctgccactctccaccagggtctcgcagaaatcattgaaactcacagcaatggcacccccgccacgtggcagcacgtcagcaacagcatcctcaaccctgaacttcccttctcctttcatcagatgctgtactatggttgctacaaggattacggtcccgacccacccgcttggatacccaaccgggaaagtgctgctttgactaatgtttggcagttgctagagaggaagggtgaagagtttctgggttcggcatataaggatcctattacaagctttgatgatttccagaaattttcagtctcaaaccctgaggtgctaccgattttacattcatctgggatgttaataacatttgctagcacactttcaatgtcctttttcattaatgggtgaaattcttacgagttttcctcaaggttttaaattacatttagtgacggttatacagaactccaaaatcttaatatcccagaaaattgtaggcaaatgcagttgcagactgtaatttaaaactgtcacccccagtaaatgacgtgggccccacttaagttactgggtttcatctcttatcttgtgggtcctatgtaaattccactcaataagggtgttggaaacaatttgtagatagtgtattggtaacatttatggaggatttgttttcattttctt

SEQ ID NO: 8106 - protein, 188 aa, Glycine max
  misc_feature (1)..(188): Ceres Seq. ID no. 15177715
EAKGYYPYQPAIETGLMLLGEVSGATLDPTITHMAYYKSLSSITVSDIESHGIAREDAATLHQGLAEIIETHSNGTPATWQHVSNSILNPELPFSFHQMLYYGCYKDYGPDPPAWIPNRESAALTNVWQLLERKGEEFLGSAYKDPITSFDDFQKFSVSNPEVLPILHSSGMLITFASTLSMSFFING

SEQ ID NO: 8107 - protein, 172 aa, Glycine max
  misc_feature (1)..(172): Ceres Seq. ID no. 15177716
MLLGEVSGATLDPTITHMAYYKSLSSITVSDIESHGIAREDAATLHQGLAEIIETHSNGTPATWQHVSNSILNPELPFSFHQMLYYGCYKDYGPDPPAWIPNRESAALTNVWQLLERKGEEFLGSAYKDPITSFDDFQKFSVSNPEVLPILHSSGMLITFASTLSMSFFING

SEQ ID NO: 8108 - protein, 155 aa, Glycine max
  misc_feature (1)..(155): Ceres Seq. ID no. 15177717
MAYYKSLSSITVSDIESHGIAREDAATLHQGLAEIIETHSNGTPATWQHVSNSILNPELPFSFHQMLYYGCYKDYGPDPPAWIPNRESAALTNVWQLLERKGEEFLGSAYKDPITSFDDFQKFSVSNPEVLPILHSSGMLITFASTLSMSFFING

SEQ ID NO: 8109 - DNA, 1166 bp, Glycine max
  misc_feature (1)..(1166): Ceres Seq. ID no. 15177746
attttagttccttttcctctttaattcattcatttctctgcaatcccatgggcaagaaaatgaagctcccttccctactacacaacaaaccctcttcttcttcttggccctgccaccaaccgcgaaccctctctttccgaacccaaaacgacgccgcattcaaaaccatcaacgccgcttacttggacacgctggagagctccgaaacttccttcttcacagtctcccctgactccggaagcttctcaactgcctcagaacaagattctagaagaccccactcactagactccgtcattcgcggcttgcgttccgaccgcttattcttcgagccagacgagacaagctccatattagaggccaaaccaccaccaccaccaccaccaccaccatcaccaccaccaccaccaacaacaacaacaacgttgccgttcaaagacagcgttgtcatgtccgtggactctcaggacccttacgtcgatttccgcaggtccatggaggagatggtggaggcgcagtgcgtcaaggactgggagggtctccaagagcttctgtgttggtatttgaaagtcaatggaaaaaccaaccatggctatattgttggcgctttcgtcgatttattggtcgcttcttcttcttcttcttcctcttcctctttctcggtttcttcttcttctaataataataacaactcccaaatagtatctccttcttcccctttatctttttatagctcttctctctcttcctcttgcagcactcgctgtgtttcttgtttggaagctgaggtcgtcgaggttcataatgatatagccactagtactcctacttcttctttcttgttacaacaagttagggaagaccagccatcatcttcttcttcttcctatttgaattaaatattacttttttttttatttgaacctaagggaaatcagttatttttaattgtaatatttgttctgtattatatacttagtagtttataattagtagttgcatttttgtttcatatatggcgcgcgagcttccatggctctgttaatggaggaaattaatactgcaaccgtacgtgagagagagagagagagagagagattgtcaatttttgtttcctttatcccatgggaagccaacaaggagtaaaaatttctatatttgtcttg

SEQ ID NO: 8110 - protein, 298 aa, Glycine max
  misc_feature (1)..(298): Ceres Seq. ID no. 15177747
FSSFSSLIHSFLCNPMGKKMKLPSLLHNKPSSSSWPCHQPRTLSFRTQNDAAFKTINAAYLDTLESSETSFFTVSPDSGSFSTASEQDSRRPHSLDSVIRGLRSDRLFFEPDETSSILEAKPPPPPPPPPSPPPPPTTTTTLPFKDSVVMSVDSQDPYVDFRRSMEEMVEAQCVKDWEGLQELLCWYLKVNGKTNHGYIVGAFVDLLVASSSSSSSSSFSVSSSSNNNNNSQIVSPSSPLSFYSSSLSSSCSTRCVSCLEAEVVEVHNDIATSTPTSSFLLQQVREDQPSSSSSSYLN

SEQ ID NO: 8111 - protein, 283 aa, Glycine max
  misc_feature (1)..(283): Ceres Seq. ID no. 15177748
MGKKMKLPSLLHNKPSSSSWPCHQPRTLSFRTQNDAAFKTINAAYLDTLESSETSFFTVSPDSGSFSTASEQDSRRPHSLDSVIRGLRSDRLFFEPDETSSILEAKPPPPPPPPPSPPPPPTTTTTLPFKDSVVMSVDSQDPYVDFRRSMEEMVEAQCVKDWEGLQELLCWYLKVNGKTNHGYIVGAFVDLLVASSSSSSSSSFSVSSSSNNNNNSQIVSPSSPLSFYSSSLSSSCSTRCVSCLEAEVVEVHNDIATSTPTSSFLLQQVREDQPSSSSSSYLN

SEQ ID NO: 8112 - protein, 279 aa, Glycine max
  misc_feature (1)..(279): Ceres Seq. ID no. 15177749
MKLPSLLHNKPSSSSWPCHQPRTLSFRTQNDAAFKTINAAYLDTLESSETSFFTVSPDSGSFSTASEQDSRRPHSLDSVIRGLRSDRLFFEPDETSSILEAKPPPPPPPPPSPPPPPTTTTTLPFKDSVVMSVDSQDPYVDFRRSMEEMVEAQCVKDWEGLQELLCWYLKVNGKTNHGYIVGAFVDLLVASSSSSSSSSFSVSSSSNNNNNSQIVSPSSPLSFYSSSLSSSCSTRCVSCLEAEVVEVHNDIATSTPTSSFLLQQVREDQPSSSSSSYLN

SEQ ID NO: 8113 - DNA, 902 bp, Glycine max
  misc_feature (1)..(902): Ceres Seq. ID no. 15177754
atcaacaccttttggtttccacggatatttggagacaacacagggcaatataggttactaataatggttaccaaggtttacattgtttattattctacgtatggacacattgagaagctagctagagagattgaaaaaggtgctgcttccgtggagggagtagaagcaaaactgtggcaggtacctgaaacactgtctgaagaagtccttgtgaagaagggagcacctccaaagagtgatgatgttcctattattaaaccccgtgagcttgccgatgccgatggctttctgttcggttttccaacaacatttggaaccatggcttctcaattcaaagcatttttagaaggcactatagggctgtggcatacacaggcactagcaggaaaacctgcagggttcttctctagcactagttctcaaggaggtggacaagaagagaccccgttgacctctgtcactcagcttgttcaccatggaatgatttttgttccggttgggtacacatttggagatggcatgtatgagatggagaaggtcaaaggtgggtccccttatggctcaggaactgttgtcggggatggctcaaggcaacctagtgacttggaattggctcaagcttttcatcagggtaaatactttgcagccattgcaaaaaagctcaagggatagataagatacatctcattcatctatctcccacactatactctctctccagttaccctattattaatatcaaaccagaataaggtcatgttagtagaaaaaataaaagtacgtacgtgtgagataatgatgaattaatacttcatcttcgatacaattgttgtcacttaattgtcataatatatgtatcctgtaatgcagtgtttgttgtcaataacaagaatttggtgatt

SEQ ID NO: 8114 - protein, 223 aa, Glycine max
  misc_feature (1)..(223): Ceres Seq. ID no. 15177755
INTFWFPRIFGDNTGQYRLLIMVTKVYIVYYSTYGHIEKLAREIEKGAASVEGVEAKLWQVPETLSEEVLVKKGAPPKSDDVPIIKPRELADADGFLFGFPTTFGTMASQFKAFLEGTIGLWHTQALAGKPAGFFSSTSSQGGGQEETPLTSVTQLVHHGMIFVPVGYTFGDGMYEMEKVKGGSPYGSGTVVGDGSRQPSDLELAQAFHQGKYFAAIAKKLKG

SEQ ID NO: 8115 - protein, 202 aa, Glycine max
  misc_feature (1)..(202): Ceres Seq. ID no. 15177756
MVTKVYIVYYSTYGHIEKLAREIEKGAASVEGVEAKLWQVPETLSEEVLVKKGAPPKSDDVPIIKPRELADADGFLFGFPTTFGTMASQFKAFLEGTIGLWHTQALAGKPAGFFSSTSSQGGGQEETPLTSVTQLVHHGMIFVPVGYTFGDGMYEMEKVKGGSPYGSGTVVGDGSRQPSDLELAQAFHQGKYFAAIAKKLKG

SEQ ID NO: 8116 - protein, 117 aa, Glycine max
  misc_feature (1)..(117): Ceres Seq. ID no. 15177757
MASQFKAFLEGTIGLWHTQALAGKPAGFFSSTSSQGGGQEETPLTSVTQLVHHGMIFVPVGYTFGDGMYEMEKVKGGSPYGSGTVVGDGSRQPSDLELAQAFHQGKYFAAIAKKLKG

SEQ ID NO: 8117 - DNA, 1177 bp, Glycine max
  misc_feature (1)..(1177): Ceres Seq. ID no. 15177758
catctcaagtcttatcatcttcatctcccaagggattcaatacaataccaggctagaagaaactccactcatcaccatctcaagcaactaattaacaagctagtactctttgagtgtttggcaattggcttagatttcttgtacttggaacaagatggaaagcactgtcacatttgagactgatctcaacctcaaggcaaccgagcttagattggggcttccaggaacagaagaaattgttgaaaaaccacttcctgcaagtgctagaattaccaacaaaaggcctttgtctgaaacctctgaggagtgtgcttcaaagggttctagtgctccacatgtggaaactgaagcagcccctcctgccaaggctaagatagtggggtggccaccaatcagatcctacagaaagaacagccttcaggagaatgatggtgctgggatttatgtgaaagtgagcatggatggagctccttacctcagaaagatagacttgaaggtctatggaggctacacacaactcctcaaagctctagaaaacatgttcaagttgaccataggtgagtattctgaaaaagaaggttataagggatctgactatgcacctacatatgaagacaaagatggtgactggatgttagttggagatgttccatgggacatgtttgtgacttcttgcaaaaggctaagaatcatgaaaggatcagaggcaaggggtttgggttgtgctgtatgagaaaaccaaaccactaaaaattactatgagcagagaattaaaaaaagtgttttgggggtgaagggaaaaacatgctgaaaagcttgtgttctcggatctgaagggttttgacttttgaaatcactctagtgtgtgcttttggcatacctttatatggagttatactctgaagcaggagaagatggaagatacggtgcagtttcgatcttcctcaagtttggcaacttttatggttattattttggcatctgtggttggatgctatgcttatgatgttgtttccactgatcctttttgaagtttcatgtgagaaatcttagagatttcaaatgaaactttgtgtagaggagagatagaaaattaaaggttatatgtaatattgtttaatccaagttttttggttgtgttgatacaagaatacaatgtaatatactaagtgttggt

SEQ ID NO: 8118 - protein, 192 aa, Glycine max
  misc_feature (1)..(192): Ceres Seq. ID no. 15177759
MESTVTFETDLNLKATELRLGLPGTEEIVEKPLPASARITNKRPLSETSEECASKGSSAPHVETEAAPPAKAKIVGWPPIRSYRKNSLQENDGAGIYVKVSMDGAPYLRKIDLKVYGGYTQLLKALENMFKLTIGEYSEKEGYKGSDYAPTYEDKDGDWMLVGDVPWDMFVTSCKRLRIMKGSEARGLGCAV

SEQ ID NO: 8119 - DNA, 1385 bp, Glycine max
  misc_feature (1)..(1385): Ceres Seq. ID no. 15177766
gattacctattatgatggaaagagaaaaaggtttacctttgatgatctctaacacaaatctcagcagcagcagcagcagtgtgatgagggtcaacaaaaacctcccagatgagatcatgttgttcaagatcctccctttgctcccatcaaagacccttattcgattcaggtgcgtgtgcaagttatgggactgtttcatacgcgacccttcattccttcatcttcgaaaactcactaataaccccacccaccactttctcttcctctcacccaaccaaaactcttcacatcccttcctttatggtgctcctcaccccaacaatagcattgtcacaacaccccttcgtccttcgatcctctttgccctcccaaacaaccttcaaatctccgaaacaaatgtccaatgtgtcaatggtttgctctgtttctacccgagaagccatgttagcttttattctcatgccgatgctttcactctcatagcaaaccccaccaccagagagattattactctccccagtgataactattactctgtaaaagcaaattcagagtttttcgcttcaactcattttggatatgaccctgttcgagaccagttcaaggttcttcgctttcttaagtatcaagcaactctccaagtcaaggtttttactcttggtcgcgacacttcatggaggcttgttactgctgaaacaccctttgctatgttgcatcttgaaaaccttttgtcttctcatggtaatagtagtagcctttgtgtcaatggtgctatttattggagacatttagatggtcttcttatgttcgatgtggcagccgaacagttcagggagatactcgttccttcaggagatggaagcgtccttggattctcgctatacccggatctcagggaaattgatgggtgtttgtgtttggttggattcagtaaccatggtttgaagttgtggattctgagggactaccaggctcagctgtgggaacatgaaaccggtgacctcagagccggcccaaaggcctcactcgctgttggaccaatcctgggtgacctccctcctctttatccgctttgcagagttcccacgggtgagatcctacttctgccacattatgttcctacaggtgttgaaagagtcaattttagagcgatttactatgacatggacacaaagagctctaggagtgctgttatcatggaaatgccattgacatggacaacaacattcagagaagttggcattgtcttttgtcaagaaagctttaggttactaaagtagcagcatcataactagagaaatacctttctatttgcttgcatggggccttaaattgtgttggaatggttatgacctattgatatggatttcttttttgccctactg

SEQ ID NO: 8120 - protein, 425 aa, Glycine max
  misc_feature (1)..(425): Ceres Seq. ID no. 15177767
LPIMMEREKGLPLMISNTNLSSSSSSVMRVNKNLPDEIMLFKILPLLPSKTLIRFRCVCKLWDCFIRDPSFLHLRKLTNNPTHHFLFLSPNQNSSHPFLYGAPHPNNSIVTTPLRPSILFALPNNLQISETNVQCVNGLLCFYPRSHVSFYSHADAFTLIANPTTREIITLPSDNYYSVKANSEFFASTHFGYDPVRDQFKVLRFLKYQATLQVKVFTLGRDTSWRLVTAETPFAMLHLENLLSSHGNSSSLCVNGAIYWRHLDGLLMFDVAAEQFREILVPSGDGSVLGFSLYPDLREIDGCLCLVGFSNHGLKLWILRDYQAQLWEHETGDLRAGPKASLAVGPILGDLPPLYPLCRVPTGEILLLPHYVPTGVERVNFRAIYYDMDTKSSRSAVIMEMPLTWTTTFREVGIVFCQESFRLLK

SEQ ID NO: 8121 - protein, 422 aa, Glycine max
  misc_feature (1)..(422): Ceres Seq. ID no. 15177768
MMEREKGLPLMISNTNLSSSSSSVMRVNKNLPDEIMLFKILPLLPSKTLIRFRCVCKLWDCFIRDPSFLHLRKLTNNPTHHFLFLSPNQNSSHPFLYGAPHPNNSIVTTPLRPSILFALPNNLQISETNVQCVNGLLCFYPRSHVSFYSHADAFTLIANPTTREIITLPSDNYYSVKANSEFFASTHFGYDPVRDQFKVLRFLKYQATLQVKVFTLGRDTSWRLVTAETPFAMLHLENLLSSHGNSSSLCVNGAIYWRHLDGLLMFDVAAEQFREILVPSGDGSVLGFSLYPDLREIDGCLCLVGFSNHGLKLWILRDYQAQLWEHETGDLRAGPKASLAVGPILGDLPPLYPLCRVPTGEILLLPHYVPTGVERVNFRAIYYDMDTKSSRSAVIMEMPLTWTTTFREVGIVFCQESFRLLK

SEQ ID NO: 8122 - protein, 421 aa, Glycine max
  misc_feature (1)..(421): Ceres Seq. ID no. 15177769
MEREKGLPLMISNTNLSSSSSSVMRVNKNLPDEIMLFKILPLLPSKTLIRFRCVCKLWDCFIRDPSFLHLRKLTNNPTHHFLFLSPNQNSSHPFLYGAPHPNNSIVTTPLRPSILFALPNNLQISETNVQCVNGLLCFYPRSHVSFYSHADAFTLIANPTTREIITLPSDNYYSVKANSEFFASTHFGYDPVRDQFKVLRFLKYQATLQVKVFTLGRDTSWRLVTAETPFAMLHLENLLSSHGNSSSLCVNGAIYWRHLDGLLMFDVAAEQFREILVPSGDGSVLGFSLYPDLREIDGCLCLVGFSNHGLKLWILRDYQAQLWEHETGDLRAGPKASLAVGPILGDLPPLYPLCRVPTGEILLLPHYVPTGVERVNFRAIYYDMDTKSSRSAVIMEMPLTWTTTFREVGIVFCQESFRLLK

SEQ ID NO: 8123 - DNA, 1557 bp, Glycine max
  misc_feature (1)..(1557): Ceres Seq. ID no. 15177770
atcaccagattccatccagctagttgctgagcatgctgctgcaaataacaagatcttctcaatgaacctttctgccccttttatctgcgagtttttcagggatgtacaggagaaagctctaccgtaaggattcatcttaaaacgaatgaaattttacatattggttcttaaggatgcacattatgtgatttaggtatacggactttgttttcggatatgagactgaagcaagaacattttctaaagttcatggctgggagaccgataatgttgaggagatagctctaaagatttcccagtggccaaaggcatcaggaacacacaaaaggataactgtcatcacacagggtgtggatcctgtttgtgttgctgaggatgggaaggtgaaaaagttccctgtgcaacttttgcctaaagagaaactagttgatgcaaatggaacaggtactgtgctctactgcttttaggagttaaaatgtggaacatgcgtgtataattattatgtatttgctccttaaagttattttgtactggtctttcatggtggtaaggggatacttgattggggtaaagtggattagtaggaagatagcccctatagttagatagaggcacaaaatcattaggaaggacttggataaataggttttggttgggccattttaaaaagccctttagacctaataaagtcagcttgtttgaataaatataataataatattattatgtaggcacttattataattattataaaattgaaacttcaatgtaatattttgagattatatatacttattgttgtatttaaagtctatttaccagtgagtttttttatctatttaaaagacttcattaaaaagtagacttttaaataaacttgaaggctagactatgcttttaaaataggctaaatagataagacgtcaggcttaaatttgagattttgttcaagcttagaccttgtaaagcctagtgtagtcatcctattttcatccttagttgttgttgttggtcttcaattgtgatatttgctctaaaatacatgcttgctggctataattctctcatattattgtcacacgacattgaaaccaacatggaaagtccatgaaattatttatgattactgaggcacagccaggatttcgtaaatagacattggtagtgacaagcaagatgccaattttgtttcatgattcattccttattgttttatgtttgtaggagatgcatttgtcggaggatttctttctcaattggttcaggagaagcccattgaagagtgcgtgagagctggctgttatgcagcaaacgttatcatccaaaggtctggctgtacgtacccagagaagcctgattttcattgagtgtttctctcggttctgtttccattatgaagttttgattgttaggaaatcttttgttgtattttgatagttgcagcataacagctgcatttggatttttcaatcccgactggggaaaacgaggaaagagtttcagtgaaaggaaacaaataattgatctgttatattctagtactattattagaggctt

SEQ ID NO: 8124 - protein, 50 aa, Glycine max
  misc_feature (1)..(50): Ceres Seq. ID no. 15177771
MFVGDAFVGGFLSQLVQEKPIEECVRAGCYAANVIIQRSGCTYPEKPDFH

SEQ ID NO: 8125 - protein, 43 aa, Glycine max
  misc_feature (1)..(43): Ceres Seq. ID no. 15177772
MQQTLSSKGLAVRTQRSLIFIECFSRFCFHYEVLIVRKSFVVF

SEQ ID NO: 8126 - protein, 41 aa, Glycine max
  misc_feature (1)..(41): Ceres Seq. ID no. 15177773
SPDSIQLVAEHAAANNKIFSMNLSAPFICEFFRDVQEKALP

SEQ ID NO: 8127 - DNA, 523 bp, Glycine max
  misc_feature (1)..(523): Ceres Seq. ID no. 15177774
acatatatcttaatggtcaggaaaatgcctcgaatgtatgtttagaggtagtgaaaacactgccacagttgcaacagaaagagccacaatcaagaggtggcagatttggtgataatggtggtcgtggtgggaactacaggtttggtggaagaggtggaggaggcaggaatggtaggttctccaatggtggtgggcgtggcggcaactggggtggaaagagatggtgaagctgagaagggactttgggagttgagtgttttcactctgctcggtgtgggatcataactgcgtgacgaccacgtggggatgaatacttcagtcgtgaatgaagaaacagttgatgttggttaaggcccacggaggattcgagttcaagatggattcaatgtgtcccctaacaacatattctatgtttcatttttgttttgttattttttattcttttgcggggaagcgtaagtttagatttttatattctgtctttcacaggagaaattttgatgtagtagtatatacttttacg

SEQ ID NO: 8128 - protein, 74 aa, Glycine max
  misc_feature (1)..(74): Ceres Seq. ID no. 15177775
IYLNGQENASNVCLEVVKTLPQLQQKEPQSRGGRFGDNGGRGGNYRFGGRGGGGRNGRFSNGGGRGGNWGGKRW

SEQ ID NO: 8129 - protein, 66 aa, Glycine max
  misc_feature (1)..(66): Ceres Seq. ID no. 15177776
MKKQLMLVKAHGGFEFKMDSMCPLTTYSMFHFCFVIFYSFAGKRKFRFLYSVFHRRNFDVVVYTFT

SEQ ID NO: 8130 - protein, 61 aa, Glycine max
  misc_feature (1)..(61): Ceres Seq. ID no. 15177777
MLVKAHGGFEFKMDSMCPLTTYSMFHFCFVIFYSFAGKRKFRFLYSVFHRRNFDVVVYTFT

SEQ ID NO: 8131 - protein, 56 aa, Glycine max
  misc_feature (1)..(56): Ceres Seq. ID no. 15177778
MVVVVGTTGLVEEVEEAGMVGSPMVVGVAATGVERDGEAEKGLWELSVFTLLGVGS

SEQ ID NO: 8132 - DNA, 1618 bp, Glycine max
  misc_feature (1)..(1618): Ceres Seq. ID no. 15177783
aactactaaagggataaaatatgactactattagtgatgatcagtgattagtgtgattagtgcgtgcgattcattgtgtttgtgtagtagtgagtgactttgggttgggtttcgtctcaactcaacaaacgtcgtcgttctcccatttccaatctttctccaatggcttcttctgcttccttaatcaactcgttgacttgctcttcgcctgcacccactcagcactgtttcgccttcacccgcaccaccgccaccgctaccgccacgtcactgagacaattcaacagccaccgtccgcccccactcaccacgaggatctcctcgtcgccttccaccgttgtctgcaaagctgtctccgttaagccccaaaccgaaaccgaaggtctcaacattgctgacgatgtcacacagctcatagggaaaacgccgatggtttacctcaacaatatcgtgaagggttctgtggccaatattgctgcgaagcttgagattatggagccctgttgtagtgtcaaggacaggattggttttagtatgataaatgatgctgagcagagaggagctataacacctgggaagagtatattggtggaacctactagtgggaacacaggaattggtcttgcctttatagcagcttcaagaggatataagctaattttgacaatgcctgcttcaatgagtttagaaagacgggttcttttgaaagcatttggggccgagcttgttttgactgatgcagcaaagggcatgaatggagcagtacaaaaagctgaagaaattttaaaaagtacccccaattcatacatgcttcaacaatttgataatccttcaaatcctaaggttcattatgagacaactggcccggagatatgggaagatactagaggaaagatagatattttagttgcaggaattggaaccggtggaactgtttctggagctggccaattcctaaaacaacaaaatccgaaaatacaggttattggcgtagagcctctggaaagcaacatacttacaggtggaaagccaggacctcacaaaattcagggtattggggctggttttgtgcccaggaatttggatcaagatgtgcttgatgaagttatagcgatatcaagtgatgaagcagttgaaactgcaaagcaattagcactccaggaaggcttgctggtgggaatttcttcaggagctgcagctgcagctgctttgaaggttggaaagaggcctgagaatgcaggaaagcttattggggttgtcttcccaagctttggtgaaagatatttgtcaactattcttttccagtcaatacgggaagaatgcgagaaaatgcaacctgagccatgaattgactttgcttgttaatgtttcatactcattttccacaagtatctgtatggaatgacagtgtcagatgtccatgttatgcccgtgtttctcatttttgacactcaagaaattagataactgtgtacaggtcattgatttgacttacaacacagattaatgacccttgattgaagaaattttagatgtaataattattggcattgatgacaacgtagcaaatttctgccttatgttcgctattaaaaaataattgatgaaacagtttatc

SEQ ID NO: 8133 - protein, 394 aa, Glycine max
  misc_feature (1)..(394): Ceres Seq. ID no. 15177784
MASSASLINSLTCSSPAPTQHCFAFTRTTATATATSLRQFNSHRPPPLTTRISSSPSTVVCKAVSVKPQTETEGLNIADDVTQLIGKTPMVYLNNIVKGSVANIAAKLEIMEPCCSVKDRIGFSMINDAEQRGAITPGKSILVEPTSGNTGIGLAFIAASRGYKLILTMPASMSLERRVLLKAFGAELVLTDAAKGMNGAVQKAEEILKSTPNSYMLQQFDNPSNPKVHYETTGPEIWEDTRGKIDILVAGIGTGGTVSGAGQFLKQQNPKIQVIGVEPLESNILTGGKPGPHKIQGIGAGFVPRNLDQDVLDEVIAISSDEAVETAKQLALQEGLLVGISSGAAAAAALKVGKRPENAGKLIGVVFPSFGERYLSTILFQSIREECEKMQPEP

SEQ ID NO: 8134 - protein, 305 aa, Glycine max
  misc_feature (1)..(305): Ceres Seq. ID no. 15177785
MVYLNNIVKGSVANIAAKLEIMEPCCSVKDRIGFSMINDAEQRGAITPGKSILVEPTSGNTGIGLAFIAASRGYKLILTMPASMSLERRVLLKAFGAELVLTDAAKGMNGAVQKAEEILKSTPNSYMLQQFDNPSNPKVHYETTGPEIWEDTRGKIDILVAGIGTGGTVSGAGQFLKQQNPKIQVIGVEPLESNILTGGKPGPHKIQGIGAGFVPRNLDQDVLDEVIAISSDEAVETAKQLALQEGLLVGISSGAAAAAALKVGKRPENAGKLIGVVFPSFGERYLSTILFQSIREECEKMQPEP

SEQ ID NO: 8135 - protein, 284 aa, Glycine max
  misc_feature (1)..(284): Ceres Seq. ID no. 15177786
MEPCCSVKDRIGFSMINDAEQRGAITPGKSILVEPTSGNTGIGLAFIAASRGYKLILTMPASMSLERRVLLKAFGAELVLTDAAKGMNGAVQKAEEILKSTPNSYMLQQFDNPSNPKVHYETTGPEIWEDTRGKIDILVAGIGTGGTVSGAGQFLKQQNPKIQVIGVEPLESNILTGGKPGPHKIQGIGAGFVPRNLDQDVLDEVIAISSDEAVETAKQLALQEGLLVGISSGAAAAAALKVGKRPENAGKLIGVVFPSFGERYLSTILFQSIREECEKMQPEP

SEQ ID NO: 8136 - DNA, 1299 bp, Glycine max
  misc_feature (1)..(1299): Ceres Seq. ID no. 15177787
ttttttagttgtaccatgcaatcattaattactttaaaagagagaaccaattgttaaaaggccatagccacatctaattggcacttcataaaggtggtttagttattgggaagcagagaaagaaaaggaggaaatggaggaagcactttttaagacggtgaagaagagcaaaggtgaaattatgggttcttctccggcaacatattgtgttaccggagcaacagggtatattggttcatggcttgtggaggctcttcttgaaagagggtacactgttcatgctactgttagagatcctgaaaagtcactacacctgttgtcattgtggacaagaggtgaccgattgagaattttcaaggcggatttgaatgaagaaagaagtttcgatgaggctgtgaaaggctgtgatggcgtttttcatgttgcagcttcaatggaattcaatgtggttcagaaagaaaacatcgaggcctgtgttcaagcaaatataattgatccagcaataaaaggaaccataaaccttctaaagtcctgcttgaattccaattctgtgaaaagggttgttttcacatcttcaataagtaccatcactgctaaagatagcagtgggaagtggaaacctcttgttgatgaatcttgccaaatccaaagtgaacttgtgttgaaaacacaagcaagtgggtgggtttatgcactttcaaagcttctaacagaagaggcagcatttaagtttgcaaaagagaatggcattgatcttgtgtcagtcataacagccactgttgctggtccattcttcactgctagtgtaccatcaagtgttaaagtcctactgtcaccaataacaggtgaacctgagttcttcaagatattatcttctgtaaatgcacgaatggggtcaattgctttagttcacattgaagatatatgcagtgcacacatattcctaatggagcattctaaagcagaaggtcgatacatatgcagcagccaaagttgtccattagacatgttggctaatcttcttgccaaagagtattcctactcaagcaagaaaaggattgcggagaagaattatgataatgttccttctgagatttcctctaagaagttaaaagagttgggttttagttacaagcatgggcttgaagacataatccatcagacaattatttgttgcctagattatggttatttacctcccattagacaatagtctttcaacactactgtacatgattttaaaacttttgtaattttttttttttgtgatctcaaaataaatgaagtcatattctaaag

SEQ ID NO: 8137 - protein, 359 aa, Glycine max
  misc_feature (1)..(359): Ceres Seq. ID no. 15177788
MEEALFKTVKKSKGEIMGSSPATYCVTGATGYIGSWLVEALLERGYTVHATVRDPEKSLHLLSLWTRGDRLRIFKADLNEERSFDEAVKGCDGVFHVAASMEFNVVQKENIEACVQANIIDPAIKGTINLLKSCLNSNSVKRVVFTSSISTITAKDSSGKWKPLVDESCQIQSELVLKTQASGWVYALSKLLTEEAAFKFAKENGIDLVSVITATVAGPFFTASVPSSVKVLLSPITGEPEFFKILSSVNARMGSIALVHIEDICSAHIFLMEHSKAEGRYICSSQSCPLDMLANLLAKEYSYSSKKRIAEKNYDNVPSEISSKKLKELGFSYKHGLEDIIHQTIICCLDYGYLPPIRQ

SEQ ID NO: 8138 - protein, 343 aa, Glycine max
  misc_feature (1)..(343): Ceres Seq. ID no. 15177789
MGSSPATYCVTGATGYIGSWLVEALLERGYTVHATVRDPEKSLHLLSLWTRGDRLRIFKADLNEERSFDEAVKGCDGVFHVAASMEFNVVQKENIEACVQANIIDPAIKGTINLLKSCLNSNSVKRVVFTSSISTITAKDSSGKWKPLVDESCQIQSELVLKTQASGWVYALSKLLTEEAAFKFAKENGIDLVSVITATVAGPFFTASVPSSVKVLLSPITGEPEFFKILSSVNARMGSIALVHIEDICSAHIFLMEHSKAEGRYICSSQSCPLDMLANLLAKEYSYSSKKRIAEKNYDNVPSEISSKKLKELGFSYKHGLEDIIHQTIICCLDYGYLPPIRQ

SEQ ID NO: 8139 - protein, 259 aa, Glycine max
  misc_feature (1)..(259): Ceres Seq. ID no. 15177790
MEFNVVQKENIEACVQANIIDPAIKGTINLLKSCLNSNSVKRVVFTSSISTITAKDSSGKWKPLVDESCQIQSELVLKTQASGWVYALSKLLTEEAAFKFAKENGIDLVSVITATVAGPFFTASVPSSVKVLLSPITGEPEFFKILSSVNARMGSIALVHIEDICSAHIFLMEHSKAEGRYICSSQSCPLDMLANLLAKEYSYSSKKRIAEKNYDNVPSEISSKKLKELGFSYKHGLEDIIHQTIICCLDYGYLPPIRQ

SEQ ID NO: 8140 - DNA, 1424 bp, Glycine max
  misc_feature (1)..(1424): Ceres Seq. ID no. 15177799
ccctctcagcatctgtgtatttttccgttgcaattgcaacctccctcttcacactttccctcctccgtcttcttcctctgcacgcattttccgctgcagcaactccaaagccgccagctcagcatcctcgaaatcaggtgttgcaatctggcatggatttcctctggagcgagaatgcgacgacgccgcgcgcctcgcatttctccgtcgcgatctgcttcgccttcgccagtttcgcggccaggttcttccttgacagattcgtctttcgcagtttggccattaggatgttgacaaagggcagagctccttcacgtattactaaggaaatgcaagtaaagattggaaaatgctcagagtcaatgtggaagctaacatattatgctgcagttgaagcatttgttcttaaaattacctaccatgaaccctggttcactaatacgaagttatacttcaatgactggccaaatcatgagttgaagagtcccctagtgttgtactacatgtgccagtgtgggttctacatatatagcattgctgctattctcacatgggagactcgaaggaaggatttttcagtgatgtttactcaccatgtaattactgttttactgattgggatttcatatctaacaagtttttttagggttggctccataatcctcgcccttcatgatgcaagtgacgtattcatggaagctgccaaggttttcaagtattctggaagggagtttggtgcaagtgtgtgttttggattctttgctgtttcgtggctcatactgcggctaattttctttccattttgggttattaaagcaacgagcattgatcttcagcaagtcttaagcctgtcagagggttttcatatgtttctttactatgtttttaatacaatgctcataatgctgctcatcttccatatatattggtggaagctcatttgtgcgatgatcttgaggcagctgaaaaataggggaaaagttggcgaggatataagatcagattcagatgatgactgaatagacgaagaagggttttgttgagttttctttgctcccgctagttggtggtggtagctctgatggatactgtttttgacttgtctatagatttctaggagttcagttggttaatacaaccagtggaggagatctgaattttcgttagtttcaaaattttcattgattaccaagtaaaaagggagtaggaaaccgtccaaagcatattttgattcttatatttttgctgtataaatgataggcattcctgtataattgtttttccaaacgaacccgtttaggttaactaggggttgaatgacaagtggcttataacaaatatgaaggagaaagaaaaacttacagtcattctacttttgtagttgcgcttttgaggaataagccgcagactggtgcattgtactg

SEQ ID NO: 8141 - protein, 338 aa, Glycine max
  misc_feature (1)..(338): Ceres Seq. ID no. 15177800
LSASVYFSVAIATSLFTLSLLRLLPLHAFSAAATPKPPAQHPRNQVLQSGMDFLWSENATTPRASHFSVAICFAFASFAARFFLDRFVFRSLAIRMLTKGRAPSRITKEMQVKIGKCSESMWKLTYYAAVEAFVLKITYHEPWFTNTKLYFNDWPNHELKSPLVLYYMCQCGFYIYSIAAILTWETRRKDFSVMFTHHVITVLLIGISYLTSFFRVGSIILALHDASDVFMEAAKVFKYSGREFGASVCFGFFAVSWLILRLIFFPFWVIKATSIDLQQVLSLSEGFHMFLYYVFNTMLIMLLIFHIYWWKLICAMILRQLKNRGKVGEDIRSDSDDD

SEQ ID NO: 8142 - protein, 288 aa, Glycine max
  misc_feature (1)..(288): Ceres Seq. ID no. 15177801
MDFLWSENATTPRASHFSVAICFAFASFAARFFLDRFVFRSLAIRMLTKGRAPSRITKEMQVKIGKCSESMWKLTYYAAVEAFVLKITYHEPWFTNTKLYFNDWPNHELKSPLVLYYMCQCGFYIYSIAAILTWETRRKDFSVMFTHHVITVLLIGISYLTSFFRVGSIILALHDASDVFMEAAKVFKYSGREFGASVCFGFFAVSWLILRLIFFPFWVIKATSIDLQQVLSLSEGFHMFLYYVFNTMLIMLLIFHIYWWKLICAMILRQLKNRGKVGEDIRSDSDDD

SEQ ID NO: 8143 - protein, 243 aa, Glycine max
  misc_feature (1)..(243): Ceres Seq. ID no. 15177802
MLTKGRAPSRITKEMQVKIGKCSESMWKLTYYAAVEAFVLKITYHEPWFTNTKLYFNDWPNHELKSPLVLYYMCQCGFYIYSIAAILTWETRRKDFSVMFTHHVITVLLIGISYLTSFFRVGSIILALHDASDVFMEAAKVFKYSGREFGASVCFGFFAVSWLILRLIFFPFWVIKATSIDLQQVLSLSEGFHMFLYYVFNTMLIMLLIFHIYWWKLICAMILRQLKNRGKVGEDIRSDSDDD

SEQ ID NO: 8144 - DNA, 1238 bp, Glycine max
  misc_feature (1)..(1238): Ceres Seq. ID no. 15177807
aggaatttgctttgaacggaacaagaatccaatagaagaaagaagaagatgtggctttcggatcatcgattgtttcttctctgcattgtttgtggcctttacttttctctgcagttcacaacgggtcatgcagattcaaatgctggaagaactttgaatcaggagggtggtgatcatcaaatacattgctctagagaaagaagtagaacagcttggaaaatcattcaagagtatttgatgccctttgtggagaaagaaaaataccacatctcaaaaaggtgtaggcttcaccctgacaatgacatatacagagatcaggagcaacataagtttcatacagatataaacgaatggcagtgtgggttctgtaagaaaagtttctatgaagagaaacatcttgaccagcattttgacaacagacactccaatttgcttaatttgagtgaaagccagtgcatagcagatgtttgtggtgcactgcactgtgaccatgaaatgaattctggatcaaaaaaatcaaagtgcaatcctgctgctgctgcaaaaaataaacatctatgtgagagcttagccgatagttgttttcctgtcactgagggccctgcggcaagccgacttcatgaattcttcttgcaccaattctgtgatgcacacagctgcactggaaataggaaacctttctccagagggcgcaggaagaagacaaatgtgttctacatctttgtgtctattttgcttgtgatactgctgctactatactacctctacatttacttatatcagagaggaatgaaaagggaaactcaagtgctgaagcgcgtctcacaagccagcagaaagaaaaagccatcttaattgattgttctttccacaaaaagaagttctcaacctacattttcagaaagtaaaggtgtcactaatggatagagtgtgaactgcacgtaaatctacctacattacattttcagaaagttaaggtgtaactaatggatacagtcagaactgcacttggaatccagtttacgctattctgctatttgcaagagtacgtttgaaggcagaaagagattgtcagcttcaaaaatgacttctatgtgatttgctagtttgtaaaccaaattcttgtaaactttttgaacaaaaagggggctgcatgactgaatccaccttagttggccatttgcatttgattgtgcatgacagcactaacaagaaaaaataacatgaacatttgcaac

SEQ ID NO: 8145 - protein, 268 aa, Glycine max
  misc_feature (1)..(268): Ceres Seq. ID no. 15177808
MWLSDHRLFLLCIVCGLYFSLQFTTGHADSNAGRTLNQEGGDHQIHCSRERSRTAWKIIQEYLMPFVEKEKYHISKRCRLHPDNDIYRDQEQHKFHTDINEWQCGFCKKSFYEEKHLDQHFDNRHSNLLNLSESQCIADVCGALHCDHEMNSGSKKSKCNPAAAAKNKHLCESLADSCFPVTEGPAASRLHEFFLHQFCDAHSCTGNRKPFSRGRRKKTNVFYIFVSILLVILLLLYYLYIYLYQRGMKRETQVLKRVSQASRKKKPS

SEQ ID NO: 8146 - protein, 205 aa, Glycine max
  misc_feature (1)..(205): Ceres Seq. ID no. 15177809
MPFVEKEKYHISKRCRLHPDNDIYRDQEQHKFHTDINEWQCGFCKKSFYEEKHLDQHFDNRHSNLLNLSESQCIADVCGALHCDHEMNSGSKKSKCNPAAAAKNKHLCESLADSCFPVTEGPAASRLHEFFLHQFCDAHSCTGNRKPFSRGRRKKTNVFYIFVSILLVILLLLYYLYIYLYQRGMKRETQVLKRVSQASRKKKPS

SEQ ID NO: 8147 - DNA, 1496 bp, Glycine max
  misc_feature (1)..(1496): Ceres Seq. ID no. 15177818
acaaaatcgcccgcagtttcatcttcttcttcactctcttgctctcagtctcagactatttttctgaaagcatttcaaatggttgatagcaatccttcctctggatcacccgaagaaacacaaaatcccaacccagatgggaatgcacctgttgaaagtgatcttgcattggagaatctagcccaaaaagttcaagaatctctctctctggaaaaaagacataaattttgggaaacccaacctgttgggcagttcaaggatgtaggggactccagtttgccagaaggcccgattgaacttccaacccccttatctgaggtcaaacaagaaccatacaaccttcctgaccactatgaatgggttacttgtgacataaactctgaggagacgtgtgatgaggtatacaaccttcttgctcataattatgttgaggatgatgagaatatgtttcgatttaactactcaaaggaatttctgcgctgggctctgcaacctccgggttatttcaagagttggcatattggtgtccgtgttaaaagttccaagaagatggttgcctttataacaggtattcctgctagaatccgagttcgtgatgaggttgttcatatggcagagatcaattttctgtgtgtccataagaagcttcgaacaaagaggcttgctcctgtcatgatcaaagaggtcaccaggagggtgcatctggaaaatatgtggcaggcagcctacactgctggagtagttctccctacaccaataacaacttgtcaatactggcacagatctttgaatcccaagaagctaattgatgttggtttttctcggcttggtgcacgaatgacaatgagtcgaaccatcaagctttacaagctaccagaatcaacaatcaccccagggtttaggaagatggaaattcatgacgttcctgcagttaccaggctaattagaaattatttgagtcattttgttgttgcacctgattttgatgaaaacgatgtggagcattggcttcttccaagggatggtgttattgacagttatctggttgaaagtccggaaactcacgaggtcacggacttttgtagtttttacacacttccttcttctatccttggccacctaaattataaaattttgaaagcagcatattcattttataatgtttccacagtaactcctttgcttcagctgataaatgatgctctcattgtcgcaaaacacaaggattatgatgttttcaatgcattagatgtcatgcagaatgagaccttcttgagggaactgaagtttggaccaggtgatgggaaacttcattattatctttacaactaccgaataaggcatgcattgaagccatcagagcttgggcttgtgcttctgtagtctaaattttggaaatttgtcttgctatattgggatttataatggttttgctgtagacattgtatggttgcaaattatgtggtgatcaacgattagaccttaaattttgcttc

SEQ ID NO: 8148 - protein, 460 aa, Glycine max
  misc_feature (1)..(460): Ceres Seq. ID no. 15177819
TKSPAVSSSSSLSCSQSQTIFLKAFQMVDSNPSSGSPEETQNPNPDGNAPVESDLALENLAQKVQESLSLEKRHKFWETQPVGQFKDVGDSSLPEGPIELPTPLSEVKQEPYNLPDHYEWVTCDINSEETCDEVYNLLAHNYVEDDENMFRFNYSKEFLRWALQPPGYFKSWHIGVRVKSSKKMVAFITGIPARIRVRDEVVHMAEINFLCVHKKLRTKRLAPVMIKEVTRRVHLENMWQAAYTAGVVLPTPITTCQYWHRSLNPKKLIDVGFSRLGARMTMSRTIKLYKLPESTITPGFRKMEIHDVPAVTRLIRNYLSHFVVAPDFDENDVEHWLLPRDGVIDSYLVESPETHEVTDFCSFYTLPSSILGHLNYKILKAAYSFYNVSTVTPLLQLINDALIVAKHKDYDVFNALDVMQNETFLRELKFGPGDGKLHYYLYNYRIRHALKPSELGLVLL

SEQ ID NO: 8149 - protein, 434 aa, Glycine max
  misc_feature (1)..(434): Ceres Seq. ID no. 15177820
MVDSNPSSGSPEETQNPNPDGNAPVESDLALENLAQKVQESLSLEKRHKFWETQPVGQFKDVGDSSLPEGPIELPTPLSEVKQEPYNLPDHYEWVTCDINSEETCDEVYNLLAHNYVEDDENMFRFNYSKEFLRWALQPPGYFKSWHIGVRVKSSKKMVAFITGIPARIRVRDEVVHMAEINFLCVHKKLRTKRLAPVMIKEVTRRVHLENMWQAAYTAGVVLPTPITTCQYWHRSLNPKKLIDVGFSRLGARMTMSRTIKLYKLPESTITPGFRKMEIHDVPAVTRLIRNYLSHFVVAPDFDENDVEHWLLPRDGVIDSYLVESPETHEVTDFCSFYTLPSSILGHLNYKILKAAYSFYNVSTVTPLLQLINDALIVAKHKDYDVFNALDVMQNETFLRELKFGPGDGKLHYYLYNYRIRHALKPSELGLVLL

SEQ ID NO: 8150 - protein, 312 aa, Glycine max
  misc_feature (1)..(312): Ceres Seq. ID no. 15177821
MFRFNYSKEFLRWALQPPGYFKSWHIGVRVKSSKKMVAFITGIPARIRVRDEVVHMAEINFLCVHKKLRTKRLAPVMIKEVTRRVHLENMWQAAYTAGVVLPTPITTCQYWHRSLNPKKLIDVGFSRLGARMTMSRTIKLYKLPESTITPGFRKMEIHDVPAVTRLIRNYLSHFVVAPDFDENDVEHWLLPRDGVIDSYLVESPETHEVTDFCSFYTLPSSILGHLNYKILKAAYSFYNVSTVTPLLQLINDALIVAKHKDYDVFNALDVMQNETFLRELKFGPGDGKLHYYLYNYRIRHALKPSELGLVLL

SEQ ID NO: 8151 - DNA, 1213 bp, Glycine max
  misc_feature (1)..(1213): Ceres Seq. ID no. 15177824
ggtcagaggaaagataatcatacaatatttttaaaattgcgaattgcagattcctcaggtaatattcgcaatatccactttccttttgatactgaagcagacacttcaatctctgttgctagtgaaatggttgaggagttggaactcactgatcaagatgttacaactattgctgggatgattgattctgaaattcgatatcacattcctagttggaatttcagtgaaactcctgttgactttaaccatcaagattcaagttatacctctgaaactaggccagaggcctctcctatgaaaattgattctgttgttgctcctggcagtcttgcattagaaattttaccttcaggtcgtaagtactggtcagattcaccaaggggatttggtggaaactctccatctcgacatatgacttcaatcttgtctaatgaagcaggtgtgaactctgaggaagacaacccgactgcaaatggtggtatttcagctgatgattgtgttgacggtaccattgagcaggaatgtgatgagatagctgattctccttccagtgagaaatctgaaatggaatacatcaatcaaataacaacaaaattggagaatttgttggttaaacaaagggaggagttagatgaactaaagaggaaacacaaactagctgtctcagatcttttgatggaaattcctccagaaatgtgccagaaggtcctaaatatatgcaacctgcagatgcctgacagtgaaatggccaggcttgcccttcattaatctaaatgccactttgtgtggtttatggtagtagttcacttagaaagctcattttaggagtgaaatttagaagttgtgatcttgcttgttgcttggaactgttgatattttgggtttcataattcatgcataagagggtaaatttttaatggcacaagtgttcttggtataatatatgttgtcaagaggaattgcagctgggttaactagggactgggaattggggactggggagtcatctttgcaggagaaatctcgttacggcataacgtcccaagagcttggaggacttaatgctatttctgcatttacctaaaaaacatggagttgaaacgagaaattagctttgagaggtcacaagactggattatatgaatatcatttctcatatgtaaatagtatgatacaattcattaaactataggaaatatatacttgtacatat

SEQ ID NO: 8152 - protein, 255 aa, Glycine max
  misc_feature (1)..(255): Ceres Seq. ID no. 15177825
GQRKDNHTIFLKLRIADSSGNIRNIHFPFDTEADTSISVASEMVEELELTDQDVTTIAGMIDSEIRYHIPSWNFSETPVDFNHQDSSYTSETRPEASPMKIDSVVAPGSLALEILPSGRKYWSDSPRGFGGNSPSRHMTSILSNEAGVNSEEDNPTANGGISADDCVDGTIEQECDEIADSPSSEKSEMEYINQITTKLENLLVKQREELDELKRKHKLAVSDLLMEIPPEMCQKVLNICNLQMPDSEMARLALH

SEQ ID NO: 8153 - protein, 213 aa, Glycine max
  misc_feature (1)..(213): Ceres Seq. ID no. 15177826
MVEELELTDQDVTTIAGMIDSEIRYHIPSWNFSETPVDFNHQDSSYTSETRPEASPMKIDSVVAPGSLALEILPSGRKYWSDSPRGFGGNSPSRHMTSILSNEAGVNSEEDNPTANGGISADDCVDGTIEQECDEIADSPSSEKSEMEYINQITTKLENLLVKQREELDELKRKHKLAVSDLLMEIPPEMCQKVLNICNLQMPDSEMARLALH

SEQ ID NO: 8154 - protein, 196 aa, Glycine max
  misc_feature (1)..(196): Ceres Seq. ID no. 15177827
MIDSEIRYHIPSWNFSETPVDFNHQDSSYTSETRPEASPMKIDSVVAPGSLALEILPSGRKYWSDSPRGFGGNSPSRHMTSILSNEAGVNSEEDNPTANGGISADDCVDGTIEQECDEIADSPSSEKSEMEYINQITTKLENLLVKQREELDELKRKHKLAVSDLLMEIPPEMCQKVLNICNLQMPDSEMARLALH

SEQ ID NO: 8155 - DNA, 1277 bp, Glycine max
  misc_feature (1)..(1277): Ceres Seq. ID no. 15177842
ctgaacacatttcatttttggatttttatacttccttctttcttttacactgcacacacacacagaggtattttcacttctctcgctttcattttgcgatgcgtcgattaaaaattgaacaaccttcactgactcgttcagcgttgggttattgactttgatggttccaaattgtgttctgtttagagacaacaccgctaaccaaacgcctttctctcaacttcaacgtctttgctatttaaatttaaatcactgcacaacctattgcagtgtacctcattcttcgtttggttttggtttcaatttgcgtcgcacaagttgacgtttcctcggatacacaatgataggatcttttattacaagggcacttgtgatggtttttggctatgccttccctgcctatgaatgctataaagcagttgaaaagaataggccagaaattgaacaacttcgtttttggtgccagtactggattttggtagctgttttgtcagtatgtgagcggattgctgatgcttttatatcatgggtcccaatgtatagtgaagctaagttggcatttgtcatatacttgtggtacccgaaaacaaagggaacaacatatgtgtatgattccttctttagaccatatgttgcgaaacatgagacagaaattgaccgcaacttgttggaactaaggacaagggcaggagatactgcagttttgtattggcaaaaagctgctagttatggccagactagaatatttgaaattttgcagtatgttgctgcacagtcaacaccttcgccacgccctgctcagcaacaaccagctatgagggtgcgtcaagccgcaactagtaatagccaaccagcatctgcgacagaaccacaagctgagaatccatcttctcctacttctagttcatccagtcagcaacagaaggaagtagcagaggaggagttgggttcttcacaagtgcctaaagcaccttatactgtagcaggtttaagtagccagaagtctaatcctatacctgaaacggccaatcaatcggtacctgaagaggatgagccaatgcagattgaagcagcagcaccttcatcctcttctgcaaatgaaaatgagaaccctcccttggaagatacaataatggaagaaagcattagggtaacgcgtggtagactaagaaaaaatcgatcagctcgaatccgttagatatcattgttttcaagttttagcctggaaaacatgggtagatggataatagtgggtgtggaatagtaaagttgtgtgt

SEQ ID NO: 8156 - protein, 285 aa, Glycine max
  misc_feature (1)..(285): Ceres Seq. ID no. 15177843
MIGSFITRALVMVFGYAFPAYECYKAVEKNRPEIEQLRFWCQYWILVAVLSVCERIADAFISWVPMYSEAKLAFVIYLWYPKTKGTTYVYDSFFRPYVAKHETEIDRNLLELRTRAGDTAVLYWQKAASYGQTRIFEILQYVAAQSTPSPRPAQQQPAMRVRQAATSNSQPASATEPQAENPSSPTSSSSSQQQKEVAEEELGSSQVPKAPYTVAGLSSQKSNPIPETANQSVPEEDEPMQIEAAAPSSSSANENENPPLEDTIMEESIRVTRGRLRKNRSARIR

SEQ ID NO: 8157 - protein, 274 aa, Glycine max
  misc_feature (1)..(274): Ceres Seq. ID no. 15177844
MVFGYAFPAYECYKAVEKNRPEIEQLRFWCQYWILVAVLSVCERIADAFISWVPMYSEAKLAFVIYLWYPKTKGTTYVYDSFFRPYVAKHETEIDRNLLELRTRAGDTAVLYWQKAASYGQTRIFEILQYVAAQSTPSPRPAQQQPAMRVRQAATSNSQPASATEPQAENPSSPTSSSSSQQQKEVAEEELGSSQVPKAPYTVAGLSSQKSNPIPETANQSVPEEDEPMQIEAAAPSSSSANENENPPLEDTIMEESIRVTRGRLRKNRSARIR

SEQ ID NO: 8158 - protein, 220 aa, Glycine max
  misc_feature (1)..(220): Ceres Seq. ID no. 15177845
MYSEAKLAFVIYLWYPKTKGTTYVYDSFFRPYVAKHETEIDRNLLELRTRAGDTAVLYWQKAASYGQTRIFEILQYVAAQSTPSPRPAQQQPAMRVRQAATSNSQPASATEPQAENPSSPTSSSSSQQQKEVAEEELGSSQVPKAPYTVAGLSSQKSNPIPETANQSVPEEDEPMQIEAAAPSSSSANENENPPLEDTIMEESIRVTRGRLRKNRSARIR

SEQ ID NO: 8159 - DNA, 1157 bp, Glycine max
  misc_feature (1)..(1157): Ceres Seq. ID no. 15177850
agcacagcaccaccacccgccacctcaacgcacgcaaaggccgaggaggacaagctaggaggagcgagcagccatggcttcgtcggtggccgccgcggcgagcgcgttcctcgggacccggctggcggacccggcgccgcagaacgggcgcatcgtggcgcggttcggcttcggcaagaagaaggccccgccgaagaaggccaaggcgcccccgaccaccgaccggccgctgtggttccccggcgcgcaggcgcccgagtacctcgacgggacgctcgtcggcgactacggcttcgaccccttcggccttgggaagcccgcggagtacctgcagtacgacgtggactccctggaccagaacctggcccagaacctggcgggcgagatcatcggcacccggttcgaggacgccgacgtcaagtccaccccgttccagccctacgccgaggtgttcggcctccagaggttccgcgagtgcgagctcatccacggtcgctgggccatgctcgccaccctcggcgccctcaccgtcgagtggctcaccggcgtcacctggcaggacgccggcaaggtggagctggtggacgggtcgtcgtacctggggcagccgctgccgttcacgctcaccacgctgatctggatcgaggtgctggtgatcgggtacatcgagttccagcgcaacgcggagctggacccggagaggaggctctaccccggtggctcctacttcgacccgctggggctcgcggcggacccggagaagaaggagactctgcagctggcggagatcaagcacgcccgcctcgccatggtcgccttcctcggcttcgccgtgcaggccgccgccaccggcaaggggcctctcaacaactgggccacccacctcagcgacccgctgcacaccaccatcttcgacaccttgggttcctcttaagtggtcggtggtcgagcaatttctgtcagctcagcagcaaaatggacgaacgcgcgtccgtgtaacgaacgtgctttggttttgtatgacgagtgatggatgagagggtatcgcacagatcctttgttgattaatgcaggtctgatcacataggagagctgctgggacttggtgatttgtaaaatatgaaccaatggtaacttaatgcatccacttgtacatc

SEQ ID NO: 8160 - protein, 332 aa, Glycine max
  misc_feature (1)..(332): Ceres Seq. ID no. 15177851
STAPPPATSTHAKAEEDKLGGASSHGFVGGRRGERVPRDPAGGPGAAERAHRGAVRLRQEEGPAEEGQGAPDHRPAAVVPRRAGARVPRRDARRRLRLRPLRPWEARGVPAVRRGLPGPEPGPEPGGRDHRHPVRGRRRQVHPVPALRRGVRPPEVPRVRAHPRSLGHARHPRRPHRRVAHRRHLAGRRQGGAGGRVVVPGAAAAVHAHHADLDRGAGDRVHRVPAQRGAGPGEEALPRWLLLRPAGARGGPGEEGDSAAGGDQARPPRHGRLPRLRRAGRRHRQGASQQLGHPPQRPAAHHHLRHLGFLLSGRWSSNFCQLSSKMDERASV

SEQ ID NO: 8161 - protein, 286 aa, Glycine max
  misc_feature (1)..(286): Ceres Seq. ID no. 15177852
MASSVAAAASAFLGTRLADPAPQNGRIVARFGFGKKKAPPKKAKAPPTTDRPLWFPGAQAPEYLDGTLVGDYGFDPFGLGKPAEYLQYDVDSLDQNLAQNLAGEIIGTRFEDADVKSTPFQPYAEVFGLQRFRECELIHGRWAMLATLGALTVEWLTGVTWQDAGKVELVDGSSYLGQPLPFTLTTLIWIEVLVIGYIEFQRNAELDPERRLYPGGSYFDPLGLAADPEKKETLQLAEIKHARLAMVAFLGFAVQAAATGKGPLNNWATHLSDPLHTTIFDTLGSS

SEQ ID NO: 8162 - protein, 210 aa, Glycine max
  misc_feature (1)..(210): Ceres Seq. ID no. 15177853
HSTTTRHLNARKGRGGQARRSEQPWLRRWPPRRARSSGPGWRTRRRRTGASWRGSASARRRPRRRRPRRPRPPTGRCGSPARRRPSTSTGRSSATTASTPSALGSPRSTCSTTWTPWTRTWPRTWRARSSAPGSRTPTSSPPRSSPTPRCSASRGSASASSSTVAGPCSPPSAPSPSSGSPASPGRTPARWSWWTGRRTWGSRCRSRSPR

SEQ ID NO: 8163 - DNA, 1225 bp, Glycine max
  misc_feature (1)..(1225): Ceres Seq. ID no. 15177862
aaaccttatcccttcccccaaagcacagcgagagagaaagtaaagtgagccatgtctgcctctgcttcctccctttccctttcttccttcaaccctaaatccctccctctctgcatttcccgctccgcctccgttctcccaccttccctctccttcaaactctactccatcttcgcttcctccgccgtcaaatgctcctcctcccccgcccaacacccgtcgcgtttcgccagaaacgtggccgtatcatcggatttcgaggtggaggaagacgacgtgttcaccgacgatgactctcccccgccgcagcaagagcgcagctcctccttctccgcggacctcaaactcttcgtcggtaacctctccttcgatgtggatagcgctcagctcgctcagttgtttgagagcgccgggactgttgagatggttgaggttatctatgataaagtgactggcagaagcagaggttttggatttgtgacaatgtccactgcagctgaagtcgaagcagctgctcagcagtttaatggctatgaacttgagggcagagctttgagggttaacgctggccctcctccacctaagagggaggaatcattctccaggggaccaagaagtggtggttacggttcagaacgttctggttacggctctgaacgttccggctacgggtctcaacgttcaggacgttctggttacgggtctgagcgttccagctatggttctgggtcaggttcgggctcaggctcaggttcaggttcatcagaccgtgtgtatgtgggaaacctttcgtggggtgtggatgacacggctcttgagagcttgttcagcgagcaaggaaaggttgttgaggccagggtcatttacgacagggacactggtcgatccaagggttttgggtttgtgacactcggctctcctcaagaggtcacacgagccatcaactctttgaatggcgcagatttggatggaagacagattagagtctcggaggctgaggctagaccaccaaggcgccagttttgagcgaccatgtcacttcactgctctcaaagaaatgcagattcttgaggtgtatcatgtatgtcatcttggctgacgaacaagctatctatgtttcgagttttgggctttgtttctttattttaagtcgttttgggctttgcttttatttttgcagactacttacggttttggacttttacttctttcttcattatgctcg

SEQ ID NO: 8164 - protein, 324 aa, Glycine max
  misc_feature (1)..(324): Ceres Seq. ID no. 15177863
MSASASSLSLSSFNPKSLPLCISRSASVLPPSLSFKLYSIFASSAVKCSSSPAQHPSRFARNVAVSSDFEVEEDDVFTDDDSPPPQQERSSSFSADLKLFVGNLSFDVDSAQLAQLFESAGTVEMVEVIYDKVTGRSRGFGFVTMSTAAEVEAAAQQFNGYELEGRALRVNAGPPPPKREESFSRGPRSGGYGSERSGYGSERSGYGSQRSGRSGYGSERSSYGSGSGSGSGSGSGSSDRVYVGNLSWGVDDTALESLFSEQGKVVEARVIYDRDTGRSKGFGFVTLGSPQEVTRAINSLNGADLDGRQIRVSEAEARPPRRQF

SEQ ID NO: 8165 - protein, 200 aa, Glycine max
  misc_feature (1)..(200): Ceres Seq. ID no. 15177864
MVEVIYDKVTGRSRGFGFVTMSTAAEVEAAAQQFNGYELEGRALRVNAGPPPPKREESFSRGPRSGGYGSERSGYGSERSGYGSQRSGRSGYGSERSSYGSGSGSGSGSGSGSSDRVYVGNLSWGVDDTALESLFSEQGKVVEARVIYDRDTGRSKGFGFVTLGSPQEVTRAINSLNGADLDGRQIRVSEAEARPPRRQF

SEQ ID NO: 8166 - protein, 180 aa, Glycine max
  misc_feature (1)..(180): Ceres Seq. ID no. 15177865
MSTAAEVEAAAQQFNGYELEGRALRVNAGPPPPKREESFSRGPRSGGYGSERSGYGSERSGYGSQRSGRSGYGSERSSYGSGSGSGSGSGSGSSDRVYVGNLSWGVDDTALESLFSEQGKVVEARVIYDRDTGRSKGFGFVTLGSPQEVTRAINSLNGADLDGRQIRVSEAEARPPRRQF

SEQ ID NO: 8167 - DNA, 1625 bp, Glycine max
  misc_feature (1)..(1625): Ceres Seq. ID no. 15177870
agtttgggttaagtagtgaggtttcttcttataagctattgcctttccgcaattggcttctccactgactcaattctatagtctagcttctctctctttcttatcacatatgccaaatccaattttgacccgcaatagactttcaatattctaatgctactttacttcatcacttgcatctccttcttcttgtttttaaagtccctccttctcaagcctctcccatcatgggcatctgagatgtggctgtttccccttttgttttctcaagagttttctatgagcacaatctccaagctgttcaggaaccggttttggattggttttctgtgtcaaattcccataggaatgtctctggtgaggaagagtctgacttcaagagtggagaatgttgaggaaagccttgacatgtcagtgttggacttgcctgagttggccttggattgcattcttgagaggcttcccccctcttcgctgtgtcgaatcgccgccgtgtgccgcaccttgagggagaggtgtgtgagtgatcacctttgggagaagcacatgaggaagaagtggggtagagttattggccctgctgcttatagggagtggaaatggcatgttgcttccaaaaggaatgttgggggtcttaaacatggcaggcaaaagggtttgatgagatttatgtctcttcattggcctttccaatggattagaccaaaggttgatgcaaattataataacccaaagctgaggagctctctgcctgttgactcagtcatgaactggtatcttgctcttgagtctggcaatttttggttccctgctcaagtctataaccgtgagaatggtcatgttggattcatgctatcttgctatgatgctgaacttagctatgatccgcgaactgatacctttcaagccagatatcctccacatggaagaagggcagatgctagagagtgtggcatcccatgggaaaggctaagagcacctcctattgatacttctccgcatgatcttcatgtctccgactgtttaaatgatttgtatccgggtgatcacatagagattcaatggaggagaaacaaagaatttccttatggttggtggtatggtgttgtaggccacttggagtcatgcaatgggagtgaaaattattgccgatgtcatagtagtgacactgtggtgctagagttcaatcattacactcctggctcacgatggaggctgaccactgtcagtaggaaagatcatagggaggaggggaacgaggctgatggattttatggcggaataagaaagattaccagcgaggctgagattgccacttggaaatgcctttggccatctgaagtcttggattagtaggcactagcactggatctgatcaaattctctacaacttagcatgatttcaatatagaagctttgtttcagaaactgaagcattgactggttctggattatacatggcaatatacaacctgaagtggacttcagttcagatatttaggccaacccgattttcttctcttttttgtcacattttttcatgaaaaaatttatgcatattcatgtggtttccctcattgtaaattgttcatttaagcacaaatgtagaatattcattccactat

SEQ ID NO: 8168 - protein, 399 aa, Glycine max
  misc_feature (1)..(399): Ceres Seq. ID no. 15177871
MLLYFITCISFFLFLKSLLLKPLPSWASEMWLFPLLFSQEFSMSTISKLFRNRFWIGFLCQIPIGMSLVRKSLTSRVENVEESLDMSVLDLPELALDCILERLPPSSLCRIAAVCRTLRERCVSDHLWEKHMRKKWGRVIGPAAYREWKWHVASKRNVGGLKHGRQKGLMRFMSLHWPFQWIRPKVDANYNNPKLRSSLPVDSVMNWYLALESGNFWFPAQVYNRENGHVGFMLSCYDAELSYDPRTDTFQARYPPHGRRADARECGIPWERLRAPPIDTSPHDLHVSDCLNDLYPGDHIEIQWRRNKEFPYGWWYGVVGHLESCNGSENYCRCHSSDTVVLEFNHYTPGSRWRLTTVSRKDHREEGNEADGFYGGIRKITSEAEIATWKCLWPSEVLD

SEQ ID NO: 8169 - protein, 370 aa, Glycine max
  misc_feature (1)..(370): Ceres Seq. ID no. 15177872
MWLFPLLFSQEFSMSTISKLFRNRFWIGFLCQIPIGMSLVRKSLTSRVENVEESLDMSVLDLPELALDCILERLPPSSLCRIAAVCRTLRERCVSDHLWEKHMRKKWGRVIGPAAYREWKWHVASKRNVGGLKHGRQKGLMRFMSLHWPFQWIRPKVDANYNNPKLRSSLPVDSVMNWYLALESGNFWFPAQVYNRENGHVGFMLSCYDAELSYDPRTDTFQARYPPHGRRADARECGIPWERLRAPPIDTSPHDLHVSDCLNDLYPGDHIEIQWRRNKEFPYGWWYGVVGHLESCNGSENYCRCHSSDTVVLEFNHYTPGSRWRLTTVSRKDHREEGNEADGFYGGIRKITSEAEIATWKCLWPSEVLD

SEQ ID NO: 8170 - protein, 357 aa, Glycine max
  misc_feature (1)..(357): Ceres Seq. ID no. 15177873
MSTISKLFRNRFWIGFLCQIPIGMSLVRKSLTSRVENVEESLDMSVLDLPELALDCILERLPPSSLCRIAAVCRTLRERCVSDHLWEKHMRKKWGRVIGPAAYREWKWHVASKRNVGGLKHGRQKGLMRFMSLHWPFQWIRPKVDANYNNPKLRSSLPVDSVMNWYLALESGNFWFPAQVYNRENGHVGFMLSCYDAELSYDPRTDTFQARYPPHGRRADARECGIPWERLRAPPIDTSPHDLHVSDCLNDLYPGDHIEIQWRRNKEFPYGWWYGVVGHLESCNGSENYCRCHSSDTVVLEFNHYTPGSRWRLTTVSRKDHREEGNEADGFYGGIRKITSEAEIATWKCLWPSEVLD

SEQ ID NO: 8171 - DNA, 1424 bp, Glycine max
  misc_feature (1)..(1424): Ceres Seq. ID no. 15177955
tatctgttccagaattacaaaataattgcaatatgtttgttgcatcagcccgtcagttggttaaagccttagaagtgccattggttaatgatttaggatatacaaagagatatgtgcgctgcctacagatatcagaagtggtaaatagtatgaaagacttgatagattacagccgagaaactgggactggacctatggagagcttagcaaaattccctaggagaacaagtggttcagctggacctcgtggtcaagcacaacagcatgaagaacaattacagcagcagcaacaacaacaaatggtggcccataactcaaatggtgatcaaaactcagtacgagctgctgccatgcaaattgcttctagcaatggtatggttagtgtaaataactctgtcaacccagcatccacatcaacaaccacaagcactattgttggtcttcttcaccagaactctatgaattctagacaacaaaattcaatgaacaatgcaagcagtccatatggaggtagttctgttcagattccttccccaggttcctccagtacagtgccacaaggccagccaaactcgtccccttttcaatcaccaacaccgtcctcttctaacaaccccccacaaacatctcaccctgctttaacatctgccaatcacacaagtacgacaaactcaccagctaatatttccatgcaacaacagcagtcatctatttctggtgaacctgaccctagtgatgctcaaagctcagtccagaaaatcatacatgagatgatgatgtcctcccagattaatggcaatggtggaatggtcggtgttggatctcttggaaatgatgtgaagaatgtaagtggtattcttccagtgagtgccaatacagggctaaatggtggcaatggcttggtgggtaacggcccaatgaacagtaattcaggcgttggggttggtaattatggcacaatgggtcttggtcaatccgctatgcctaatggaatcagaactgctatggtaaataattcaatcatgaatggaaggggaggaatggcgtctcttgcccgggatcaagctatgaatcatcaacaagatctgtcaaaccaactacttagtgggctaggggcagttggtggttttaataatcttcaatttgattggaaaccttctccttgagagcctttgtagatgatatgaatgttgtggttcttgacagttgctcatgcaacatgagcaatggtatttgccttcggcccctgatgatggcagaaagtatttgggttgggtagagtcatagggcgttggccactgtgctaatatatgattttatatataagaaatgaaaatttgttggctggttgtgtggctgatggggctgatttttcttgtgaatttaagtgtaactttttatattaaattttcttatgagctgtc

SEQ ID NO: 8172 - protein, 387 aa, Glycine max
  misc_feature (1)..(387): Ceres Seq. ID no. 15177956
SVPELQNNCNMFVASARQLVKALEVPLVNDLGYTKRYVRCLQISEVVNSMKDLIDYSRETGTGPMESLAKFPRRTSGSAGPRGQAQQHEEQLQQQQQQQMVAHNSNGDQNSVRAAAMQIASSNGMVSVNNSVNPASTSTTTSTIVGLLHQNSMNSRQQNSMNNASSPYGGSSVQIPSPGSSSTVPQGQPNSSPFQSPTPSSSNNPPQTSHPALTSANHTSTTNSPANISMQQQQSSISGEPDPSDAQSSVQKIIHEMMMSSQINGNGGMVGVGSLGNDVKNVSGILPVSANTGLNGGNGLVGNGPMNSNSGVGVGNYGTMGLGQSAMPNGIRTAMVNNSIMNGRGGMASLARDQAMNHQQDLSNQLLSGLGAVGGFNNLQFDWKPSP

SEQ ID NO: 8173 - protein, 377 aa, Glycine max
  misc_feature (1)..(377): Ceres Seq. ID no. 15177957
MFVASARQLVKALEVPLVNDLGYTKRYVRCLQISEVVNSMKDLIDYSRETGTGPMESLAKFPRRTSGSAGPRGQAQQHEEQLQQQQQQQMVAHNSNGDQNSVRAAAMQIASSNGMVSVNNSVNPASTSTTTSTIVGLLHQNSMNSRQQNSMNNASSPYGGSSVQIPSPGSSSTVPQGQPNSSPFQSPTPSSSNNPPQTSHPALTSANHTSTTNSPANISMQQQQSSISGEPDPSDAQSSVQKIIHEMMMSSQINGNGGMVGVGSLGNDVKNVSGILPVSANTGLNGGNGLVGNGPMNSNSGVGVGNYGTMGLGQSAMPNGIRTAMVNNSIMNGRGGMASLARDQAMNHQQDLSNQLLSGLGAVGGFNNLQFDWKPSP

SEQ ID NO: 8174 - protein, 338 aa, Glycine max
  misc_feature (1)..(338): Ceres Seq. ID no. 15177958
MKDLIDYSRETGTGPMESLAKFPRRTSGSAGPRGQAQQHEEQLQQQQQQQMVAHNSNGDQNSVRAAAMQIASSNGMVSVNNSVNPASTSTTTSTIVGLLHQNSMNSRQQNSMNNASSPYGGSSVQIPSPGSSSTVPQGQPNSSPFQSPTPSSSNNPPQTSHPALTSANHTSTTNSPANISMQQQQSSISGEPDPSDAQSSVQKIIHEMMMSSQINGNGGMVGVGSLGNDVKNVSGILPVSANTGLNGGNGLVGNGPMNSNSGVGVGNYGTMGLGQSAMPNGIRTAMVNNSIMNGRGGMASLARDQAMNHQQDLSNQLLSGLGAVGGFNNLQFDWKPSP

SEQ ID NO: 8175 - DNA, 1749 bp, Glycine max
  misc_feature (1)..(1749): Ceres Seq. ID no. 15177963
acaataacaactcgataagaacacaataaactccttcctcatttctcatttctcattcaacaccatggcaagaaaaaccaagtccattttcttggccttcttactactatgctctttctcactgggggtagtggtagtagcccaagaggaggcaatagcaaaatccgaaagtgaagcattaggggaaccagagaaaagagaaacacttgaaatcatcattggtggaggtggttcacctgctccttctccctctccccctacatattgcccacctcctccaccaaaaccactgagccggttggagaaagcaaaacgtgttcttctcaaattcaaaaccacaatcgacgaccccaattgttacacgcaaaactggagccaggacacagacgcgtgtaaattcaatggggtacgatgcgccaatttcccagacgatcagcagcgagcagtagctggacttgacctaaacggagcaaaactcgccactaaaaacggtggcaatttgcccctcacgggtctcctcgacagcatacccgagttaacattcttccacgttaactccaacaacttctccttcgtcggtggcttccccaacaacattaccaggttccgtttcttcttcgagcttgatctcagtaacaacaaagtcagtggcaagttcccaacgcaagcaattcagaacaaccagttagtcttcctggacctcaggttcaaccagctcaccgggcccattgacccgaaactcttcgagagggacctggacgtgatttttgtgaacaacaacaagttcacggggtacctcccggagaatttcgggtccacgccggcccggtacctcacgtttgcccacaacagcctctcgggctcgctccctaagagcgtgggctacgcgccgaacctcaccgaggttctcttcttgaagaaccagttcgaagggtgtctgcccttcgaaatcggttacctcaagaaggccgtagtgtttgatataagtgaaaatctcttgaccggtcccatcccgctctccttcggatgcctgaagaaaattcaatttctcaatttggcgcacaacaagctctacggctgtgttcccgacaacctttgccaaattccttctatccgcaacaatgggaatctctctttggcgaacaattatttcaacgaaattggaccttcgtgttggagtttgataaaatccaaggttttggatgtgtcaggaaactgcattccggggcttcctaaccaaaagtctcccaaagaatgctaccagttttacaaaacaaagaaaacatgtccgaacccgaattcattttactacgttccgtgcaaatcgtactgggggaggcagagcaagcccactagtccaccttctgagccagtgacttacaagactctcaaaccacatcgtctcagattgtgatcagatatcataggatagctcatattagtcccttgtgcaggcgggactttgcctttgtgttgggtttcattttttatttttctcacaacaatcctctggtcagatagaaacctctcctctgatgcgttgattcaaatcctgttcactggtttcatattattactgtggttatgtttgtatgtttttctttcatgattagctgttgttattttgtattttgtatgccccgtgaataagcgctgtcgtggagttgggcatcttgactattacaagtttggtgtcactcaaatgtaatttcccaagttgtcgaataaaattggtactatatttggacg

SEQ ID NO: 8176 - protein, 449 aa, Glycine max
  misc_feature (1)..(449): Ceres Seq. ID no. 15177964
MARKTKSIFLAFLLLCSFSLGVVVVAQEEAIAKSESEALGEPEKRETLEIIIGGGGSPAPSPSPPTYCPPPPPKPLSRLEKAKRVLLKFKTTIDDPNCYTQNWSQDTDACKFNGVRCANFPDDQQRAVAGLDLNGAKLATKNGGNLPLTGLLDSIPELTFFHVNSNNFSFVGGFPNNITRFRFFFELDLSNNKVSGKFPTQAIQNNQLVFLDLRFNQLTGPIDPKLFERDLDVIFVNNNKFTGYLPENFGSTPARYLTFAHNSLSGSLPKSVGYAPNLTEVLFLKNQFEGCLPFEIGYLKKAVVFDISENLLTGPIPLSFGCLKKIQFLNLAHNKLYGCVPDNLCQIPSIRNNGNLSLANNYFNEIGPSCWSLIKSKVLDVSGNCIPGLPNQKSPKECYQFYKTKKTCPNPNSFYYVPCKSYWGRQSKPTSPPSEPVTYKTLKPHRLRL

SEQ ID NO: 8177 - DNA, 1530 bp, Glycine max
  misc_feature (1)..(1530): Ceres Seq. ID no. 15177965
aagattttcttggacgtgttagaaaatacagtagccgttgaccaaaaccaacaaaaaaaaaaatagtattatatgaacgtgaaccagcgtcacaaagaagtttgtgagcataaagaaacatctcaatctcaaaagaagcatctcgtgtattgtctcttaaaaacaatggaattgatgtgccattgttcgagctttcttcttccgccggagaatcctaacacgacgtgttcgctttctctaaagtacgctctcgttgttctcaaccaaagcctaccgagatttgctcctctgctctgggaccacgctcaagtacgagtttgcgctgatggaggtgccaatagggtgtatgatgaaatgcctcttttcttccctcatcaacaaccttcccatgttcgcaccaggtacaagcctgatgtaattaaaggagacatggattcaatcaggacagaagtacttgacttctatgcaaagctgggaactaagataattgatgagtctcatgatcaggacaccacagatttacacaaatgtgtggcatacatacgtgacctcaccccaaatgttgatggatcagaactatgcattcttgttgctggagcacttggtgggagattcgaccatgagattggaaatattaatgtgctgtgccgattttccaacacacgaattatccttctatctgatgattgcctcattcatcttcttccaaagaatcattgtcatcaaatctttattgaatcttctgttgagggtccgcattgtggactcattcccattgggatgccttctggaagctctacatccacaggactcaaatgggatctcaatgacacagcgatgagttttggaggtttagtaagtacatccaatattgtaaaaggggaaatagttacagtacagtctgattcagatcttctttggactatttctattaagaagctcgaggttttacatggtgcatagtgcggtgatttttcagatcttcaataccaatttatatgggccctatattccagttaaaagccagagcttctgctgacctttataactttacgtttcattctttcaatttactctgaattatgggagggtggaagggaattaggaaattattctttaaattaggaagttctattcctagtaactgtgccttgaaagtcagttttcaaaaggctacttacattccttggctcagttgtattgtatgttattgttatccgtaaatgaaatagcaggaataagatgagcaagaaaaagaaggagaaaaccatgtcatgtactattgcttatgcatacagaacagttactgtcaattgaaatggttaatggattgttagttgccactctacactgcaggaccatgacgggtcaataattctggttaatatctagtatgtgattagtgatatggatttttgaattagaagaatgagttgaaatttgattatacattgtaacgggagtaattattatatgtgagacgggtttttcaatttacaagaacgagttaataaaatttgattatgcagg

SEQ ID NO: 8178 - protein, 296 aa, Glycine max
  misc_feature (1)..(296): Ceres Seq. ID no. 15177966
MNVNQRHKEVCEHKETSQSQKKHLVYCLLKTMELMCHCSSFLLPPENPNTTCSLSLKYALVVLNQSLPRFAPLLWDHAQVRVCADGGANRVYDEMPLFFPHQQPSHVRTRYKPDVIKGDMDSIRTEVLDFYAKLGTKIIDESHDQDTTDLHKCVAYIRDLTPNVDGSELCILVAGALGGRFDHEIGNINVLCRFSNTRIILLSDDCLIHLLPKNHCHQIFIESSVEGPHCGLIPIGMPSGSSTSTGLKWDLNDTAMSFGGLVSTSNIVKGEIVTVQSDSDLLWTISIKKLEVLHGA

SEQ ID NO: 8179 - protein, 265 aa, Glycine max
  misc_feature (1)..(265): Ceres Seq. ID no. 15177967
MELMCHCSSFLLPPENPNTTCSLSLKYALVVLNQSLPRFAPLLWDHAQVRVCADGGANRVYDEMPLFFPHQQPSHVRTRYKPDVIKGDMDSIRTEVLDFYAKLGTKIIDESHDQDTTDLHKCVAYIRDLTPNVDGSELCILVAGALGGRFDHEIGNINVLCRFSNTRIILLSDDCLIHLLPKNHCHQIFIESSVEGPHCGLIPIGMPSGSSTSTGLKWDLNDTAMSFGGLVSTSNIVKGEIVTVQSDSDLLWTISIKKLEVLHGA

SEQ ID NO: 8180 - protein, 262 aa, Glycine max
  misc_feature (1)..(262): Ceres Seq. ID no. 15177968
MCHCSSFLLPPENPNTTCSLSLKYALVVLNQSLPRFAPLLWDHAQVRVCADGGANRVYDEMPLFFPHQQPSHVRTRYKPDVIKGDMDSIRTEVLDFYAKLGTKIIDESHDQDTTDLHKCVAYIRDLTPNVDGSELCILVAGALGGRFDHEIGNINVLCRFSNTRIILLSDDCLIHLLPKNHCHQIFIESSVEGPHCGLIPIGMPSGSSTSTGLKWDLNDTAMSFGGLVSTSNIVKGEIVTVQSDSDLLWTISIKKLEVLHGA

SEQ ID NO: 8181 - DNA, 876 bp, Glycine max
  misc_feature (1)..(876): Ceres Seq. ID no. 15177975
taataatttgacaggcctggacagaggcatcatctattccaagagcactagtttcaattattttaagattgccaagacttaaatttgctattgtaactttgggaaaagatggctgcataatgcttgagcgatgtgtggatgatgaaggttctcacatagaagaaatggacgttgaaagctgtttgacaacattaaaagagagaaaggacgatagcacagccatgccaacctgcatagcctcgcccgttaccaaattaagagccaagggcatagaagaatctgtgtgtgggaggttatattatggggcatctgaaaagatcccaccatcagagcttatggatacaactggtgctggggatgcatttgttggagctgttttatatgcaatctgtgccaacatatcaccagagaaaatgttgccattggcttcttatgtggcagctgccaattgtagagctcttggagctcgtagaggtcttccatacagcaataatccatgcctggcatcctttactgagtagagccctaaactgttcatcaaaattttcagcgtagtatgcaagaaacaaggcttcagcatataaattatgctgttgtatcccagtttaaaattaatcatttagcccaactattttattttttggtagcaaactgtaaattgaattgtataatttcagtgtgatagatttgtaggatgatatgttgttgttgggaaaaattatgcaatttttcttcttcataatcagatttgtaaaagctaaatgaatgtagaataacaataaacacaattggtaaccaagttcagccatttttttagtatgagcacctcatcctgaagcagaaaccggatgaagtgacaatgaagaattgaagatc

SEQ ID NO: 8182 - protein, 133 aa, Glycine max
  misc_feature (1)..(133): Ceres Seq. ID no. 15177976
MLERCVDDEGSHIEEMDVESCLTTLKERKDDSTAMPTCIASPVTKLRAKGIEESVCGRLYYGASEKIPPSELMDTTGAGDAFVGAVLYAICANISPEKMLPLASYVAAANCRALGARRGLPYSNNPCLASFTE

SEQ ID NO: 8183 - protein, 118 aa, Glycine max
  misc_feature (1)..(118): Ceres Seq. ID no. 15177977
MDVESCLTTLKERKDDSTAMPTCIASPVTKLRAKGIEESVCGRLYYGASEKIPPSELMDTTGAGDAFVGAVLYAICANISPEKMLPLASYVAAANCRALGARRGLPYSNNPCLASFTE

SEQ ID NO: 8184 - protein, 99 aa, Glycine max
  misc_feature (1)..(99): Ceres Seq. ID no. 15177978
MPTCIASPVTKLRAKGIEESVCGRLYYGASEKIPPSELMDTTGAGDAFVGAVLYAICANISPEKMLPLASYVAAANCRALGARRGLPYSNNPCLASFTE

SEQ ID NO: 8185 - DNA, 1386 bp, Glycine max
  misc_feature (1)..(1386): Ceres Seq. ID no. 15177987
aatttcggtcgcaaaagtttctaataccacaaagtcgtcatttttaattggggaccgtattcgtagggttgctagtaaacttactggttcaccctctatggtgaagagttctggtgatcggtctcagaagaccgatggaagcgctgatggtttttctgggaatggacctgatttttcttttgaggaggctcagaggtcaaatatggttgccccaacagagtattcatctctggacgatttgctatcttcacttcgtttggtggctcaagaaccccttggagattacagcttcctgaatcctattgtaagcttcttctatgatttcaggaattcgatagttgtggctgatgattctgtaaaagatatattttgtaaagaaaaagttggtactaaaaggaagaaaccgctcacggctggattgcccgaaacatttgaatttgaggatatgagtgacacatattggacagacagggtcattgacaatggtagtgaagcacaaccagcgcaaccgtgtcaaccaccacaaccagcacggagaaaccggaaaaaagaccatcaacttgttcctactgagccagggaagcctgttcaagttagtcgtaggccatattccaggaaacagtattctaacaacaatcacattgaggctcctgcaaaacctcctggttatatagatgagaatgcccctgctgaacttgttatgaactttgctgagttgggttctgttccctcagaaacaaaccttaataaaatgtttaggcgttttggacctctaaaggaagcagagacagaagttgatacagtaagcagccgagcaagagtggtttttaaaaagtgtgttgatgcagaggttgcttgtagtagtgctcaaaagttcaacatatttggcccaatacttgtaaattaccagcttaattatactcctagtgcattgttcaaagcttcatctgttgccacaacacaggaccaggagatgcatcttgatctctccaattttgaggttaatataattgggagtgttgacgatgatgtggcggctaagtttggctgaatgaattgctgaagcaaaattttacctagtggctgctgaagtaggtaggtaaccagaatgttaattcatctggtcatccatttttctgttaagagatatttttggttgtaggattcctttagttgtagttctggtagttttgtaattcattttctagttttctgtatagccttgtcaactgaccctcttttgtagttgccatcattctccatccggatcattttgaattttctagtctgaacactggttctatatcaagatctttcgaattctctagtctgaacactggttctgtatcaaaatcaatagtcattcggcaattatagttaacaaag

SEQ ID NO: 8186 - protein, 349 aa, Glycine max
  misc_feature (1)..(349): Ceres Seq. ID no. 15177988
ISVAKVSNTTKSSFLIGDRIRRVASKLTGSPSMVKSSGDRSQKTDGSADGFSGNGPDFSFEEAQRSNMVAPTEYSSLDDLLSSLRLVAQEPLGDYSFLNPIVSFFYDFRNSIVVADDSVKDIFCKEKVGTKRKKPLTAGLPETFEFEDMSDTYWTDRVIDNGSEAQPAQPCQPPQPARRNRKKDHQLVPTEPGKPVQVSRRPYSRKQYSNNNHIEAPAKPPGYIDENAPAELVMNFAELGSVPSETNLNKMFRRFGPLKEAETEVDTVSSRARVVFKKCVDAEVACSSAQKFNIFGPILVNYQLNYTPSALFKASSVATTQDQEMHLDLSNFEVNIIGSVDDDVAAKFG

SEQ ID NO: 8187 - protein, 317 aa, Glycine max
  misc_feature (1)..(317): Ceres Seq. ID no. 15177989
MVKSSGDRSQKTDGSADGFSGNGPDFSFEEAQRSNMVAPTEYSSLDDLLSSLRLVAQEPLGDYSFLNPIVSFFYDFRNSIVVADDSVKDIFCKEKVGTKRKKPLTAGLPETFEFEDMSDTYWTDRVIDNGSEAQPAQPCQPPQPARRNRKKDHQLVPTEPGKPVQVSRRPYSRKQYSNNNHIEAPAKPPGYIDENAPAELVMNFAELGSVPSETNLNKMFRRFGPLKEAETEVDTVSSRARVVFKKCVDAEVACSSAQKFNIFGPILVNYQLNYTPSALFKASSVATTQDQEMHLDLSNFEVNIIGSVDDDVAAKFG

SEQ ID NO: 8188 - protein, 282 aa, Glycine max
  misc_feature (1)..(282): Ceres Seq. ID no. 15177990
MVAPTEYSSLDDLLSSLRLVAQEPLGDYSFLNPIVSFFYDFRNSIVVADDSVKDIFCKEKVGTKRKKPLTAGLPETFEFEDMSDTYWTDRVIDNGSEAQPAQPCQPPQPARRNRKKDHQLVPTEPGKPVQVSRRPYSRKQYSNNNHIEAPAKPPGYIDENAPAELVMNFAELGSVPSETNLNKMFRRFGPLKEAETEVDTVSSRARVVFKKCVDAEVACSSAQKFNIFGPILVNYQLNYTPSALFKASSVATTQDQEMHLDLSNFEVNIIGSVDDDVAAKFG

SEQ ID NO: 8189 - DNA, 1462 bp, Glycine max
  misc_feature (1)..(1462): Ceres Seq. ID no. 15178003
attttctttcagttataaatcctttggcagtgcaaacttttgaggcatgttgcatacttttgtgattttccaatatcgcggggggaattgaaatacatgaagttttagtcactgcagggtattattatttaagccgagtattgggatttccactctaatattttttataattaaaaaatgtgtagtattgtgtttctatgttcatgtttgtttgcaaagtgtccaactcccacctcttccgactgtaccatgaaaagaaatttatgaacagcactgtgacagaaagcattgacagtgcttctgcttataaaatttggaatagctaggccagaaaattggtcatcctttcacttaaatgcatgtgtcttgcaactaggtggatctgctgaagaataaattaggatttgatgaagcttttaactacaaagaagagccagacctcaatgcagctttgaaaaggtcagtatttaacaatttcctaataaatcaaccaccaacatcgtcctcgaactataccctttctcctaaatagttttttctaaagtattaaaactatttaaatagtccccgacgtgttaaatatccattagttcagtccctacattgatgtatttcagtaaagttcagggactaatttgaagggcgttttaatatttaagggactgcttagacagatttccaatacttttatgtctagttaagaaatttgatttattttaaagactattctggagaaaaggtaatactttaacaataaaattggtggtttactcatttcttgatagagaaattttattttaaattgtttattaccataaaagaagtaaagttaccgtgcctagtaacatgatcaagcaactgaaagtggatatcaacatacaaatcaggtactttccagaaggcattgacatttactttgagaatgttgggggcaagacacttgatgcagtactcccaaacatgaaatttcatggccgcatacctgtctgtggaatgatctcgcagtacaatcttactcagttcgatggtgtaacaaatttggcaaatctcatatttaagcgggttaaaatggaaggttttattgcaactgatttctatcatttatatccaaaattcttggagtttgtcctgcctcatatcagagaagggaaggttgtgtatgtggaagacattgctgagggccttgagaatggccctgcagccttggttggcctctataccggtcgcaatgttggtaaacaagtggttgttgttactcacaagtaaaattatataattatattgttattctctaagctttaattccgaattttcaattttctgttggatattgaaccttgcttttatggtttatgcagtcattcttctattttgttgatagaaattactacattagtgacattttgtgataaataaaacctctaatatatgctaatttgttacttccaaaaaaaaaaaaaag

SEQ ID NO: 8190 - protein, 139 aa, Glycine max
  misc_feature (1)..(139): Ceres Seq. ID no. 15178004
MIKQLKVDINIQIRYFPEGIDIYFENVGGKTLDAVLPNMKFHGRIPVCGMISQYNLTQFDGVTNLANLIFKRVKMEGFIATDFYHLYPKFLEFVLPHIREGKVVYVEDIAEGLENGPAALVGLYTGRNVGKQVVVVTHK

SEQ ID NO: 8191 - protein, 101 aa, Glycine max
  misc_feature (1)..(101): Ceres Seq. ID no. 15178005
MKFHGRIPVCGMISQYNLTQFDGVTNLANLIFKRVKMEGFIATDFYHLYPKFLEFVLPHIREGKVVYVEDIAEGLENGPAALVGLYTGRNVGKQVVVVTHK

SEQ ID NO: 8192 - protein, 90 aa, Glycine max
  misc_feature (1)..(90): Ceres Seq. ID no. 15178006
MISQYNLTQFDGVTNLANLIFKRVKMEGFIATDFYHLYPKFLEFVLPHIREGKVVYVEDIAEGLENGPAALVGLYTGRNVGKQVVVVTHK

SEQ ID NO: 8193 - DNA, 1217 bp, Glycine max
  misc_feature (1)..(1217): Ceres Seq. ID no. 15178042
gggaaaagggttttacattttattcgttctccggtgagaaacagaaacacacagaagacagagtgagacgcttctcacgatggagggaggagtatcctacgcgcgcatgcctcgggtcaaaatccgcgagctgaaggacgactacgccaagttcgagctccgcgacaccgacgcgagcatcgccaacgcgctgcggcgcgtgatgatcgcggaggtgccgacggtcgccatcgacctcgtggagatcgaggtcaactcctcggtgctcaatgacgagtttatcgctcacaggctgggcctcatccccctcactagcgagcgcgccatgtccatgcgcttctcacgtgactgcgacgcgtgcgacggtgacggacagtgcgagttttgctccgtcgagtttcatcttagggttaagtgcatgactgatcagaccctcgatgttacgagcaaggacctctacagttctgaccctactgtcagtcccgttgatttctctgacccctctgccactgactccgacaacaacagggggattatcattgtgaagttgcggcgcggacaagagctgaagctgagagcgatagctaggaaggggattgggaaggatcatgctaaatggtcacctgctgcaactgtcactttcatgtatgaaccggagattcatataaatgaggatttgatggaaaccttgactctggaagagaaaagagaatgggttgacagtagtccaacccgtgtctttgaaattgatccagtgacacaacaggtgatggtggttgatgctgaggcatacacatatgatgatgaggtgcttaagaaagcagaagctatgggcaagcctgggcttgtagaaatcattgcgaggcaggatagcttcatattcactgtggagtctactggagcggttaaagcttctcaattggttctaaatgccatagaaattctcaagcagaagctggatgctgtgaggctatctgaagatacagtggaggctgatgatcagtttggcgagcttggtgcacatatgcgaggaggttgattaatttgttagaaggatatcagacttgtttcccacaacttgtttcccggaacttgtttcttacttgtctttaactgaatacctgcagaacgtattaacttgttgagccaaggatgctaattagtaattactgtgattaccatttgaagatagatagttatctttcacattttatttc

SEQ ID NO: 8194 - protein, 319 aa, Glycine max
  misc_feature (1)..(319): Ceres Seq. ID no. 15178043
MEGGVSYARMPRVKIRELKDDYAKFELRDTDASIANALRRVMIAEVPTVAIDLVEIEVNSSVLNDEFIAHRLGLIPLTSERAMSMRFSRDCDACDGDGQCEFCSVEFHLRVKCMTDQTLDVTSKDLYSSDPTVSPVDFSDPSATDSDNNRGIIIVKLRRGQELKLRAIARKGIGKDHAKWSPAATVTFMYEPEIHINEDLMETLTLEEKREWVDSSPTRVFEIDPVTQQVMVVDAEAYTYDDEVLKKAEAMGKPGLVEIIARQDSFIFTVESTGAVKASQLVLNAIEILKQKLDAVRLSEDTVEADDQFGELGAHMRGG

SEQ ID NO: 8195 - protein, 310 aa, Glycine max
  misc_feature (1)..(310): Ceres Seq. ID no. 15178044
MPRVKIRELKDDYAKFELRDTDASIANALRRVMIAEVPTVAIDLVEIEVNSSVLNDEFIAHRLGLIPLTSERAMSMRFSRDCDACDGDGQCEFCSVEFHLRVKCMTDQTLDVTSKDLYSSDPTVSPVDFSDPSATDSDNNRGIIIVKLRRGQELKLRAIARKGIGKDHAKWSPAATVTFMYEPEIHINEDLMETLTLEEKREWVDSSPTRVFEIDPVTQQVMVVDAEAYTYDDEVLKKAEAMGKPGLVEIIARQDSFIFTVESTGAVKASQLVLNAIEILKQKLDAVRLSEDTVEADDQFGELGAHMRGG

SEQ ID NO: 8196 - protein, 278 aa, Glycine max
  misc_feature (1)..(278): Ceres Seq. ID no. 15178045
MIAEVPTVAIDLVEIEVNSSVLNDEFIAHRLGLIPLTSERAMSMRFSRDCDACDGDGQCEFCSVEFHLRVKCMTDQTLDVTSKDLYSSDPTVSPVDFSDPSATDSDNNRGIIIVKLRRGQELKLRAIARKGIGKDHAKWSPAATVTFMYEPEIHINEDLMETLTLEEKREWVDSSPTRVFEIDPVTQQVMVVDAEAYTYDDEVLKKAEAMGKPGLVEIIARQDSFIFTVESTGAVKASQLVLNAIEILKQKLDAVRLSEDTVEADDQFGELGAHMRGG

SEQ ID NO: 8197 - DNA, 1438 bp, Glycine max
  misc_feature (1)..(1438): Ceres Seq. ID no. 15178046
aaaactgaaggctgtgctttgctctgcttctgaatgaagaaaatgaagacacatagtcgttaccaggacaatttggattctgattcaaagagtaagagatcatgcttctgtggaatcgttccagcggtttctttactttgtgttgtcttgcttttctcgactttattctttgcacaacgctacaacgagaaactattaaggtggaaaatgaacatcaagaaattgaaaaatgacaattgcaagaaccagtgcaggactggtggaagtcatgcattacctgaaggcataatctccaacacttctgatttggaaatgcggcatttgtgggatcttcctatgactaagacaatagagaataaggaaaatgcatcaaccaatttgtttgcaatggcagttgggataaagcagaaagatcttgtgaacaaattggtcaaaaagtttctatcaagcaatttcgttgtaatgctcttccactacgatggtattgttgacgaatggaatgactttgaatggaataatcatgtcattcatgtggctgtagccaatcaaagtaaatggtggtttgcaaagcgtttcttacaccctgacatagttgcagaatatggttatattttcctatgggatgaggatcttggagttgaacacttccacccggataggtatgtttctattataaaaagtgaaggactggaaatatcacaaccagcacttgatagtaacaaatcagaggtacatcatcagattactgcacgtgggaggaggtcgaatgtgcacagaaggatttacaaaactggtggtagtggcaaacgttgtgatgaaagtagcactgctcctccttgcacagggtgggttgaaatgatggcctttgttttctcaagagctgcatggcgttgcgtttggtatatgatccagaatgacttgatccatgcatggggtctagatatgcagctaggctactgtgctcagggtgatcgaacaaaaaatgttggtgttgtggatgctgaatacatagtccactacggtcatcctactcttggaggcttagatgtgaatgaggtttcatctcggacaaaggatcatagagttgatgtgaggagactgtcttaccgtgaattacaagtttttagaaaacgatggcagaaggcagttgaggaggatgattgttgggtcgatccatttcaataacaaatactgatagtcaaaattgtgtatagattttatgaaaatacacaaatatgtaaggagaagcaaattcaattggcagataaaacaaatgttgatcatggagaggggagtagttaaaaaagcctagaggagtttttttagcatctcaagggcaagcatgacttcatggggaaaaaattcttctcaattgagtttggtgcatttttgtttaacctttcattttttaatagtttccaaatggaattgtttattc

SEQ ID NO: 8198 - protein, 383 aa, Glycine max
  misc_feature (1)..(383): Ceres Seq. ID no. 15178047
MKKMKTHSRYQDNLDSDSKSKRSCFCGIVPAVSLLCVVLLFSTLFFAQRYNEKLLRWKMNIKKLKNDNCKNQCRTGGSHALPEGIISNTSDLEMRHLWDLPMTKTIENKENASTNLFAMAVGIKQKDLVNKLVKKFLSSNFVVMLFHYDGIVDEWNDFEWNNHVIHVAVANQSKWWFAKRFLHPDIVAEYGYIFLWDEDLGVEHFHPDRYVSIIKSEGLEISQPALDSNKSEVHHQITARGRRSNVHRRIYKTGGSGKRCDESSTAPPCTGWVEMMAFVFSRAAWRCVWYMIQNDLIHAWGLDMQLGYCAQGDRTKNVGVVDAEYIVHYGHPTLGGLDVNEVSSRTKDHRVDVRRLSYRELQVFRKRWQKAVEEDDCWVDPFQ

SEQ ID NO: 8199 - protein, 380 aa, Glycine max
  misc_feature (1)..(380): Ceres Seq. ID no. 15178048
MKTHSRYQDNLDSDSKSKRSCFCGIVPAVSLLCVVLLFSTLFFAQRYNEKLLRWKMNIKKLKNDNCKNQCRTGGSHALPEGIISNTSDLEMRHLWDLPMTKTIENKENASTNLFAMAVGIKQKDLVNKLVKKFLSSNFVVMLFHYDGIVDEWNDFEWNNHVIHVAVANQSKWWFAKRFLHPDIVAEYGYIFLWDEDLGVEHFHPDRYVSIIKSEGLEISQPALDSNKSEVHHQITARGRRSNVHRRIYKTGGSGKRCDESSTAPPCTGWVEMMAFVFSRAAWRCVWYMIQNDLIHAWGLDMQLGYCAQGDRTKNVGVVDAEYIVHYGHPTLGGLDVNEVSSRTKDHRVDVRRLSYRELQVFRKRWQKAVEEDDCWVDPFQ

SEQ ID NO: 8200 - protein, 325 aa, Glycine max
  misc_feature (1)..(325): Ceres Seq. ID no. 15178049
MNIKKLKNDNCKNQCRTGGSHALPEGIISNTSDLEMRHLWDLPMTKTIENKENASTNLFAMAVGIKQKDLVNKLVKKFLSSNFVVMLFHYDGIVDEWNDFEWNNHVIHVAVANQSKWWFAKRFLHPDIVAEYGYIFLWDEDLGVEHFHPDRYVSIIKSEGLEISQPALDSNKSEVHHQITARGRRSNVHRRIYKTGGSGKRCDESSTAPPCTGWVEMMAFVFSRAAWRCVWYMIQNDLIHAWGLDMQLGYCAQGDRTKNVGVVDAEYIVHYGHPTLGGLDVNEVSSRTKDHRVDVRRLSYRELQVFRKRWQKAVEEDDCWVDPFQ

SEQ ID NO: 8201 - DNA, 721 bp, Glycine max
  misc_feature (1)..(721): Ceres Seq. ID no. 15178067
atttttcttcttagcatacaatgaatcacaaggcacctagtttttttctggggatggatgtgaagagaatcatgggtggtgatagagatgggaacaccaattgggtgattaaggaagatggtgaagaagatagcaatgattcatcatccattggactcaactcaatggactctatgtgctcgtcttcttcatcagagctgagcgaggacgcttcatcttcaacatcatcaacacattcaaatggacctttgtttgaattatcagacctcatgagccacctccctatgaagagagggctatctatgttctatcaagggaaggcccagtctttcacttctttagcaagggtggagagcatagaagatcttcccaagaaaggcataccttatagaaagagaacgaaatcatgcaagagttttgggggaggcttggatagtcagagaatattgtgctgtccaaaggctacaatatcaaagaaaacttcaagagtgtcttttgcatctgtactaagcaaaagaggaagtttcctaggagggtctagatcttccattgcagttcaacacaagaacttctgaaattcagactgttaaaagttattgcttatttcatgtacaaaatccggaaaattttgagtcctgcagcttcagtttattgagtcaaagccatatgatcaattagctacatatttgagattcattattcgtttgttttccatggtggt

SEQ ID NO: 8202 - protein, 184 aa, Glycine max
  misc_feature (1)..(184): Ceres Seq. ID no. 15178068
MNHKAPSFFLGMDVKRIMGGDRDGNTNWVIKEDGEEDSNDSSSIGLNSMDSMCSSSSSELSEDASSSTSSTHSNGPLFELSDLMSHLPMKRGLSMFYQGKAQSFTSLARVESIEDLPKKGIPYRKRTKSCKSFGGGLDSQRILCCPKATISKKTSRVSFASVLSKRGSFLGGSRSSIAVQHKNF

SEQ ID NO: 8203 - protein, 173 aa, Glycine max
  misc_feature (1)..(173): Ceres Seq. ID no. 15178069
MDVKRIMGGDRDGNTNWVIKEDGEEDSNDSSSIGLNSMDSMCSSSSSELSEDASSSTSSTHSNGPLFELSDLMSHLPMKRGLSMFYQGKAQSFTSLARVESIEDLPKKGIPYRKRTKSCKSFGGGLDSQRILCCPKATISKKTSRVSFASVLSKRGSFLGGSRSSIAVQHKNF

SEQ ID NO: 8204 - protein, 167 aa, Glycine max
  misc_feature (1)..(167): Ceres Seq. ID no. 15178070
MGGDRDGNTNWVIKEDGEEDSNDSSSIGLNSMDSMCSSSSSELSEDASSSTSSTHSNGPLFELSDLMSHLPMKRGLSMFYQGKAQSFTSLARVESIEDLPKKGIPYRKRTKSCKSFGGGLDSQRILCCPKATISKKTSRVSFASVLSKRGSFLGGSRSSIAVQHKNF

SEQ ID NO: 8205 - DNA, 1274 bp, Glycine max
  misc_feature (1)..(1274): Ceres Seq. ID no. 15178096
atttctttttctggccatcatcgtatcttttccaaaacaccaaaaatgcctgcgacaacagagaacaacaaccaaggctcattcctgggtcgaataagcatccgcagaaaccaagtgatgtccatggacggaagccacgaccaagagatggaagacctggagcttttccagaagcacatcggagaccgcttctcggagctcttatcctccacctccgaagactcctcctcctcctcctcctcctcctccggcgacgcgcttctctccattgcgtggctccgcaggctcctcgacgagttcctctgctgcgaggccgagttcaaagccgtcgtcttaatgggccgcgacccttcccagatcacgaagccaccgctcgacaagctcctcccggatctcctcgaccgcggcgtcaagtccctcgacgtctgcaatgccgtcaccctcggcctcgacgccgtcaagaacctccagcgcctcgccgagatcgccgtcgcggccctcgaacaaacccccctcggtgacggccaggtccgccgcgccaagaaggcgctctccgccctcgtagccgccatgctgaacgacgacagcaacgccgccgccaagggaaccgaacgcacccgctccttcgggcgccgcgccggaaacaccaacgccactaaatacaagtcgctgtcgtggagcatggccaagaactggtccgcggcgaagcaaatccacgcgatgatgtcgaatctgacggcgccacgtggcgcggagtcctcgggattggcgcaacccatgtacatgatgagcaccgtgttggtgttcgtgatgtggactctggttgcggcggttccttgccaggaaaggaatgggctagggacccattttcctctgccgaggcaattgggctgggcccagcccatgatcggcctgcaggagaagattgcggaggagtggaagaagaaagagaagaaagggaacgttgggttgttagaggagatgcagaggatggacaagctgggtcagtccctgattgaattcgcagactcgtttcagttcccaaccgaaacggagcgtatggatgaggtgaagaagcacgtcgaggaattgggggacatttgtaaaaaaatggaggaaggcttggaacctttacagcagcagattagagaggtctttcacagggtcgtaaggagcaggactgagtttctccttgccttggaccaagctgccaagtccactacacccgctctgtaaataaccacaatctacatcatcatccttttaggtttcac

SEQ ID NO: 8206 - protein, 411 aa, Glycine max
  misc_feature (1)..(411): Ceres Seq. ID no. 15178097
ISFSGHHRIFSKTPKMPATTENNNQGSFLGRISIRRNQVMSMDGSHDQEMEDLELFQKHIGDRFSELLSSTSEDSSSSSSSSSGDALLSIAWLRRLLDEFLCCEAEFKAVVLMGRDPSQITKPPLDKLLPDLLDRGVKSLDVCNAVTLGLDAVKNLQRLAEIAVAALEQTPLGDGQVRRAKKALSALVAAMLNDDSNAAAKGTERTRSFGRRAGNTNATKYKSLSWSMAKNWSAAKQIHAMMSNLTAPRGAESSGLAQPMYMMSTVLVFVMWTLVAAVPCQERNGLGTHFPLPRQLGWAQPMIGLQEKIAEEWKKKEKKGNVGLLEEMQRMDKLGQSLIEFADSFQFPTETERMDEVKKHVEELGDICKKMEEGLEPLQQQIREVFHRVVRSRTEFLLALDQAAKSTTPAL

SEQ ID NO: 8207 - protein, 396 aa, Glycine max
  misc_feature (1)..(396): Ceres Seq. ID no. 15178098
MPATTENNNQGSFLGRISIRRNQVMSMDGSHDQEMEDLELFQKHIGDRFSELLSSTSEDSSSSSSSSSGDALLSIAWLRRLLDEFLCCEAEFKAVVLMGRDPSQITKPPLDKLLPDLLDRGVKSLDVCNAVTLGLDAVKNLQRLAEIAVAALEQTPLGDGQVRRAKKALSALVAAMLNDDSNAAAKGTERTRSFGRRAGNTNATKYKSLSWSMAKNWSAAKQIHAMMSNLTAPRGAESSGLAQPMYMMSTVLVFVMWTLVAAVPCQERNGLGTHFPLPRQLGWAQPMIGLQEKIAEEWKKKEKKGNVGLLEEMQRMDKLGQSLIEFADSFQFPTETERMDEVKKHVEELGDICKKMEEGLEPLQQQIREVFHRVVRSRTEFLLALDQAAKSTTPAL

SEQ ID NO: 8208 - protein, 372 aa, Glycine max
  misc_feature (1)..(372): Ceres Seq. ID no. 15178099
MSMDGSHDQEMEDLELFQKHIGDRFSELLSSTSEDSSSSSSSSSGDALLSIAWLRRLLDEFLCCEAEFKAVVLMGRDPSQITKPPLDKLLPDLLDRGVKSLDVCNAVTLGLDAVKNLQRLAEIAVAALEQTPLGDGQVRRAKKALSALVAAMLNDDSNAAAKGTERTRSFGRRAGNTNATKYKSLSWSMAKNWSAAKQIHAMMSNLTAPRGAESSGLAQPMYMMSTVLVFVMWTLVAAVPCQERNGLGTHFPLPRQLGWAQPMIGLQEKIAEEWKKKEKKGNVGLLEEMQRMDKLGQSLIEFADSFQFPTETERMDEVKKHVEELGDICKKMEEGLEPLQQQIREVFHRVVRSRTEFLLALDQAAKSTTPAL

SEQ ID NO: 8209 - DNA, 873 bp, Glycine max
  misc_feature (1)..(873): Ceres Seq. ID no. 15178123
agattaacgttttcttcattcagtcatactaccgccctctgcagcaccagactgcatcacgcatggcagctccggcggcgcagccgccgccaaagaccgtcctgcgggtggcggcgatctccggctcgctgcgcagggcgtcggccaacaccggcctcatccgcgccgctgcggagatttgcagggagtccatcccgggcctgcacatcgaccacgtcgacatctcggagctgccgctgctcaacaccgacctcgaggccagcggccggttcccgccggccgtcgaggcgttccgcgacaaagtccgcgcggccgattgcttcctcttcgcctcgcccgagtacaactactccatttcagggcctctgaagaacgcgctggactggggatcacggccgcccaactgctgggccgaccgagccgcggcgatgctgagcgcgtcgggcggctccggcggcagccggtcgcagtaccacatccggcaggtcggggtgtttcttgacatccacttcatcaacaggccggagctcttcaccaaggcacacctgcccccgagaaagttcgacgcggacggcaacctcatcgactcggagaccaaggagcaggtcaggaagatgctcctctcgctgcaagccttcgcactcaagctccagggtgcagactctgtctgaacaggggaactgatgcctgaatttgtttcttcagacgaacggtggtgctctgctcattagatggactgagcagatcgtcacaaactccaaatgcgaaagccatatactggttgatgctccatgatatctggaataattcttcatctgcgactgaacattccggtggcacagtaatgcaaatctatttttattatcttgcccc

SEQ ID NO: 8210 - protein, 222 aa, Glycine max
  misc_feature (1)..(222): Ceres Seq. ID no. 15178124
INVFFIQSYYRPLQHQTASRMAAPAAQPPPKTVLRVAAISGSLRRASANTGLIRAAAEICRESIPGLHIDHVDISELPLLNTDLEASGRFPPAVEAFRDKVRAADCFLFASPEYNYSISGPLKNALDWGSRPPNCWADRAAAMLSASGGSGGSRSQYHIRQVGVFLDIHFINRPELFTKAHLPPRKFDADGNLIDSETKEQVRKMLLSLQAFALKLQGADSV

SEQ ID NO: 8211 - protein, 202 aa, Glycine max
  misc_feature (1)..(202): Ceres Seq. ID no. 15178125
MAAPAAQPPPKTVLRVAAISGSLRRASANTGLIRAAAEICRESIPGLHIDHVDISELPLLNTDLEASGRFPPAVEAFRDKVRAADCFLFASPEYNYSISGPLKNALDWGSRPPNCWADRAAAMLSASGGSGGSRSQYHIRQVGVFLDIHFINRPELFTKAHLPPRKFDADGNLIDSETKEQVRKMLLSLQAFALKLQGADSV

SEQ ID NO: 8212 - protein, 122 aa, Glycine max
  misc_feature (1)..(122): Ceres Seq. ID no. 15178126
RLTFSSFSHTTALCSTRLHHAWQLRRRSRRQRPSCGWRRSPARCAGRRPTPASSAPLRRFAGSPSRACTSTTSTSRSCRCSTPTSRPAAGSRRPSRRSATKSARPIASSSPRPSTTTPFQGL

SEQ ID NO: 8213 - DNA, 1632 bp, Glycine max
  misc_feature (1)..(1632): Ceres Seq. ID no. 15178169
tttttttctgtgggaagaagaaaatgctggttcggaggagggtgatgagttggagaagggtggcgaaggcccttcaggctctggtagctcatgtcttacttttctccttcactatttcccttgctctcaagcttgaccatgtcattcgtcactcatggtggaaggtattttttcctctatgggtttttcatgctgtggtagcacgaggcaggttttccttgcccgctccttcgatgcctcatgatcgccgatgggctccttttcattcactcgtagcaactcctctacttgttgcatttgagctacttctttgtatgcatctcgggagcagttatgtgatgaatttaagaattgtcttcatgcccctgatatttcttgaaatggcgattttgtttgataatgtcaggatgtgtagggctttgatgcctggagatgatgaaaatttgaccgacgaagcagtatgggaaactcttccgcacttctgggtttcaatatccatggtcttctttattgctgccacagtgttcacccttctaaagatatgtggtgatgttgcagctctagggtggtgggacttgtttattaacttcggcattgcacagtgctttgcgtttcttgtttgtacaaagtggcacaatccaactattcatggaggctgtcatattacagaaccgtgttcatcatcaaataccataagatacctagacttgaggacaggaggcttagttgtttacacagatgaagatagacagcaaaatgggttctgcaatctgcaggatatcggcagccatattatgaaaattccattcattggtttccaaatacttctttttatgcatttagagggaacaccatccagtgcaaaaaatctgccacactgggtcattatttccccactatttttgttgcaaggagctggggttttatttgcagcttatagattaatagagaagatagttcttttactctacattggagatattcctgaaagatactcagctatagcatcaaaatcccgtgagtgctttgggttctttcgacgtgggtcaaggttgcttggttggtggtcaatagatgaaggaagtagagaggaagaagctagacttttttgtgctgggagtcctgggtataatactttcacccctgagacggtgaagaaaatgcctagaacagatctggttgaggagatttggagactacaagctgcactgggtgagcagacacacgttacaaaatttagccaggaggagtatgaaagacttcaaaatgagaagatcttatgcagaatttgctttgaggagcagatcaacgtggtcctacttccctgcaggcatcacattctttgtagcacttgctgcgaaaaatgtaaaaggtgccctgtctgccgtggatccattgaagaaaggatgcctgtatatgatgtatagaccgagttcaatgaagatgtataggtatcttactgatcatccagcttgtgattttagatgaggcaagcgctgagaattatcaatttctcttctcatagatatgatgaacatcagaagttgtatagaattttaaacgtgttactccccctccctcctaatttttcttccatagtgcatttttgcaattctgaagggattgccaatg

SEQ ID NO: 8214 - protein, 474 aa, Glycine max
  misc_feature (1)..(474): Ceres Seq. ID no. 15178170
FFCGKKKMLVRRRVMSWRRVAKALQALVAHVLLFSFTISLALKLDHVIRHSWWKVFFPLWVFHAVVARGRFSLPAPSMPHDRRWAPFHSLVATPLLVAFELLLCMHLGSSYVMNLRIVFMPLIFLEMAILFDNVRMCRALMPGDDENLTDEAVWETLPHFWVSISMVFFIAATVFTLLKICGDVAALGWWDLFINFGIAQCFAFLVCTKWHNPTIHGGCHITEPCSSSNTIRYLDLRTGGLVVYTDEDRQQNGFCNLQDIGSHIMKIPFIGFQILLFMHLEGTPSSAKNLPHWVIISPLFLLQGAGVLFAAYRLIEKIVLLLYIGDIPERYSAIASKSRECFGFFRRGSRLLGWWSIDEGSREEEARLFCAGSPGYNTFTPETVKKMPRTDLVEEIWRLQAALGEQTHVTKFSQEEYERLQNEKILCRICFEEQINVVLLPCRHHILCSTCCEKCKRCPVCRGSIEERMPVYDV

SEQ ID NO: 8215 - protein, 467 aa, Glycine max
  misc_feature (1)..(467): Ceres Seq. ID no. 15178171
MLVRRRVMSWRRVAKALQALVAHVLLFSFTISLALKLDHVIRHSWWKVFFPLWVFHAVVARGRFSLPAPSMPHDRRWAPFHSLVATPLLVAFELLLCMHLGSSYVMNLRIVFMPLIFLEMAILFDNVRMCRALMPGDDENLTDEAVWETLPHFWVSISMVFFIAATVFTLLKICGDVAALGWWDLFINFGIAQCFAFLVCTKWHNPTIHGGCHITEPCSSSNTIRYLDLRTGGLVVYTDEDRQQNGFCNLQDIGSHIMKIPFIGFQILLFMHLEGTPSSAKNLPHWVIISPLFLLQGAGVLFAAYRLIEKIVLLLYIGDIPERYSAIASKSRECFGFFRRGSRLLGWWSIDEGSREEEARLFCAGSPGYNTFTPETVKKMPRTDLVEEIWRLQAALGEQTHVTKFSQEEYERLQNEKILCRICFEEQINVVLLPCRHHILCSTCCEKCKRCPVCRGSIEERMPVYDV

SEQ ID NO: 8216 - protein, 460 aa, Glycine max
  misc_feature (1)..(460): Ceres Seq. ID no. 15178172
MSWRRVAKALQALVAHVLLFSFTISLALKLDHVIRHSWWKVFFPLWVFHAVVARGRFSLPAPSMPHDRRWAPFHSLVATPLLVAFELLLCMHLGSSYVMNLRIVFMPLIFLEMAILFDNVRMCRALMPGDDENLTDEAVWETLPHFWVSISMVFFIAATVFTLLKICGDVAALGWWDLFINFGIAQCFAFLVCTKWHNPTIHGGCHITEPCSSSNTIRYLDLRTGGLVVYTDEDRQQNGFCNLQDIGSHIMKIPFIGFQILLFMHLEGTPSSAKNLPHWVIISPLFLLQGAGVLFAAYRLIEKIVLLLYIGDIPERYSAIASKSRECFGFFRRGSRLLGWWSIDEGSREEEARLFCAGSPGYNTFTPETVKKMPRTDLVEEIWRLQAALGEQTHVTKFSQEEYERLQNEKILCRICFEEQINVVLLPCRHHILCSTCCEKCKRCPVCRGSIEERMPVYDV

SEQ ID NO: 8217 - DNA, 1606 bp, Glycine max
  misc_feature (1)..(1606): Ceres Seq. ID no. 15178216
aattcacactcaaggacaaaaacggacgtgataacaagatcaccgtcatgctcaagtacattcccgtaaagatgcgtcttgatcccagcgaatcattcaacaaccaaggtacattgcgagtagatgtgcttgatgcggcagatcttccagctgcggaccgtaacggcttctcggatccttactgcaagttcatgctcaacgataaggaggtgtacaagaccaagacacaaaagaagactctccacccagcatggaacgagtactttgaggtacctgtacgaagtcgaacagcggctgactttgtcgtcaatgtctacgattgggactttggcgacaaggcagacttccttggcaagtcatccatcaacttggagattctggagcctttccagcagcaagaggtcacgcttgctcttgatggcaagtcaggcgccatccgacttcgaatgttgttcaagccagattacgtcgtacgatcccgtcaaggctcgagcacattctctggcacctttgctgttccaggcaaggtcatcggtgcgcccgtcaagggcgttggtaagggcgccgcatttgttggtggtaacgtggtccgcgcaggcactttccttggccgtggtttcaagcgtagaaagtcgcgcggcgaagcccctgaagaggagcttgaacgaccaagcactgcagaacgaccctccgcagatacgcccatgatctctgtcgaaggcgagccgaatacacctactaaggatagtgcgaaccacaacagacaccgcagctggggcgctcagagtttccacagccggtttggcgatggcggctctggaggtgccgagcaaggcacagccaacatcaccgttctcagcgctgatggcttccctgctaacaccaacctacgtgtacacatccagctcggcaagaaggaaattcacaaaaccgatcacattaaggcaccccaaggttctgtatcctttgatcccagcgaagagagcttcaaagcatcttgtaccgccgatgccttcttcaggctcgttgtcaaagaccatagcaggttcggtggcgacaaagaactcggtgaagctcaatttaccatctcagaccagggtggtggtgccgagcagaacattggtgtaggcaaaggcatggtatctatacgcagcagcttccagcctattgatgcaggcagccagcaggatagtgtcagtccacggccgaagacgtcggagagaaggggattgctaaggagggatcgaagtactacgccaaacccccctgcttagaaagctttaaatcctttacaccggctacgaaaaaatgggagcaaggttagttttgccgcaagtggaatgatgggtcgccagcagcaggaggcctctctcaatgaggagagaactggcgcgttgagggattggattgaggatgtcgagaggggtagacggtcttttgcactctgaggtttggaatgggtctggcaaaggaaaagagctgcatcggctagtggggtttctttgcgtccactttctctctattgtcctacgtccgacatagtcgactttcttcattcctcttctttctgactgtaattcaataccaatattatctcattgcctac

SEQ ID NO: 8218 - protein, 423 aa, Glycine max
  misc_feature (1)..(423): Ceres Seq. ID no. 15178217
FTLKDKNGRDNKITVMLKYIPVKMRLDPSESFNNQGTLRVDVLDAADLPAADRNGFSDPYCKFMLNDKEVYKTKTQKKTLHPAWNEYFEVPVRSRTAADFVVNVYDWDFGDKADFLGKSSINLEILEPFQQQEVTLALDGKSGAIRLRMLFKPDYVVRSRQGSSTFSGTFAVPGKVIGAPVKGVGKGAAFVGGNVVRAGTFLGRGFKRRKSRGEAPEEELERPSTAERPSADTPMISVEGEPNTPTKDSANHNRHRSWGAQSFHSRFGDGGSGGAEQGTANITVLSADGFPANTNLRVHIQLGKKEIHKTDHIKAPQGSVSFDPSEESFKASCTADAFFRLVVKDHSRFGGDKELGEAQFTISDQGGGAEQNIGVGKGMVSIRSSFQPIDAGSQQDSVSPRPKTSERRGLLRRDRSTTPNPPA

SEQ ID NO: 8219 - protein, 408 aa, Glycine max
  misc_feature (1)..(408): Ceres Seq. ID no. 15178218
MLKYIPVKMRLDPSESFNNQGTLRVDVLDAADLPAADRNGFSDPYCKFMLNDKEVYKTKTQKKTLHPAWNEYFEVPVRSRTAADFVVNVYDWDFGDKADFLGKSSINLEILEPFQQQEVTLALDGKSGAIRLRMLFKPDYVVRSRQGSSTFSGTFAVPGKVIGAPVKGVGKGAAFVGGNVVRAGTFLGRGFKRRKSRGEAPEEELERPSTAERPSADTPMISVEGEPNTPTKDSANHNRHRSWGAQSFHSRFGDGGSGGAEQGTANITVLSADGFPANTNLRVHIQLGKKEIHKTDHIKAPQGSVSFDPSEESFKASCTADAFFRLVVKDHSRFGGDKELGEAQFTISDQGGGAEQNIGVGKGMVSIRSSFQPIDAGSQQDSVSPRPKTSERRGLLRRDRSTTPNPPA

SEQ ID NO: 8220 - protein, 400 aa, Glycine max
  misc_feature (1)..(400): Ceres Seq. ID no. 15178219
MRLDPSESFNNQGTLRVDVLDAADLPAADRNGFSDPYCKFMLNDKEVYKTKTQKKTLHPAWNEYFEVPVRSRTAADFVVNVYDWDFGDKADFLGKSSINLEILEPFQQQEVTLALDGKSGAIRLRMLFKPDYVVRSRQGSSTFSGTFAVPGKVIGAPVKGVGKGAAFVGGNVVRAGTFLGRGFKRRKSRGEAPEEELERPSTAERPSADTPMISVEGEPNTPTKDSANHNRHRSWGAQSFHSRFGDGGSGGAEQGTANITVLSADGFPANTNLRVHIQLGKKEIHKTDHIKAPQGSVSFDPSEESFKASCTADAFFRLVVKDHSRFGGDKELGEAQFTISDQGGGAEQNIGVGKGMVSIRSSFQPIDAGSQQDSVSPRPKTSERRGLLRRDRSTTPNPPA

SEQ ID NO: 8221 - DNA, 1226 bp, Glycine max
  misc_feature (1)..(1226): Ceres Seq. ID no. 15178228
agtaaagaaaaaaaaagaagagaaaaccctattcactctgaaagtggcgaagatgagtttgggaaccgcggaggaggaatcgggttccgaaatccacatcccggcggaaatcgactggcacatgctggacaagtcaaaattcttcttcctgggtgcggccttattctccggcgtctcatgcgcactctatcccatggtggtgttgaagacgcggcaacaagtttcctcctcacgtttctcctgcctcaacatctcctgcgccattctccgccacgagggattccgcggcttctacaagggcttccccacctccctcatgggcaccatccccgcgcgtgccctctacatggcctccctcgagttcaccaagaccaacgttggcaccgctttcgtccaattcggcttctccgaaacctccgccgttgcggctgccaacgccgccgcgggcgtcacctccgccatggcggcgcagctcgtgtggacccccatcgacgtcgtgagtcagcggctcatggttcaggggagtggtgggagcaaaaccgtgctcgccaatctcaattctgaaaattacagaaacgggtttgatgcttttaggaaaattctgtgtgccgatggagcgagagggttttatagagggtttgggatttctatattgacttatgcgccttcaaatgctgtttggtggacttcttattctatggttcatagactcatttggggtgcttttggttcttacttggggaataataatttggggggagggtttaggcctgattcgaaggcaatggtggcggttcaagggttgagtgcggttatggcaagtggggtatctgcaattgtgacaatgccgcttgataccattaaaacgaggttgcaggtgttggatcttgaagagaatgggagaagaaggcctttgacttttgttcagacggtgaggaatttggtgaaggaaggtggtttggttgcttgttacagaggattgggtcccagatgggcttccatgtccatgtctgccacaactatgattactacatatgaatttttgaaacgaatgtctaccaagagtcaagaggatttcacttcatcataggccaggcagtgaaacattgttaggaattaggagcaacaatcaacttgtttctttgcttggatttttctctgtcagttgtactagtctagtctacctcatcggacactaaatacaatatgatgatgagagattgtac

SEQ ID NO: 8222 - protein, 362 aa, Glycine max
  misc_feature (1)..(362): Ceres Seq. ID no. 15178229
VKKKKEEKTLFTLKVAKMSLGTAEEESGSEIHIPAEIDWHMLDKSKFFFLGAALFSGVSCALYPMVVLKTRQQVSSSRFSCLNISCAILRHEGFRGFYKGFPTSLMGTIPARALYMASLEFTKTNVGTAFVQFGFSETSAVAAANAAAGVTSAMAAQLVWTPIDVVSQRLMVQGSGGSKTVLANLNSENYRNGFDAFRKILCADGARGFYRGFGISILTYAPSNAVWWTSYSMVHRLIWGAFGSYLGNNNLGGGFRPDSKAMVAVQGLSAVMASGVSAIVTMPLDTIKTRLQVLDLEENGRRRPLTFVQTVRNLVKEGGLVACYRGLGPRWASMSMSATTMITTYEFLKRMSTKSQEDFTSS

SEQ ID NO: 8223 - protein, 345 aa, Glycine max
  misc_feature (1)..(345): Ceres Seq. ID no. 15178230
MSLGTAEEESGSEIHIPAEIDWHMLDKSKFFFLGAALFSGVSCALYPMVVLKTRQQVSSSRFSCLNISCAILRHEGFRGFYKGFPTSLMGTIPARALYMASLEFTKTNVGTAFVQFGFSETSAVAAANAAAGVTSAMAAQLVWTPIDVVSQRLMVQGSGGSKTVLANLNSENYRNGFDAFRKILCADGARGFYRGFGISILTYAPSNAVWWTSYSMVHRLIWGAFGSYLGNNNLGGGFRPDSKAMVAVQGLSAVMASGVSAIVTMPLDTIKTRLQVLDLEENGRRRPLTFVQTVRNLVKEGGLVACYRGLGPRWASMSMSATTMITTYEFLKRMSTKSQEDFTSS

SEQ ID NO: 8224 - protein, 322 aa, Glycine max
  misc_feature (1)..(322): Ceres Seq. ID no. 15178231
MLDKSKFFFLGAALFSGVSCALYPMVVLKTRQQVSSSRFSCLNISCAILRHEGFRGFYKGFPTSLMGTIPARALYMASLEFTKTNVGTAFVQFGFSETSAVAAANAAAGVTSAMAAQLVWTPIDVVSQRLMVQGSGGSKTVLANLNSENYRNGFDAFRKILCADGARGFYRGFGISILTYAPSNAVWWTSYSMVHRLIWGAFGSYLGNNNLGGGFRPDSKAMVAVQGLSAVMASGVSAIVTMPLDTIKTRLQVLDLEENGRRRPLTFVQTVRNLVKEGGLVACYRGLGPRWASMSMSATTMITTYEFLKRMSTKSQEDFTSS

SEQ ID NO: 8225 - DNA, 1517 bp, Glycine max
  misc_feature (1)..(1517): Ceres Seq. ID no. 15178246
ctctcctccccaccctcgcccgctgaggtttccgccgcgatctcgtctcgatccgcactctctatctgagatttggaatcgggcgaggcctgcagctcctgccgacatggcgctcgttttgcattcgggcagtggcaacaagaatgccttcaaggcacttattgctgcagagtactgtggggtcaaggttgagctgaccaagaactttgagatgggtgtctcaaacaaaacccctgaattcatcaagatgaatccccttggcaaggttcctgttcttgagactcctgatggtgctgtttttgagagcaatgctattgcacgctatgttgctcgctcaaagggtgacaacctgctttggggtggttctcttattgaatatgcgcgtgttgagcaatggatggactttggtgccacagaggttgatcccaatatcgcaaggtggctgtacccaaggcttggttatatgccttacaatgcccagtctgaggaattcggcattgctggattgaagagggcccttgaagcattgaacacacacctggcatcaaacacattccttgttgggcattctgtcactctggctgatattgtcatgacatgcaacctctaccatggttttgctcggatcttgaccaagactttcacatctgagttccctcatgttgagaggtacttctggaccatggttaaccagcctaacttcaagaaggtcattggcgatttcaagcaggcagaggttgtacctcctgttcagaagaaggctgctcctgctaaaccaaaggaggccaagaaagaggctcccaaggcggccccaaagccagcagaggttgaggcaccagaggaagaggcaccaaagccaaagcccaaaaatccccttgatctactgccaccaagcaagatggtacttgatgactggaagaggctatactcaaacactaagagcaacttccatgatgttgctgttaaaggtttctgggagatgtatgacccagagggctactctctctggttctgtgactacaagtaccaggaagagaacaccgtgtcctacgtgaccctgaacaaggtcggcgggttcctgcagcggatggatctgtgccgcaagtacgcttttggcaagatgctcgtgattggttctgaggcgcccttcaaagtcaaggggctgtggctcttccgtgggcaggacatccctgagttcgtcatgaatgaggtctatgacatggagctctacgagtggactaaggttgacctctccgacgaggcccagaagaagcgtgtcgaggccatgatcgaggaccttgagccgtttgaggggcaggccttgctggacgccaagtgcttcaagtaagcgaacagtgcctgggatcgtgatggcggtggcaaagaaactatctaggacttgaaattcagtgtcgaaacagttggtcttttttttggaagagtttgcttgttacttaatggctatttgacctggtgaactagttaattttgtgctatgctaagagtttttgggtatc

SEQ ID NO: 8226 - protein, 448 aa, Glycine max
  misc_feature (1)..(448): Ceres Seq. ID no. 15178247
SPPHPRPLRFPPRSRLDPHSLSEIWNRARPAAPADMALVLHSGSGNKNAFKALIAAEYCGVKVELTKNFEMGVSNKTPEFIKMNPLGKVPVLETPDGAVFESNAIARYVARSKGDNLLWGGSLIEYARVEQWMDFGATEVDPNIARWLYPRLGYMPYNAQSEEFGIAGLKRALEALNTHLASNTFLVGHSVTLADIVMTCNLYHGFARILTKTFTSEFPHVERYFWTMVNQPNFKKVIGDFKQAEVVPPVQKKAAPAKPKEAKKEAPKAAPKPAEVEAPEEEAPKPKPKNPLDLLPPSKMVLDDWKRLYSNTKSNFHDVAVKGFWEMYDPEGYSLWFCDYKYQEENTVSYVTLNKVGGFLQRMDLCRKYAFGKMLVIGSEAPFKVKGLWLFRGQDIPEFVMNEVYDMELYEWTKVDLSDEAQKKRVEAMIEDLEPFEGQALLDAKCFK

SEQ ID NO: 8227 - protein, 413 aa, Glycine max
  misc_feature (1)..(413): Ceres Seq. ID no. 15178248
MALVLHSGSGNKNAFKALIAAEYCGVKVELTKNFEMGVSNKTPEFIKMNPLGKVPVLETPDGAVFESNAIARYVARSKGDNLLWGGSLIEYARVEQWMDFGATEVDPNIARWLYPRLGYMPYNAQSEEFGIAGLKRALEALNTHLASNTFLVGHSVTLADIVMTCNLYHGFARILTKTFTSEFPHVERYFWTMVNQPNFKKVIGDFKQAEVVPPVQKKAAPAKPKEAKKEAPKAAPKPAEVEAPEEEAPKPKPKNPLDLLPPSKMVLDDWKRLYSNTKSNFHDVAVKGFWEMYDPEGYSLWFCDYKYQEENTVSYVTLNKVGGFLQRMDLCRKYAFGKMLVIGSEAPFKVKGLWLFRGQDIPEFVMNEVYDMELYEWTKVDLSDEAQKKRVEAMIEDLEPFEGQALLDAKCFK

SEQ ID NO: 8228 - protein, 378 aa, Glycine max
  misc_feature (1)..(378): Ceres Seq. ID no. 15178249
MGVSNKTPEFIKMNPLGKVPVLETPDGAVFESNAIARYVARSKGDNLLWGGSLIEYARVEQWMDFGATEVDPNIARWLYPRLGYMPYNAQSEEFGIAGLKRALEALNTHLASNTFLVGHSVTLADIVMTCNLYHGFARILTKTFTSEFPHVERYFWTMVNQPNFKKVIGDFKQAEVVPPVQKKAAPAKPKEAKKEAPKAAPKPAEVEAPEEEAPKPKPKNPLDLLPPSKMVLDDWKRLYSNTKSNFHDVAVKGFWEMYDPEGYSLWFCDYKYQEENTVSYVTLNKVGGFLQRMDLCRKYAFGKMLVIGSEAPFKVKGLWLFRGQDIPEFVMNEVYDMELYEWTKVDLSDEAQKKRVEAMIEDLEPFEGQALLDAKCFK

SEQ ID NO: 8229 - DNA, 1214 bp, Glycine max
  misc_feature (1)..(1214): Ceres Seq. ID no. 15178250
catttcatttttttttattttttttttatttagttacttactcctcacactttctctatcgttttcatctctgtttcagatctgagctctcgtatattccccagccatggccgaaaaggtcaccataatgaggctcaaggttgatcttcagtgccacaaatgctacaagaaggtcaagaagattctctgcaaattccctcaaatccgagaccaggtgtacgacgagaagaataacatcgtgaccatcgcggtggtttgctgtaaccctgagaagctcagggacaaaatttgctgcaaaggttgtggtacgatcaaaagcattgaaattgttgagcctcccaagcccaaaccaccacctcaaccagaaaagcccaaggaaccagagaagccaaaagagccacagaagccgaaagagccagagaagccgaaagagccagagaaaccgaaggagccaccgaagcctaaggaacctgaaaaaccaaaggaaccagagaagcccaaagagcctgagaagcccaaggagccagagaagcccaaagagcccgagaagcccaaggaacccgagaagcccaaggagcccgagaagcccaagcctgaatgccctcctccggtgccggtttgtccggcaccggtgccagtgtgtccgccacagccaacacctccgccaccggtggtggttccgattggggtgtgctgtgttccatgctatgaaggtcggcccggtgggccatgctttgatgggtacggcggtgggcccccaccatgttatgacgcttattatggaaggcctgtttatgatagttacggtgggagcaggccttgttacgtgagccgttgcgatgaatatttctgtgaagaaaacacctctgcttgcacaattatgtgatcgatcgcattattacttacttacttcattcatcgaatctctctctcttgtgccgcccatgcatgcaagttgttgcaacggcgcgttcttccatcttattgttggagcgatcatcaccctcatcaatccaaggaataatgatctttgtttttttgtgtttgggagtacaaaatgtttcgtacgtgaaacaaatatagataatatgatatgataccagaggctagctagctaaagaataaatgtttttactgtaatgtatgtaactgatactatatactgtgatatcttacattttcacaaattaataaagtttcttaatttgtgtacg

SEQ ID NO: 8230 - protein, 259 aa, Glycine max
  misc_feature (1)..(259): Ceres Seq. ID no. 15178251
MAEKVTIMRLKVDLQCHKCYKKVKKILCKFPQIRDQVYDEKNNIVTIAVVCCNPEKLRDKICCKGCGTIKSIEIVEPPKPKPPPQPEKPKEPEKPKEPQKPKEPEKPKEPEKPKEPPKPKEPEKPKEPEKPKEPEKPKEPEKPKEPEKPKEPEKPKEPEKPKPECPPPVPVCPAPVPVCPPQPTPPPPVVVPIGVCCVPCYEGRPGGPCFDGYGGGPPPCYDAYYGRPVYDSYGGSRPCYVSRCDEYFCEENTSACTIM

SEQ ID NO: 8231 - protein, 252 aa, Glycine max
  misc_feature (1)..(252): Ceres Seq. ID no. 15178252
MRLKVDLQCHKCYKKVKKILCKFPQIRDQVYDEKNNIVTIAVVCCNPEKLRDKICCKGCGTIKSIEIVEPPKPKPPPQPEKPKEPEKPKEPQKPKEPEKPKEPEKPKEPPKPKEPEKPKEPEKPKEPEKPKEPEKPKEPEKPKEPEKPKEPEKPKPECPPPVPVCPAPVPVCPPQPTPPPPVVVPIGVCCVPCYEGRPGGPCFDGYGGGPPPCYDAYYGRPVYDSYGGSRPCYVSRCDEYFCEENTSACTIM

SEQ ID NO: 8232 - DNA, 1541 bp, Glycine max
  misc_feature (1)..(1541): Ceres Seq. ID no. 15178260
acttctggactctctagctagcacctctctctattctctccctaagtgactcctacttcataatcagagggcatgcctgaatgtccagagaaagggagagatttgatgagatagggaagaagatcaagagggaaggagatgtttcatctcaaatgggaagaagacacatgttaggccctccaggaaccctaaatactatcaccccttgtgcggcatgtaagttgttgagaagaagatgtgcccaagaatgtcccttttctccatatttctctccccatgagccccaaaaatttgcttctgtccacaaagtttttggtgccagcaacgtctcaaagatgctcatggaagtaccagagtgtcaaagagctgatgcagcaaatagtctagtatatgaggctaatgtgaggctaagagatcctgtgtatggatgcatgggtgcaatttctgctttgcaacagcaagttcaatctttacaagctgaacttaatgcagtgagaggtgaaatacttaaatacaaactcagggaagctaacatgataccctcctctcatgttgcaatgctcccttcatctggggctgtttcaattgctgctccaccgccgccaccaccaccaccaccacctcttcctcctccttctcttcctcttcctcttcctctaacttcttcccctccttccatgtacatccaacaaagggatcccaccacttataccacaatttcaagtgataatatctcctattttgtctaaatttgcagcctaaaaacaattattccatttatttctctcttaagatgcatcaaggtggaataaagtaaagaaaaggagagtattgatactgaatgttgttatgccccggctgtatgcttttattattattattattatcttaattcatatgattaatactcccaaaacttcccctggctatatggttggttaaacttttatttcttgtacaccttttcaagctaattaaagctagctactaccatattggaaattaatttctccttgatcctgtgattaactattgcatttcttccccagcctcaagtacaaccgatgtagacataatgccaacttgatatatatttatgccaattaattttcccttcattattttatgaagcaatggacaataaagggggaaaagaaacttggttttatattccattgatgatatttgatcaatttggtatgtgaaacatagcaaattaagggtgggaggagggaatcactggtattgttggtagaattaattctgcacgtacgtgatgactgtggttcgtgaccataacatttcttagacatgttaatctgtgccactgaagtatctgagtttgctgtctgaagttgcgggagacaaaaggtatgcttgtgaccttcaccatgttgagtcagacttaacttctgagaaatttcgtttatatatatggaaattgggaagcataattttacgtcaagttatctatcatttgtattatacagtcaaaactatgttatattgctaactagattgagaattgagtattctaatgt

SEQ ID NO: 8233 - protein, 222 aa, Glycine max
  misc_feature (1)..(222): Ceres Seq. ID no. 15178261
MSRERERFDEIGKKIKREGDVSSQMGRRHMLGPPGTLNTITPCAACKLLRRRCAQECPFSPYFSPHEPQKFASVHKVFGASNVSKMLMEVPECQRADAANSLVYEANVRLRDPVYGCMGAISALQQQVQSLQAELNAVRGEILKYKLREANMIPSSHVAMLPSSGAVSIAAPPPPPPPPPPLPPPSLPLPLPLTSSPPSMYIQQRDPTTYTTISSDNISYFV

SEQ ID NO: 8234 - protein, 198 aa, Glycine max
  misc_feature (1)..(198): Ceres Seq. ID no. 15178262
MGRRHMLGPPGTLNTITPCAACKLLRRRCAQECPFSPYFSPHEPQKFASVHKVFGASNVSKMLMEVPECQRADAANSLVYEANVRLRDPVYGCMGAISALQQQVQSLQAELNAVRGEILKYKLREANMIPSSHVAMLPSSGAVSIAAPPPPPPPPPPLPPPSLPLPLPLTSSPPSMYIQQRDPTTYTTISSDNISYFV

SEQ ID NO: 8235 - protein, 193 aa, Glycine max
  misc_feature (1)..(193): Ceres Seq. ID no. 15178263
MLGPPGTLNTITPCAACKLLRRRCAQECPFSPYFSPHEPQKFASVHKVFGASNVSKMLMEVPECQRADAANSLVYEANVRLRDPVYGCMGAISALQQQVQSLQAELNAVRGEILKYKLREANMIPSSHVAMLPSSGAVSIAAPPPPPPPPPPLPPPSLPLPLPLTSSPPSMYIQQRDPTTYTTISSDNISYFV

SEQ ID NO: 8236 - DNA, 520 bp, Glycine max
  misc_feature (1)..(520): Ceres Seq. ID no. 15178354
aatctctccaccaacatcttgaaggagatgtatatcttgacaaggggcaggattcctttgattggctgtgggggcattagcagtggggaagatgcatataagaaaatacgagctggagcaactctagttcagctctataccgcattcgcttatgggggacctgcacttattcctcagataaaggctgaattagctgcatgcctggaaagagatggtttcaaatccattgttgatgcagttggtgcagattgtagatgactttggtccaaatcagaatcccgtgctgtaagaaccataatcttattttaggagtagtaatgttccggttttggcaatactgaaattgcaaaatcatttttttaagcttgctttaatttataccagattttatcttaattgtttattttatttgggtttcgccacgtgttctgaattgtaaaagcaagccaaggactgctgaggcaactcaagcagtgtttattttgagcaattgtttgaacaataaatcgcggcatcatag

SEQ ID NO: 8237 - protein, 85 aa, Glycine max
  misc_feature (1)..(85): Ceres Seq. ID no. 15178355
NLSTNILKEMYILTRGRIPLIGCGGISSGEDAYKKIRAGATLVQLYTAFAYGGPALIPQIKAELAACLERDGFKSIVDAVGADCR

SEQ ID NO: 8238 - protein, 76 aa, Glycine max
  misc_feature (1)..(76): Ceres Seq. ID no. 15178356
MYILTRGRIPLIGCGGISSGEDAYKKIRAGATLVQLYTAFAYGGPALIPQIKAELAACLERDGFKSIVDAVGADCR

SEQ ID NO: 8239 - DNA, 735 bp, Glycine max
  misc_feature (1)..(735): Ceres Seq. ID no. 15178427
gatgcaagatttcaaaactgcacattacacacgtacctctcccagagcaatgttcatatgccaagtaattggcattgcaatgggttgtgtgacagctcctctcagcttcttcctatactacaaggcatttgatgtgggaaacccgcatggggaattcaaagctccatatgcgttaatttacagaaacatggcaatcataggggtccaaggtttctcagcattgcccctgcattgtttaaagctatgctttgggttctttgcttttgccataggcgtaaacatgataagagattttgcaccccaaaagattgggaaatggatgccattaccaatggtcatggccgtaccgtttctagttggggcatactttgcaatcgatatgttcataggtactgtggttgtgtttgcgtggcagaagcttgactccaagaaggcagagttgatggttccagcagctgcctctggactaatttgtggggaaggactatggactctaccagctgcgattctagctcttgcaagaattaaacctcctatctgcatgaaattcgttcctacctagagcttcaccgacgacagagcaaacaatgctataggaattattagttactgcccccttctttttttggtaaacgctagtacattggagcacatcaaacattatccaaatgctttacagaagagtctctgtcacccccatacaatttgtaacataaaatttggcaaaaataagat

SEQ ID NO: 8240 - protein, 186 aa, Glycine max
  misc_feature (1)..(186): Ceres Seq. ID no. 15178428
MQDFKTAHYTRTSPRAMFICQVIGIAMGCVTAPLSFFLYYKAFDVGNPHGEFKAPYALIYRNMAIIGVQGFSALPLHCLKLCFGFFAFAIGVNMIRDFAPQKIGKWMPLPMVMAVPFLVGAYFAIDMFIGTVVVFAWQKLDSKKAELMVPAAASGLICGEGLWTLPAAILALARIKPPICMKFVPT

SEQ ID NO: 8241 - protein, 170 aa, Glycine max
  misc_feature (1)..(170): Ceres Seq. ID no. 15178429
MFICQVIGIAMGCVTAPLSFFLYYKAFDVGNPHGEFKAPYALIYRNMAIIGVQGFSALPLHCLKLCFGFFAFAIGVNMIRDFAPQKIGKWMPLPMVMAVPFLVGAYFAIDMFIGTVVVFAWQKLDSKKAELMVPAAASGLICGEGLWTLPAAILALARIKPPICMKFVPT

SEQ ID NO: 8242 - protein, 160 aa, Glycine max
  misc_feature (1)..(160): Ceres Seq. ID no. 15178430
MGCVTAPLSFFLYYKAFDVGNPHGEFKAPYALIYRNMAIIGVQGFSALPLHCLKLCFGFFAFAIGVNMIRDFAPQKIGKWMPLPMVMAVPFLVGAYFAIDMFIGTVVVFAWQKLDSKKAELMVPAAASGLICGEGLWTLPAAILALARIKPPICMKFVPT

SEQ ID NO: 8243 - DNA, 820 bp, Glycine max
  misc_feature (1)..(820): Ceres Seq. ID no. 15178436
atgataatttcaaacattgttgttgttgttgcatcaaaccttttgcaaaatgtccatagcagaggaggagagtccaagtgtgatgccaaaagtgatcactttcctctgctctcttcttgagagggtggctgagtcaaatgatcacaaccaacacctccaacagcaccagaagatctcagtgttccatggcctgacaaggccaaacatctcaattcagtgctatcttgagagaatcttcaagtacgcgaattgcagcccttcatgcttcgtcgtcgcctacgtctacctcgatcgattcactcagagacaaccctctttgcccatcaactccttcaacgtgcaccgtttactgatcactagtgtcatggtagctgccaagttcatggatgacatgttctacaacaatgctcactatgccaaagttggaggaatcaccaaagtagagatgaattttcttgagttggatttcctctttggtttgggtttccatttaaatgtgaccccaggcaccttccaagcctattgtgtccatctccaaagagaaatgttgttgatccaacctctaaatttttcagattccaccctaaatttaggacaatcactaaaggctcacttgtgcttcaatgaggatgaatgttctcatcaaaagcagaaacaacaacaacagctagctgtttgattccttgcattttctcagtgcatgtgtagtatggttgactagttgtaaatgtagtgattctattacagactggcaagtaaactacttttccttgtgcaatccgcttgctccttttttattctaattctttctactttttcc

SEQ ID NO: 8244 - protein, 209 aa, Glycine max
  misc_feature (1)..(209): Ceres Seq. ID no. 15178437
MSIAEEESPSVMPKVITFLCSLLERVAESNDHNQHLQQHQKISVFHGLTRPNISIQCYLERIFKYANCSPSCFVVAYVYLDRFTQRQPSLPINSFNVHRLLITSVMVAAKFMDDMFYNNAHYAKVGGITKVEMNFLELDFLFGLGFHLNVTPGTFQAYCVHLQREMLLIQPLNFSDSTLNLGQSLKAHLCFNEDECSHQKQKQQQQLAV

SEQ ID NO: 8245 - protein, 198 aa, Glycine max
  misc_feature (1)..(198): Ceres Seq. ID no. 15178438
MPKVITFLCSLLERVAESNDHNQHLQQHQKISVFHGLTRPNISIQCYLERIFKYANCSPSCFVVAYVYLDRFTQRQPSLPINSFNVHRLLITSVMVAAKFMDDMFYNNAHYAKVGGITKVEMNFLELDFLFGLGFHLNVTPGTFQAYCVHLQREMLLIQPLNFSDSTLNLGQSLKAHLCFNEDECSHQKQKQQQQLAV

SEQ ID NO: 8246 - protein, 104 aa, Glycine max
  misc_feature (1)..(104): Ceres Seq. ID no. 15178439
MVAAKFMDDMFYNNAHYAKVGGITKVEMNFLELDFLFGLGFHLNVTPGTFQAYCVHLQREMLLIQPLNFSDSTLNLGQSLKAHLCFNEDECSHQKQKQQQQLAV

SEQ ID NO: 8247 - DNA, 855 bp, Glycine max
  misc_feature (1)..(855): Ceres Seq. ID no. 15178518
tcattaatccaggcactttgtttatcatctcaagttgaagaagcaattgcactatatagtgaaatgaccaggaaaggcattgtaccagatttaagtgcctttgtttgtcttgtaaagggactaattgaaatgaacaagtggaatgaagctcttcagttgtgttatggcatatgccaggagggtgtgcactggcagggtaacaaattctgtgatggagggtagagctgtggcaccttactgtacattataactccgaatttctcccctaagaagtcgcatctctacgtctcatgctttgctctaagatgtggtgtgatccagtcaccctgagacagaaatgtgcaactcatggatgactgaagaaaaacagcaaccaggacttggagtagcactgcactacaaagagataagattgattcttaagctacatgtatgggtgctgctgctgctgataatgatcatgatggttgaagaaaaccttcagtacactgcatgcagtcaaattgcactcacgtaagcacaaccttttgaagagtcagcagaactttatttgtcaatagtggcagctaatttaggtcgttacctgcttaactgtgacatcacacgatgcaaattccatcccattttgatgagggatggctggttcatcttcagatggacaaagaaatttcactggctatcaggattagtctttgtatataagatggtgatggctacagaagtcttgctggttgtgaagatagcatgaaagttccataacccttctttattcattatttcagtgatataccatgtggaacaatacaattgctttgatatgatttacttgagtatccttctaaaaaaaaaaaaaaa

SEQ ID NO: 8248 - protein, 73 aa, Glycine max
  misc_feature (1)..(73): Ceres Seq. ID no. 15178519
SLIQALCLSSQVEEAIALYSEMTRKGIVPDLSAFVCLVKGLIEMNKWNEALQLCYGICQEGVHWQGNKFCDGG

SEQ ID NO: 8249 - protein, 59 aa, Glycine max
  misc_feature (1)..(59): Ceres Seq. ID no. 15178520
MCNSWMTEEKQQPGLGVALHYKEIRLILKLHVWVLLLLIMIMMVEENLQYTACSQIALT

SEQ ID NO: 8250 - protein, 54 aa, Glycine max
  misc_feature (1)..(54): Ceres Seq. ID no. 15178521
MTEEKQQPGLGVALHYKEIRLILKLHVWVLLLLIMIMMVEENLQYTACSQIALT

SEQ ID NO: 8251 - protein, 52 aa, Glycine max
  misc_feature (1)..(52): Ceres Seq. ID no. 15178522
MTRKGIVPDLSAFVCLVKGLIEMNKWNEALQLCYGICQEGVHWQGNKFCDGG

SEQ ID NO: 8252 - DNA, 1463 bp, Glycine max
  misc_feature (1)..(1463): Ceres Seq. ID no. 15178751
tgctttttggggatttcagtttttgagttgagtgtgtgtagtttctgttcccttgttttatttatttggtttctcgttggcaactcaagggaggtacagcaaccaccatatatcaggtagtattatcagagtgtgtgtgactcctaaggaatttgcagagccccctactcatatttctctcttctctctcccttttgctccctctggtttctgtttgcgtggggagcaaaaagctcctgcttttctctctgatatatactatatgtaagacacgagctagaggtgaaaaaaggaactattctagttgttgaggggaggacgtatgtatgttcccatttggtgttgaggaacaaacacaagtgaaggtcttcttgactatacatacaccaagtgtacgtttggatatatagagaaaaaatgggtagttgtggaagagaaggagcagtgaggcaatatgtaagatcgaaggttcctcgtttaaggtggactcctgagctgcaccgttgctttgttcatgctattgatagccttggaggtcatcataaggctactccgaagcttgttcttcagttgatggatgttaaagggctcacaatttcacacgtcaagagccatcttcagatgtacagaagcatgaggggtgacttgggcagacaaggtaggacaccctcccaacataggaaccaatcttttgaggagcatgatgatggatgtgttgatgaagtgaatgatgttggtgttgagtactcatgttcgaaacccctgggaagagaatctgattccttcttcgggcacagtaatctccctccaaaaagagcaagaatcgagatgagaagttccatctcagagaggctgcagcaatgcagccaaagattatgtgatgttgtagttccaaatccgtactgtttttatgattatctgaaacagaagaagcccatgcccatggctgatcagcattcccctccttttccagattttcccaacctcacttcattcaaatctcctgatcaacaatctgatttccttcaggttactaaattaaatgaaggaaaaagcacttcacagactattaatgtacttgtgaacactactactgagacagctaatgtagaaattgaagatgaattgtcattgtcgctcacattgccaaatccttcacctcagagaagttcaggcagtgagataagtgaggcaatctcatcctgccatgggtttagcaacaactacaaggactgctctagttcatccactcacactgtcaaagaaagaattaatttggacctatctttagccctatgtggcaattgatttgatgctcttttgtaaaatcaatctactataggtataattccacggtagctctttttcattctctaacagttttggttattttcttgtttctactaccgggtacctttccaatcaccatgtcaattaattctaagctaagctattttgagtag

SEQ ID NO: 8253 - protein, 296 aa, Glycine max
  misc_feature (1)..(296): Ceres Seq. ID no. 15178752
MGSCGREGAVRQYVRSKVPRLRWTPELHRCFVHAIDSLGGHHKATPKLVLQLMDVKGLTISHVKSHLQMYRSMRGDLGRQGRTPSQHRNQSFEEHDDGCVDEVNDVGVEYSCSKPLGRESDSFFGHSNLPPKRARIEMRSSISERLQQCSQRLCDVVVPNPYCFYDYLKQKKPMPMADQHSPPFPDFPNLTSFKSPDQQSDFLQVTKLNEGKSTSQTINVLVNTTTETANVEIEDELSLSLTLPNPSPQRSSGSEISEAISSCHGFSNNYKDCSSSSTHTVKERINLDLSLALCGN

SEQ ID NO: 8254 - protein, 244 aa, Glycine max
  misc_feature (1)..(244): Ceres Seq. ID no. 15178753
MDVKGLTISHVKSHLQMYRSMRGDLGRQGRTPSQHRNQSFEEHDDGCVDEVNDVGVEYSCSKPLGRESDSFFGHSNLPPKRARIEMRSSISERLQQCSQRLCDVVVPNPYCFYDYLKQKKPMPMADQHSPPFPDFPNLTSFKSPDQQSDFLQVTKLNEGKSTSQTINVLVNTTTETANVEIEDELSLSLTLPNPSPQRSSGSEISEAISSCHGFSNNYKDCSSSSTHTVKERINLDLSLALCGN

SEQ ID NO: 8255 - protein, 228 aa, Glycine max
  misc_feature (1)..(228): Ceres Seq. ID no. 15178754
MYRSMRGDLGRQGRTPSQHRNQSFEEHDDGCVDEVNDVGVEYSCSKPLGRESDSFFGHSNLPPKRARIEMRSSISERLQQCSQRLCDVVVPNPYCFYDYLKQKKPMPMADQHSPPFPDFPNLTSFKSPDQQSDFLQVTKLNEGKSTSQTINVLVNTTTETANVEIEDELSLSLTLPNPSPQRSSGSEISEAISSCHGFSNNYKDCSSSSTHTVKERINLDLSLALCGN

SEQ ID NO: 8256 - DNA, 1250 bp, Glycine max
  misc_feature (1)..(1250): Ceres Seq. ID no. 15178755
ggaagaaagaaggattatgcaggcagagattcaacggttgaaagacaagcaagctatatcagagagaacagctaaggcagagtcccaattgaaggataaactgaagctgaggcttaaaacactggaggaaggcttaaagcatttctccaataacccaatcacttcgaatgtgtcttatgcatctcaaaaagcagaaaagtctaacatactaggtttcctaacaaccagtgctggactgagaaagagatccacatcacaaccaagggcatgtacggttggaagctcattgttccagacaccaaatataaaaaacaacagaggagacatcgtagctgggaatttgaagctggggagccctacaaaaaaaatatggttctacagaaaatatgttaacgaaagggatatgggcatcaagaagtaaagttgctgataatggtgaaaaggaaaatgaaatgcaggtgaacagagacatgactttaaacagatgcaatgatgaaagtgaagcaacagaaattaaaaccattgttgatgtggaagaagaccctcctgaaagcaagaaaccaaaaggttcaagcagggatgatgtggtctcaggttttctatatgataagctgcaaaaagaggtcatcaatttgaggaagtcttgtgaaattaaagacagtagtttacaagctaaagatgaagaaattaagatgcttataaagaaagtcggtgtactgacaaaggccatggaagtagagtggaagaaaatgaaaagagaggcagctgctagagagaaggaggcttcatcaacaaagtcagatgataacaggaaaaacagaagcgcaaactcctctaaaagggcgatataaatttattacatggcggtgaaagagcgctgtgaattctttatttggagatagttgaagacaatttatttatcaatggcatcttgtgtgatttttctttgtaaatacaaaacatttggtgaggtaatatcctgaaataaatttccattggggaaaggaagtttgagaatcagtttccgtacaatcattagtgttcaacatcttcctctatatttggataaatgacatgttttgtgatgtgagttttacacactagccaagtttgtcacatgcttcagggacatgaaacatgaggaacacttgtgaaactagtggtatagtcctcattaagtagtaaaagatttagtgcttatttgattcccttctcattttttggttataaaatattaaaaattgttttcc

SEQ ID NO: 8257 - protein, 154 aa, Glycine max
  misc_feature (1)..(154): Ceres Seq. ID no. 15178756
MLTKGIWASRSKVADNGEKENEMQVNRDMTLNRCNDESEATEIKTIVDVEEDPPESKKPKGSSRDDVVSGFLYDKLQKEVINLRKSCEIKDSSLQAKDEEIKMLIKKVGVLTKAMEVEWKKMKREAAAREKEASSTKSDDNRKNRSANSSKRAI

SEQ ID NO: 8258 - protein, 139 aa, Glycine max
  misc_feature (1)..(139): Ceres Seq. ID no. 15178757
EERRIMQAEIQRLKDKQAISERTAKAESQLKDKLKLRLKTLEEGLKHFSNNPITSNVSYASQKAEKSNILGFLTTSAGLRKRSTSQPRACTVGSSLFQTPNIKNNRGDIVAGNLKLGSPTKKIWFYRKYVNERDMGIKK

SEQ ID NO: 8259 - protein, 134 aa, Glycine max
  misc_feature (1)..(134): Ceres Seq. ID no. 15178758
MQAEIQRLKDKQAISERTAKAESQLKDKLKLRLKTLEEGLKHFSNNPITSNVSYASQKAEKSNILGFLTTSAGLRKRSTSQPRACTVGSSLFQTPNIKNNRGDIVAGNLKLGSPTKKIWFYRKYVNERDMGIKK

SEQ ID NO: 8260 - DNA, 1667 bp, Glycine max
  misc_feature (1)..(1667): Ceres Seq. ID no. 15178767
gagtgtcttgttctcgtttatggaggatcaaagcggagaagctgaaggagaagaacaacaaatacaaccttcactctttcattatttaataacaattattattctcaatgggcaagactcctttctcctttcgtcgctccgcctctcgccgccgccccaagaagaccgccgccccgccccctcctccctctccgccgcaacatccctacgcggccggattcgccgcctcacccgacgacaacaaccgtctcatcgccgccgccgccggcagcagcgccttgacgaaggcgaagaagaagaccggcaacgtccgcttgtggatgaggtttgaccggtccggccggtcagaactggtggagttggagaagaacgccatcgtccgccacgcagcgattcccgctagagacttgcgaattttgggccccgtcttctcccactcctccaacatcctcgctagagagaaagcaatggtggttaatttggagtttataaaggcaattgtgactgctgaagaagtgttattgcttgatcctcttcggcaggaggttcttccctttgttgagcaactcaggcaacagcttcctggcaaaagtcaacctaaacttctcggcggcacggaagagcaggaaggcgaaatgcatgtctctaatggaagacaatggttgcctacaccggaggcagccgatggtttgcagtctgagcttccgtttgagtttcaagttctggagattgctttggaggctgtgtgcacttatctggactcgaatgtggcggaccttgagcgaggtgcttaccctgtgttggatgaattggctaggaatgttagcaccaagaatcttgagcatgtgcggagtttaaagagtaatcttacgcggttgctggcacgagtgcagaaggtgcgagatgaaattgaacatctgttagatgacaatgaagatatggcacaactatatttgacaaggaagtggttgcagaatcaacaatttgaggaggctcatttgggtgccacaacctcaaataactttcctaatacctcacgttctgttcgtcaacttggttctatcagaagtgaaagtcttgtgaccagccattatgaggatgataacaatgtggaggacttggagatgttgcttgatgcatatttcatgcagttggatggaactcgtaacaaaatattatcagttagggagtatattgacgacactgaagactatgtcaacatccaacttgataaccaccgaaatgaacttattcagctgcagttgacgttgactattgcatcatttgctattgctattgaaactttgattgctggtgcatttggtatgaacattccttgtaacttatataacattgatggagtattttggcccttcgtttggaccacgtctgcggcttgcgtattacttttcttgcttattttagcatatgcaagatggaagaagttgctgggatcataaggcaaggctgttgtgtgacaattggcaatttgaatctccgcagcgagtgacctgaagaacagacacaaatgtgtcaccggagaagtggcttaggaagcaactatcttaatttctgacaaaaattgtaatagttgatgtataggatgttccaacattgcttttagcatcatatattttatagccgatactattcacagcatctttttt

SEQ ID NO: 8261 - protein, 450 aa, Glycine max
  misc_feature (1)..(450): Ceres Seq. ID no. 15178768
MGKTPFSFRRSASRRRPKKTAAPPPPPSPPQHPYAAGFAASPDDNNRLIAAAAGSSALTKAKKKTGNVRLWMRFDRSGRSELVELEKNAIVRHAAIPARDLRILGPVFSHSSNILAREKAMVVNLEFIKAIVTAEEVLLLDPLRQEVLPFVEQLRQQLPGKSQPKLLGGTEEQEGEMHVSNGRQWLPTPEAADGLQSELPFEFQVLEIALEAVCTYLDSNVADLERGAYPVLDELARNVSTKNLEHVRSLKSNLTRLLARVQKVRDEIEHLLDDNEDMAQLYLTRKWLQNQQFEEAHLGATTSNNFPNTSRSVRQLGSIRSESLVTSHYEDDNNVEDLEMLLDAYFMQLDGTRNKILSVREYIDDTEDYVNIQLDNHRNELIQLQLTLTIASFAIAIETLIAGAFGMNIPCNLYNIDGVFWPFVWTTSAACVLLFLLILAYARWKKLLGS

SEQ ID NO: 8262 - protein, 379 aa, Glycine max
  misc_feature (1)..(379): Ceres Seq. ID no. 15178769
MRFDRSGRSELVELEKNAIVRHAAIPARDLRILGPVFSHSSNILAREKAMVVNLEFIKAIVTAEEVLLLDPLRQEVLPFVEQLRQQLPGKSQPKLLGGTEEQEGEMHVSNGRQWLPTPEAADGLQSELPFEFQVLEIALEAVCTYLDSNVADLERGAYPVLDELARNVSTKNLEHVRSLKSNLTRLLARVQKVRDEIEHLLDDNEDMAQLYLTRKWLQNQQFEEAHLGATTSNNFPNTSRSVRQLGSIRSESLVTSHYEDDNNVEDLEMLLDAYFMQLDGTRNKILSVREYIDDTEDYVNIQLDNHRNELIQLQLTLTIASFAIAIETLIAGAFGMNIPCNLYNIDGVFWPFVWTTSAACVLLFLLILAYARWKKLLGS

SEQ ID NO: 8263 - protein, 330 aa, Glycine max
  misc_feature (1)..(330): Ceres Seq. ID no. 15178770
MVVNLEFIKAIVTAEEVLLLDPLRQEVLPFVEQLRQQLPGKSQPKLLGGTEEQEGEMHVSNGRQWLPTPEAADGLQSELPFEFQVLEIALEAVCTYLDSNVADLERGAYPVLDELARNVSTKNLEHVRSLKSNLTRLLARVQKVRDEIEHLLDDNEDMAQLYLTRKWLQNQQFEEAHLGATTSNNFPNTSRSVRQLGSIRSESLVTSHYEDDNNVEDLEMLLDAYFMQLDGTRNKILSVREYIDDTEDYVNIQLDNHRNELIQLQLTLTIASFAIAIETLIAGAFGMNIPCNLYNIDGVFWPFVWTTSAACVLLFLLILAYARWKKLLGS

SEQ ID NO: 8264 - DNA, 1329 bp, Glycine max
  misc_feature (1)..(1329): Ceres Seq. ID no. 15178775
gacggaaaaagaagcctctggaaagtcctaaaaatcccaaccgcagagggtagggaggacttgctaaatctgaaccagaaagagagaacaaagaaggctaataaacctgaagatctgttttctccatgtgatagtgactcatgcaaagaacataaaaacctaactaacatcagataatacaaggatgtctgatcattgtttgaagagcagcaaagtagattctagtagtagtgagctttgtgctgatgataccatcttaggagacaagtgtgtggtggaggatgacagtgtgtctcaatattcaatcaatcacatatctcaaaccgacaatgaactcagctttcttgataatgatgggtggctcgatatcggaaactttgaagatgttgataggatgatgttaagctgtgacttgacatttggaatggggagcctcaataatgaagaggagttctgctggctccggtcttcgcaaggaactgaaggatctgatgatgcattgaagtctgcgttcaagttttcatctgctgaagcaagtccgttgaaaagtatatctgattataatatagacacaaatgaaaacatggaaggtctgccaattaatgacgggaacgttaaagcatctcctattgataaaaaattgaggtctccaatgaatgccaatcatgatggaattccttcttcactatcaacattccatgaatcagccatgaaatctggtaatgcagatgacttgatggcgaaactaaaggcactagacctgactgcattcggcaattcaatgctttaatgtcagtatttatgtactcaaattcaattcagtggatattcaaatagcttcttcatagaattaccacttcaaaaaaggtttatactgtataaactcaaatatatttctatcatcgttgactcctaaaacataattttaggaattgataaaactaacgtatgtcagtgctagaacccagaaggctcttcgctatgcaaaggtatggaggagggtcattgcgtgcagccttacccttgcgtatgcaaagaggctatttccggatttgaacccatgaccaattggtcaccaaggctcaactttaccgttgcaccaaggcttccacaattttaggaattgatattctatagaaattgaaatccctaaacattttagtttatattcatgttctaggaatttgtatcctaatttgagttgtaaccaataataagtgtgcaacaaagggaatcaagtagttacttattttgtttgatgtaaattgtgtttttcaataatggaaaactggccttgaccagtaggcaatactcaatttcagctagctt

SEQ ID NO: 8265 - protein, 201 aa, Glycine max
  misc_feature (1)..(201): Ceres Seq. ID no. 15178776
MSDHCLKSSKVDSSSSELCADDTILGDKCVVEDDSVSQYSINHISQTDNELSFLDNDGWLDIGNFEDVDRMMLSCDLTFGMGSLNNEEEFCWLRSSQGTEGSDDALKSAFKFSSAEASPLKSISDYNIDTNENMEGLPINDGNVKASPIDKKLRSPMNANHDGIPSSLSTFHESAMKSGNADDLMAKLKALDLTAFGNSML

SEQ ID NO: 8266 - protein, 131 aa, Glycine max
  misc_feature (1)..(131): Ceres Seq. ID no. 15178777
MMLSCDLTFGMGSLNNEEEFCWLRSSQGTEGSDDALKSAFKFSSAEASPLKSISDYNIDTNENMEGLPINDGNVKASPIDKKLRSPMNANHDGIPSSLSTFHESAMKSGNADDLMAKLKALDLTAFGNSML

SEQ ID NO: 8267 - protein, 130 aa, Glycine max
  misc_feature (1)..(130): Ceres Seq. ID no. 15178778
MLSCDLTFGMGSLNNEEEFCWLRSSQGTEGSDDALKSAFKFSSAEASPLKSISDYNIDTNENMEGLPINDGNVKASPIDKKLRSPMNANHDGIPSSLSTFHESAMKSGNADDLMAKLKALDLTAFGNSML

SEQ ID NO: 8268 - DNA, 1501 bp, Glycine max
  misc_feature (1)..(1501): Ceres Seq. ID no. 15179711
aatgacagctcatgatatatcttctgatggagatggaataagccaaaagatgaaggagttctctgttacttttaataaagttacatgcaatgaagcaagtttgctgcagttcgttcttgacctgtctaatgttctagccaaagcaagtgaatttagatttaatatccttggttataagggtagagaagctgaaactaatagtcctgattgcatagataagattgctctgccagaaaataagttagttcaagacaattcatcaggagagagatttcaaaatggtcgttcacatattcttaatccctgttctgatcctgagattcctgatgatggaaatttggccccaggctatgaatcaaatgccacgtcacagaagttctcaatggagaactttgaagaattgaaattagagaaagagaaggcagttgttgatctgtcaaagtgtgttgaaaatcttgaaatgacaaagtctcgattactagagacagagcaacatctagctgaagttaaatcacaattgacttctgctcaaagatcaaacagcctggctgagacgcaactaaaatgtatgacagaatcatacaggtcaattgaagcacgcgcaaaggagtttgaaactgagcttaatcatctgcaaatgaagacagaaactctggagaatgaacttgaagatgaaaagagggctcatgaagaagctttggctaagtacaaggagctagaagaacaactacaaaggaatgagagctcagctgctgataatgacattaagactaagcaggagagagacttggaagctgctgctgaaaagttagctgagtgtcaggaaaccatatttcttcttggcaagcagttaaaatcgatgcatcctcaaacagagccaacggggcctccttattcaaaggctgaaggcttcgcagagcgtgaacctaatagcccaaattttcaggatcaagcagagatggacagtgctagttctgcatttgtgcaaagactgggtggagagtcccccttacatttttctaacagtttatacagtccatcagataatgagtcaaactttccagccatatcttctgtacagaatccaaaccacaggcctacaaagtcaacctcttcgtctgcttcttccactcctacaccggagaaacacaaccgaggtttcagtagattcttttcatcaaaaggaaaaaacggtcattgagcatgcatgaccgatgggaattcttgacttaagggaccacacagcaatggcatttggaaagcatcaaggttcaatccgcttcatgatttaacagaattgagtttttaggaggtttgtgtagttaaaggacaggatgccatgaatatcgggtgattcttgtatctaatggttgtacatggtaaacatgtcttttcttcttttcctttccattgttttgttctctgttctgtaatttaattagcaaacattgacatagcctctgaactattacaggatatgttgaatattgttgtatttcat

SEQ ID NO: 8269 - protein, 399 aa, Glycine max
  misc_feature (1)..(399): Ceres Seq. ID no. 15179712
MTAHDISSDGDGISQKMKEFSVTFNKVTCNEASLLQFVLDLSNVLAKASEFRFNILGYKGREAETNSPDCIDKIALPENKLVQDNSSGERFQNGRSHILNPCSDPEIPDDGNLAPGYESNATSQKFSMENFEELKLEKEKAVVDLSKCVENLEMTKSRLLETEQHLAEVKSQLTSAQRSNSLAETQLKCMTESYRSIEARAKEFETELNHLQMKTETLENELEDEKRAHEEALAKYKELEEQLQRNESSAADNDIKTKQERDLEAAAEKLAECQETIFLLGKQLKSMHPQTEPTGPPYSKAEGFAEREPNSPNFQDQAEMDSASSAFVQRLGGESPLHFSNSLYSPSDNESNFPAISSVQNPNHRPTKSTSSSASSTPTPEKHNRGFSRFFSSKGKNGH

SEQ ID NO: 8270 - protein, 383 aa, Glycine max
  misc_feature (1)..(383): Ceres Seq. ID no. 15179713
MKEFSVTFNKVTCNEASLLQFVLDLSNVLAKASEFRFNILGYKGREAETNSPDCIDKIALPENKLVQDNSSGERFQNGRSHILNPCSDPEIPDDGNLAPGYESNATSQKFSMENFEELKLEKEKAVVDLSKCVENLEMTKSRLLETEQHLAEVKSQLTSAQRSNSLAETQLKCMTESYRSIEARAKEFETELNHLQMKTETLENELEDEKRAHEEALAKYKELEEQLQRNESSAADNDIKTKQERDLEAAAEKLAECQETIFLLGKQLKSMHPQTEPTGPPYSKAEGFAEREPNSPNFQDQAEMDSASSAFVQRLGGESPLHFSNSLYSPSDNESNFPAISSVQNPNHRPTKSTSSSASSTPTPEKHNRGFSRFFSSKGKNGH

SEQ ID NO: 8271 - protein, 272 aa, Glycine max
  misc_feature (1)..(272): Ceres Seq. ID no. 15179714
MENFEELKLEKEKAVVDLSKCVENLEMTKSRLLETEQHLAEVKSQLTSAQRSNSLAETQLKCMTESYRSIEARAKEFETELNHLQMKTETLENELEDEKRAHEEALAKYKELEEQLQRNESSAADNDIKTKQERDLEAAAEKLAECQETIFLLGKQLKSMHPQTEPTGPPYSKAEGFAEREPNSPNFQDQAEMDSASSAFVQRLGGESPLHFSNSLYSPSDNESNFPAISSVQNPNHRPTKSTSSSASSTPTPEKHNRGFSRFFSSKGKNGH

SEQ ID NO: 8272 - DNA, 1356 bp, Glycine max
  misc_feature (1)..(1356): Ceres Seq. ID no. 15179800
atatattgaatgttctggtcttcctttgtgtttttgtagatagaagccatcagtcatggataggcttctatcatcgtcttcacccccttcttttacatttctcactcgattcgaatctgcaactgcaagattcaatttctctccgtcaacacgttctcactctcacttgaagcggctctcctcaatttgttgccagcatgcaaatccatctcctttttcctcttccactccctttctcgcttcttccaaccaccccattaattttccatccttttcctcttcttcagatccctccacactcgaatcccattctctcaatcaaatcaaaaccggggctttcccaaaaccaaaggtaataacagctcggacgcttgtaatactttctgctcttgctatgatcttaatccaaccaactattgcaccagcagcttttgcaacctttcaaactgctgccaagactggtggtcctgctgctgcagctgcagttggtagaaaactaatccacacggagctactaagtagtgcttggactggtttcttggctggctgcttacacaccttatcagggcctgaccacctagctgccttggctccattgtcaatcggtcgaacccgaatggagagtgctgctgttggagccctttggggttgtggccatgatgctggtcaagttctttttgggttaatatttctaatcctcaaggatcaactccatattgaaattatccgaacttggggtaccagagtggtgggtcttactctgctaataattggtgctatgggaattagagaagcatcagaagtacatgccccaattgttgctttagaaagtggtgaatgtgatgtcaacgtgtatgaatcgcttgataatccaacagtgggcaaaaagaagataggttttgctacttttgcaacagggatagttcatggcctgcaaccagatgcattgatgatggttttgcctgcccttgctttgccttcgcgtttggctggtgctgcgtttctcatcatgttcttaattggaactgtaattgcaatgggaagttataccgtgtttataggttcgtgtagccaggcactgaaggatagagtacctaggataactgagaaactcacttgggtttcctcccttattgcaatagccctcggatttgctatcattattagccagttttttgggtttagtctgtattaaaacatctttaataagaaaggtactttttttcttatgaacattgttttagtatttagaaaaagtagacgttggacagaaaattggttgtttataggaagtacatcatccagaaaacatgtgaaattgattgttaattatttactttgcattcgaatgtgtat

SEQ ID NO: 8273 - protein, 379 aa, Glycine max
  misc_feature (1)..(379): Ceres Seq. ID no. 15179801
MDRLLSSSSPPSFTFLTRFESATARFNFSPSTRSHSHLKRLSSICCQHANPSPFSSSTPFLASSNHPINFPSFSSSSDPSTLESHSLNQIKTGAFPKPKVITARTLVILSALAMILIQPTIAPAAFATFQTAAKTGGPAAAAAVGRKLIHTELLSSAWTGFLAGCLHTLSGPDHLAALAPLSIGRTRMESAAVGALWGCGHDAGQVLFGLIFLILKDQLHIEIIRTWGTRVVGLTLLIIGAMGIREASEVHAPIVALESGECDVNVYESLDNPTVGKKKIGFATFATGIVHGLQPDALMMVLPALALPSRLAGAAFLIMFLIGTVIAMGSYTVFIGSCSQALKDRVPRITEKLTWVSSLIAIALGFAIIISQFFGFSLY

SEQ ID NO: 8274 - protein, 266 aa, Glycine max
  misc_feature (1)..(266): Ceres Seq. ID no. 15179802
MILIQPTIAPAAFATFQTAAKTGGPAAAAAVGRKLIHTELLSSAWTGFLAGCLHTLSGPDHLAALAPLSIGRTRMESAAVGALWGCGHDAGQVLFGLIFLILKDQLHIEIIRTWGTRVVGLTLLIIGAMGIREASEVHAPIVALESGECDVNVYESLDNPTVGKKKIGFATFATGIVHGLQPDALMMVLPALALPSRLAGAAFLIMFLIGTVIAMGSYTVFIGSCSQALKDRVPRITEKLTWVSSLIAIALGFAIIISQFFGFSLY

SEQ ID NO: 8275 - protein, 192 aa, Glycine max
  misc_feature (1)..(192): Ceres Seq. ID no. 15179803
MESAAVGALWGCGHDAGQVLFGLIFLILKDQLHIEIIRTWGTRVVGLTLLIIGAMGIREASEVHAPIVALESGECDVNVYESLDNPTVGKKKIGFATFATGIVHGLQPDALMMVLPALALPSRLAGAAFLIMFLIGTVIAMGSYTVFIGSCSQALKDRVPRITEKLTWVSSLIAIALGFAIIISQFFGFSLY

SEQ ID NO: 8276 - DNA, 1935 bp, Glycine max
  misc_feature (1)..(1935): Ceres Seq. ID no. 15179918
acagtaactgtaaccgttccaaatttctatgccagcgaggcagagagagaaactagagcgagaaagagagagagcgccacgcaccgttcattccttcgtcctcgccgtttctaaccgtcgcagttttccggcgaagtttctccgatttgtttaaccgaaatggcggatctgtccgttctcggttggattctgtgctccgctctgagcctcttcgcgctctacagcctggccttcggcggagcgagccgtaaccgcgcttcgccggagaagaggaatgagttatcggagaccgtgacgacctccgccggagaatgtagatcagagaaacaccacggcgacgctgacgtcatcattgtcggagccggcgtcgccggcgcctctctggcgcacactctcggcaaggatgggcgtcgggtacacgtcattgaaagagacctgagtgagcctgatcgaattgttggagagttgcttcaacccggtggctatctcaaattaattgagctcggacttgaagattttgtggacaaaattgatgctcagcaagtgtttggttatgcccttttcaaggatgggaaacatactcgtctctcttaccccttggagaagtttcactcggatgtctctggcagaagctttcacaatgggcgctttattcagaggttgcgggagaaagctgcctcacttgccaatgtacgattggagcaaggaacagtcacttccctggttgaagagaagggaacaattaaaggtgtgcaatataagaacaaagatggccaggagttgacaacatatgctcctcttaccattgtttgtgatggttgcttctcaaacttacgccgttctctttgtaatcctaaggtggatattccctcatgttttgttggtttagttttagagaactgtgaacttccatgtgcaaatcatggccatgtcatactgggagacccttcgccgattctattctatcctatcagtagtacagagattcgctgtctggtcgatgtacctggtcagaaggttccttctatatcaaacggtgaaatggaaaagtatttgaagacaatggtggctccacagatccccccccagctttatgatgccttcattgctgctgttgacaaaggcaacataaggacaatgccaaacagaagcatgccagcagatcctcatcctacacccggagcccttctgatgggagatgcattcaacatgcgacatccactaactgggggaggaatgactgtagcattgtctgatattgtggtgctgagaaatcttctaagccctttgtctgacctgaatgatgcacccacactctgtaaataccttgaatcattttataccttgcgtaagcctgtggcatccaccataaatacattggcaggtgctctttacaaagtattttgtgcatcccctgatctggcaaggaaggaaatgcgccaagcttgcttcgattatctcagccttggaggcctattctcggaaggaccagtctctttactttctggattaaaccctcgtcccttgagcttggttctccatttctttgctgttgcaatatacggtgttggccgtctattgttaccatttccttcacctaagagagtatggatcggagcccgattaatctcgggtgcatctgcaatcatccttcccataattaaggccgaagggattcgtcagatgtttttccctgccactgttccagcttattacagaactcctccagttgcacaataaattgagggaaggttgaagttcgtagttctgtaagcattttggcttcttttgtgtgtattctttgtagtctgtagcttgtaatgttttaattgaatgtatcatctctgtctctctctctctctctcctttttggtacactagaaattaaatccatgatattaaactaaattacaatccactctgggcacttaaacc

SEQ ID NO: 8277 - protein, 526 aa, Glycine max
  misc_feature (1)..(526): Ceres Seq. ID no. 15179919
MADLSVLGWILCSALSLFALYSLAFGGASRNRASPEKRNELSETVTTSAGECRSEKHHGDADVIIVGAGVAGASLAHTLGKDGRRVHVIERDLSEPDRIVGELLQPGGYLKLIELGLEDFVDKIDAQQVFGYALFKDGKHTRLSYPLEKFHSDVSGRSFHNGRFIQRLREKAASLANVRLEQGTVTSLVEEKGTIKGVQYKNKDGQELTTYAPLTIVCDGCFSNLRRSLCNPKVDIPSCFVGLVLENCELPCANHGHVILGDPSPILFYPISSTEIRCLVDVPGQKVPSISNGEMEKYLKTMVAPQIPPQLYDAFIAAVDKGNIRTMPNRSMPADPHPTPGALLMGDAFNMRHPLTGGGMTVALSDIVVLRNLLSPLSDLNDAPTLCKYLESFYTLRKPVASTINTLAGALYKVFCASPDLARKEMRQACFDYLSLGGLFSEGPVSLLSGLNPRPLSLVLHFFAVAIYGVGRLLLPFPSPKRVWIGARLISGASAIILPIIKAEGIRQMFFPATVPAYYRTPPVAQ

SEQ ID NO: 8278 - DNA, 1560 bp, Glycine max
  misc_feature (1)..(1560): Ceres Seq. ID no. 15179926
atatacactcgttcatatataattctctctgatcttattatttcctttcaagtctcttaatttctctatatttcaaaaactcaaaccctaaaatgaacgacttgttctccggctccttctcccgcaccaatgaccaagtctcgccggaccaccaccatgtgatcgagatggcggccaccgcatcgccaacggccgagggaagcgtgaatctcgaaaagttctttcaagaagttgagcaggtaaaagaggagctgaaggagctagagcgtctccatgaaaatctgcgtgggtcccacgagaaaagcaagatccttcacagcgccaaagctgtgaaggaacttcgcttacgcatggacagtgacgtgacacttgctctaaagaatgcaaagctcgttaaggttcggcttgaggcactggaccggtccaaccagaccagtcaaagcttgcctggttcgggacctggttcgtcctcagaccggaccagaacgtccgttgtgagcggactgaggaagaagctgaaggactcgatggacagcttcaacagcctcagacaaaagatatcgtcagagtatagggaaaccgtgcagcgtagatattatactgtcaccggagagaaccctgatgacaaaaccattgatctccttatttctacgggtgagagtgaaacattcttgcagaaggcgatccagcagcaaggtagagccagtgtgatggacacgatccaagagattcaagagaggcacgacacagtcaaggaaatagagagaaacctaaacgagctccaccaagtgttcttggacatggccgtgctggtgcagtcccagggcgaacaactggacgacatcgagagccacgtggcgcgcgccaattcgtacgtgcggggtggggtccagcagttgcacgtggcaaggaagcaccagaagaacacccgaaagtggacatgcatagccatcatactgctcattattatcatcttgattatagtcctccctatagttctaagaaattgattgatcacatattctaattggttcaaggtggtggctgccaagaaattggactagttcaaacttcaaagattattagtcaggtcaattcatgctgcctagaccattgcattagaaaaatatataccttggcttttgtaatcagttttgttttcttctttttggtcgcatcatgtgttgattagtttacattttccacgtacccatttgtacatgtttgaagattgagacattttggtttggtttggtttctagaagcctatgtatggacacggtgcttgcatgtaccgtttagaattattactttactaccgggaagagaactcattgaagcggttttattctagctagctagggagagaaacgctaagccagggtgatgttcatggtggtacattcttttgcaaatatgtatttaattttaagcagttctatatgggtgaactactataggcattgcaggagttacttcaattgctttgcgtgtttatgccattgcatgtacaaaagaattgcacctttttcactagcatattgataacattgctttcac

SEQ ID NO: 8279 - protein, 305 aa, Glycine max
  misc_feature (1)..(305): Ceres Seq. ID no. 15179927
MNDLFSGSFSRTNDQVSPDHHHVIEMAATASPTAEGSVNLEKFFQEVEQVKEELKELERLHENLRGSHEKSKILHSAKAVKELRLRMDSDVTLALKNAKLVKVRLEALDRSNQTSQSLPGSGPGSSSDRTRTSVVSGLRKKLKDSMDSFNSLRQKISSEYRETVQRRYYTVTGENPDDKTIDLLISTGESETFLQKAIQQQGRASVMDTIQEIQERHDTVKEIERNLNELHQVFLDMAVLVQSQGEQLDDIESHVARANSYVRGGVQQLHVARKHQKNTRKWTCIAIILLIIIILIIVLPIVLRN

SEQ ID NO: 8280 - protein, 280 aa, Glycine max
  misc_feature (1)..(280): Ceres Seq. ID no. 15179928
MAATASPTAEGSVNLEKFFQEVEQVKEELKELERLHENLRGSHEKSKILHSAKAVKELRLRMDSDVTLALKNAKLVKVRLEALDRSNQTSQSLPGSGPGSSSDRTRTSVVSGLRKKLKDSMDSFNSLRQKISSEYRETVQRRYYTVTGENPDDKTIDLLISTGESETFLQKAIQQQGRASVMDTIQEIQERHDTVKEIERNLNELHQVFLDMAVLVQSQGEQLDDIESHVARANSYVRGGVQQLHVARKHQKNTRKWTCIAIILLIIIILIIVLPIVLRN

SEQ ID NO: 8281 - protein, 219 aa, Glycine max
  misc_feature (1)..(219): Ceres Seq. ID no. 15179929
MDSDVTLALKNAKLVKVRLEALDRSNQTSQSLPGSGPGSSSDRTRTSVVSGLRKKLKDSMDSFNSLRQKISSEYRETVQRRYYTVTGENPDDKTIDLLISTGESETFLQKAIQQQGRASVMDTIQEIQERHDTVKEIERNLNELHQVFLDMAVLVQSQGEQLDDIESHVARANSYVRGGVQQLHVARKHQKNTRKWTCIAIILLIIIILIIVLPIVLRN

SEQ ID NO: 8282 - DNA, 1175 bp, Glycine max
  misc_feature (1)..(1175): Ceres Seq. ID no. 15224302
aaacttatgttatggcattctaactctgaacgatgaaatgaaatggagttccaagataagcgtttatctctgagatcgagcttgacgttcagcgagacgctgtgcgcagtgttcattccgttcataggaatagtcgaagctttggttttcacattcactagttgcttcgatttccaatctcccaggaataagaagaaacattcttctaccttcgacgacattctcaccctcgccgaggattctccatttagtattaatgaaatcgaggccttgcgtgagttgttcaagaagttgagtagttctatcattgatgatggcctcatccacaaggaagaactcacattggcactgttgaagaccaccaccggggagaatcttttccttgacagggtgtttgatgtctttgatgaaaaaagaaacggcgttatagaatttgaggagtttgtgcatgctctcagtatctttcatccttgtactcctctggaaaagaaaattgattttgcttttagattgtatgacttgagacagactggatatattgagagagaagaagttaggcaaatggttgttgccattctgtcagaatgtggcatggatctggatgatgaaatccttgataccattattgataagacatttcaagatgctgatgctgacaaagatgataaaataagcaaagaagaatggaaggcatttgtcattcgacacccgacactcttgaagcacatgactctacctcatctaaaggacatcactacactgtttaccagtttcatcttcaacaccgaagttgatgattctcactggcatattaatggcaatcattaacattgaggagttgaagcttgttgttctgttgcactctcccaatgttgactgcatcacaccaacgagagaattcatggaagtgaatcaaaccaccaaagagtgttaaaaatttgatccgaaccagtaaaaagggcttaaattgaatccaattactgtttggtttgatcagcttactgtgcatagtacagctcattttggccggtgtacaaaatttattggtatgatcataaaaggtttaactatttagcctccatgtctacacaattttaggccccgatcggggatggttgtaacttatcagttttcaattttgaaatgttatttttaaatccaagacctgtttggat

SEQ ID NO: 8283 - protein, 261 aa, Glycine max
  misc_feature (1)..(261): Ceres Seq. ID no. 15224303
MEFQDKRLSLRSSLTFSETLCAVFIPFIGIVEALVFTFTSCFDFQSPRNKKKHSSTFDDILTLAEDSPFSINEIEALRELFKKLSSSIIDDGLIHKEELTLALLKTTTGENLFLDRVFDVFDEKRNGVIEFEEFVHALSIFHPCTPLEKKIDFAFRLYDLRQTGYIEREEVRQMVVAILSECGMDLDDEILDTIIDKTFQDADADKDDKISKEEWKAFVIRHPTLLKHMTLPHLKDITTLFTSFIFNTEVDDSHWHINGNH

SEQ ID NO: 8284 - DNA, 566 bp, Glycine max
  misc_feature (1)..(566): Ceres Seq. ID no. 15224326
atcacagcaggacgtacacagctagctgcccagctctcaaagcctcgctcgaatcattagctagcagcatcgaatcatcagcatggcttctgccggccgtcgtcccacggtgctccagcagatcgctctcttcgtcgtcgtcgccgcggtgatcatgaacagctccgtctgccttggagccgctggccacgacgccactgtagtaggcactggtagcaacgaccctaaccaccctgcttttccgtcgccgcctggtaaaccctacaccggtcgtccgtgcagcaaaatttacggctgtaatgtaccaccggcaggtggccagccctaattacacccgtgcgcaggcctcatcttccaaaacaatgcaaggatcgatcggtttatgtaacggaacggcggcctagacgcatatactatatgcggcatcaatgcatgcctcctatgtaatgtatgtaacgtatcatcacaagttactctaccgccatgcacgaccttatacagtgataccatctcgtgtatatactagctacttgcactcgaataaaactggactgttgcatgtctgg

SEQ ID NO: 8285 - protein, 81 aa, Glycine max
  misc_feature (1)..(81): Ceres Seq. ID no. 15224327
MASAGRRPTVLQQIALFVVVAAVIMNSSVCLGAAGHDATVVGTGSNDPNHPAFPSPPGKPYTGRPCSKIYGCNVPPAGGQP

SEQ ID NO: 8286 - protein, 57 aa, Glycine max
  misc_feature (1)..(57): Ceres Seq. ID no. 15224328
MNSSVCLGAAGHDATVVGTGSNDPNHPAFPSPPGKPYTGRPCSKIYGCNVPPAGGQP

SEQ ID NO: 8287 - protein, 49 aa, Glycine max
  misc_feature (1)..(49): Ceres Seq. ID no. 15224329
HSRTYTASCPALKASLESLASSIESSAWLLPAVVPRCSSRSLSSSSSPR

SEQ ID NO: 8288 - DNA, 1185 bp, Glycine max
  misc_feature (1)..(1185): Ceres Seq. ID no. 15224330
actacctacctacccttttgcagccacttaaacaaagtcattgacaaaagcacacaaagtctcttcccctcataaagcactgattttcacgcagaactcagctttagttcgtgcttcattaacatgggtgctggtgactactacaaaatactgaaggtgaagcatgatgccactgatgaagaagtgaagaaggcttataagaaattggcaatgaaatggcacccagataagaaccttgaagaccctcttaggaaagaagagtttgaggccaagtttaaacaagtttctgaggcctatgatgtgcttagtgacccaaagaagcgccagatctatgacttgtacggtcactatccccttaactctcaacgcttcaccaaggaatatggctatgggaacatgaaggatgcaggggtggttgaaagcagcttgctttgtacccttgaagagctttacaacggttgcaaaaagaagttgaaggtctcaaggattgttcctgatgaattcggagagttaaggtctgtagaagaaatcttgaagatagacataaagcctggttggaagaagggcacaaaaataacttttcctgggaaaggcaaccaagaaccaggatttgctccatctgatctaatttttgagttggatgagaagcctcatgctattttcaagagggatggaaatgatcttgtagtgatgcataagatattacttgtggatgctctcacaggaaagactctcaacttgactactttggatggaagagatctcacaatcaaagtggctgatattgtgaaacctggctatgagctggtggtcccaaatgaaggcatgcccatctcaaaggaacctggcaagaaaggaaacctcagaatcatgtttgatgttatgtttccatcaaggctgaccacacaacagaagtatgatctgaaaaggattctcagtgatgttgattactaagccaattaatggctgtaactatccattaacatcctctttcacatgaagatcagtttacactgtaaataacttaaaagtaattccacttatctataagaagtttgtgcatattacaaattatacctagcatagttgctactgctaccatatatgaagcatgatgtagctttgtaaacaagtctatatcaatatttttacagttttagtaattttactctgctgttttagatt

SEQ ID NO: 8289 - protein, 276 aa, Glycine max
  misc_feature (1)..(276): Ceres Seq. ID no. 15224331
MGAGDYYKILKVKHDATDEEVKKAYKKLAMKWHPDKNLEDPLRKEEFEAKFKQVSEAYDVLSDPKKRQIYDLYGHYPLNSQRFTKEYGYGNMKDAGVVESSLLCTLEELYNGCKKKLKVSRIVPDEFGELRSVEEILKIDIKPGWKKGTKITFPGKGNQEPGFAPSDLIFELDEKPHAIFKRDGNDLVVMHKILLVDALTGKTLNLTTLDGRDLTIKVADIVKPGYELVVPNEGMPISKEPGKKGNLRIMFDVMFPSRLTTQQKYDLKRILSDVDY

SEQ ID NO: 8290 - protein, 247 aa, Glycine max
  misc_feature (1)..(247): Ceres Seq. ID no. 15224332
MKWHPDKNLEDPLRKEEFEAKFKQVSEAYDVLSDPKKRQIYDLYGHYPLNSQRFTKEYGYGNMKDAGVVESSLLCTLEELYNGCKKKLKVSRIVPDEFGELRSVEEILKIDIKPGWKKGTKITFPGKGNQEPGFAPSDLIFELDEKPHAIFKRDGNDLVVMHKILLVDALTGKTLNLTTLDGRDLTIKVADIVKPGYELVVPNEGMPISKEPGKKGNLRIMFDVMFPSRLTTQQKYDLKRILSDVDY

SEQ ID NO: 8291 - protein, 185 aa, Glycine max
  misc_feature (1)..(185): Ceres Seq. ID no. 15224333
MKDAGVVESSLLCTLEELYNGCKKKLKVSRIVPDEFGELRSVEEILKIDIKPGWKKGTKITFPGKGNQEPGFAPSDLIFELDEKPHAIFKRDGNDLVVMHKILLVDALTGKTLNLTTLDGRDLTIKVADIVKPGYELVVPNEGMPISKEPGKKGNLRIMFDVMFPSRLTTQQKYDLKRILSDVDY

SEQ ID NO: 8292 - DNA, 1443 bp, Glycine max
  misc_feature (1)..(1443): Ceres Seq. ID no. 15224376
cagctacgtaggccccccccccggtggccaaacccgacttcccagaagtggtgtattttgcacaaaataaatgaaatgggtgtagattaggaattttgaggagaaagagcatctagaatggttaaaaaacctccttctgttctttcagtcggttcttcttgtcctgatctttcacacccagaagatccacttgtttcccactcttactttgtcaatgaaaggttgtgggtggagttcaatggcggtgacaaattctgaaaatcgtcttcttgatgaaaacacctgtggttcattgttagaaaagttgcaggaaatattggatggggttggtgagaataatgaccagcaagataagatgatccttcatatagagcaagagtttggatgtgtacaaaagaaatgttgagcaggcttctaagtcaagggcactgctacttcaatccttgtcagatgctaagcttgagctctctagtcttttattggctcttggtgaaaacagcttcatgggaatggctgaagtggaagttgaaaggcttcatcagcagaaagcgaacaggatgaaagaaattgcttttaagaagcaagacgagcttgaaaagatatatgcccatgcgtatgtagaaataaaccttgaagctgcttgagggaatattttgtcactgattgactttggaaacattgaaccatatgaattactggctgacatggacaaacagatagctgcagcgaaagaagaagctttaagccaaaaagaaatattggacaaggttgagaaatggatgtcagcatgtgaagaagagagttggcttgaagactataatagggtacttataatcaaccatcttcattctatatttgagtctctaatatcttgttgcatgcttacatcttaggtggaaaagttgaatcacttgagaatctaactttatttctattaataacccctaattctaggtagaaattgaccatgatagtcatttgcactccaatttatgcaaaccaatgtacatctttaatgtatttaacctaattaatgtttggtactaaaatattttaagtgcaaaaaaaaaaaaaaaaaaaaaaaaaaaaaaaaaaaaaaaaaaaaaaaaaaaaaaaaaaaaaaaaaaaaaaaaaaaaaaaaaaaaaaagaaaaaaaaaaaaaaaaaaaatttcctggcaccccgggggatcccctatttttaaaggggccccccccgggggggacccccactttttttcccctttagggggggtaaatttcaagttgggggaaahcagggccaaagtgtttccggggggaaattgttttcccctcaaaattcccccaaaaaataaaasccgaaaaaaaaaagggaaaagccgggggggccaaaggrgggrgctaaccccctttatttgggkgggscyccckgccccttttccagksggaaaacctgtcgggcc

SEQ ID NO: 8293 - protein, 63 aa, Glycine max
  misc_feature (1)..(63): Ceres Seq. ID no. 15224377
MKGCGWSSMAVTNSENRLLDENTCGSLLEKLQEILDGVGENNDQQDKMILHIEQEFGCVQKKC

SEQ ID NO: 8294 - protein, 62 aa, Glycine max
  misc_feature (1)..(62): Ceres Seq. ID no. 15224378
MDKQIAAAKEEALSQKEILDKVEKWMSACEEESWLEDYNRVLIINHLHSIFESLISCCMLTS

SEQ ID NO: 8295 - protein, 58 aa, Glycine max
  misc_feature (1)..(58): Ceres Seq. ID no. 15224379
MCTKEMLSRLLSQGHCYFNPCQMLSLSSLVFYWLLVKTASWEWLKWKLKGFISRKRTG

SEQ ID NO: 8296 - DNA, 1272 bp, Glycine max
  misc_feature (1)..(1272): Ceres Seq. ID no. 15224449
gtcagctacgtaggcccccccccccagacccatctatccaaactattaggatacgattacactatcgaataccagtttggctctgacaatgctgcagcagacgctctgtcacgtataccgccacaaggtcaatgccttacactctcccttcccactttcgaattcctcggggaagtacgaaccttgcttcatcaatcttcgatcttcttggacatgtggaacaaggtaaggactagccccactgaccttccgggctactccattcgccgggagctactcttttatcacaacaagctatggcttctgtcagattgctcctttattagtggaattcagttattgcaatatagccattctgttatggtattacctgcttttgtcacttctgttactaggccttgtagtcaatttccaccaatatcagtactttattggcctctatatatacaagatgaatcaataaaagaagcaaggaatatctcagtattttttggtctatagtattgcaaattttgatttacctaacatcttcattagacgcacaactgatattcagttctttcccttgataatctttggattaactacctactcttttgttctacaggaagcatacatgaatggaccagtgtctcagaaagaacctgctcctggacttgcatactttcacatcccgctacccgaatatgctagttttgactcatcaaacttcacaggtgtgaaacaagaaggcataagttctgcttctgtgaattctggcttcttcacaacattggttgaagcaggagatgtgaaggcagttttcactggccatgatcatgtcaatgacttctgtggcaagctaacgggtatacatctttgttatgctgggggatttggatatcacgcttatggaaaagctggatggtccaggagagcaagagtggtgctagttagcctggagaaaacagataatggccgttgggaagatgtcaaatcaattaaaacatggaagcgccttgatgatcaaaatctaactggtattgatggtcaggtcttatggagcaagagctttggcagtaagatatctctggattctggaatacttggtgtactctatttcttgatttcaaacttgtgctacagactaatagatgaaatctatctttagaaattacatataatgtagcagatgccaactggagactgaaaatgaacttctgtttaggcatcatacttggcatatctgagtttataaaaagataccaggaaacacataacttttgctttttt

SEQ ID NO: 8297 - protein, 177 aa, Glycine max
  misc_feature (1)..(177): Ceres Seq. ID no. 15224450
MNGPVSQKEPAPGLAYFHIPLPEYASFDSSNFTGVKQEGISSASVNSGFFTTLVEAGDVKAVFTGHDHVNDFCGKLTGIHLCYAGGFGYHAYGKAGWSRRARVVLVSLEKTDNGRWEDVKSIKTWKRLDDQNLTGIDGQVLWSKSFGSKISLDSGILGVLYFLISNLCYRLIDEIYL

SEQ ID NO: 8298 - protein, 166 aa, Glycine max
  misc_feature (1)..(166): Ceres Seq. ID no. 15224451
VSYVGPPPQTHLSKLLGYDYTIEYQFGSDNAAADALSRIPPQGQCLTLSLPTFEFLGEVRTLLHQSSIFLDMWNKVRTSPTDLPGYSIRRELLFYHNKLWLLSDCSFISGIQLLQYSHSVMVLPAFVTSVTRPCSQFPPISVLYWPLYIQDESIKEARNISVFFGL

SEQ ID NO: 8299 - protein, 95 aa, Glycine max
  misc_feature (1)..(95): Ceres Seq. ID no. 15224452
MWNKVRTSPTDLPGYSIRRELLFYHNKLWLLSDCSFISGIQLLQYSHSVMVLPAFVTSVTRPCSQFPPISVLYWPLYIQDESIKEARNISVFFGL

SEQ ID NO: 8300 - DNA, 725 bp, Glycine max
  misc_feature (1)..(725): Ceres Seq. ID no. 15224464
agagaaatgaaatttattgctgaaaatagggcatcaatcacgtatgaattaccattagcagagatggttggtgatttctttgaccagttgaagtcgagaagtaagggttatgctagtatggagtatacctttgtcgggtacactgaaagtaatttaattaaacttgacatacggataaatggtgactgtgtggagccattggctacaattgtgcacaatgataaggcatattcggtgggaagggctttgactctaaagttgaaggagctcataccacgacaaatgtttaaagtaccaattcaagcgtgcataggatcaaaagtgatcgctagtgaagcgatatccgcaataaggaaggatgtactagccaaatgctacggtggggatatttcgagaaaaaagaaattgcttaagaaacaggctgaaggaaagaaaaggatgaagtctattggtaaagttgatgttccccaagaagctttcatggcagttttgaaacttgaaaaggaggtaatatgatcgtgtttacgtgtaagttgcaacatgatatgaaattgtaaatatattaagaaaatattagaaccttgatctccttttgctcggtataattattcaaatgttgttattgtatgattcatagttgcatacaagattctggatcattgataggatctctttaccattaaaaattgaaatattgtttgtcaaaaaaaaaaaaaaaaaaaaaa

SEQ ID NO: 8301 - protein, 171 aa, Glycine max
  misc_feature (1)..(171): Ceres Seq. ID no. 15224465
REMKFIAENRASITYELPLAEMVGDFFDQLKSRSKGYASMEYTFVGYTESNLIKLDIRINGDCVEPLATIVHNDKAYSVGRALTLKLKELIPRQMFKVPIQACIGSKVIASEAISAIRKDVLAKCYGGDISRKKKLLKKQAEGKKRMKSIGKVDVPQEAFMAVLKLEKEVI

SEQ ID NO: 8302 - protein, 169 aa, Glycine max
  misc_feature (1)..(169): Ceres Seq. ID no. 15224466
MKFIAENRASITYELPLAEMVGDFFDQLKSRSKGYASMEYTFVGYTESNLIKLDIRINGDCVEPLATIVHNDKAYSVGRALTLKLKELIPRQMFKVPIQACIGSKVIASEAISAIRKDVLAKCYGGDISRKKKLLKKQAEGKKRMKSIGKVDVPQEAFMAVLKLEKEVI

SEQ ID NO: 8303 - protein, 150 aa, Glycine max
  misc_feature (1)..(150): Ceres Seq. ID no. 15224467
MVGDFFDQLKSRSKGYASMEYTFVGYTESNLIKLDIRINGDCVEPLATIVHNDKAYSVGRALTLKLKELIPRQMFKVPIQACIGSKVIASEAISAIRKDVLAKCYGGDISRKKKLLKKQAEGKKRMKSIGKVDVPQEAFMAVLKLEKEVI

SEQ ID NO: 8304 - DNA, 1375 bp, Glycine max
  misc_feature (1)..(1375): Ceres Seq. ID no. 15224520
ggataaattatttagggggcagaaaagatcaaccgagtctaattccagcctttggctgattctctttgcaaaccaatctcatcatatattctcaaaccatatcagcttccccaccacacaaaaccataaaccaaaaactccattgattgaagaaaaagagagcatcatatcatcgtattcatggacacagaacaagaagagatgcagttcatggggctctacggcgtctacagagaatcctacaagatcatattcgcatggagcaaggtcttcaacaagatcaccttaaccctaatcctccctctctccttcatctttctcatccacatcgaagtctccaacatcctcttcggaaaaatcctccacaacacccaacaaatgatggaaaccccacaagacacgccccaataccacaacctcaccaacatgctctcttccgaatgggccattttcattctcttcaagctcctctacttcaccttcctcctcgtcttctccctcttatccacctcagcagcagtctacaccgtggcctcaatctacacttcacgagaagtcaccttctccaaagtcatgaacgttgttcccaaagtatggaaaagactcatggtaacttttttatgcacctttgtggcgtttttcgcgtacaacgttatgacactcgttgttttcgttatatgggcacttgcaataggactaaggaatggtggggttgtggttttggttgtgttggggatgttgtatttcgcggggtttgtgtacttaacggtggtttggcaactggcgagtgtggtgaccgtgttggaggaagacacgtgcggggtaagagcaatgatgaagaccaacgagttgataaaagggagaatagggttgaccgtactcatattcttgaagctcgtgatttcttttgggttgatacagtttctgttcaagaaaacggtggtacaagggtggaagttggggtctgtggatagaacgatttatggggtggtgtgtttggtgctgttctctcagttgtaccttttccaacttgttatacaaaccgtgctctatttcgtttgcaagtcctaccaccatcagaatattgacaaatctgctttgtcggatcaccttgaagtgtatcatggtgagtatgagcctttgaaggctaaagatgttcagatggaagagtgccatgtttgatagatatagcaaaattatgtgcatatctatctgctatagtttctaggtgtcataagaaatatgttccaatgtttgaaattaaatcaatcagatatatatgtcagagtgctgaatacacaggattagttatctgcagcatgtgccttaatttgcttttgcgctacgtgttaataaattcttgtagtttttattc

SEQ ID NO: 8305 - protein, 333 aa, Glycine max
  misc_feature (1)..(333): Ceres Seq. ID no. 15224521
MDTEQEEMQFMGLYGVYRESYKIIFAWSKVFNKITLTLILPLSFIFLIHIEVSNILFGKILHNTQQMMETPQDTPQYHNLTNMLSSEWAIFILFKLLYFTFLLVFSLLSTSAAVYTVASIYTSREVTFSKVMNVVPKVWKRLMVTFLCTFVAFFAYNVMTLVVFVIWALAIGLRNGGVVVLVVLGMLYFAGFVYLTVVWQLASVVTVLEEDTCGVRAMMKTNELIKGRIGLTVLIFLKLVISFGLIQFLFKKTVVQGWKLGSVDRTIYGVVCLVLFSQLYLFQLVIQTVLYFVCKSYHHQNIDKSALSDHLEVYHGEYEPLKAKDVQMEECHV

SEQ ID NO: 8306 - protein, 326 aa, Glycine max
  misc_feature (1)..(326): Ceres Seq. ID no. 15224522
MQFMGLYGVYRESYKIIFAWSKVFNKITLTLILPLSFIFLIHIEVSNILFGKILHNTQQMMETPQDTPQYHNLTNMLSSEWAIFILFKLLYFTFLLVFSLLSTSAAVYTVASIYTSREVTFSKVMNVVPKVWKRLMVTFLCTFVAFFAYNVMTLVVFVIWALAIGLRNGGVVVLVVLGMLYFAGFVYLTVVWQLASVVTVLEEDTCGVRAMMKTNELIKGRIGLTVLIFLKLVISFGLIQFLFKKTVVQGWKLGSVDRTIYGVVCLVLFSQLYLFQLVIQTVLYFVCKSYHHQNIDKSALSDHLEVYHGEYEPLKAKDVQMEECHV

SEQ ID NO: 8307 - protein, 323 aa, Glycine max
  misc_feature (1)..(323): Ceres Seq. ID no. 15224523
MGLYGVYRESYKIIFAWSKVFNKITLTLILPLSFIFLIHIEVSNILFGKILHNTQQMMETPQDTPQYHNLTNMLSSEWAIFILFKLLYFTFLLVFSLLSTSAAVYTVASIYTSREVTFSKVMNVVPKVWKRLMVTFLCTFVAFFAYNVMTLVVFVIWALAIGLRNGGVVVLVVLGMLYFAGFVYLTVVWQLASVVTVLEEDTCGVRAMMKTNELIKGRIGLTVLIFLKLVISFGLIQFLFKKTVVQGWKLGSVDRTIYGVVCLVLFSQLYLFQLVIQTVLYFVCKSYHHQNIDKSALSDHLEVYHGEYEPLKAKDVQMEECHV

SEQ ID NO: 8308 - DNA, 1183 bp, Glycine max
  misc_feature (1)..(1183): Ceres Seq. ID no. 15224554
accgggccccccctcgagtcagctacgtaggcccccccccccctgttaaaaagattaggactagcagttgcacctaagagaaagatgggtgatgctgatgctgaaggacatttgtctactagccctaatcagttagatggtgacaaaagagctaccaatcataaatcagtgaatttggagggaagcctgttggttcagcacctgcaaaaaaagaagagagtccaggctttcaatgaagctcaagaagctctgatcaaagttctatatgagcaattcaaggatcacagaagatgcagttacatgatagccaatgcactggatgaggatggtaaaatcactgctgctcaagtctctcgaaaacttaagcaacttggtttatctcttcctcagaagagttctggaggcaaaatgcacccaaaggatgcagatctcatggatctttcaaatgataggattaatgaatctgatgatgagacattggtaacattgataaaaaggaagaaaatggagaatgacaaattatcaaggggacagttacatggacaaatcagtgaggatagattgtcaatagatgattctgatgatgaaatgctcagctctgttctcaaggaaaaaataaatagcaaagtatcaactgaacaattacttgaacccatcaatgtggatgcattgtcaagagatgattctgatgatgaaatgcccagctctgctctcaaaagaactagaagatcctctcttaattcaaagcaagttgagcttgaaaatatccaaattcaggagagaataatgggcgatgattctttcaatgaaggcaaaacagatgctttggaaagggataatcgtgttgattctatgaattcctcccaaatagaacatcagcaaatggatgacttagcagattcagaagatgaagtggctgttagtggatttcctgacaatgccagatctagaaggcagctgagaatggtgattgatcctgaggatgatgactgaaggagaaagcatgattagggtccaggtttctttatttttgcatatattttctactaaactgaaggagaaagcattgattagtgagtgttgcagagacaagatatgaggatgtttacaagttgccatccttattacaacatatcagttctatatttatagagtataattataactgttataaactttcatt

SEQ ID NO: 8309 - protein, 302 aa, Glycine max
  misc_feature (1)..(302): Ceres Seq. ID no. 15224555
MGDADAEGHLSTSPNQLDGDKRATNHKSVNLEGSLLVQHLQKKKRVQAFNEAQEALIKVLYEQFKDHRRCSYMIANALDEDGKITAAQVSRKLKQLGLSLPQKSSGGKMHPKDADLMDLSNDRINESDDETLVTLIKRKKMENDKLSRGQLHGQISEDRLSIDDSDDEMLSSVLKEKINSKVSTEQLLEPINVDALSRDDSDDEMPSSALKRTRRSSLNSKQVELENIQIQERIMGDDSFNEGKTDALERDNRVDSMNSSQIEHQQMDDLADSEDEVAVSGFPDNARSRRQLRMVIDPEDDD

SEQ ID NO: 8310 - protein, 230 aa, Glycine max
  misc_feature (1)..(230): Ceres Seq. ID no. 15224556
MIANALDEDGKITAAQVSRKLKQLGLSLPQKSSGGKMHPKDADLMDLSNDRINESDDETLVTLIKRKKMENDKLSRGQLHGQISEDRLSIDDSDDEMLSSVLKEKINSKVSTEQLLEPINVDALSRDDSDDEMPSSALKRTRRSSLNSKQVELENIQIQERIMGDDSFNEGKTDALERDNRVDSMNSSQIEHQQMDDLADSEDEVAVSGFPDNARSRRQLRMVIDPEDDD

SEQ ID NO: 8311 - protein, 194 aa, Glycine max
  misc_feature (1)..(194): Ceres Seq. ID no. 15224557
MHPKDADLMDLSNDRINESDDETLVTLIKRKKMENDKLSRGQLHGQISEDRLSIDDSDDEMLSSVLKEKINSKVSTEQLLEPINVDALSRDDSDDEMPSSALKRTRRSSLNSKQVELENIQIQERIMGDDSFNEGKTDALERDNRVDSMNSSQIEHQQMDDLADSEDEVAVSGFPDNARSRRQLRMVIDPEDDD

SEQ ID NO: 8312 - DNA, 1364 bp, Glycine max
  misc_feature (1)..(1364): Ceres Seq. ID no. 15224558
gtcagctacgtaggccccccccccatttttaattagaaaaggcgcagaaacagaaacagaaagaatggctggtcccggcaaatgcttcctcgtgacgggtcctccgggtgtgggaaaaaccactcttattatgaaagtattcgagtccctcaaagtcaatccatccctcaagcttcagggcttctacactcgggaaattaggcgcgccggccagagggttggttttgaagtggtcacactcgacggtcgcactgccccacttgcttccatcgacatttcaacgttcattttttcattccctcactctttagctccacaccataaacatctcaatttttagtttaccataattagtacttaggacccattatctggtgtttctctgtttggtaacttgtatttattgctcatgccacttgagggtctttattcatttttcaacaaaggtactcatgtgatagtaaatcctaaaggggcaggcaaaaaatagatgaaacgaactgaactgtaaaaggggtttaggcaaactgaactgaactgcaactgaattgaaccggactgttctaaataaacatcttatacaactctgcctatttgattaaatggtgtcatttgattgcattgactttggcagccccgagtctctcagatggcctaatgttggcaagtataaagttgatgttgcttccttcgagtcactagcacttcccgagttacaggttaaagaagacactgatctcttcatcattgacgaagttggtaagatggagttgttcagttcctcattcttccctgcagttctaagagttttggagtcaaatatcccagttttggcttccattccagttccaaaattcggcagagacatacctgaagttgcaaggttgcggaatcatgcaggggcaacttgttttacattgagcgttagtaacagagatgctgttagagaacagatacgctcacaattggaagatatgctgacaaaacactagtcattgcaagtttgtggtctgaattcataccgtgtaatgtagaataaattatgaatttatgatgggctaatactatttagtgagagaaaaaaaaagtgcaaatcttaatcgagccttaaataagttgataagctagttgagctttgaataccattagtagtatacatgacttatctgcatgatagtccttttgtaatgacttatctgtatgtctgtattatggacaatatcttctgcaggaaaaaaaaaaaaaaaaaaaaaaaaaaaaaaaaaaaaaaaaaaaaaaaaaaaaaaagaaaaaaaaaaaaaaaaaagatttcctgcaccccggggaatccactagttctaaagcgcccgcccccgcgggggagc

SEQ ID NO: 8313 - protein, 129 aa, Glycine max
  misc_feature (1)..(129): Ceres Seq. ID no. 15224559
MVSFDCIDFGSPESLRWPNVGKYKVDVASFESLALPELQVKEDTDLFIIDEVGKMELFSSSFFPAVLRVLESNIPVLASIPVPKFGRDIPEVARLRNHAGATCFTLSVSNRDAVREQIRSQLEDMLTKH

SEQ ID NO: 8314 - protein, 91 aa, Glycine max
  misc_feature (1)..(91): Ceres Seq. ID no. 15224560
MAGPGKCFLVTGPPGVGKTTLIMKVFESLKVNPSLKLQGFYTREIRRAGQRVGFEVVTLDGRTAPLASIDISTFIFSFPHSLAPHHKHLNF

SEQ ID NO: 8315 - protein, 75 aa, Glycine max
  misc_feature (1)..(75): Ceres Seq. ID no. 15224561
MELFSSSFFPAVLRVLESNIPVLASIPVPKFGRDIPEVARLRNHAGATCFTLSVSNRDAVREQIRSQLEDMLTKH

SEQ ID NO: 8316 - DNA, 515 bp, Glycine max
  misc_feature (1)..(515): Ceres Seq. ID no. 15224713
ttttaataagcacaaaaaacagtggtcaggttagagtgcaaactgtggacgtgtggaacggtgcattattcagtttgcagctattttacaaccaaataataatactaatatataatttttggtcttaaaactgcgcctaaagggttgttggcttggtttctaatctgctcgccactatgactacttcaaagcgcctagcggacaggaaaattgcaaggtttgaaaagaatattagcaagaaaagttcagaaaactctaagaagggatatgcctatcctgtgggccccatcgtgcttggattcttcgtctttgttgtcgttggatcatctctgtttcagattattaggacagctactagtcgtgggatggcctaaggcaggaggaatgtttgtgaaatgttatatatatcaagtagacatgtcgaaaacataataattcactttagatcagcaatgtgttgataaagagtgaaatgagaacttaactttgcttaataaacgaatatttcatttctt

SEQ ID NO: 8317 - protein, 65 aa, Glycine max
  misc_feature (1)..(65): Ceres Seq. ID no. 15224714
MTTSKRLADRKIARFEKNISKKSSENSKKGYAYPVGPIVLGFFVFVVVGSSLFQIIRTATSRGMA

SEQ ID NO: 8318 - protein, 54 aa, Glycine max
  misc_feature (1)..(54): Ceres Seq. ID no. 15224715
MPILWAPSCLDSSSLLSLDHLCFRLLGQLLVVGWPKAGGMFVKCYIYQVDMSKT

SEQ ID NO: 8319 - protein, 41 aa, Glycine max
  misc_feature (1)..(41): Ceres Seq. ID no. 15224716
LISTKNSGQVRVQTVDVWNGALFSLQLFYNQIIILIYNFWS

SEQ ID NO: 8320 - DNA, 1378 bp, Glycine max
  misc_feature (1)..(1378): Ceres Seq. ID no. 15224803
accaccaccacaccacggccagccatctcacaacataagctagccagcatacacgagtccagactacctagctagcgttgccaaggttccaatcatcaatggcgagagcgatcgtgcatgcggccgtcatggccgcggccgcactgttcgtgctgctggccgctgcgccggcgccggcgagcgccattgacttcggcgaccacgacctggcgtcggaggactccctgtgggcgctgtacgagcgctggagggagcagcacacggtggcgcgagacctcggcgagaaagcccgccgcttcaacgtcttcagggagaacgtccgcctcatccacgagttcaaccgcggcgacgccccctacaagctccgcctcaaccgcttcggcgacatgaccgcggacgagttccgccgcgcctacgcctcctcccgcgtctctcaccaccgcatgttcagccgtaaggagggcgatggcggcttcatgcacgggagcgctcgggacgtgccgccttcggtggactggcggcagaagggcgcggtgaccgccgtcaaggaccaggggcagtgcggcagctgctgggctttctccacgatcgcggccgtggagggcgtcaacgcgatccgcaccaagaacctcacgtctctgtccgagcagcagctcgtggactgcgacaccaagtccaacgccggctgcaacggcggcctcatggactacgccttccagtacatcgccaagcacggcggggtcgccgccgaggacgcgtacccctacaaggcccggcaggcctcctcctgcaacaagaagccgtccgccgtggtcaccatcgacgggtacgaggacgtgccggccaacgacgagacggcgctgaagaaggcggtggccgcgcagccggtggccgtggccatcgaggctagcgggtcgcacttccagttctactcggagggggtgtttgcgggcaagtgcgggacggagctggaccatggcgtgacggcggtggggtacggcgccaccgtggacggcaccaagtactggatcgtgaagaactcgtgggggccggagtggggcgaaaaggggtacatccgcatgaagcgcgatgtgaaagacaaggaggggctctgcggcatcgccatggaggcgtcctaccccgtcaagacctcagccaacccgaagcatgccagtgccaatgacgagctctgaatctctcatcgattgtcttacaaattattggccccaatatgcatgatcagggcattatcgctagggaaaaaaataagtagtcaatcgttatgcacccatcacatatagtgcactactacttaattgtttgtactagtaaaacgcccatgcgttgccacgggcttttgaaaaaaatttaagatgcc

SEQ ID NO: 8321 - protein, 364 aa, Glycine max
  misc_feature (1)..(364): Ceres Seq. ID no. 15224804
MARAIVHAAVMAAAALFVLLAAAPAPASAIDFGDHDLASEDSLWALYERWREQHTVARDLGEKARRFNVFRENVRLIHEFNRGDAPYKLRLNRFGDMTADEFRRAYASSRVSHHRMFSRKEGDGGFMHGSARDVPPSVDWRQKGAVTAVKDQGQCGSCWAFSTIAAVEGVNAIRTKNLTSLSEQQLVDCDTKSNAGCNGGLMDYAFQYIAKHGGVAAEDAYPYKARQASSCNKKPSAVVTIDGYEDVPANDETALKKAVAAQPVAVAIEASGSHFQFYSEGVFAGKCGTELDHGVTAVGYGATVDGTKYWIVKNSWGPEWGEKGYIRMKRDVKDKEGLCGIAMEASYPVKTSANPKHASANDEL

SEQ ID NO: 8322 - protein, 354 aa, Glycine max
  misc_feature (1)..(354): Ceres Seq. ID no. 15224805
MAAAALFVLLAAAPAPASAIDFGDHDLASEDSLWALYERWREQHTVARDLGEKARRFNVFRENVRLIHEFNRGDAPYKLRLNRFGDMTADEFRRAYASSRVSHHRMFSRKEGDGGFMHGSARDVPPSVDWRQKGAVTAVKDQGQCGSCWAFSTIAAVEGVNAIRTKNLTSLSEQQLVDCDTKSNAGCNGGLMDYAFQYIAKHGGVAAEDAYPYKARQASSCNKKPSAVVTIDGYEDVPANDETALKKAVAAQPVAVAIEASGSHFQFYSEGVFAGKCGTELDHGVTAVGYGATVDGTKYWIVKNSWGPEWGEKGYIRMKRDVKDKEGLCGIAMEASYPVKTSANPKHASANDEL

SEQ ID NO: 8323 - protein, 268 aa, Glycine max
  misc_feature (1)..(268): Ceres Seq. ID no. 15224806
MTADEFRRAYASSRVSHHRMFSRKEGDGGFMHGSARDVPPSVDWRQKGAVTAVKDQGQCGSCWAFSTIAAVEGVNAIRTKNLTSLSEQQLVDCDTKSNAGCNGGLMDYAFQYIAKHGGVAAEDAYPYKARQASSCNKKPSAVVTIDGYEDVPANDETALKKAVAAQPVAVAIEASGSHFQFYSEGVFAGKCGTELDHGVTAVGYGATVDGTKYWIVKNSWGPEWGEKGYIRMKRDVKDKEGLCGIAMEASYPVKTSANPKHASANDEL

SEQ ID NO: 8324 - DNA, 953 bp, Glycine max
  misc_feature (1)..(953): Ceres Seq. ID no. 15224823
gagtcagctacgtaggccccccccccaatcagtcaaaggcatgtgtttagtcataccttctcaatgatttggcaaaatatgtttgtggggacttttgtttcatgttggaagttgaagaaacacaaaaatagatatggagtttctaaaaggtttcaggttttatataggccaggaaattacttatgtttctatcactaagtatgggtcctttggtatatatggattttggcatttgtcacgctcattgatatatggttgtcccccaagtttaagttcttacatgccttatctttggcgggttattggaatgtgactgagtatcctgacatgaaagttaatcttaatgttgaaatgatttggcaggagcatgcttataagtcataaccacacgtgtacaatttgtttatttggagctgtcctaaatttgtatcatttcccaaaaggaagactgtgtgcaccaggcctaattgtatgcacaccctcctccttccttctcttagttgtccacaactggagtcactctctaatgccatcaaatgggaagttttgcaaactcctcttaattacgagactcgaggaagcaaagttctcttcactacatgcagtaagagagttgcttcaaccatgcagtcaaataaagcgagtcaactagagcaattacatgaagaacattgctagaaatatgaattttggttcttgtctctcacgttgatgtgtatgacttgttctccatgggactgtgggtattgattgccgtgttttatgttctactttttcatttgtatcattggaattctataattgaaagagtgggaatataaaaatgtgaargggtgttgttttcttttgtttaataagacagcttctatacagaattatcctaagctaaatgcaagaatycyttwttygtttttttwwaaramaaagawaaaaaaaaaaaaaaagaattcctg

SEQ ID NO: 8325 - protein, 94 aa, Glycine max
  misc_feature (1)..(94): Ceres Seq. ID no. 15224824
MLISHNHTCTICLFGAVLNLYHFPKGRLCAPGLIVCTPSSFLLLVVHNWSHSLMPSNGKFCKLLLITRLEEAKFSSLHAVRELLQPCSQIKRVN

SEQ ID NO: 8326 - protein, 68 aa, Glycine max
  misc_feature (1)..(68): Ceres Seq. ID no. 15224825
MHTLLLPSLSCPQLESLSNAIKWEVLQTPLNYETRGSKVLFTTCSKRVASTMQSNKASQLEQLHEEHC

SEQ ID NO: 8327 - protein, 59 aa, Glycine max
  misc_feature (1)..(59): Ceres Seq. ID no. 15224826
MEFLKGFRFYIGQEITYVSITKYGSFGIYGFWHLSRSLIYGCPPSLSSYMPYLWRVIGM

SEQ ID NO: 8328 - DNA, 1149 bp, Glycine max
  misc_feature (1)..(1149): Ceres Seq. ID no. 15224827
gcacgagwccaktmcctagaacatccamtcgaaaacctggttgatatcaattgatgagaatggtkggagaaccataccacaaaaacaagctgtgttgtggagcctaagaaagagtttttaaaatcttggggataaaaatggccgatctatataatctcaattctcaaagactaatttaagggtttattcccagaaaaaaacttgttactgaaaatactgaactactattctacttgcctatttatgatagcagcaatttgatggaaactaaggcagaaacttgaaattcagctgaattttattggactgcaaattttctaatggtgtccaaagaaaggccaaatgctacagtcactttgtcacaatttgtcctgaacatttattcttgtactactaactgattatatattatctaccaaatcacacaggagaatgggaaaacaaccacgtacacatggattttgagcactggctggtggcagagtagagcaccagttaacccagatgctgttgttgtagttgtcttcttatgtgcttgcttaattggtggctttttttacctcaacaggtttttgttttttgcaacttcccatgttaaccatcaagttaatagtatagacactgcttggttttgacttgttatcctctccttaattgccgcgcagagcaaatgcctcaaactccataaagaagaagtcatatcagtcaatgcttcttgtgatgtccatagcttgtttgtactgcttttggtgtgcaattcagatatactggatcagtccacgtcgtccagccgtaggtgaagaggccgatcttggtgttctcgtgttcttagctatatactttttcctaccttatggtttgtgtataatgtccatgtccccaaaagatcatgatcctaatctgattcctctttaatagtgttcaccctattagagatgtgttctgcttttgccactcctatatagttgtgagggtagctagaatatttcgccagtaagtaaattgtataatcactcagcaaaactatgtgaagctatgcatccattccttgttggaactggattcttttgagcttacaggttatatttcactgactcatacgttgttatctgtatcttgttgcaaagtgatccaatatagaagtttggc

SEQ ID NO: 8329 - protein, 68 aa, Glycine max
  misc_feature (1)..(68): Ceres Seq. ID no. 15224828
MLLVMSIACLYCFWCAIQIYWISPRRPAVGEEADLGVLVFLAIYFFLPYGLCIMSMSPKDHDPNLIPL

SEQ ID NO: 8330 - protein, 64 aa, Glycine max
  misc_feature (1)..(64): Ceres Seq. ID no. 15224829
MSIACLYCFWCAIQIYWISPRRPAVGEEADLGVLVFLAIYFFLPYGLCIMSMSPKDHDPNLIPL

SEQ ID NO: 8331 - DNA, 1106 bp, Glycine max
  misc_feature (1)..(1106): Ceres Seq. ID no. 15224967
ccttgttcatttccttcacataagatacagccaagcttcattctatttgtttttgtccctggacgcagcacctttcttttgttctgttttaggtccttgtgcattttacttttgggagaattccaaaaaagttattattcatacataacatgaaggaagaatgattacttggtgtggttattcaaaccaaaattaaccaaaataatatgatgactaaaaccactttggtgttttctctccctcttcgtattaaatatttttaacactagttccttacttgaaatcataccttttatttttttggtgacttagccttaagccctcataaaaactgtcctttgatttcagccttttttcttcttcaaaaactgttgtaggatggaatgctaaaacacaaaggtacatatgaaataatatcacctgaggacattggacttgaaagaaccaatgaagtaggtattgtactgggaaagcttaggtatgtaattttcttttctctagaacacttatttttgcatggatcttgtacacactgctaatccctatgttctcttcatcctaacatgagaaaaattttatctctagctttctggacttatgtaagtcctcatggtacaagcataccggttatatttgagtgagtgcacaagaagttgtctgactatggcaggatgaaactctgcggataatgatgattcttggcctgctttattttgatgctcagaagcattctacttgttcatccatgcctggtggttgatatcagtggttgccatgctttgagaaagcgacttgaagttactatcacagtactttttgaggaagatggttatgtcgtgcatgagtggccctgtataggggaaaatcccacttgaattacggacttgacctgagaagaatgtttgaggattattactcttctcattcttctagacttctagttatttttcttatttgtattttattactatttcagtacgttatatttaaatccattcccatctgattggatgatcatgaattaccttcctgcttgtatggattatacattattatagatatatactagctcttactttctttgtgtcaaaaaaaaaaaaaaaaaa

SEQ ID NO: 8332 - protein, 52 aa, Glycine max
  misc_feature (1)..(52): Ceres Seq. ID no. 15224968
MLRSILLVHPCLVVDISGCHALRKRLEVTITVLFEEDGYVVHEWPCIGENPT

SEQ ID NO: 8333 - protein, 51 aa, Glycine max
  misc_feature (1)..(51): Ceres Seq. ID no. 15224969
MLKHKGTYEIISPEDIGLERTNEVGIVLGKLRYVIFFSLEHLFLHGSCTHC

SEQ ID NO: 8334 - protein, 50 aa, Glycine max
  misc_feature (1)..(50): Ceres Seq. ID no. 15224970
PCSFPSHKIQPSFILFVFVPGRSTFLLFCFRSLCILLLGEFQKSYYSYIT

SEQ ID NO: 8335 - DNA, 618 bp, Glycine max
  misc_feature (1)..(618): Ceres Seq. ID no. 15224985
tcccaaacccaaagcactagtagctatcccactcaagcacacgctcacgatggcatccagagctgctaccttcgtcgccctgagcctcctcctctccgccgtcgccacgcacggctgcggaccctattgccagccgccagtcgtcgtgccgacaccgcccgttgtcgttccgccgccgtaccatggaggaggagcgcacggccacggcgggcagtgctctatcgacgccctaaagctgagggtgtgcgccaacgttctcggcggcctgctcggcctcaaggtcggcgttccggcgcacgacgagtgctgcccgctgctccaggggttggtcgaccttgacgccgccgtctgcctgtgcaccgccgtcagggccaacgtcctcggcatccacctcaacgtgcctgtggacatcagcctcctcctcaaccactgcggcaagacgtgcccgtccgagttcacttgcccagcccattaacggacgcctactgctcacgggcgccgaataaaatttgctttcgatccgtacgtcgttgttattttcgtgtccacatttgaatccttgtaaccagtactactctttttgtaacaatcatcagccatccaaaaaaaaaaaaaaaa

SEQ ID NO: 8336 - protein, 157 aa, Glycine max
  misc_feature (1)..(157): Ceres Seq. ID no. 15224986
PKPKALVAIPLKHTLTMASRAATFVALSLLLSAVATHGCGPYCQPPVVVPTPPVVVPPPYHGGGAHGHGGQCSIDALKLRVCANVLGGLLGLKVGVPAHDECCPLLQGLVDLDAAVCLCTAVRANVLGIHLNVPVDISLLLNHCGKTCPSEFTCPAH

SEQ ID NO: 8337 - protein, 141 aa, Glycine max
  misc_feature (1)..(141): Ceres Seq. ID no. 15224987
MASRAATFVALSLLLSAVATHGCGPYCQPPVVVPTPPVVVPPPYHGGGAHGHGGQCSIDALKLRVCANVLGGLLGLKVGVPAHDECCPLLQGLVDLDAAVCLCTAVRANVLGIHLNVPVDISLLLNHCGKTCPSEFTCPAH

SEQ ID NO: 8338 - protein, 112 aa, Glycine max
  misc_feature (1)..(112): Ceres Seq. ID no. 15224988
SQTQSTSSYPTQAHAHDGIQSCYLRRPEPPPLRRRHARLRTLLPAASRRADTARCRSAAVPWRRSARPRRAVLYRRPKAEGVRQRSRRPARPQGRRSGARRVLPAAPGVGRP

SEQ ID NO: 8339 - DNA, 1352 bp, Glycine max
  misc_feature (1)..(1352): Ceres Seq. ID no. 15225034
aattcatgcttgtctttgccaatattctaaagtttgaattttcatcgcaacaggttagttgggatgagcctgatttgctacataatgtgaagcgagtgagcccatggttggttgagttggtatctaacgtgccaatcatccatctggcagccttctctccaccaaggaagaagcttaggttcccccttgacgttcagtttccgataccatcgttttcaggcaacccctttgggtcttctagctctagcagccccttttgttgtctctctgataacgctcctgcaggcatacagggagccaggcattctcaaattggaatatctttatcagatctccaccttaacaataagctgcagttggggttgcttccaactaaagtccaccagcttaatttgcacgccgggatttctaatgctaagagtaaagaaagtctatcatccttgctctccatgggaaattctaacatgactttggagaaatctgatcatgtcaagagacaccattttttgcttttcggtcaaccgatactcaccgagcaacaaatctctagatcttctagtgatgtcgccacggatgatgagaataaggaaaagaagaagaagggatttcttagtgactcccagtcttcagtttcaccaggaaatttatcttctactgccgagttctcttggcaactcggttctgataccagtcattgcaaggttttcatggagtctgaagatgtaggacggacacttgacttgtcctgcctttcttcttatcaagagttgtacatgagactcgctaacatgtttggaatagagaggtctgatatgttgagtcatgttctctactgcgactcatccggtgctcttaagcaaattggagaggaacccttcagtgagttcatgaagacagcaaaaagattgaccattctgacggattcaaacaacaaagatagtagaaggtgggagaaagaaaattaatgaaatatgtataggatgtgcttccggggaagatactattgtatgtgcaagtgtaactgttccttcctctttgtgacttcaaagtctgttttgcagggtttggatcacaggaactcgaaatgctgaacatggattggatgctgcatcaaataagacaggtcctctcagtatatttgcttaatatggtgtggcatggcatcggagacattgtttttagatatgaaaagttgaaggacatagttattactcagttgtaagagatgctaatatgaactgaaaattccatcaatattggcgtctttgttttcgatgtccatttgtagaaaataatgatttttcctgtatgatggacaattactattctaatattaattaattaattaacct

SEQ ID NO: 8340 - protein, 320 aa, Glycine max
  misc_feature (1)..(320): Ceres Seq. ID no. 15225035
FMLVFANILKFEFSSQQVSWDEPDLLHNVKRVSPWLVELVSNVPIIHLAAFSPPRKKLRFPLDVQFPIPSFSGNPFGSSSSSSPFCCLSDNAPAGIQGARHSQIGISLSDLHLNNKLQLGLLPTKVHQLNLHAGISNAKSKESLSSLLSMGNSNMTLEKSDHVKRHHFLLFGQPILTEQQISRSSSDVATDDENKEKKKKGFLSDSQSSVSPGNLSSTAEFSWQLGSDTSHCKVFMESEDVGRTLDLSCLSSYQELYMRLANMFGIERSDMLSHVLYCDSSGALKQIGEEPFSEFMKTAKRLTILTDSNNKDSRRWEKEN

SEQ ID NO: 8341 - protein, 319 aa, Glycine max
  misc_feature (1)..(319): Ceres Seq. ID no. 15225036
MLVFANILKFEFSSQQVSWDEPDLLHNVKRVSPWLVELVSNVPIIHLAAFSPPRKKLRFPLDVQFPIPSFSGNPFGSSSSSSPFCCLSDNAPAGIQGARHSQIGISLSDLHLNNKLQLGLLPTKVHQLNLHAGISNAKSKESLSSLLSMGNSNMTLEKSDHVKRHHFLLFGQPILTEQQISRSSSDVATDDENKEKKKKGFLSDSQSSVSPGNLSSTAEFSWQLGSDTSHCKVFMESEDVGRTLDLSCLSSYQELYMRLANMFGIERSDMLSHVLYCDSSGALKQIGEEPFSEFMKTAKRLTILTDSNNKDSRRWEKEN

SEQ ID NO: 8342 - protein, 171 aa, Glycine max
  misc_feature (1)..(171): Ceres Seq. ID no. 15225037
MGNSNMTLEKSDHVKRHHFLLFGQPILTEQQISRSSSDVATDDENKEKKKKGFLSDSQSSVSPGNLSSTAEFSWQLGSDTSHCKVFMESEDVGRTLDLSCLSSYQELYMRLANMFGIERSDMLSHVLYCDSSGALKQIGEEPFSEFMKTAKRLTILTDSNNKDSRRWEKEN

SEQ ID NO: 8343 - DNA, 1314 bp, Glycine max
  misc_feature (1)..(1314): Ceres Seq. ID no. 15225046
aacaacctaaaaaatattcactaagatttatttcccttattttattcatttattctttgttcctagtctttatcttataatttctcattgcttgcccggtaattcaagatcaacttggaaaatttgcaagatttgggatgaaatctggtcggatcttgctttgtgggatggggattttggtgggtcttatttcaatacaaagctcttcctctctcaatcccatctccctctcttcttcttcttcttcttcttcataacacaaacacaaaacataaacctttcttccaaccaaccttttttccaattcattctttgtttcttcaaaaatcttcaatccattttcaccttttcacaaatggggatggctgcagagtcacagtttcatgtcttggctgttgatgacagtctcatagataggaaactcattgagaggctcctcagaacctcttcttatgaagttactacagttgattctggtagcaaggctttagagtttctggggttgtgtgagaatgatgagagcaacccaagtacaccatatgtttgtcccaacaaccatcaggaggtggaggtgaatcttgttataacagattactgtatgcctggcatgacaggctatgacttgcttaagaaaatcaaggaatcttcatctttgagaaacataccggtggtgattatgtcatctgaaaatgtgccttcaaggattaacagatgtttggaggaaggagcagaagaatttttcttgaagcctgtgaggctgtcagatttaaacaagcttaaaccccatatgaagaaaaccaagttgaaagatcaaaaacaaggaacagtagaaaagcttgaagacttagaagttcaacagcaacagccacaacaacaaatcatcatccaaaatgagcagcaacaagcaccaaaatcccgagatcttcttcagccagagtcagagtcacatccacatgcacaaccaactattgaacaacagcaacaatcactacaacaagccaacaacaatagcaagaggaagaccatggaacagggcctttcacctgagactgacagaacaagaccaagatacagtggcatagccactgtggtatgatcataaatcattggcaaataattttcttgaatttcaaaaatgtaattctcataacttctttcttcttcttttaaaaaaaattaacttaagtgttggttaatataggctctataggagtgtagtagagttgtttcctgtacacattttcctggaaatatttccttccaattttgcttccccccaatataaatgaaaaagaaaaaagaaatattgaattg

SEQ ID NO: 8344 - protein, 246 aa, Glycine max
  misc_feature (1)..(246): Ceres Seq. ID no. 15225047
MGMAAESQFHVLAVDDSLIDRKLIERLLRTSSYEVTTVDSGSKALEFLGLCENDESNPSTPYVCPNNHQEVEVNLVITDYCMPGMTGYDLLKKIKESSSLRNIPVVIMSSENVPSRINRCLEEGAEEFFLKPVRLSDLNKLKPHMKKTKLKDQKQGTVEKLEDLEVQQQQPQQQIIIQNEQQQAPKSRDLLQPESESHPHAQPTIEQQQQSLQQANNNSKRKTMEQGLSPETDRTRPRYSGIATVV

SEQ ID NO: 8345 - protein, 244 aa, Glycine max
  misc_feature (1)..(244): Ceres Seq. ID no. 15225048
MAAESQFHVLAVDDSLIDRKLIERLLRTSSYEVTTVDSGSKALEFLGLCENDESNPSTPYVCPNNHQEVEVNLVITDYCMPGMTGYDLLKKIKESSSLRNIPVVIMSSENVPSRINRCLEEGAEEFFLKPVRLSDLNKLKPHMKKTKLKDQKQGTVEKLEDLEVQQQQPQQQIIIQNEQQQAPKSRDLLQPESESHPHAQPTIEQQQQSLQQANNNSKRKTMEQGLSPETDRTRPRYSGIATVV

SEQ ID NO: 8346 - protein, 165 aa, Glycine max
  misc_feature (1)..(165): Ceres Seq. ID no. 15225049
MPGMTGYDLLKKIKESSSLRNIPVVIMSSENVPSRINRCLEEGAEEFFLKPVRLSDLNKLKPHMKKTKLKDQKQGTVEKLEDLEVQQQQPQQQIIIQNEQQQAPKSRDLLQPESESHPHAQPTIEQQQQSLQQANNNSKRKTMEQGLSPETDRTRPRYSGIATVV

SEQ ID NO: 8347 - DNA, 938 bp, Glycine max
  misc_feature (1)..(938): Ceres Seq. ID no. 15225107
taccgggccccccctcgagtcagctacgtaggccccccccccccacaacacaatcatcaattaagaaccctgatgttttccttattgatgatattccttctgccattgcatcagatagcagtagttcatccactcaggtttctaatgtgatggttccacctatatctgagctgacgtctatggaagtaggatcacagtttcctctcagttgtatgcccagtaacatatctgaggtgcagtcttcacctgctgttttgggtttctgtagaagtcaggggatggagacagaaagcagtttattgaatcatgagctgaatgttatgggggctgatactaggaacatgggggagatagatatgatgtcaactgttttagatgaggcagacgaagctgatcatttttcacctgacacagatggaatttctaaactcccagaaatcagtgatgaattctgggaactgtttttaaggccaagcccacttacagaagacacagaggaaactaaatgtagctctctaggatgtggtttgactgaagatcagggtttgccttcagaaatgggaaataagcaggaaaattttgatacaatacaacatgttgactgtcttactcaacagatgggacttcatgcattggagtactgattgtgtgtatatatgttactcacaactgaaggttgaggtcccctttgctactgagcagacaaagccatcttacttatacaacaaagaaacctgacagatccaacaacttgatcggtgcttttatccgcttgtaatgtcgtcgtgtgttctgtttgtcattgggggcttaaaaacatacaagttcacgaaacttcatatatctccatgtattttgaattttaataactatgcccccgtttccaatgcgatgatatttttgtggggatgttccgtataattggatcataactcttg

SEQ ID NO: 8348 - protein, 213 aa, Glycine max
  misc_feature (1)..(213): Ceres Seq. ID no. 15225108
PGPPSSQLRRPPPPTTQSSIKNPDVFLIDDIPSAIASDSSSSSTQVSNVMVPPISELTSMEVGSQFPLSCMPSNISEVQSSPAVLGFCRSQGMETESSLLNHELNVMGADTRNMGEIDMMSTVLDEADEADHFSPDTDGISKLPEISDEFWELFLRPSPLTEDTEETKCSSLGCGLTEDQGLPSEMGNKQENFDTIQHVDCLTQQMGLHALEY

SEQ ID NO: 8349 - protein, 164 aa, Glycine max
  misc_feature (1)..(164): Ceres Seq. ID no. 15225109
MVPPISELTSMEVGSQFPLSCMPSNISEVQSSPAVLGFCRSQGMETESSLLNHELNVMGADTRNMGEIDMMSTVLDEADEADHFSPDTDGISKLPEISDEFWELFLRPSPLTEDTEETKCSSLGCGLTEDQGLPSEMGNKQENFDTIQHVDCLTQQMGLHALEY

SEQ ID NO: 8350 - protein, 154 aa, Glycine max
  misc_feature (1)..(154): Ceres Seq. ID no. 15225110
MEVGSQFPLSCMPSNISEVQSSPAVLGFCRSQGMETESSLLNHELNVMGADTRNMGEIDMMSTVLDEADEADHFSPDTDGISKLPEISDEFWELFLRPSPLTEDTEETKCSSLGCGLTEDQGLPSEMGNKQENFDTIQHVDCLTQQMGLHALEY

SEQ ID NO: 8351 - DNA, 846 bp, Glycine max
  misc_feature (1)..(846): Ceres Seq. ID no. 15225168
acgagaycattacstagaacatystaatmgaaaagaatatgggttgtcttcttctgtagatggggcaaacaacaggcgctcttccgagagaataccatcggaccggaaaggaaggtatgatgatgcacgcgattcttccaagaagcggcctcacagcccaagtaggagccatagtccttcaaagaaattatcactggatagagaccgagagcacaatcgcagcagagacagattgcatggtaatgatgtcgggagagacagggcacgcgagaaaagttcaggccgagagaaggatgatcaccatgatagaagcagagaaagagaaaaggacaggagaaaggggaggtgactgagggtatgtttggttccagccctaccaaatatttggctagccaaaattttggttgaccttttggttgcccatgagttggtcaacatcggcaaggaaaacgagctagagtaaccaaaaaggcgttggcatgccaaatactcctagttggcaaccatgcaaacaaagcccagtgttttggacatgaccaaatattggtagggtaagtttagctgccataacatacatacataccctgatacttgtagatctcgcacttgtccttgggctgaataagtgtcttgagaaaggaaatatttgagctgggctgcatccgccaatacccgccgcatgtaaatgggtgcgcatggcctgctcaaggacctgcttgtagcggatttgaggatttaggctgtggtcctaatggcggacctgtttttgtagtatcaaggaacagtagtttgtgaaacataagtactttgatcaagcaacactgaatgaaatgctgtcagttcgtg

SEQ ID NO: 8352 - protein, 115 aa, Glycine max
  misc_feature (1)..(115): Ceres Seq. ID no. 15225169
  misc_feature (2)..(2): Xaa is any aa, unknown or other
  misc_feature (5)..(5): Xaa is any aa, unknown or other
  misc_feature (8)..(8): Xaa is any aa, unknown or other
  misc_feature (10)..(10): Xaa is any aa, unknown or other
RXHYXEHXNXKEYGLSSSVDGANNRRSSERIPSDRKGRYDDARDSSKKRPHSPSRSHSPSKKLSLDRDREHNRSRDRLHGNDVGRDRAREKSSGREKDDHHDRSREREKDRRKGR

SEQ ID NO: 8353 - protein, 97 aa, Glycine max
  misc_feature (1)..(97): Ceres Seq. ID no. 15225170
MGQTTGALPREYHRTGKEGMMMHAILPRSGLTAQVGAIVLQRNYHWIETESTIAAETDCMVMMSGETGHARKVQAERRMITMIEAEKEKRTGERGGD

SEQ ID NO: 8354 - protein, 78 aa, Glycine max
  misc_feature (1)..(78): Ceres Seq. ID no. 15225171
MMMHAILPRSGLTAQVGAIVLQRNYHWIETESTIAAETDCMVMMSGETGHARKVQAERRMITMIEAEKEKRTGERGGD

SEQ ID NO: 8355 - DNA, 517 bp, Glycine max
  misc_feature (1)..(517): Ceres Seq. ID no. 15225172
atcacacctctttaattagtaacacttaattttcattaccgtcgttttattaagtgtgtgttgctacaacaatggcctcaagtcagggttggactccgaagcagaacaagagatttgagaatgcccttgccatcttcgacaaggacaccccagacaggtggcacacggtggccagggccgtcggaggaaaaacggtggaggaagtgaaaaggcattatgagaagctcgtggaagatgtgaaggagattgaggaaggtcacgtgcccctccccaattaccgaagtgctgcaagaggccacggttacatggatgaagaaaacaggatgaaggttctgagtctgcagtgaagtgtgatttatcaataatatatataatatatgctggatgcttggcttagaactactataaaatattttatttgctttttcgttttttctttccatatatatatatattcaaagcatcgatgccttgtatttctgtttctataaatgtaaagatgaaatgaaattgtccc

SEQ ID NO: 8356 - protein, 91 aa, Glycine max
  misc_feature (1)..(91): Ceres Seq. ID no. 15225173
MASSQGWTPKQNKRFENALAIFDKDTPDRWHTVARAVGGKTVEEVKRHYEKLVEDVKEIEEGHVPLPNYRSAARGHGYMDEENRMKVLSLQ

SEQ ID NO: 8357 - DNA, 588 bp, Glycine max
  misc_feature (1)..(588): Ceres Seq. ID no. 15225178
ctttttcggtgcctctttcttcattaatcagtgtccctccttcccaaaataatacaaaagccaccaccaccaccatctttactctttactctttactctgccccgaaagtcacatttttcttttcttttctttttctctgaaagatctgtgactattattattattattattatttctgatttttgtgggaaaatggctgactgggcaccggtgttgatcggggtggtgctgttcgtgctgctccaaccggggctgcttttttcctttccgggaaacgggaagcagctagagtttgggagcatgaagaccaacggcaaggccattttcatccacactctcatcttcttcgccctctactccatcctcatcctcgccgttaaagtccacatctacaccggctgaaccggttcccgggcgggatctcaggtatcatttggtttggttactgagaaatgaaaggaaagaaaaacaccaccattgctgtaacaattgcctgttcttcttcttgtgttatccttttatggaaataaataaaaaaagcaaagatttttctatttatttagtaatggaaatgcatagatctgact

SEQ ID NO: 8358 - protein, 69 aa, Glycine max
  misc_feature (1)..(69): Ceres Seq. ID no. 15225179
MADWAPVLIGVVLFVLLQPGLLFSFPGNGKQLEFGSMKTNGKAIFIHTLIFFALYSILILAVKVHIYTG

SEQ ID NO: 8359 - protein, 49 aa, Glycine max
  misc_feature (1)..(49): Ceres Seq. ID no. 15225180
FSVPLSSLISVPPSQNNTKATTTTIFTLYSLLCPESHIFLFFSFSLKDL

SEQ ID NO: 8360 - DNA, 1055 bp, Glycine max
  misc_feature (1)..(1055): Ceres Seq. ID no. 15225222
ccgggccccccctckagtcagctacgtaggcccccccccatgaagcttatattgaacagcagaaacgagaaaagatggaagctgagcgcgcctcacgaatcacggtcaggaaaaagttacccaaagttaatcgggcccttgcagctcgcctcctagaaactgaagaagctgaaaatgagaagagggatgaagatgctgatgatggtgaaactaaaaaggcatccaagaaaaagaaagggctcagcatgcaagatcttcaggacgatcgatttaaagcaatatttacaaatgaggaatttgagattaaggattcctcacaagaatatctggctttacatcccatgggttctaagaagcaaacatccttgttaaaggaacattttgaacctgtcatgtcagatgatggtcaaagtctaagtgattctgatgcatcaacatcatcacaagatgaacctgcgaatggaatgaaagacaaatctcgggttccaagaatgtatgaaatcaagaatgagcagcatgcggaggcattctggagccaaaaatcacttgcaggggaggactcacttcctatgggagacagagtagcagctctaagagatgaccaacaatcttctcgtgttccaaaaggtattaagcagggtccaggaggatcacgagaaatcactttcgccacaagaagctcagctaagtacaaggaagacgaggaggataaagaagtgccaaacaggaaaaagaggggagttcaatccttggggcttaagcccaatagaccagtgtttcgtggtcaagggagagggaaacgagggaatggcagaagaggacgtcgataatgacctttacataatgtaaatggcatttgattcttcttagatcttgcttgcttgcttgatccttatggctcagttttccatccatggatagtcctgtgactgaagtcgcacaggatacgtgatctatgatgcatcatcatatgtagcttaacatctttttttacatttttgttctttccccctatttttggacactatcaagataaactattttgtgtggaacct

SEQ ID NO: 8361 - protein, 251 aa, Glycine max
  misc_feature (1)..(251): Ceres Seq. ID no. 15225223
MEAERASRITVRKKLPKVNRALAARLLETEEAENEKRDEDADDGETKKASKKKKGLSMQDLQDDRFKAIFTNEEFEIKDSSQEYLALHPMGSKKQTSLLKEHFEPVMSDDGQSLSDSDASTSSQDEPANGMKDKSRVPRMYEIKNEQHAEAFWSQKSLAGEDSLPMGDRVAALRDDQQSSRVPKGIKQGPGGSREITFATRSSAKYKEDEEDKEVPNRKKRGVQSLGLKPNRPVFRGQGRGKRGNGRRGRR

SEQ ID NO: 8362 - protein, 194 aa, Glycine max
  misc_feature (1)..(194): Ceres Seq. ID no. 15225224
MQDLQDDRFKAIFTNEEFEIKDSSQEYLALHPMGSKKQTSLLKEHFEPVMSDDGQSLSDSDASTSSQDEPANGMKDKSRVPRMYEIKNEQHAEAFWSQKSLAGEDSLPMGDRVAALRDDQQSSRVPKGIKQGPGGSREITFATRSSAKYKEDEEDKEVPNRKKRGVQSLGLKPNRPVFRGQGRGKRGNGRRGRR

SEQ ID NO: 8363 - protein, 162 aa, Glycine max
  misc_feature (1)..(162): Ceres Seq. ID no. 15225225
MGSKKQTSLLKEHFEPVMSDDGQSLSDSDASTSSQDEPANGMKDKSRVPRMYEIKNEQHAEAFWSQKSLAGEDSLPMGDRVAALRDDQQSSRVPKGIKQGPGGSREITFATRSSAKYKEDEEDKEVPNRKKRGVQSLGLKPNRPVFRGQGRGKRGNGRRGRR

SEQ ID NO: 8364 - DNA, 956 bp, Glycine max
  misc_feature (1)..(956): Ceres Seq. ID no. 15225271
ccgggccccccctygartcagctacgtaggcccccccccccccccaattcttttaaacaacaaacaacaacaacaactatttctcttactacaacaatgtatcaacaaccttcaacctacactaaccaagttccccccaccaccttcaacaatgccaacactaaccctttgactggtggcttcaacaacgccaacgttgaccccttgagaaacaacctcaacaacgccaaccaattgggtggcttcaacaatgctaatgttgatcccatgagaaacaacctccacaacgccaaccccatgactggtggcttcaacaacgctggtgttgatcccttgagaaacaactacaacaacactactaaccccatgactggtggtttcaacaatgccggcccaatgactgatggactcagaaaccaaactgctcctgaaactggtatccccatccgcaagaagcttggttatggcttcggaaccgtcaccttcagaccccttgaagcaagaatgaacaaggacaccgaccttattggtaagatggatccttactgcaagttcaagattggtcttcacatcggaaagagctctgttgccaaggctcaaggcaagaaccccgtctggaatgatgccattaccatcaaatcaaagggagaagaattcgccaccatcaagctcaaggataaggatagacttaccttcaacgatagagtcggaaaggcaaagattcctttgaacaatgtttacaatggtgaaagagttcaataatggattcctttgcacaagggagataagatgactggtgaagttttggtcgaaatgcaattcgttcctaatgtctaaagaatatagtcttatgagtatgatcgaatacgttttgatcattatttgttttgtaaataatgcaataaagtctatattataaagtatgataaccgtaagatattcaaagtcttgaatcc

SEQ ID NO: 8365 - protein, 253 aa, Glycine max
  misc_feature (1)..(253): Ceres Seq. ID no. 15225272
  misc_feature (5)..(5): Xaa is any aa, unknown or other
  misc_feature (6)..(6): Xaa is any aa, unknown or other
PGPPXXQLRRPPPPPNSFKQQTTTTTISLTTTMYQQPSTYTNQVPPTTFNNANTNPLTGGFNNANVDPLRNNLNNANQLGGFNNANVDPMRNNLHNANPMTGGFNNAGVDPLRNNYNNTTNPMTGGFNNAGPMTDGLRNQTAPETGIPIRKKLGYGFGTVTFRPLEARMNKDTDLIGKMDPYCKFKIGLHIGKSSVAKAQGKNPVWNDAITIKSKGEEFATIKLKDKDRLTFNDRVGKAKIPLNNVYNGERVQ

SEQ ID NO: 8366 - protein, 221 aa, Glycine max
  misc_feature (1)..(221): Ceres Seq. ID no. 15225273
MYQQPSTYTNQVPPTTFNNANTNPLTGGFNNANVDPLRNNLNNANQLGGFNNANVDPMRNNLHNANPMTGGFNNAGVDPLRNNYNNTTNPMTGGFNNAGPMTDGLRNQTAPETGIPIRKKLGYGFGTVTFRPLEARMNKDTDLIGKMDPYCKFKIGLHIGKSSVAKAQGKNPVWNDAITIKSKGEEFATIKLKDKDRLTFNDRVGKAKIPLNNVYNGERVQ

SEQ ID NO: 8367 - protein, 164 aa, Glycine max
  misc_feature (1)..(164): Ceres Seq. ID no. 15225274
MRNNLHNANPMTGGFNNAGVDPLRNNYNNTTNPMTGGFNNAGPMTDGLRNQTAPETGIPIRKKLGYGFGTVTFRPLEARMNKDTDLIGKMDPYCKFKIGLHIGKSSVAKAQGKNPVWNDAITIKSKGEEFATIKLKDKDRLTFNDRVGKAKIPLNNVYNGERVQ

SEQ ID NO: 8368 - DNA, 682 bp, Glycine max
  misc_feature (1)..(682): Ceres Seq. ID no. 15225303
tgttgacaatgccaatcttgaatatagctgacgattcagaagtgttcttcaggaatatagtggcatttgaggaatgtcacctttcagatgatacaaacatcattactcaataccgaaagattctagattttcttatcaacactgaaaaagatgtgaatgtactagttgataagaaaattattgtcaattggatgggtgatgctaatgcagtggctacaatggttaacagtctgggctcaaatattgggatgccacgtttcaatccagtgtatttctctctctgcaatagcttaaatgatttctatgaaagtccttgcaacaagtacaaggctatcttcaaacacgattacttcaacactccttggaaaatagcatctacagttgctgcaattgtgcttcttttgctcacattgattcagactatatgttcaataaactcactgttttaattaaggtagctgaggatttgggccgttaacagggaagtggaagtcaattgggggaaggaaacttctgtaatgtgatttagtaccttgttgcttttctttcatcaaataattaaaattctactatccttcttaacattaattatttgttgcaatataacttttatttactctctatattgatctgtattaattttgtatacgctttatatatatagctacttattattattgtt

SEQ ID NO: 8369 - protein, 148 aa, Glycine max
  misc_feature (1)..(148): Ceres Seq. ID no. 15225304
LTMPILNIADDSEVFFRNIVAFEECHLSDDTNIITQYRKILDFLINTEKDVNVLVDKKIIVNWMGDANAVATMVNSLGSNIGMPRFNPVYFSLCNSLNDFYESPCNKYKAIFKHDYFNTPWKIASTVAAIVLLLLTLIQTICSINSLF

SEQ ID NO: 8370 - protein, 146 aa, Glycine max
  misc_feature (1)..(146): Ceres Seq. ID no. 15225305
MPILNIADDSEVFFRNIVAFEECHLSDDTNIITQYRKILDFLINTEKDVNVLVDKKIIVNWMGDANAVATMVNSLGSNIGMPRFNPVYFSLCNSLNDFYESPCNKYKAIFKHDYFNTPWKIASTVAAIVLLLLTLIQTICSINSLF

SEQ ID NO: 8371 - protein, 85 aa, Glycine max
  misc_feature (1)..(85): Ceres Seq. ID no. 15225306
MGDANAVATMVNSLGSNIGMPRFNPVYFSLCNSLNDFYESPCNKYKAIFKHDYFNTPWKIASTVAAIVLLLLTLIQTICSINSLF

SEQ ID NO: 8372 - DNA, 1191 bp, Glycine max
  misc_feature (1)..(1191): Ceres Seq. ID no. 15225313
accggggccccnnncgagtcagctacgtaggccccccccccccactttttctttggcagcttagccttcctattttggaaaccctcttcactgctctcccaccttttttgtgtgtatgtgtatgagcttctcttctactctattcactgcactcttattaataaatatcagtgcttggaaagcagaagagaagatccatagctaagatagatctcgagatgggtcgtggcaagattgagataaagttgattgagaaccccaccaacaggcaagtcacctactccaagcgaaggaatggtatcttcaagaaagctcatgaactcagtgttctctgtgatgccaaggtttcactcatcatgttctctaaaaacaacaagatgcatgaatacattagccctggcctcacgacaaaaaagatcattgatcagtatcagaagactttgggggatattgatctgtggcattctcactatgagaaaatgcttgaaaacttgaagaagctgaaagatattaacaataagctcaggagacagatcaggcataggataggtgagggcttggacatggacgacatgagcttccagcaactgcgcactcttgaagaagatatggtttcatccatagggaaaatacgcgaacgaaagtttcacgtgatcaaaactcggactgatacctgtaggaaaaaggttaaaagcctgaagcagatgaatggaaatctgctgcttgaacttgaaaagtgtgtgatccatccacaatttcttttgcacgatgaaggagacgaggaatcagcagcagcagcagcagcagcagcagttgcactggccaacggtgcctccaccctgtatgcattctgtcatcagcaccattctcatctgaaccttttctcccaccattctaatggagaagagcaaccctttaaaactgatcatgaccttcgccttgcttgatccagtgcaacaattaactagcaataatgtaaattaactagctagccagcactaagcacttgttatttatgctttaatttgtattaattggacctgttaaacccaactttgcttgcaacctctctagtttctatccaggtagagaattagctaagcttatatagtgtttggcaagagcgtgctatgaaaaacagaaagactgtactttatttgttattataagtttacattgagtgattatgtt

SEQ ID NO: 8373 - protein, 242 aa, Glycine max
  misc_feature (1)..(242): Ceres Seq. ID no. 15225314
MGRGKIEIKLIENPTNRQVTYSKRRNGIFKKAHELSVLCDAKVSLIMFSKNNKMHEYISPGLTTKKIIDQYQKTLGDIDLWHSHYEKMLENLKKLKDINNKLRRQIRHRIGEGLDMDDMSFQQLRTLEEDMVSSIGKIRERKFHVIKTRTDTCRKKVKSLKQMNGNLLLELEKCVIHPQFLLHDEGDEESAAAAAAAAVALANGASTLYAFCHQHHSHLNLFSHHSNGEEQPFKTDHDLRLA

SEQ ID NO: 8374 - protein, 196 aa, Glycine max
  misc_feature (1)..(196): Ceres Seq. ID no. 15225315
MFSKNNKMHEYISPGLTTKKIIDQYQKTLGDIDLWHSHYEKMLENLKKLKDINNKLRRQIRHRIGEGLDMDDMSFQQLRTLEEDMVSSIGKIRERKFHVIKTRTDTCRKKVKSLKQMNGNLLLELEKCVIHPQFLLHDEGDEESAAAAAAAAVALANGASTLYAFCHQHHSHLNLFSHHSNGEEQPFKTDHDLRLA

SEQ ID NO: 8375 - protein, 189 aa, Glycine max
  misc_feature (1)..(189): Ceres Seq. ID no. 15225316
MHEYISPGLTTKKIIDQYQKTLGDIDLWHSHYEKMLENLKKLKDINNKLRRQIRHRIGEGLDMDDMSFQQLRTLEEDMVSSIGKIRERKFHVIKTRTDTCRKKVKSLKQMNGNLLLELEKCVIHPQFLLHDEGDEESAAAAAAAAVALANGASTLYAFCHQHHSHLNLFSHHSNGEEQPFKTDHDLRLA

SEQ ID NO: 8376 - DNA, 1212 bp, Glycine max
  misc_feature (1)..(1212): Ceres Seq. ID no. 15225337
ataatgtttcccaacattaagcatgcatttttccaacccgctgagaatgaaatgatcactctcctacacttccatctgcacaaccatattatggtagggaataagaagaccaaggacgttcaattttatgttgaggttatggacatggtccagaatgttgggggtggtaagaggtcaacgtatgaccctgatgagcttgaagaagaacagcgagagcgacagaggaagaataaaattaatgtagaattccaaacctttgtgaatcgggtgaatgatctctggggacaacctcaattcaatggccttgacctggagtttgatcaacctcttagagagcttggcttccctggtgtgcctcataaatcttcagtatttatcgtacctacttctgcctgccttgttgaactgatagagactcctttccttgttgtcacgcttagtgagattgagattgttaatcttgagagagttggacttgggcagaaaaactttgatatgacagtagtatttaaggacttcaagagggatgtcctcaggattgattctatcccttctacatcactggatggcatcaaggagtggcttgacacaacagacatcaaatattatgagagcaggctgaatctgaactggcgtcagatcctgaagacaataacggatgaccctcagagctttattgaaggtggcggttgggagtttctgaatttggaagctactgattcagaatctgagaactcggaggagtctgataaaggttacgaaccatctgatgtggaacctgaatctgattcggaggacgaagcttctgacagtgaatcacttgttgagtctgaggatgatgatgacgatgaagattccgaggaggattcagaggaagagaagggaaaaacatgggaggaactggagagggaagctagcaatgcagatagggagaagggaaatgagtctgacagtgaagaagataggaaaagaagaaaggcaaaaagctttggtaagtcacgaggagcgagtctaagcagtagcatgccaaagcggtctaagttaagatagatttttggcttttgttcttacctggtttatggtttagttcagttgttctatgcagttgctgcggttagcagctttttgtgtttggactttggagctgtactatcattgtaactataagtgtttttctcccatattatagttcagccactcgatagcaaaaag

SEQ ID NO: 8377 - protein, 349 aa, Glycine max
  misc_feature (1)..(349): Ceres Seq. ID no. 15225338
IMFPNIKHAFFQPAENEMITLLHFHLHNHIMVGNKKTKDVQFYVEVMDMVQNVGGGKRSTYDPDELEEEQRERQRKNKINVEFQTFVNRVNDLWGQPQFNGLDLEFDQPLRELGFPGVPHKSSVFIVPTSACLVELIETPFLVVTLSEIEIVNLERVGLGQKNFDMTVVFKDFKRDVLRIDSIPSTSLDGIKEWLDTTDIKYYESRLNLNWRQILKTITDDPQSFIEGGGWEFLNLEATDSESENSEESDKGYEPSDVEPESDSEDEASDSESLVESEDDDDDEDSEEDSEEEKGKTWEELEREASNADREKGNESDSEEDRKRRKAKSFGKSRGASLSSSMPKRSKLR

SEQ ID NO: 8378 - protein, 348 aa, Glycine max
  misc_feature (1)..(348): Ceres Seq. ID no. 15225339
MFPNIKHAFFQPAENEMITLLHFHLHNHIMVGNKKTKDVQFYVEVMDMVQNVGGGKRSTYDPDELEEEQRERQRKNKINVEFQTFVNRVNDLWGQPQFNGLDLEFDQPLRELGFPGVPHKSSVFIVPTSACLVELIETPFLVVTLSEIEIVNLERVGLGQKNFDMTVVFKDFKRDVLRIDSIPSTSLDGIKEWLDTTDIKYYESRLNLNWRQILKTITDDPQSFIEGGGWEFLNLEATDSESENSEESDKGYEPSDVEPESDSEDEASDSESLVESEDDDDDEDSEEDSEEEKGKTWEELEREASNADREKGNESDSEEDRKRRKAKSFGKSRGASLSSSMPKRSKLR

SEQ ID NO: 8379 - protein, 332 aa, Glycine max
  misc_feature (1)..(332): Ceres Seq. ID no. 15225340
MITLLHFHLHNHIMVGNKKTKDVQFYVEVMDMVQNVGGGKRSTYDPDELEEEQRERQRKNKINVEFQTFVNRVNDLWGQPQFNGLDLEFDQPLRELGFPGVPHKSSVFIVPTSACLVELIETPFLVVTLSEIEIVNLERVGLGQKNFDMTVVFKDFKRDVLRIDSIPSTSLDGIKEWLDTTDIKYYESRLNLNWRQILKTITDDPQSFIEGGGWEFLNLEATDSESENSEESDKGYEPSDVEPESDSEDEASDSESLVESEDDDDDEDSEEDSEEEKGKTWEELEREASNADREKGNESDSEEDRKRRKAKSFGKSRGASLSSSMPKRSKLR

SEQ ID NO: 8380 - DNA, 1403 bp, Glycine max
  misc_feature (1)..(1403): Ceres Seq. ID no. 15225368
ccccccctcgagtcagctacgtaggccccccccccattcatagaacagcacttaatcaagaaggacgttacctcggttaatttcattttctagattgcttatcagtctccaagttgagactttctgagtcagtacacttggatcactacctctggcattggcagagtattccttcaaaggggtaattcatcgtccaaaaattgttggggacaccttgtctttcgagggattgtttgctctacacaaggaattaaacgttatagaatttagtctgcagagaaatttgcaattctgatcagccacattttacctcacttacatccagcatcccaacgatcctgcaacattggtaattacctcatgagattgaggcgtgatatctttgtgtgctgtttcactagcacatcttcagacacaatgcaaaaggaaaagcacagtaagttgaagtggcgaatctttccctacaaggaacttagaaaagccacaaataattttgatcgatttcatttcattggaaagagaggtggaaagacaggccttatcactcaatatcacggttagactatgctgtagccttttatgtgactaagagcctttcatattaagtgttttgagcattgttatttaattaaaattagaatttttccttagtaattcacacaatcaagattgaaattcaaatttggcattaaatacctaagtaaatctataattttgattaacataatcactaaaaggactacatatacctcatgtttttgcattgaacagtttcttctgattatctacattgttataggaaaacttgaggatggacgtgagattacaattcagcgctttaacggagaccagcgctacttattacaacagtttatcaatgaaactattatcctaaattacttgcctcacaaaaatattgtgtcaatttacgggtgtgcttctcatcatgaggaatctctgctagtgacagaatacctatccaatggcaatcttgctgctcatcttcatagtgaaaaggacgaaaagattacactaccttggcttaaacgattggatatagcatttgatattgcaaatgcattgaaccatcttcacaattatggcatcatccaccgcaatgtgaagtccagtaatattttcctagatgcgaacttttgtgcaaaagttggtaaccttcttttgtcgcagaaacttccagatggagttccggtgcatgcgacccatgttactggtgatagggcagggtcaagtggttatatggacccagagtatttgacaaaaggccaacttagcgtaaaaaatgatgtttatagctttggggtggttttgtgtgagcttctatcatcgacgctggcaaaagactggtttctgaatgaagaggataatattgctaccgttttttg

SEQ ID NO: 8381 - protein, 66 aa, Glycine max
  misc_feature (1)..(66): Ceres Seq. ID no. 15225369
MRLRRDIFVCCFTSTSSDTMQKEKHSKLKWRIFPYKELRKATNNFDRFHFIGKRGGKTGLITQYHG

SEQ ID NO: 8382 - protein, 47 aa, Glycine max
  misc_feature (1)..(47): Ceres Seq. ID no. 15225370
MQKEKHSKLKWRIFPYKELRKATNNFDRFHFIGKRGGKTGLITQYHG

SEQ ID NO: 8383 - protein, 48 aa, Glycine max
  misc_feature (1)..(48): Ceres Seq. ID no. 15225371
MDPEYLTKGQLSVKNDVYSFGVVLCELLSSTLAKDWFLNEEDNIATVF

SEQ ID NO: 8384 - DNA, 1320 bp, Glycine max
  misc_feature (1)..(1320): Ceres Seq. ID no. 15225372
tcagctacgtaggccccccccccccccaaactaccacatccacaagggttgatgataccactaatgaggttgtgaatagttgtgcattccaagcctgtggtgatgtaaacgcaggtgctgcgaacttctcatctgatgattattctggttatgattttcattcagttgatagagaatctcctgtgctggctgcagacccaatcttgaactctaccaagtcccgggagaggcaaagtttccattcttcatctccctgtatttctgatgatgaaaatagtccagaagttatgactgcaccaattgaagctactaagtccattcatcagccatttaaagcctctcaatctccttcacctagtggttcatttaataatgctgtaaaacgattagggaaaggaaaccagagtagttgctcagatcaagagacggaaaaaatagaaaagaatgcctcaaggcagaattctttgaaagaggtgcttgcaactgagatggatgtcaatgattattctaacaatggggtcttccaggattctggtgatgcaagcggagaacatgatcgttctagatctagcaaaaggggtgaatcatttttagcaaacattatcaagaaagataatggcaaaagtaatgttactgtaaactgacatcccataccagatcgtatgattaagaaggctgaaaagctagccgggccaatccagccagggaattactggtatgattctcgggctggattttggggtgtcatgggtggaccatgtcttggaataattctgccattcatagaagagttccagcatcccatgccagataaatgtgctggtggaaataccagtgtttatgtaaatggtagagaacttcaccaaaaagatttagatttgctttctcgtagaggactccctcgtgatagcaatagatattatatcgttgaaatttctggtagagtcctggatgaagacacaggagaagagctggatagccttggcaaacttgcaccaacagtggagaaagaaaggcgtggatttggcatgaaagcacccagaacagctgcataatacaagtatagaaataaaaattctgctgagatttacttcaggagatttttgttccacccttctgcagatttggaaacattatttcggatcagatcatgggaaatttttgaaatcttttcatgattttttactagaatttattctgtctgctgccacggtccaaaccattttccacgtgacttgcatagattatatatatgatatgtaaatttgtaattcttgtactacaattttttttgtcataaatgttttaccaaaaaagagc

SEQ ID NO: 8385 - protein, 213 aa, Glycine max
  misc_feature (1)..(213): Ceres Seq. ID no. 15225373
SYVGPPPPQTTTSTRVDDTTNEVVNSCAFQACGDVNAGAANFSSDDYSGYDFHSVDRESPVLAADPILNSTKSRERQSFHSSSPCISDDENSPEVMTAPIEATKSIHQPFKASQSPSPSGSFNNAVKRLGKGNQSSCSDQETEKIEKNASRQNSLKEVLATEMDVNDYSNNGVFQDSGDASGEHDRSRSSKRGESFLANIIKKDNGKSNVTVN

SEQ ID NO: 8386 - protein, 130 aa, Glycine max
  misc_feature (1)..(130): Ceres Seq. ID no. 15225374
MIKKAEKLAGPIQPGNYWYDSRAGFWGVMGGPCLGIILPFIEEFQHPMPDKCAGGNTSVYVNGRELHQKDLDLLSRRGLPRDSNRYYIVEISGRVLDEDTGEELDSLGKLAPTVEKERRGFGMKAPRTAA

SEQ ID NO: 8387 - protein, 118 aa, Glycine max
  misc_feature (1)..(118): Ceres Seq. ID no. 15225375
MTAPIEATKSIHQPFKASQSPSPSGSFNNAVKRLGKGNQSSCSDQETEKIEKNASRQNSLKEVLATEMDVNDYSNNGVFQDSGDASGEHDRSRSSKRGESFLANIIKKDNGKSNVTVN

SEQ ID NO: 8388 - DNA, 851 bp, Glycine max
  misc_feature (1)..(851): Ceres Seq. ID no. 15225453
acactttttgtgacactaagtcattccattgtgacttttctacctcaaagatccaaagaaacacattgagcacttaaattaatattctctcatttgatcaccaacattggtgggggaatatcatggcaccaagaagaattgagatgctgctgagcatgtcccttgtaatggttctttggggtgtcacattggctcaatctgatcaatcaagtagttgcaccaatgtgttcataagtcttgctccatgccttgactatgttacaggaaatgcctctatcccttcttcttcttgttgctctcaacttgcctttgtggtacggtcacagccactgtgcctatgtgaggttgttaatggtggtgcttcatctattgctgcaagtttcaacatcaatcagactagggctttggcactccctactgcttgcaatgttcagacacctcctattacctcctgcagtgcctcggcttcttcctcacaaggtgtttctgtttcctactttccaaattccccttcaggaattggatctagcactgtttcatcaacgatcggaggcagtagaagtgtcggtgcctcatatcatggaaattcaagttcaacaaaattgccatgttctttgcttgtcatcatgtttttccttgcaacgactttgactttcaccttcaagaccatgacctagacaacgtcgttgcacatttttttaaactttgttattatcttctactgcttcgagcatactcacttactggtatcatttgtcctttatccttattaaaaaacttaggattaaaatttcccctgtatatttcatgtacatttttatttctctgtttcttctattgatggctaagac

SEQ ID NO: 8389 - protein, 184 aa, Glycine max
  misc_feature (1)..(184): Ceres Seq. ID no. 15225454
MAPRRIEMLLSMSLVMVLWGVTLAQSDQSSSCTNVFISLAPCLDYVTGNASIPSSSCCSQLAFVVRSQPLCLCEVVNGGASSIAASFNINQTRALALPTACNVQTPPITSCSASASSSQGVSVSYFPNSPSGIGSSTVSSTIGGSRSVGASYHGNSSSTKLPCSLLVIMFFLATTLTFTFKTMT

SEQ ID NO: 8390 - protein, 177 aa, Glycine max
  misc_feature (1)..(177): Ceres Seq. ID no. 15225455
MLLSMSLVMVLWGVTLAQSDQSSSCTNVFISLAPCLDYVTGNASIPSSSCCSQLAFVVRSQPLCLCEVVNGGASSIAASFNINQTRALALPTACNVQTPPITSCSASASSSQGVSVSYFPNSPSGIGSSTVSSTIGGSRSVGASYHGNSSSTKLPCSLLVIMFFLATTLTFTFKTMT

SEQ ID NO: 8391 - protein, 173 aa, Glycine max
  misc_feature (1)..(173): Ceres Seq. ID no. 15225456
MSLVMVLWGVTLAQSDQSSSCTNVFISLAPCLDYVTGNASIPSSSCCSQLAFVVRSQPLCLCEVVNGGASSIAASFNINQTRALALPTACNVQTPPITSCSASASSSQGVSVSYFPNSPSGIGSSTVSSTIGGSRSVGASYHGNSSSTKLPCSLLVIMFFLATTLTFTFKTMT

SEQ ID NO: 8392 - DNA, 1322 bp, Glycine max
  misc_feature (1)..(1322): Ceres Seq. ID no. 15225507
tcacagatgaacaaagtcacagctagaagctctcaagaaatgtcttccaagaggcaccactttcattggacaaataaggttgggactgaggatggcgaagttcccacttcagaatcattctcaacactcatcaaagaggagaaaaaacatgaagacaaggtttctattgttgctgctgctgccgaggcaacaaaagcaccagcatctcatgtaacaaggaagaagaagctgcaagcagtggcagtctcaagaatccggtctgtgctcaccgtgttcaacaacaacagcaacaacaaccgatcctcgaactcatctttaggcctcggctcgcgcgtggtcggaaccttattcggctatcgacgagggcacgtgcactttgcattccagaaggaccccacttcccagccagccttcctcatagagctggctacgccaataagtgttcttgttcgcgagatggcgtccgggttggtcagaattgcccttgaatgtgacaaggagaaagaaacagagaagaaacatgtgaggctgcttgaagagcctctgtggaggacttactgcaatggcaagaagtgtggctttgccaccagaagagagtgtggaccaaaggattgggatgttctcaaagcagttgaaccaatttcaatgggtgctggtgttttgccaggaaataatagtaataataataataatagtggagctgaagcagtagggtcagagggtgaaatcatgtacatgagggcaaagtttgagagaattgttgggtccagagactctgaagctttctacatgatgaatcctgatagcaatggtgctcctgaactcagtgtttacttgcttagagtctagcaaccttgcaagcttgcaagatctctgtttattatacttaattttcctctttgttttgggttattggtatactacttgcttagctcttcaatcatgaacatggttgatctagtcttctccagatttttctttttttcatgtagtatattaagtgggtttacttttttttttgttagaataggtgagtaggctaagtaaggaagacggggggagatagtgggtaaccaatactttacagcattgtggtgtgtggggggtgggtcatgaaaggtgtatatgtgtaattttttttccctttccaatccttttaattaatgatatgagggatggaggttaatgcaagtcatcattgtcttggcatttttagttggttgaaatagcttttgatcatttcatcatgtcatcttattgtgaaattgccctcttcgccgttatgtactaattgcttgtcgattaatcaattaattccctat

SEQ ID NO: 8393 - protein, 282 aa, Glycine max
  misc_feature (1)..(282): Ceres Seq. ID no. 15225508
SQMNKVTARSSQEMSSKRHHFHWTNKVGTEDGEVPTSESFSTLIKEEKKHEDKVSIVAAAAEATKAPASHVTRKKKLQAVAVSRIRSVLTVFNNNSNNNRSSNSSLGLGSRVVGTLFGYRRGHVHFAFQKDPTSQPAFLIELATPISVLVREMASGLVRIALECDKEKETEKKHVRLLEEPLWRTYCNGKKCGFATRRECGPKDWDVLKAVEPISMGAGVLPGNNSNNNNNSGAEAVGSEGEIMYMRAKFERIVGSRDSEAFYMMNPDSNGAPELSVYLLRV

SEQ ID NO: 8394 - protein, 280 aa, Glycine max
  misc_feature (1)..(280): Ceres Seq. ID no. 15225509
MNKVTARSSQEMSSKRHHFHWTNKVGTEDGEVPTSESFSTLIKEEKKHEDKVSIVAAAAEATKAPASHVTRKKKLQAVAVSRIRSVLTVFNNNSNNNRSSNSSLGLGSRVVGTLFGYRRGHVHFAFQKDPTSQPAFLIELATPISVLVREMASGLVRIALECDKEKETEKKHVRLLEEPLWRTYCNGKKCGFATRRECGPKDWDVLKAVEPISMGAGVLPGNNSNNNNNSGAEAVGSEGEIMYMRAKFERIVGSRDSEAFYMMNPDSNGAPELSVYLLRV

SEQ ID NO: 8395 - protein, 269 aa, Glycine max
  misc_feature (1)..(269): Ceres Seq. ID no. 15225510
MSSKRHHFHWTNKVGTEDGEVPTSESFSTLIKEEKKHEDKVSIVAAAAEATKAPASHVTRKKKLQAVAVSRIRSVLTVFNNNSNNNRSSNSSLGLGSRVVGTLFGYRRGHVHFAFQKDPTSQPAFLIELATPISVLVREMASGLVRIALECDKEKETEKKHVRLLEEPLWRTYCNGKKCGFATRRECGPKDWDVLKAVEPISMGAGVLPGNNSNNNNNSGAEAVGSEGEIMYMRAKFERIVGSRDSEAFYMMNPDSNGAPELSVYLLRV

SEQ ID NO: 8396 - DNA, 2068 bp, Glycine max
  misc_feature (1)..(2068): Ceres Seq. ID no. 15225519
cgggccccccctcgagtcagctacgtaggcccccccccgagtagaatagaatggaaatggaaattactattcacgaaattaccactctcaaacaccaaaccaaatcaaaccttccctctccttctgttctaaaacattgtccctattctctctctgcaacattcattttccatcgccatcagtgccatgcaggaggctttggctatacaatgcatgtaggaggtttgaagaagtccaagtaacctggaagaagctttgacatacattcaggtaaaatgagagacagcacagtgcaaaattgtcaccaaaataatagcggagcagtagaagcaggtgcaccttcagtcgagaaagatcttgcttcttcagtaaaagcagctactgaagttcctccatcctcttttcagttctatgtctggtcagatgtgggaattaatcttcatgttgatttaaatctgtcctcatcagattggattaacaggtttagaaatgaggtttgcataagtgagaatatgcatcgaaacaaatcccgaagcctttggcaggatctgagcagcttaggagagaattatatgcaaggtaaatcttcctttttatggagtaaaaattcttgtcaaattgaggatcatgatggacaggccagatcttcctcaagctctaaacttacaaaagatggtgctacagagtcaggtcaacagaataaagatggcattcctttgagatgtgattcttttactccatgcaacatgactatagaagtgaaagataatatactggaaaatcattcaactgtctcagctgaactaaatgtaaatgtggtagacaatttaatgcaagagcaatcaactgtctcagctgaggttagttgtgctatagacacatctaagaaaattattgattcagatgctaccaatatgccattcatcaagtcactttgtgattctgttgtcaactcactgtcagatcctggcacactggaacttcaaaattcaaagcctgataatgaatgttctgagtattgtgctctgctaaatggttcttgctttgtgaaccctggtgtggtgtgtgctggagcttcattaagtagttctgtgggactacaaaattcagaagttataagttgtcataaatatgaatcagtttcactctgtgacaatgatggttccctggatttaagtgatccaaagagtacttctgacatggaacaggatagactagtcaaaactcggattatttttgaaactgacagtaacaatttcacatcagtaactgatgaatgggaggtggacaagattgttgatggaagggagagttcagaatgctcccagtttgatgatccacttaagaaatccagcctagactataataatcaggattctaaactggagctctgcaaaaagagaaaaaaccgagactctgagattcaatgttcaaatggtgaacctactactacaagagttttgcggagcatgaagaatactgctacaagagttttacgaagcatgaagaatgtgaagcttcctagataatccatgaggctaatctccaaggtgctttgacactttcttatggaattaaagtaaaactgtatacaatgaatataaaacctgaaaagtaaaagttattcaatttaattgcggcattcagtgtctcaaattggaagttacagtatttacctgatatttgaataggatgtacatttttwaaaaaaaaaaaaaaaaaaaaaaaaaaaaaaaaaaaaaaaaaaaaaaaaaaaaaaaaaaaaaaaaaaaaaaaaaaaaaaaaaaaaaaaaaaaaaaaaaaaaaaaaaattcccggccccccgggaaaccaaaaatttaaaaagggcccccccccggggggaacccccactttttttccccttaaagaagggaaaattccaagttggggaaaaaaagggaaaaaatttttcccggggaaaaattgtaaccccccaaaaatcccaaaaaaaaaaaaacccaaaaaaaaaaaggaaaaacccggggggcccaaaggagggaccaaaccccaataaatggggtggccccaacggcccctttccaagggg

SEQ ID NO: 8397 - protein, 417 aa, Glycine max
  misc_feature (1)..(417): Ceres Seq. ID no. 15225520
MRDSTVQNCHQNNSGAVEAGAPSVEKDLASSVKAATEVPPSSFQFYVWSDVGINLHVDLNLSSSDWINRFRNEVCISENMHRNKSRSLWQDLSSLGENYMQGKSSFLWSKNSCQIEDHDGQARSSSSSKLTKDGATESGQQNKDGIPLRCDSFTPCNMTIEVKDNILENHSTVSAELNVNVVDNLMQEQSTVSAEVSCAIDTSKKIIDSDATNMPFIKSLCDSVVNSLSDPGTLELQNSKPDNECSEYCALLNGSCFVNPGVVCAGASLSSSVGLQNSEVISCHKYESVSLCDNDGSLDLSDPKSTSDMEQDRLVKTRIIFETDSNNFTSVTDEWEVDKIVDGRESSECSQFDDPLKKSSLDYNNQDSKLELCKKRKNRDSEIQCSNGEPTTTRVLRSMKNTATRVLRSMKNVKLPR

SEQ ID NO: 8398 - protein, 338 aa, Glycine max
  misc_feature (1)..(338): Ceres Seq. ID no. 15225521
MHRNKSRSLWQDLSSLGENYMQGKSSFLWSKNSCQIEDHDGQARSSSSSKLTKDGATESGQQNKDGIPLRCDSFTPCNMTIEVKDNILENHSTVSAELNVNVVDNLMQEQSTVSAEVSCAIDTSKKIIDSDATNMPFIKSLCDSVVNSLSDPGTLELQNSKPDNECSEYCALLNGSCFVNPGVVCAGASLSSSVGLQNSEVISCHKYESVSLCDNDGSLDLSDPKSTSDMEQDRLVKTRIIFETDSNNFTSVTDEWEVDKIVDGRESSECSQFDDPLKKSSLDYNNQDSKLELCKKRKNRDSEIQCSNGEPTTTRVLRSMKNTATRVLRSMKNVKLPR

SEQ ID NO: 8399 - protein, 318 aa, Glycine max
  misc_feature (1)..(318): Ceres Seq. ID no. 15225522
MQGKSSFLWSKNSCQIEDHDGQARSSSSSKLTKDGATESGQQNKDGIPLRCDSFTPCNMTIEVKDNILENHSTVSAELNVNVVDNLMQEQSTVSAEVSCAIDTSKKIIDSDATNMPFIKSLCDSVVNSLSDPGTLELQNSKPDNECSEYCALLNGSCFVNPGVVCAGASLSSSVGLQNSEVISCHKYESVSLCDNDGSLDLSDPKSTSDMEQDRLVKTRIIFETDSNNFTSVTDEWEVDKIVDGRESSECSQFDDPLKKSSLDYNNQDSKLELCKKRKNRDSEIQCSNGEPTTTRVLRSMKNTATRVLRSMKNVKLPR

SEQ ID NO: 8400 - DNA, 480 bp, Glycine max
  misc_feature (1)..(480): Ceres Seq. ID no. 15225527
aattgccaagagtttcgagaggatccaccgcagcaaccttgtaggaatgggagtgttaccgctgtgtttcaaacctggtgaggatgctgattctctggggctcaccggtcatgagcgctacacgataaggctccctaccaatgtgagcgagatacaaccgggccaagatgtccaggtgctcagtgacactgggaagtcattcacctgcaagctccggattgatacaatggtggagctggcttacttcgatcatggcgggatccttcactacgttttgaggaacctggtgaggcagcaacagcagtaataaaacgctaaaaccgcatgcaaatatgtgaatatcttgtctgtttcgaaaaaaggctatgataagaataaaattggactcaagaagaaaccgatgtaaatgtccatgagatgagctgtggtgttttgtatagtaccctttttatgtgataataaaggtgcatttgtcacctg

SEQ ID NO: 8401 - protein, 101 aa, Glycine max
  misc_feature (1)..(101): Ceres Seq. ID no. 15225528
IAKSFERIHRSNLVGMGVLPLCFKPGEDADSLGLTGHERYTIRLPTNVSEIQPGQDVQVLSDTGKSFTCKLRIDTMVELAYFDHGGILHYVLRNLVRQQQQ

SEQ ID NO: 8402 - protein, 86 aa, Glycine max
  misc_feature (1)..(86): Ceres Seq. ID no. 15225529
MGVLPLCFKPGEDADSLGLTGHERYTIRLPTNVSEIQPGQDVQVLSDTGKSFTCKLRIDTMVELAYFDHGGILHYVLRNLVRQQQQ

SEQ ID NO: 8403 - DNA, 1812 bp, Glycine max
  misc_feature (1)..(1812): Ceres Seq. ID no. 15225553
gattgtttacgttggtcttgacccctctggctttgtgtgactctgacaggactatgatcctaacttacacaattaggagtgtatattttgattttatgttcaaggagatatatttaaatattccaggttcgtccttgactctacaacattccattttcataggaaaagccaaaactgaagctcgaggaagataactacgatgaaacaagaggaatggatgattacgacagcgttgctatcgttgctgtttgtttcatcttttccgccgttgagttacggagttgttcctcctcgtactctgctcaataagctgtcggagggcaaatatctcaacactcaggagctctggttcgaccaaaccctcgatcacttctctccctatgatcaccgacaattccggcaacgttactatgagtttctagactatttccggattcccgatggaccaatttttttggtaataggtggtgaaggtatattgaatggggtagcaaatgactatcttgctgtactggcaaagaagtttggagcagctatggttactcttgaacatcgctactacggaaagagtactccatttaattctttggagacagaaaatttgaaatatctttcgtccaagcaggcactctctgatttggctgtttttcggcagtattatcaggactccataaatgcaaagcttaatagaacaaaaattgaaaacccctggttcatttttggtggttcatattctggagcactcagtgcatggttccgtcttaagtttccccatttaacatgtggaagtctggctagttctgcagttgttcttgctgtttataactacacagaatttgatcagcagattggtgagtcggcaggtcctgaatgtaaagaagcgctgcaagaaactactcaactcattgaacacaaacttgcaaccagtggaaaggaattgaaggcctcttttgatgctgctgatcttgaaatagatggagactttttttatttcttggctgatgctactgctatagcgtttcaatatggaaatccagataaagtatgcaagcctcttgttgaagcaaagaaggctggagaggacttggtggatgcttatgccaaatatgtcaaagagtactacattggaacttttggtactgatgtgcagacatatgatcagaagtacttgaaaagaactgctatgaacgaggacaattctgctcgattatggtggtttcaagtttgcactgaagttgcatactttcaggtggctccctcaaatgacagtattcgctcctcaaaagtggacataaaataccatttggacctttgcaaaaatgtctttggagagggcatctttcctgatgttgatgcaactaatttatactacggaggcactaaaattgctggttcaaaaataatatttacaaatggctcacaagatccttggcgccatgcatccaagcaaacttcatctcctgatatgccttcctacatcgtcaaatgttacaattgtggccactgttctgattatcgaggatgtcctcaattccctttctccattgaaggtaatgagaaaaactgcacctctcctgatgcagttcacaaagtaaggcaaaagatttcagaacatatggacttgtggttatctgaatgcgtcgacacaggcagaagttttatatgattatttacataagatgtgaatgatgtacttttttttctaagttgttaatgatgtactataactccgcatgacttttggtatttctttccttcataagctaattatgacaccgtgaaatatatttagtgacttcgtataaattgacc

SEQ ID NO: 8404 - protein, 488 aa, Glycine max
  misc_feature (1)..(488): Ceres Seq. ID no. 15225554
MKQEEWMITTALLSLLFVSSFPPLSYGVVPPRTLLNKLSEGKYLNTQELWFDQTLDHFSPYDHRQFRQRYYEFLDYFRIPDGPIFLVIGGEGILNGVANDYLAVLAKKFGAAMVTLEHRYYGKSTPFNSLETENLKYLSSKQALSDLAVFRQYYQDSINAKLNRTKIENPWFIFGGSYSGALSAWFRLKFPHLTCGSLASSAVVLAVYNYTEFDQQIGESAGPECKEALQETTQLIEHKLATSGKELKASFDAADLEIDGDFFYFLADATAIAFQYGNPDKVCKPLVEAKKAGEDLVDAYAKYVKEYYIGTFGTDVQTYDQKYLKRTAMNEDNSARLWWFQVCTEVAYFQVAPSNDSIRSSKVDIKYHLDLCKNVFGEGIFPDVDATNLYYGGTKIAGSKIIFTNGSQDPWRHASKQTSSPDMPSYIVKCYNCGHCSDYRGCPQFPFSIEGNEKNCTSPDAVHKVRQKISEHMDLWLSECVDTGRSFI

SEQ ID NO: 8405 - protein, 482 aa, Glycine max
  misc_feature (1)..(482): Ceres Seq. ID no. 15225555
MITTALLSLLFVSSFPPLSYGVVPPRTLLNKLSEGKYLNTQELWFDQTLDHFSPYDHRQFRQRYYEFLDYFRIPDGPIFLVIGGEGILNGVANDYLAVLAKKFGAAMVTLEHRYYGKSTPFNSLETENLKYLSSKQALSDLAVFRQYYQDSINAKLNRTKIENPWFIFGGSYSGALSAWFRLKFPHLTCGSLASSAVVLAVYNYTEFDQQIGESAGPECKEALQETTQLIEHKLATSGKELKASFDAADLEIDGDFFYFLADATAIAFQYGNPDKVCKPLVEAKKAGEDLVDAYAKYVKEYYIGTFGTDVQTYDQKYLKRTAMNEDNSARLWWFQVCTEVAYFQVAPSNDSIRSSKVDIKYHLDLCKNVFGEGIFPDVDATNLYYGGTKIAGSKIIFTNGSQDPWRHASKQTSSPDMPSYIVKCYNCGHCSDYRGCPQFPFSIEGNEKNCTSPDAVHKVRQKISEHMDLWLSECVDTGRSFI

SEQ ID NO: 8406 - protein, 376 aa, Glycine max
  misc_feature (1)..(376): Ceres Seq. ID no. 15225556
MVTLEHRYYGKSTPFNSLETENLKYLSSKQALSDLAVFRQYYQDSINAKLNRTKIENPWFIFGGSYSGALSAWFRLKFPHLTCGSLASSAVVLAVYNYTEFDQQIGESAGPECKEALQETTQLIEHKLATSGKELKASFDAADLEIDGDFFYFLADATAIAFQYGNPDKVCKPLVEAKKAGEDLVDAYAKYVKEYYIGTFGTDVQTYDQKYLKRTAMNEDNSARLWWFQVCTEVAYFQVAPSNDSIRSSKVDIKYHLDLCKNVFGEGIFPDVDATNLYYGGTKIAGSKIIFTNGSQDPWRHASKQTSSPDMPSYIVKCYNCGHCSDYRGCPQFPFSIEGNEKNCTSPDAVHKVRQKISEHMDLWLSECVDTGRSFI

SEQ ID NO: 8407 - DNA, 2003 bp, Glycine max
  misc_feature (1)..(2003): Ceres Seq. ID no. 15225635
tcagctacgtaggcccccccccccaaaaaaaaaaaattctatcgaattggttccaactgcagttgttttgaccagggatgagtttgaaggagaatgtagctaagacaggcaacactgaggacaatgctagtcaaatgtggaccttatgcaaacatgctttctatgatttaactcatgtttctccggtggtgtttctgttcctgctgaaagaatgttattattatggcacatgtaaggcatcaacaaaattccgagcccttcaacatcaagtacatcttgttcttagtaatgatccaaaacccgaaccagcaacttttattgttcagtgcatgtatgtctctccattatttgaagatcatagtcaaggatttactcatctgataatatctgctcttcgccgattcctgaaaagatcaacaaccactacagaagactcattggaggtgaaagacctagttgcccatctacttgtagatattatttggggccagatcgatcatgatgaaaagattgtcctgaagctactcgagatttttgatgtaaaactaacaaatgttgagaaagcaatgtgtcaaattaaggaaaaacatgatttaagttgtggtacagcaaaagaatttgttgaacagtatattgttgagttggtaaaatcccagttgtacatgacagctgtcactttaatagagcaattctctgtctaccagtatggccagtcttttctccttgatatgatacagagtaatcaattcaaagccgcagagaagtgggcaacatttatggggaaacaaatgctatccacacttgtagaggagttcattgagaggaacatgctaaagaatgcccatgagattataaagaaaaataatctaaagcaggattttcctgatgtatacaaaaggtgtaaagaaagctcactaaaaaacttggcagaaaaaggatgctgggaggttgctgaggcaagaataaacaatgatagacagcttatggaatatctggtttatttggcaatggaagctggatacatggagaaagttgatgaactgtgtgatcggtactccctatccaggtttttggacatcaatgtacctgaaacaagtaatctgcaagggcattatttaaatcttgatgaattattggttgaaagcatcatttgggttgatgaagttgaaggtttgcttgatgcaacaaggcatattgagggttttaaagttataggtcttgactgtgaatggaaacccaattatataaaaggcagcaaaccaaacaaggtttctatcatgcagattgcttctgaagattcggcttttatctttgatctgataaagttacacaaagaagtgcctgacattttagataactgtctatctcgcattttgctgtcacctagaattctaaaacttggctataatttccaatgcgatgcaaagcaacttgcttattcgtatgaagagttgagatgtttcaagaactatgaaatgttgctggacatccagaatgtttttaaagaacctcggggtggtttggctgggcttacagagaaaatactgggagctagtttaaacaagacaagacgaaacagcaattgggagcaaagacctttaactccacatcaattagaatacgctgctctggatgctgttgtacttgttcacatattccgccatcttccttgtcaaggacataataaagataaatctgagtggaagtcttgcatcgtgtccctcaccgaaaacgccaagaaattcaagaaatgtgtaccaaagattgtagacacttgacaaggagaccagcaagcattgatttctgatgaattgagatcgaattttttaactgattgcatgtgtatatggaaaagttcctatagaaaaataagaaattttcaagaggtaaatgataattaatttcattgaatattttctttttctttttttgtatatgacatacaatttgaaatttggcattttgtacatgctatatttactagctgcaattacagttgtgtt

SEQ ID NO: 8408 - protein, 566 aa, Glycine max
  misc_feature (1)..(566): Ceres Seq. ID no. 15225636
MSLKENVAKTGNTEDNASQMWTLCKHAFYDLTHVSPVVFLFLLKECYYYGTCKASTKFRALQHQVHLVLSNDPKPEPATFIVQCMYVSPLFEDHSQGFTHLIISALRRFLKRSTTTTEDSLEVKDLVAHLLVDIIWGQIDHDEKIVLKLLEIFDVKLTNVEKAMCQIKEKHDLSCGTAKEFVEQYIVELVKSQLYMTAVTLIEQFSVYQYGQSFLLDMIQSNQFKAAEKWATFMGKQMLSTLVEEFIERNMLKNAHEIIKKNNLKQDFPDVYKRCKESSLKNLAEKGCWEVAEARINNDRQLMEYLVYLAMEAGYMEKVDELCDRYSLSRFLDINVPETSNLQGHYLNLDELLVESIIWVDEVEGLLDATRHIEGFKVIGLDCEWKPNYIKGSKPNKVSIMQIASEDSAFIFDLIKLHKEVPDILDNCLSRILLSPRILKLGYNFQCDAKQLAYSYEELRCFKNYEMLLDIQNVFKEPRGGLAGLTEKILGASLNKTRRNSNWEQRPLTPHQLEYAALDAVVLVHIFRHLPCQGHNKDKSEWKSCIVSLTENAKKFKKCVPKIVDT

SEQ ID NO: 8409 - protein, 547 aa, Glycine max
  misc_feature (1)..(547): Ceres Seq. ID no. 15225637
MWTLCKHAFYDLTHVSPVVFLFLLKECYYYGTCKASTKFRALQHQVHLVLSNDPKPEPATFIVQCMYVSPLFEDHSQGFTHLIISALRRFLKRSTTTTEDSLEVKDLVAHLLVDIIWGQIDHDEKIVLKLLEIFDVKLTNVEKAMCQIKEKHDLSCGTAKEFVEQYIVELVKSQLYMTAVTLIEQFSVYQYGQSFLLDMIQSNQFKAAEKWATFMGKQMLSTLVEEFIERNMLKNAHEIIKKNNLKQDFPDVYKRCKESSLKNLAEKGCWEVAEARINNDRQLMEYLVYLAMEAGYMEKVDELCDRYSLSRFLDINVPETSNLQGHYLNLDELLVESIIWVDEVEGLLDATRHIEGFKVIGLDCEWKPNYIKGSKPNKVSIMQIASEDSAFIFDLIKLHKEVPDILDNCLSRILLSPRILKLGYNFQCDAKQLAYSYEELRCFKNYEMLLDIQNVFKEPRGGLAGLTEKILGASLNKTRRNSNWEQRPLTPHQLEYAALDAVVLVHIFRHLPCQGHNKDKSEWKSCIVSLTENAKKFKKCVPKIVDT

SEQ ID NO: 8410 - protein, 482 aa, Glycine max
  misc_feature (1)..(482): Ceres Seq. ID no. 15225638
MYVSPLFEDHSQGFTHLIISALRRFLKRSTTTTEDSLEVKDLVAHLLVDIIWGQIDHDEKIVLKLLEIFDVKLTNVEKAMCQIKEKHDLSCGTAKEFVEQYIVELVKSQLYMTAVTLIEQFSVYQYGQSFLLDMIQSNQFKAAEKWATFMGKQMLSTLVEEFIERNMLKNAHEIIKKNNLKQDFPDVYKRCKESSLKNLAEKGCWEVAEARINNDRQLMEYLVYLAMEAGYMEKVDELCDRYSLSRFLDINVPETSNLQGHYLNLDELLVESIIWVDEVEGLLDATRHIEGFKVIGLDCEWKPNYIKGSKPNKVSIMQIASEDSAFIFDLIKLHKEVPDILDNCLSRILLSPRILKLGYNFQCDAKQLAYSYEELRCFKNYEMLLDIQNVFKEPRGGLAGLTEKILGASLNKTRRNSNWEQRPLTPHQLEYAALDAVVLVHIFRHLPCQGHNKDKSEWKSCIVSLTENAKKFKKCVPKIVDT

SEQ ID NO: 8411 - DNA, 1401 bp, Glycine max
  misc_feature (1)..(1401): Ceres Seq. ID no. 15225703
aannnnnngggccccccctcgagtcagctacgtaggccccccccccgataatctctgtttgtgaagttcttactgcggcagttagtaaatgacatacccttgccactaactaatgtcctctcattcccccgtttaaactcattcaccaattccacctctataaactataaacaccttacgttacagaataaaagtttctgactgacagaaattatggccagaagagatcttgaaagtggcggtggagtaaccaagaacaacagaagtgcagaggaaaactactctgcgcccgaatcttcccatgtttatgattctgagacccattggacatcatggctcgtgcccatgtttgtggttgctaatattgctgtctttgttattaccatgtacatcaacaattgtcccaggaacaaccttcgtttccaaggtcgctgcgtggcaaggtttcttggaaggttctcttttcagcctatgcaggagaatcccttgcttggtccttcttcttcaacattgaccaagatgggagctcttcgatgggataatgttgtgaatagacatcagggatggagacttgtcacttgcatttggttacatgctggggttattcatttgctggctaatatgttgagtctggtcttcattggcattcgccttgaacaacaattcgggtttattaagattggaatcatatacttggtgtctgggtttggtggaagtgtactgtcgtctctatttatcagagaccacatctctgtgggtgcttctggtgccctttttggacttcttggcgcaatgctgtctgaacttatcacaaactggactatatattccaataaagcaatggctttaataacccttctagtgatcattgtaatcaaccttggcattggcattttgccacacgtagataattttgctcacatcggaggattcctggtgggattactccttggctttattttgctgccacgtcctcagttcggttggttagagcagcgacgtcttcctgccggtgttcagatgaagtcaaagtacaagactcaccaatatgttctaggggttgtgtctcttattctgttgattgcagggttatcgactgcattggtgatgctatttcggggtgagaaagggtatgaccactgccattggtgtcgctacttaacatgtgtccctacttctaaatgggaatgcagcaatgacagttaaataagaaaggggaaatgattttcacttgcaatatcttttcttgtgtatagccatagagctcttagaaactggcttgttttgtctcttttagttttttttgttctttaaataattggtctgcctttatgaatttatgctttttttaaaaaaaaaattatacatattagtatatgatatataaagaaatttgcttgt

SEQ ID NO: 8412 - protein, 330 aa, Glycine max
  misc_feature (1)..(330): Ceres Seq. ID no. 15225704
MARRDLESGGGVTKNNRSAEENYSAPESSHVYDSETHWTSWLVPMFVVANIAVFVITMYINNCPRNNLRFQGRCVARFLGRFSFQPMQENPLLGPSSSTLTKMGALRWDNVVNRHQGWRLVTCIWLHAGVIHLLANMLSLVFIGIRLEQQFGFIKIGIIYLVSGFGGSVLSSLFIRDHISVGASGALFGLLGAMLSELITNWTIYSNKAMALITLLVIIVINLGIGILPHVDNFAHIGGFLVGLLLGFILLPRPQFGWLEQRRLPAGVQMKSKYKTHQYVLGVVSLILLIAGLSTALVMLFRGEKGYDHCHWCRYLTCVPTSKWECSNDS

SEQ ID NO: 8413 - protein, 286 aa, Glycine max
  misc_feature (1)..(286): Ceres Seq. ID no. 15225705
MFVVANIAVFVITMYINNCPRNNLRFQGRCVARFLGRFSFQPMQENPLLGPSSSTLTKMGALRWDNVVNRHQGWRLVTCIWLHAGVIHLLANMLSLVFIGIRLEQQFGFIKIGIIYLVSGFGGSVLSSLFIRDHISVGASGALFGLLGAMLSELITNWTIYSNKAMALITLLVIIVINLGIGILPHVDNFAHIGGFLVGLLLGFILLPRPQFGWLEQRRLPAGVQMKSKYKTHQYVLGVVSLILLIAGLSTALVMLFRGEKGYDHCHWCRYLTCVPTSKWECSNDS

SEQ ID NO: 8414 - protein, 273 aa, Glycine max
  misc_feature (1)..(273): Ceres Seq. ID no. 15225706
MYINNCPRNNLRFQGRCVARFLGRFSFQPMQENPLLGPSSSTLTKMGALRWDNVVNRHQGWRLVTCIWLHAGVIHLLANMLSLVFIGIRLEQQFGFIKIGIIYLVSGFGGSVLSSLFIRDHISVGASGALFGLLGAMLSELITNWTIYSNKAMALITLLVIIVINLGIGILPHVDNFAHIGGFLVGLLLGFILLPRPQFGWLEQRRLPAGVQMKSKYKTHQYVLGVVSLILLIAGLSTALVMLFRGEKGYDHCHWCRYLTCVPTSKWECSNDS

SEQ ID NO: 8415 - DNA, 517 bp, Glycine max
  misc_feature (1)..(517): Ceres Seq. ID no. 15225715
ccctcgagtcagctacgtaggcccccccccattttttttctgggaaaaactgcaggtttatgcctttcctgatcttatctggacaactttgtcctccaggaattgaagggactttatttgcacttttcatgtcaataaacaacttgggatccacagtggggtcttttgtgggtgctggcttggcttctatattgaacattgattcaggatcatttgacaatcttctcttgggcatcattgttcatgccttgtgcaatttcatcccaattgcttttctgtttctgataccaaaggaagctacaggttcttcaacatagattatgactactacacagggattggctttgcttcattaggttcttctaggcctaccatagttgtaattttacacttgtagatgggaatattttggagcaaatgaggaacatattaatctgatttatgcgaactcggatcatagtaattgtatatactattttactgacaattttggtcagcaagtctattttcttgcatg

SEQ ID NO: 8416 - protein, 85 aa, Glycine max
  misc_feature (1)..(85): Ceres Seq. ID no. 15225716
MPFLILSGQLCPPGIEGTLFALFMSINNLGSTVGSFVGAGLASILNIDSGSFDNLLLGIIVHALCNFIPIAFLFLIPKEATGSST

SEQ ID NO: 8417 - protein, 62 aa, Glycine max
  misc_feature (1)..(62): Ceres Seq. ID no. 15225717
MSINNLGSTVGSFVGAGLASILNIDSGSFDNLLLGIIVHALCNFIPIAFLFLIPKEATGSST

SEQ ID NO: 8418 - DNA, 573 bp, Glycine max
  misc_feature (1)..(573): Ceres Seq. ID no. 15225718
gttattcggctccctattgggggaattgggttmcggggccccccttgagtcargttcgttgggccccccccccccccttgaccttgagattgctgctacacgaatgcctgagcaatatcaaaataaaatggtttggatcctgtgcaatgactgtggtaaaacttctcacgttcagttccattttgtggctcaaaagtgtccgaactgcaaatcctacaacacacgacaaacatgaggcggagcaggtggccacgattattcattggcttcatcaaaagccttcactcgagagctctcttgatgttgtcgtgacttgtgaaggcagtgaaaatagatgtgcatccattgggtacgtggatgtgcacgtgtgggaatttggagtgcatgatgagccacattcagagggataaaataatggttcttatgttgatttggagtggggtggtttaatttgttggggctcccctagtagttggaatagtccagagtgttagagttcttgtattatatttgttttagccctatcgataagtattctagttaaattactctttaagtgaaattcattcttcc

SEQ ID NO: 8419 - protein, 135 aa, Glycine max
  misc_feature (1)..(135): Ceres Seq. ID no. 15225719
  misc_feature (11)..(11): Xaa is any aa, unknown or other
  misc_feature (17)..(17): Xaa is any aa, unknown or other
YSAPYWGNWVXGPPLSXVRWAPPPPLTLRLLLHECLSNIKIKWFGSCAMTVVKLLTFSSILWLKSVRTANPTTHDKHEAEQVATIIHWLHQKPSLESSLDVVVTCEGSENRCASIGYVDVHVWEFGVHDEPHSEG

SEQ ID NO: 8420 - protein, 87 aa, Glycine max
  misc_feature (1)..(87): Ceres Seq. ID no. 15225720
MTVVKLLTFSSILWLKSVRTANPTTHDKHEAEQVATIIHWLHQKPSLESSLDVVVTCEGSENRCASIGYVDVHVWEFGVHDEPHSEG

SEQ ID NO: 8421 - protein, 77 aa, Glycine max
  misc_feature (1)..(77): Ceres Seq. ID no. 15225721
  misc_feature (11)..(11): Xaa is any aa, unknown or other
  misc_feature (18)..(18): Xaa is any aa, unknown or other
LFGSLLGELGXGAPLESXSLGPPPPLDLEIAATRMPEQYQNKMVWILCNDCGKTSHVQFHFVAQKCPNCKSYNTRQT

SEQ ID NO: 8422 - DNA, 983 bp, Glycine max
  misc_feature (1)..(983): Ceres Seq. ID no. 15225722
tcagctacgtaggcccccccccccaagagagctagaatttcttggtagaatcaagcaccccaatcttgttcctttaactggatattgtgtagctggggatcagagaattgccatatatgattacatggagaatggtaacttgcaaaacctgctttatgacttgccacttggggtacaaagcacagatgactggagcacagacacatgggaagaagctgacaacaatggcattcaaaatgctggctctgaagggcttttcacatcttggagatttcgccacagaatcgcccttggcacggctcgagcattggcatttttgcatcatggttgctcacctccaataatccacagagctgttaaggccagtagtgtgtatttggactatgacttggagccaaggttgtctgattttgggttggccaagattttcggaagtggcttggatgatcaaatcgcgcgtggctcgcctggttatgttccaccagagtttactcaaccagaattggacactccaacaccaaaatctgatgtgtactgttttggggtggtgctctttgagctagtgactggaaagaagccaattgaagatgattaccctgatgataaagaagaaactttggtgagttgggtgagaggacttgtaagaaagaaccaagcttcaagagctatcgatccgaaaattcgcgacactggaccagatgaacaaatagaagaggctcttaagataggttatctttgcactgctgaccttcccttcaaacgaccaagcatgcaacagatagttggacttctaaaggatattgaacctactggctagttagtgagcatgatgagaaagagtctaggtccttttttcaatttttttttaattttctctttgatttttctacttgagagcttctcatgctaccttggagaaaatgtaaagcagtttatgagttcttgaatgttgatcttttttcaattttttcccaaaaaaaacg

SEQ ID NO: 8423 - protein, 271 aa, Glycine max
  misc_feature (1)..(271): Ceres Seq. ID no. 15225723
QLRRPPPPRELEFLGRIKHPNLVPLTGYCVAGDQRIAIYDYMENGNLQNLLYDLPLGVQSTDDWSTDTWEEADNNGIQNAGSEGLFTSWRFRHRIALGTARALAFLHHGCSPPIIHRAVKASSVYLDYDLEPRLSDFGLAKIFGSGLDDQIARGSPGYVPPEFTQPELDTPTPKSDVYCFGVVLFELVTGKKPIEDDYPDDKEETLVSWVRGLVRKNQASRAIDPKIRDTGPDEQIEEALKIGYLCTADLPFKRPSMQQIVGLLKDIEPTG

SEQ ID NO: 8424 - protein, 230 aa, Glycine max
  misc_feature (1)..(230): Ceres Seq. ID no. 15225724
MENGNLQNLLYDLPLGVQSTDDWSTDTWEEADNNGIQNAGSEGLFTSWRFRHRIALGTARALAFLHHGCSPPIIHRAVKASSVYLDYDLEPRLSDFGLAKIFGSGLDDQIARGSPGYVPPEFTQPELDTPTPKSDVYCFGVVLFELVTGKKPIEDDYPDDKEETLVSWVRGLVRKNQASRAIDPKIRDTGPDEQIEEALKIGYLCTADLPFKRPSMQQIVGLLKDIEPTG

SEQ ID NO: 8425 - DNA, 693 bp, Glycine max
  misc_feature (1)..(693): Ceres Seq. ID no. 15225745
agtcagctacgtaggccccccccccccaaaactcaacccacagttagtacaaaaaagggttacttcagcttccacatatcttgaagaattgatcaatgggcaagtctgtagttgagaagctactttggatggcaattgtgtgcttggtgctgggtgtaatttccattactcccaaggcccaagcagcagtgacatgcaaccaggtggtgagcaacctcaccccatgcatttcttatgtgctcaatggtggcaaaaccgtgcctggcccttgctgcaatgggatcaagaccctctttaacctcgctcactccacaccagaccgccaaaccgtttgcaagtgcataaagaacgctgttagtgcgttccattatggcaagtccaatgtggaccgtgctgctgctcttcctaagcagtgtggggttaacattccttaccagatcagcccttccaccgactgtaccagagtgcagtgaggttaatgatatatggagcggtaactcgagaagagaaggatatacaatatatagctagtgtgtgaataagtggctggctatacgtaggccacacattacattaatgactggtggctgcttattattacatccatcaactagtcttgttattgagttattgtattttttttatttgtaagaatcaaaaataatattaaagatttataataatttatgtatg

SEQ ID NO: 8426 - protein, 125 aa, Glycine max
  misc_feature (1)..(125): Ceres Seq. ID no. 15225746
MGKSVVEKLLWMAIVCLVLGVISITPKAQAAVTCNQVVSNLTPCISYVLNGGKTVPGPCCNGIKTLFNLAHSTPDRQTVCKCIKNAVSAFHYGKSNVDRAAALPKQCGVNIPYQISPSTDCTRVQ

SEQ ID NO: 8427 - protein, 114 aa, Glycine max
  misc_feature (1)..(114): Ceres Seq. ID no. 15225747
MAIVCLVLGVISITPKAQAAVTCNQVVSNLTPCISYVLNGGKTVPGPCCNGIKTLFNLAHSTPDRQTVCKCIKNAVSAFHYGKSNVDRAAALPKQCGVNIPYQISPSTDCTRVQ

SEQ ID NO: 8428 - DNA, 1239 bp, Glycine max
  misc_feature (1)..(1239): Ceres Seq. ID no. 15225822
attatgcttttggaatgttgcagccaagagagaacttatcttcgatattatggtcttctggggcagcgtttctgcatgatcaacaaagtacaccaagaaaattttgaaaagtgttttgtgcagcagtactcaatgattcaccgacttgaaacaaataaactgcgaaatgtggcaaagttttttgctcatttacttggcacagatgctctaccttggcatgttttatcttatatacgcttgactgaagaggacacaacttcttcttcacgtatatttattaagattctcttccaggaattatcagaacatcttggaatccgactgctaaatgagcgattaaatgatctaacaatgcaagaatcttttgaatccatatttccaaaagataatccaaaaaacacacggttctgcattaacttctttacatctattggtcttggtggtcttaccgagaacctacgtgagtatttgaagaatatgccacgtcttatcatgcaacaacagaaacaagtttcagaatctgaatcagatgatgagtcagggagttctgattcatcagattctggatcagctagttcagagtcagactcagactcagcaagttctgatgaaactgaccgtgcgagtgacagaagacaaagaaagcggaggagaaagtgaagcaattgtatgctattgtcgaaggcccttgcatccacaaaactgagtatccatggtttctcaatctttaaatcactgaataaacttgcctttttatgtgctgtgaaagggatatgtgggcttcctcggtaagtgaaaactgtggcatgtgctgtgctgtttaagcaaatttgacatggttcacattgttccatgatcaccccttcatcatcgttagatctggaaagatccaatggccacatttatgcttagaaccacactgaacatggcagtgggaacaacaactgaagagagataggagtgtgaagttggtgaaggtttttgataagatgaaacgaagtggtggaatggtaactcggttgcgtgaaaggaacaaacttgttaagagttagacatggttctgaaagtggggtcagtgtttctggctttgtttcaacacttacttcataggactttcgatgaagactttttttttctttttcttttttgggtctgggacttttgttctttcaccgtgtgtgattgaattcatcaaagtttgagtttgtatgcttgcaatggaaatgagtcattattgtc

SEQ ID NO: 8429 - protein, 219 aa, Glycine max
  misc_feature (1)..(219): Ceres Seq. ID no. 15225823
IMLLECCSQERTYLRYYGLLGQRFCMINKVHQENFEKCFVQQYSMIHRLETNKLRNVAKFFAHLLGTDALPWHVLSYIRLTEEDTTSSSRIFIKILFQELSEHLGIRLLNERLNDLTMQESFESIFPKDNPKNTRFCINFFTSIGLGGLTENLREYLKNMPRLIMQQQKQVSESESDDESGSSDSSDSGSASSESDSDSASSDETDRASDRRQRKRRRK

SEQ ID NO: 8430 - protein, 218 aa, Glycine max
  misc_feature (1)..(218): Ceres Seq. ID no. 15225824
MLLECCSQERTYLRYYGLLGQRFCMINKVHQENFEKCFVQQYSMIHRLETNKLRNVAKFFAHLLGTDALPWHVLSYIRLTEEDTTSSSRIFIKILFQELSEHLGIRLLNERLNDLTMQESFESIFPKDNPKNTRFCINFFTSIGLGGLTENLREYLKNMPRLIMQQQKQVSESESDDESGSSDSSDSGSASSESDSDSASSDETDRASDRRQRKRRRK

SEQ ID NO: 8431 - protein, 194 aa, Glycine max
  misc_feature (1)..(194): Ceres Seq. ID no. 15225825
MINKVHQENFEKCFVQQYSMIHRLETNKLRNVAKFFAHLLGTDALPWHVLSYIRLTEEDTTSSSRIFIKILFQELSEHLGIRLLNERLNDLTMQESFESIFPKDNPKNTRFCINFFTSIGLGGLTENLREYLKNMPRLIMQQQKQVSESESDDESGSSDSSDSGSASSESDSDSASSDETDRASDRRQRKRRRK

SEQ ID NO: 8432 - DNA, 1279 bp, Glycine max
  misc_feature (1)..(1279): Ceres Seq. ID no. 15225873
tttctatcatggaaacattatcagttggcttgaatgccaaaccatttcagaagactaaaaacacttcgaacttctctgcacctgcaagtgatcctgtttcctttcagagagaaaactgcagtgctgaaagtaaagaggctgttttgggagcaagaactaatgttgaggccaatggattgaggtcaaaagtaaacagcacacctctttctctgccaaaaaagagtacacatgaacctagaaagtcatttgacaattctagcagcaatacagacattcaagcacagaagagtgcaccttctcccaataacttgcagaagacagcgaaagaaagagataattcagatcaagtttctgaagtgcaccatgatgcttccgatgcttttccaacagagtgggtgccaccaaatttgagtgtacccattttggatctggttgatgttatcttccaggttcatgatggtggatggattaggcggaaggctttttgggttgctaaacaaatcttacaactaggaatgggtgatgcctttgatgactggttgatagagaaaattcagcttctccgtaagggttcagtggttgcttcaggggtcaagcgagttgagcaaatactctggcctgatggaatattcataaccaagcatccaaatcgacgacctccgtcaccttctagtccatctcagaattctcctcatggcaatcaacctacacaagtgtcttctccaaggttggatgatgagcagaaacaggaggcagatcggcgtgcaaaatttgtatatgagctaatgattgatcatgcaccgccagctattgtaggtcttgttggtcggaaggagtacgagcaatgtgcaagggatttatattttttccttcagtcatccgttatcttgaagcagctggcttttgacatcctggagctgctgctgacatcggcatttccggagcttgataatgtatttaagcagctgcatgaagaaaagcataaatttggtgagttcagaacacagtaaatattacaattttcagacgaggcacggagaaataatggtttagatgtttcgtcttccgaaatacattctttttcttgtgattgttcctgattgcccttttgtctctgcaaccgctatccttctctttctgccaactaatgagccaaaggcaattcaatttttccatctaccaagtcaagttttgtaattaaggttggcattttgaggcagacgtcatgtaaattttgagattaatgcaattattttgagattctttattggctaaaaag

SEQ ID NO: 8433 - protein, 335 aa, Glycine max
  misc_feature (1)..(335): Ceres Seq. ID no. 15225874
SIMETLSVGLNAKPFQKTKNTSNFSAPASDPVSFQRENCSAESKEAVLGARTNVEANGLRSKVNSTPLSLPKKSTHEPRKSFDNSSSNTDIQAQKSAPSPNNLQKTAKERDNSDQVSEVHHDASDAFPTEWVPPNLSVPILDLVDVIFQVHDGGWIRRKAFWVAKQILQLGMGDAFDDWLIEKIQLLRKGSVVASGVKRVEQILWPDGIFITKHPNRRPPSPSSPSQNSPHGNQPTQVSSPRLDDEQKQEADRRAKFVYELMIDHAPPAIVGLVGRKEYEQCARDLYFFLQSSVILKQLAFDILELLLTSAFPELDNVFKQLHEEKHKFGEFRTQ

SEQ ID NO: 8434 - protein, 333 aa, Glycine max
  misc_feature (1)..(333): Ceres Seq. ID no. 15225875
METLSVGLNAKPFQKTKNTSNFSAPASDPVSFQRENCSAESKEAVLGARTNVEANGLRSKVNSTPLSLPKKSTHEPRKSFDNSSSNTDIQAQKSAPSPNNLQKTAKERDNSDQVSEVHHDASDAFPTEWVPPNLSVPILDLVDVIFQVHDGGWIRRKAFWVAKQILQLGMGDAFDDWLIEKIQLLRKGSVVASGVKRVEQILWPDGIFITKHPNRRPPSPSSPSQNSPHGNQPTQVSSPRLDDEQKQEADRRAKFVYELMIDHAPPAIVGLVGRKEYEQCARDLYFFLQSSVILKQLAFDILELLLTSAFPELDNVFKQLHEEKHKFGEFRTQ

SEQ ID NO: 8435 - DNA, 1062 bp, Glycine max
  misc_feature (1)..(1062): Ceres Seq. ID no. 15225932
ggttacttttcgcatcttttcgttttgagctcaccgtggctcttctccattgtcgttttgcttctcccttcttccttcccattcaaaccctaatctgtccctcggatcccaaaattgccccaaattgagaacacgccatggcggcaacgttcgatttggttcgttccctcgcacttctcactcttgcatttgtgtgtagcgtcgcgaattcgatgcggttcgagcttcaatcgggtaacaccaagtgcatttcagaagacattaagaccaacgcgatgagtgtgggaaagtacagtgttgttaatccccgagaagggtacccacttcccgattcccacaggatcgttgtcaaggtgacgtcgcctcatgcgaacatgtatcactttggagatcatgtggattctggtaattttgcatttacggcatctgagtctggtgactactcagcttgcttttgggttcaggataccagagataccccgtcggtggtgactattgaatttgagtggagaactggggttgctgccaaagactggtccaaggttgccaagaaagggcagattgaagtaatggaatttgagttgaagaagctatatgatactatcctatccatccatgacgagatgttttatcttcgagaaagggaggaagagatgcaagatcttaacaaagcaacaaacagcaagatgtttaccttcagtttcctttcgattgtggtttgcttgtctgtggctggtttgcaactatggcatttgaagacattctttgagaggaagaagctcctctaagttcatcacacgaattttgttcatttttgcttcagaattttttttattttctgttcctggttgttccttatgtatccaaatgtatgattagttcatctttcacttttacattttatggcaactagaaattgctgctgatcgcaagtcatgttaaatgtatgttacaattatgaaccggtattaactttagaaactatagttaaatttcttaacaggcccttaaaaaaaaaaaaaaaaaaaaaaaaaaaaaaaaaaaaaaaaaaaaaaaaaaaag

SEQ ID NO: 8436 - protein, 216 aa, Glycine max
  misc_feature (1)..(216): Ceres Seq. ID no. 15225933
MAATFDLVRSLALLTLAFVCSVANSMRFELQSGNTKCISEDIKTNAMSVGKYSVVNPREGYPLPDSHRIVVKVTSPHANMYHFGDHVDSGNFAFTASESGDYSACFWVQDTRDTPSVVTIEFEWRTGVAAKDWSKVAKKGQIEVMEFELKKLYDTILSIHDEMFYLREREEEMQDLNKATNSKMFTFSFLSIVVCLSVAGLQLWHLKTFFERKKLL

SEQ ID NO: 8437 - protein, 191 aa, Glycine max
  misc_feature (1)..(191): Ceres Seq. ID no. 15225934
MRFELQSGNTKCISEDIKTNAMSVGKYSVVNPREGYPLPDSHRIVVKVTSPHANMYHFGDHVDSGNFAFTASESGDYSACFWVQDTRDTPSVVTIEFEWRTGVAAKDWSKVAKKGQIEVMEFELKKLYDTILSIHDEMFYLREREEEMQDLNKATNSKMFTFSFLSIVVCLSVAGLQLWHLKTFFERKKLL

SEQ ID NO: 8438 - protein, 170 aa, Glycine max
  misc_feature (1)..(170): Ceres Seq. ID no. 15225935
MSVGKYSVVNPREGYPLPDSHRIVVKVTSPHANMYHFGDHVDSGNFAFTASESGDYSACFWVQDTRDTPSVVTIEFEWRTGVAAKDWSKVAKKGQIEVMEFELKKLYDTILSIHDEMFYLREREEEMQDLNKATNSKMFTFSFLSIVVCLSVAGLQLWHLKTFFERKKLL

SEQ ID NO: 8439 - DNA, 1351 bp, Glycine max
  misc_feature (1)..(1351): Ceres Seq. ID no. 15226049
gtctgtggcagccacacgtcttggcagttctcttctctgattacgaaattttttcagcaaaagcaggcaatggacttcttttttaagggaatgaacagggatggatctgagtgtccctttgatgtgaaagacatccaacggtgtccgtttttaagaaacatcaatgaacctacaaacttctctttctcctcaactaaaatctccattcctgttcatggatccaagggtcctatatttgaagatggtcctagttttggcatggcatttaagctatttcatgggaaggatggagtcattcccctatctgagaaatctgactttcacaatggcagcacagaagcagattctctgcctgttttcaaccctttggcaggaagagctgcctccataagtctgtctggaccaggtggcccatttagtttttggaatttttctgagaaatggaagaagcagaagaattccgaatcatcaaataaaaaggaatactcacctcagaatggagatgtatcaaagcatgaggcacttggaaatgaatggttggccaaaggaacttgcccaattgccaagtcttatagagctgtaagcaatgttctaccccttgttgcaacagcttttcggccaccgagtggagtgaagcttagatgtccacatgcaattgttgctgcaagggctgcccttgcccgtacaacctttgtgaaaaacatgcgccctcagcctcttcctgcaaaaatgcttgttattgcagcgttaggcatggcggttaatgtgccctttggcatgtggaaggagcataccaagaaattttcattatcttggtttgtagccgtgcatgctgctgttccctttatagccatgcttcggaagtcagtggtgatgcctaaatcagcaatggcactgaccattgcagcttctatacttggacaagttattggctcaagagctgagcgaatccggctgaaaacaatagctgttgagatgggaaaagtgaaaacagagacagtatgcagcatggaaagctataatagtcccatgcaacttggtgatattagggccaatcactgtggtgctgaaggaatggtcctcaagtcgtcacttcctgtgaaggatactggttcaacttcaactgctggcgtgtgttattgatctataaagattggaaagaaatccattcaggttctatttgaacatattgatgaactggaattgtaataaaattgattaatataaataagatccttatgagctatgtataacttgaacagaaattaagacatgctgttactatgcatgcagaaatgtatatggagaattgatcgcttaattctgataaaagttgagttcgtcttaaatt

SEQ ID NO: 8440 - protein, 380 aa, Glycine max
  misc_feature (1)..(380): Ceres Seq. ID no. 15226050
VCGSHTSWQFSSLITKFFQQKQAMDFFFKGMNRDGSECPFDVKDIQRCPFLRNINEPTNFSFSSTKISIPVHGSKGPIFEDGPSFGMAFKLFHGKDGVIPLSEKSDFHNGSTEADSLPVFNPLAGRAASISLSGPGGPFSFWNFSEKWKKQKNSESSNKKEYSPQNGDVSKHEALGNEWLAKGTCPIAKSYRAVSNVLPLVATAFRPPSGVKLRCPHAIVAARAALARTTFVKNMRPQPLPAKMLVIAALGMAVNVPFGMWKEHTKKFSLSWFVAVHAAVPFIAMLRKSVVMPKSAMALTIAASILGQVIGSRAERIRLKTIAVEMGKVKTETVCSMESYNSPMQLGDIRANHCGAEGMVLKSSLPVKDTGSTSTAGVCY

SEQ ID NO: 8441 - protein, 357 aa, Glycine max
  misc_feature (1)..(357): Ceres Seq. ID no. 15226051
MDFFFKGMNRDGSECPFDVKDIQRCPFLRNINEPTNFSFSSTKISIPVHGSKGPIFEDGPSFGMAFKLFHGKDGVIPLSEKSDFHNGSTEADSLPVFNPLAGRAASISLSGPGGPFSFWNFSEKWKKQKNSESSNKKEYSPQNGDVSKHEALGNEWLAKGTCPIAKSYRAVSNVLPLVATAFRPPSGVKLRCPHAIVAARAALARTTFVKNMRPQPLPAKMLVIAALGMAVNVPFGMWKEHTKKFSLSWFVAVHAAVPFIAMLRKSVVMPKSAMALTIAASILGQVIGSRAERIRLKTIAVEMGKVKTETVCSMESYNSPMQLGDIRANHCGAEGMVLKSSLPVKDTGSTSTAGVCY

SEQ ID NO: 8442 - protein, 350 aa, Glycine max
  misc_feature (1)..(350): Ceres Seq. ID no. 15226052
MNRDGSECPFDVKDIQRCPFLRNINEPTNFSFSSTKISIPVHGSKGPIFEDGPSFGMAFKLFHGKDGVIPLSEKSDFHNGSTEADSLPVFNPLAGRAASISLSGPGGPFSFWNFSEKWKKQKNSESSNKKEYSPQNGDVSKHEALGNEWLAKGTCPIAKSYRAVSNVLPLVATAFRPPSGVKLRCPHAIVAARAALARTTFVKNMRPQPLPAKMLVIAALGMAVNVPFGMWKEHTKKFSLSWFVAVHAAVPFIAMLRKSVVMPKSAMALTIAASILGQVIGSRAERIRLKTIAVEMGKVKTETVCSMESYNSPMQLGDIRANHCGAEGMVLKSSLPVKDTGSTSTAGVCY

SEQ ID NO: 8443 - DNA, 1622 bp, Glycine max
  misc_feature (1)..(1622): Ceres Seq. ID no. 15226087
accgggccccccctygagtcagctacgtaggccccccccccccccaaaacccacaaacacttgagtcagacaaaaagatggaaacctctaataacaaccatgatgctcctcctccacctctacttaaagacctgaaggtgaccatccacaatgcctccatgatttttccatccaaagagattgagagaaagtcccttttcttgtcaaacattgacaaggtcctcaactttgatgtggaaacggttcacttctttggtgcccacaaagattttcctcctcatgttgtgaatgagaggctcaagaatgccctagaggatgcccttgtggtttatgacttcttgggtggaagattgaagctcaactatgacaccaaaagattggagatggattgtaatccagagggagctggattcgtggtggcttccagcgagtacaatttggatcagataggggacttggattatccaaatccagcttttgcacaattggtacatcagaataaggattttcttaaagatggtgatgttccactctgtgttgcccaggtgacatccttcaagtgtggtggttttgcaattggcatatctactagccacaccacctttgatggcctcagcttcaaaaccttcctagacaacattgcttcaatagccgctaagaagcccttggttgtcacgccctgtcatgacaggcacctcctagccgcccgatccccaccacgtgtcaccttcccacaccctgagatgctcaagctaagtgaccagctcccaacatgccccgagtccaacatctttgaggcctccaccgaacaacttgatttcaaggtcttcaaactaacattaaacgacatcacaaaattgaaggaagaggctaggaattcttcaattagtggtggcctaagtactaaatgtgtcactggctttaacgttatcactgcctacatatggagatgcaaggcactttcgtgctacaatgatgagaaccgtaataggtcatcaactatactatatgctgtagatatacgttcaagattgaaccctccattgcctaaatcatacgcgggtaacgcagtgttaactgcttatgccacggcaaagtgtaaggagctagaagaatggccttttatgaagctagttgaaatggtgcgtgagggagcaactaggatgacaaatgagtatgcaagatctatcatagattggggagagataaacaatgggtttcccaatggggaggttttggtgtcttcatggtggagattagggtttgaggaagtggagtatccgtgggggaagccaaagtattgttgcccagtggtgtatcataagaaggatattattttgttgtttcctccggttggtggaggtgaaggggtgagtattattgtggctcttcctcctaaggaaatggaaaaattccatgggctcttcaacaagttcttgacttcacattgagggaaatgatgggtctttcttcctcctcctatggaaatggaaagattccatgcatgcttaagttcatgacttgagaattatgtctctccctctattgatatccttattaatatgacatctttagcttttcgctagttgttatgtaataaagtatgattctttytgggtttt

SEQ ID NO: 8444 - protein, 482 aa, Glycine max
  misc_feature (1)..(482): Ceres Seq. ID no. 15226088
  misc_feature (5)..(5): Xaa is any aa, unknown or other
RAPPXVSYVGPPPPQNPQTLESDKKMETSNNNHDAPPPPLLKDLKVTIHNASMIFPSKEIERKSLFLSNIDKVLNFDVETVHFFGAHKDFPPHVVNERLKNALEDALVVYDFLGGRLKLNYDTKRLEMDCNPEGAGFVVASSEYNLDQIGDLDYPNPAFAQLVHQNKDFLKDGDVPLCVAQVTSFKCGGFAIGISTSHTTFDGLSFKTFLDNIASIAAKKPLVVTPCHDRHLLAARSPPRVTFPHPEMLKLSDQLPTCPESNIFEASTEQLDFKVFKLTLNDITKLKEEARNSSISGGLSTKCVTGFNVITAYIWRCKALSCYNDENRNRSSTILYAVDIRSRLNPPLPKSYAGNAVLTAYATAKCKELEEWPFMKLVEMVREGATRMTNEYARSIIDWGEINNGFPNGEVLVSSWWRLGFEEVEYPWGKPKYCCPVVYHKKDIILLFPPVGGGEGVSIIVALPPKEMEKFHGLFNKFLTSH

SEQ ID NO: 8445 - protein, 457 aa, Glycine max
  misc_feature (1)..(457): Ceres Seq. ID no. 15226089
METSNNNHDAPPPPLLKDLKVTIHNASMIFPSKEIERKSLFLSNIDKVLNFDVETVHFFGAHKDFPPHVVNERLKNALEDALVVYDFLGGRLKLNYDTKRLEMDCNPEGAGFVVASSEYNLDQIGDLDYPNPAFAQLVHQNKDFLKDGDVPLCVAQVTSFKCGGFAIGISTSHTTFDGLSFKTFLDNIASIAAKKPLVVTPCHDRHLLAARSPPRVTFPHPEMLKLSDQLPTCPESNIFEASTEQLDFKVFKLTLNDITKLKEEARNSSISGGLSTKCVTGFNVITAYIWRCKALSCYNDENRNRSSTILYAVDIRSRLNPPLPKSYAGNAVLTAYATAKCKELEEWPFMKLVEMVREGATRMTNEYARSIIDWGEINNGFPNGEVLVSSWWRLGFEEVEYPWGKPKYCCPVVYHKKDIILLFPPVGGGEGVSIIVALPPKEMEKFHGLFNKFLTSH

SEQ ID NO: 8446 - protein, 430 aa, Glycine max
  misc_feature (1)..(430): Ceres Seq. ID no. 15226090
MIFPSKEIERKSLFLSNIDKVLNFDVETVHFFGAHKDFPPHVVNERLKNALEDALVVYDFLGGRLKLNYDTKRLEMDCNPEGAGFVVASSEYNLDQIGDLDYPNPAFAQLVHQNKDFLKDGDVPLCVAQVTSFKCGGFAIGISTSHTTFDGLSFKTFLDNIASIAAKKPLVVTPCHDRHLLAARSPPRVTFPHPEMLKLSDQLPTCPESNIFEASTEQLDFKVFKLTLNDITKLKEEARNSSISGGLSTKCVTGFNVITAYIWRCKALSCYNDENRNRSSTILYAVDIRSRLNPPLPKSYAGNAVLTAYATAKCKELEEWPFMKLVEMVREGATRMTNEYARSIIDWGEINNGFPNGEVLVSSWWRLGFEEVEYPWGKPKYCCPVVYHKKDIILLFPPVGGGEGVSIIVALPPKEMEKFHGLFNKFLTSH

SEQ ID NO: 8447 - DNA, 655 bp, Glycine max
  misc_feature (1)..(655): Ceres Seq. ID no. 15226140
acatcctaatcgaaaaaagatttgtgctatctaagagctgagtttttctgaatcttcagaggaaacataacatcatattagggaccctccctctctacattgttgcagagaatacaaagcctcaagtgaaccaagcaattcatctgcggaaggacatcatattttgtacacgccttctcaactatctaggaaagggatggagggaaatatggagaaaaagtccccttgcatgaatgtaataaagctggatggtaaagaaataaaaatgcctggcttgaatatggatgatatcaataagcagtcaaatatggttgtgtctgtgtcaacaacacctcaagctgcatctgcattgaagaagtcttcgagtgaaaggaggagttgtctatgctcacccaccacacatgttggatccttcaggtgccggcaccaccgttcaggaatgagccatgctagctctgttggctccaatctctctgcaatgagctccaacgactcactccaatctcaatactagccttgcctggcttctgtgcttgaatatgttgtgaatactgcaaagtttcaatggaaagaactctcatgttaactaaattacttgtaatgaaataagttttttaataacaaaaatattattttaattaattttttttgtggg

SEQ ID NO: 8448 - protein, 105 aa, Glycine max
  misc_feature (1)..(105): Ceres Seq. ID no. 15226141
MEGNMEKKSPCMNVIKLDGKEIKMPGLNMDDINKQSNMVVSVSTTPQAASALKKSSSERRSCLCSPTTHVGSFRCRHHRSGMSHASSVGSNLSAMSSNDSLQSQY

SEQ ID NO: 8449 - protein, 101 aa, Glycine max
  misc_feature (1)..(101): Ceres Seq. ID no. 15226142
MEKKSPCMNVIKLDGKEIKMPGLNMDDINKQSNMVVSVSTTPQAASALKKSSSERRSCLCSPTTHVGSFRCRHHRSGMSHASSVGSNLSAMSSNDSLQSQY

SEQ ID NO: 8450 - protein, 94 aa, Glycine max
  misc_feature (1)..(94): Ceres Seq. ID no. 15226143
MNVIKLDGKEIKMPGLNMDDINKQSNMVVSVSTTPQAASALKKSSSERRSCLCSPTTHVGSFRCRHHRSGMSHASSVGSNLSAMSSNDSLQSQY

SEQ ID NO: 8451 - DNA, 912 bp, Glycine max
  misc_feature (1)..(912): Ceres Seq. ID no. 15226144
aaaatcttcccattatccgcgcgatcccctagccatctaccatgtcccgcctcctcgcgcgaaccctaaccctaggccgcccggccgctccggggtcctccctgcagccccaccgcgccctctcagacaaggtggagctgatcgagatcgacctctccgaggaatccgcctcctccacctcatccggcgactccgcggaggagccgatggggatggggcgcctgaacgacgccatccgcggtgtcctagtgcggcgggccgctccggagtggctccccttcgtgcctgggggatcgtactgggtgccgccgatgcggcggccgctcggggtgtccgatctcgtcggcacggtcgtctacagcgcgaggggcgccgtcgatacggcggagatggcgagagccaccatggttaaggccgcgatgactaaggaggaggccatgtgcttcaccacgcagcggggctggccgtcagaggcctatttcgtccaagggaaagtttggcatccagtgaagaagtcaaggaaaaatgctaaaactgatgatgaggaaagctaatttgtccttgcaagtttacctgggatccccaggtggacacaggaagactcagctcggagaagtaaaaccctgctgatggctgtacatatagacgatataggtgtcttaacagaccctagcgacaataatgagccgcctcatcgcccgtctcttcttggtagatcatgcgtgcttaagatgaaatatgatgaatttgtattacaacacagcctagtgtcatgtgccctttgactgctctctgagctgaagttgtatgatgtaccaactattctttgtggattatttctgcttgtacgggcacccgtcagctccacgggttgtcggcgtcagttggtaatgttaatacagatttcttgcc

SEQ ID NO: 8452 - protein, 170 aa, Glycine max
  misc_feature (1)..(170): Ceres Seq. ID no. 15226145
MSRLLARTLTLGRPAAPGSSLQPHRALSDKVELIEIDLSEESASSTSSGDSAEEPMGMGRLNDAIRGVLVRRAAPEWLPFVPGGSYWVPPMRRPLGVSDLVGTVVYSARGAVDTAEMARATMVKAAMTKEEAMCFTTQRGWPSEAYFVQGKVWHPVKKSRKNAKTDDEES

SEQ ID NO: 8453 - protein, 136 aa, Glycine max
  misc_feature (1)..(136): Ceres Seq. ID no. 15226146
KSSHYPRDPLAIYHVPPPRANPNPRPPGRSGVLPAAPPRPLRQGGADRDRPLRGIRLLHLIRRLRGGADGDGAPERRHPRCPSAAGRSGVAPLRAWGIVLGAADAAAARGVRSRRHGRLQREGRRRYGGDGESHHG

SEQ ID NO: 8454 - protein, 115 aa, Glycine max
  misc_feature (1)..(115): Ceres Seq. ID no. 15226147
MGMGRLNDAIRGVLVRRAAPEWLPFVPGGSYWVPPMRRPLGVSDLVGTVVYSARGAVDTAEMARATMVKAAMTKEEAMCFTTQRGWPSEAYFVQGKVWHPVKKSRKNAKTDDEES

SEQ ID NO: 8455 - DNA, 1958 bp, Glycine max
  misc_feature (1)..(1958): Ceres Seq. ID no. 15226288
rvcgggscccccctcgagtcagctacgtaggcccccccccccaggagtttctgcatgtggaaattcagagtcaagcttaccacttcccagtcaaaaccattctgagcaacaagtttttcatgatgagtggccagcaactgaacaaccaattgctagaaatgcacaggaactaaacatgtctgcttcttctaatgccaatgggccatttgagcatcctagcttgcatgtaaatgcaattggtttacacaggaactgtgaattagacacagccccagtttcatggggggatgttgcttgtgataatgatgcttttgaaaaaaatgaatctgcttctatatctagagaacatactgttttgagcagcaacactggactacgatcccattccaactctaacttaaggaatactatttcctctgatcattgtagttcttatgggcatggtgaagacgtgtcatcagccgcttcaattttccagcggctaagtataggagaatccaaacagaaagtgccaacatttgaagatgatcctgcagtggttattccaattcatttacaagccttaggtgctgactgttcacatttgagttttggtacatataatggcagcagtactgcatcttctgtccttcttaattctaatcatctttcaaaaagtgacttggaagagaagtctgcagctgtagatgattcttcggctcagttcctggatgcaagttatgatttccagagagataagcagcatggatttgatgttcttaaaggagcagcaggtgataaaaacagtgacatcctttcatctgataagcaatggtttgtgaagcatattgttcctgaggaaacttttgagaatgaacacatcatcaaggcatctgtatcagatcctagattgcaaaaatcacactgggagaatacttcactgccattgaagcagccaggggtgcagagtggaaaccatttgaattttccaagaggattgtatgctgactcaaattcaatacctggtgatgtgttggcgttgctcatgtcacaatctcaaactgcaagacacagtaacacagtttcatccataagcaatcctgccttctccatgtctaaggtcatggagccaggtgcctttcctctacctatgagatctgcacttccccgggatcctacagtgcattcctcatcacactttcatcaattgcctgacacaaaaggatatttttccctgccccagaataggtcatacaatacaaccataaattctcagttaccattttcaggcaatactgtatacaatcaatctccagcagacatgaagtacaaccttctacaaaatagaaatgaattccttacaaatagattgcctcctgccactgccagagatgcatttggctatggaaatcttggctcttccatttatagttctggaagctttctgtctaatccatctcctggtcatatgatgccttcaagtaactttaatgagattttaccttctcagtataatggtggacgtaacataaactctattcaacagcatggtagcttttctcattgggattacggagccgagccaagatctttgtttatcccgaagagaacccagtcacagtatgctactcctggatatgctgaccttcatcattctgagacacgggttttggaaaaatatcagcagccaggtgattttcaagatttgccatccaagcagttgcatccattttggcaacgcgacaaccttcatcattctgagacacgggttttggaagaacatcagcagccaggtgattttcaagatttgccgtccaagcagttgcatccattttggcagcacgataactaatactatacatcctgcttgttttttcttcccttttttgtatacagaattattttagtaggtttaggtgaattatggtgttattttcattcagatgcttgagcgttaattcaattgtagatcttttttg

SEQ ID NO: 8456 - protein, 609 aa, Glycine max
  misc_feature (1)..(609): Ceres Seq. ID no. 15226289
  misc_feature (1)..(1): Xaa is any aa, unknown or other
  misc_feature (2)..(2): Xaa is any aa, unknown or other
XXPPSSQLRRPPPPGVSACGNSESSLPLPSQNHSEQQVFHDEWPATEQPIARNAQELNMSASSNANGPFEHPSLHVNAIGLHRNCELDTAPVSWGDVACDNDAFEKNESASISREHTVLSSNTGLRSHSNSNLRNTISSDHCSSYGHGEDVSSAASIFQRLSIGESKQKVPTFEDDPAVVIPIHLQALGADCSHLSFGTYNGSSTASSVLLNSNHLSKSDLEEKSAAVDDSSAQFLDASYDFQRDKQHGFDVLKGAAGDKNSDILSSDKQWFVKHIVPEETFENEHIIKASVSDPRLQKSHWENTSLPLKQPGVQSGNHLNFPRGLYADSNSIPGDVLALLMSQSQTARHSNTVSSISNPAFSMSKVMEPGAFPLPMRSALPRDPTVHSSSHFHQLPDTKGYFSLPQNRSYNTTINSQLPFSGNTVYNQSPADMKYNLLQNRNEFLTNRLPPATARDAFGYGNLGSSIYSSGSFLSNPSPGHMMPSSNFNEILPSQYNGGRNINSIQQHGSFSHWDYGAEPRSLFIPKRTQSQYATPGYADLHHSETRVLEKYQQPGDFQDLPSKQLHPFWQRDNLHHSETRVLEEHQQPGDFQDLPSKQLHPFWQHDN

SEQ ID NO: 8457 - protein, 551 aa, Glycine max
  misc_feature (1)..(551): Ceres Seq. ID no. 15226290
MSASSNANGPFEHPSLHVNAIGLHRNCELDTAPVSWGDVACDNDAFEKNESASISREHTVLSSNTGLRSHSNSNLRNTISSDHCSSYGHGEDVSSAASIFQRLSIGESKQKVPTFEDDPAVVIPIHLQALGADCSHLSFGTYNGSSTASSVLLNSNHLSKSDLEEKSAAVDDSSAQFLDASYDFQRDKQHGFDVLKGAAGDKNSDILSSDKQWFVKHIVPEETFENEHIIKASVSDPRLQKSHWENTSLPLKQPGVQSGNHLNFPRGLYADSNSIPGDVLALLMSQSQTARHSNTVSSISNPAFSMSKVMEPGAFPLPMRSALPRDPTVHSSSHFHQLPDTKGYFSLPQNRSYNTTINSQLPFSGNTVYNQSPADMKYNLLQNRNEFLTNRLPPATARDAFGYGNLGSSIYSSGSFLSNPSPGHMMPSSNFNEILPSQYNGGRNINSIQQHGSFSHWDYGAEPRSLFIPKRTQSQYATPGYADLHHSETRVLEKYQQPGDFQDLPSKQLHPFWQRDNLHHSETRVLEEHQQPGDFQDLPSKQLHPFWQHDN

SEQ ID NO: 8458 - DNA, 1640 bp, Glycine max
  misc_feature (1)..(1640): Ceres Seq. ID no. 15226295
acaaattgggtaccggkycccccctcgagtcagctacgtaggccccccccccgcagcagccaaaaaacccgaaaccaaaaacaacaaagttctattctattgaagagctccagcacgatggcttccctctctacattgctcccgaacccgaaccttatttccaagcacaacagcaccctttcttccactcacccatgtgcttattcctggaaaaacaaaaccccaaccagtaagggtcggttctccgtttcttgttcttcttcgtctcaagcatacgacgtcgtcgtagttggcgctggcgtcattggcttaaccatcgctcgccacttcctcgtttcttccgacctttctgtcgccgtagtcgataaggctgtcccttgttccggtgccactggcgcagggcagggacatctgtggatggtaaacaaaacccctgggagtgctacgtgggatcttgcgtcaaggagtcatcaactttggaagacgctggtacagagcatagaagagcaaggtttggatcctatggtggagttgggttggaaacagtctggaagcctattaattggtaggactgatgctgagtcagacgtgctaaaagggagggtgaaactactatgtgaggctgggttgaaagcagagtacctgtgtagcagtgatttgattaaagaggaacctgatctactggtggacaaagacagtgcagctgcatttctaccagatgactgccaaatagatgcttatcgcactgttgcatatattgaaaagactaacaggagttttgcatcaaaaggaagatatacagaattttatgatgacccagtgaaatgtttcatcaggtcagatagcaatggagaggtcaaagctgttcagacttccaagaacacaatatacagcaagaaagcagttatagttgcagctggttgttggactggttctttgatgcaggacttgtttagaaattggggaatggatttacatgttccagtaatgcccagaaagggtcacctacttgtggttcaaaatttcaatttccttcaaatgaatcatggcttgatggaggcagattatctcaaccatccaacaatttctggttcagaatcccctgatcatcaaaagaacttatctgtttcaatggtagcaagtatagatgcagcaggaaatcttcttcttgggagtagccgtgaatttgttggtttcaacaccaatttggacgagtctgttgtcagttacatatggaagcgagttggagaattctttcccaaattgaaaacacttccactttcagatctaagtgcaagtagaaaagtcagaataggattacgaccttacatgcctaatgggaagccagtgattgggcctgtgcctggcttgtcaaatgtgtaccttgcagctggacatgaagggagtggacttttaatggctttggggactgctgaaatgatcgttgagatggtgttgggatatccagcaaaagttgatagcacacctttcgctgtgcagaaagttcttgtttaaaatttgcacaactttggagaattctaagtaattagctctagttttatgtgaacaaggtattgaaattcatgcttaaataatttgctcataagctcttcttatattgtaataaaaagaaaacggtc

SEQ ID NO: 8459 - protein, 504 aa, Glycine max
  misc_feature (1)..(504): Ceres Seq. ID no. 15226296
  misc_feature (6)..(6): Xaa is any aa, unknown or other
TNWVPXPPSSQLRRPPPRSSQKTRNQKQQSSILLKSSSTMASLSTLLPNPNLISKHNSTLSSTHPCAYSWKNKTPTSKGRFSVSCSSSSQAYDVVVVGAGVIGLTIARHFLVSSDLSVAVVDKAVPCSGATGAGQGHLWMVNKTPGSATWDLASRSHQLWKTLVQSIEEQGLDPMVELGWKQSGSLLIGRTDAESDVLKGRVKLLCEAGLKAEYLCSSDLIKEEPDLLVDKDSAAAFLPDDCQIDAYRTVAYIEKTNRSFASKGRYTEFYDDPVKCFIRSDSNGEVKAVQTSKNTIYSKKAVIVAAGCWTGSLMQDLFRNWGMDLHVPVMPRKGHLLVVQNFNFLQMNHGLMEADYLNHPTISGSESPDHQKNLSVSMVASIDAAGNLLLGSSREFVGFNTNLDESVVSYIWKRVGEFFPKLKTLPLSDLSASRKVRIGLRPYMPNGKPVIGPVPGLSNVYLAAGHEGSGLLMALGTAEMIVEMVLGYPAKVDSTPFAVQKVLV

SEQ ID NO: 8460 - protein, 465 aa, Glycine max
  misc_feature (1)..(465): Ceres Seq. ID no. 15226297
MASLSTLLPNPNLISKHNSTLSSTHPCAYSWKNKTPTSKGRFSVSCSSSSQAYDVVVVGAGVIGLTIARHFLVSSDLSVAVVDKAVPCSGATGAGQGHLWMVNKTPGSATWDLASRSHQLWKTLVQSIEEQGLDPMVELGWKQSGSLLIGRTDAESDVLKGRVKLLCEAGLKAEYLCSSDLIKEEPDLLVDKDSAAAFLPDDCQIDAYRTVAYIEKTNRSFASKGRYTEFYDDPVKCFIRSDSNGEVKAVQTSKNTIYSKKAVIVAAGCWTGSLMQDLFRNWGMDLHVPVMPRKGHLLVVQNFNFLQMNHGLMEADYLNHPTISGSESPDHQKNLSVSMVASIDAAGNLLLGSSREFVGFNTNLDESVVSYIWKRVGEFFPKLKTLPLSDLSASRKVRIGLRPYMPNGKPVIGPVPGLSNVYLAAGHEGSGLLMALGTAEMIVEMVLGYPAKVDSTPFAVQKVLV

SEQ ID NO: 8461 - protein, 365 aa, Glycine max
  misc_feature (1)..(365): Ceres Seq. ID no. 15226298
MVNKTPGSATWDLASRSHQLWKTLVQSIEEQGLDPMVELGWKQSGSLLIGRTDAESDVLKGRVKLLCEAGLKAEYLCSSDLIKEEPDLLVDKDSAAAFLPDDCQIDAYRTVAYIEKTNRSFASKGRYTEFYDDPVKCFIRSDSNGEVKAVQTSKNTIYSKKAVIVAAGCWTGSLMQDLFRNWGMDLHVPVMPRKGHLLVVQNFNFLQMNHGLMEADYLNHPTISGSESPDHQKNLSVSMVASIDAAGNLLLGSSREFVGFNTNLDESVVSYIWKRVGEFFPKLKTLPLSDLSASRKVRIGLRPYMPNGKPVIGPVPGLSNVYLAAGHEGSGLLMALGTAEMIVEMVLGYPAKVDSTPFAVQKVLV

SEQ ID NO: 8462 - DNA, 793 bp, Glycine max
  misc_feature (1)..(793): Ceres Seq. ID no. 15226360
cttgatcgacatgcactctctctctcccaaaacgccatgagaaaaagacgaaaaagaagccacaagacccacactcgtctctgctgaagaacaaaatactaggagaagaagctgtaccaaaaaggaaatttcgagtacaaaaccccacaccttcatcttcaaatttcagaaaatgtgctacgtggggaaagcaacaaagatcttcatcttcattgtgacggtgctcgttgttctgggtctagttttgggattggggctccttcgccgccgccaccaccacaacactgcaaataaatgctcagacgaatcttgcattccttcaccaaccacatttccaaaccccaatttcaacacaccaaccccaccttctccaattgacaacaaccccactaccccacaaactcctcagcttccaaatccaattcctccacctccttactccaataacccatctttgccgccgccgccgccgattctgcagtctccgccgccgccggaggaaacaacccctccgactcctcctagtgtggcggcgccgcctatgaacactcccacaccagggtcggcgctgttgaccccaggtcctgtgcatgctatggcctaatgagctatctatctgagtggttcttcttttttactttctttcatatttttactgatggggttatttaatttgtgaatgttttaattgatgagagagagagagagtattgagataattagagcatttgtaaggtgggatagtgaatttacagagccgtccctggcatctatattgattttcaaggatgac

SEQ ID NO: 8463 - protein, 143 aa, Glycine max
  misc_feature (1)..(143): Ceres Seq. ID no. 15226361
MCYVGKATKIFIFIVTVLVVLGLVLGLGLLRRRHHHNTANKCSDESCIPSPTTFPNPNFNTPTPPSPIDNNPTTPQTPQLPNPIPPPPYSNNPSLPPPPPILQSPPPPEETTPPTPPSVAAPPMNTPTPGSALLTPGPVHAMA

SEQ ID NO: 8464 - DNA, 1076 bp, Glycine max
  misc_feature (1)..(1076): Ceres Seq. ID no. 15226410
ataacgacttgctcttcaagcactttgggatctgccttttctttaacaggcgctatgaactcagggtacgtatgtttttccattttgaattaatctttatttgatttaagtgttgatctgcatttgaatattttaagtactagtggacaagatgttgctttataagtatttttcaataaaacagaacaaatatttacaagttgatcaatgaaaatataacacatgcagtatttgtcacatgtacattgtgtataagagtggaaatataggtcaggacaaacaagacttagtcggaacttgtttaaaaaaattcaaggcttaaattaggttggttgccggtttatcaatggaagtggcatgtgcttttttctcacaatcatgatgcagtctgactctgataacataataaactctaatgtcttggttgttatttctctatattttacttttttttattcgtagaaattaaaataattaaaaaaattataacaattcatacatcttcttaaatcaactaagttaaactccttgattttttctatattttgctaacttcagtattctctatctttttcttaaataatgaattaaatccttttttctacacacaagaatagatatttttattaaacatgtatttcatatagcaagttggccctatatatgaagtgaacaattcattgtttaattttattgcagattctcgaagaagagcctaataagaattatttctcgccatggtgtgtgatacccatgatgttcaatgctgttttggaactaataaggagctttaccattgcgttcaagaatggacctcactatagagaaggatggtttctttttggcttcaggttgtttggtttgctgattcctggcttacctgctcatggtccacaagattatattaattccactcttctgggatcaattgaaaaacattttaaagcagattgatgtgtccgtgtactgtacatgatcattccgtaccactccatgtgtatggtcatgcaaactaaaatttacgtgatatataatcaagtttttcaatttaaataatgaaaaaaaaaaaaaaaaaa

SEQ ID NO: 8465 - protein, 66 aa, Glycine max
  misc_feature (1)..(66): Ceres Seq. ID no. 15226411
MMFNAVLELIRSFTIAFKNGPHYREGWFLFGFRLFGLLIPGLPAHGPQDYINSTLLGSIEKHFKAD

SEQ ID NO: 8466 - protein, 65 aa, Glycine max
  misc_feature (1)..(65): Ceres Seq. ID no. 15226412
MFNAVLELIRSFTIAFKNGPHYREGWFLFGFRLFGLLIPGLPAHGPQDYINSTLLGSIEKHFKAD

SEQ ID NO: 8467 - protein, 34 aa, Glycine max
  misc_feature (1)..(34): Ceres Seq. ID no. 15226413
MCFFLTIMMQSDSDNIINSNVLVVISLYFTFFYS

SEQ ID NO: 8468 - DNA, 1903 bp, Glycine max
  misc_feature (1)..(1903): Ceres Seq. ID no. 15226493
aaactatcaaataataatgtatgtggtgtttagttaactggtaagtaagggaaggtagaaattgaggagattgaattgcaatagcaatgagtgtgtcttcaaattcgaaggaatcgatggaattatgcatatttgatttgcggagaggccaacacgaaggccaagagctcgataagattctcttcttcttccccgccggtttgcccttttcaaagcaactctccgtcattggcctcagcgaaggactcatcactttcactagaatcttctcgccagaggctgcctgcgacgtcatcgaagcagaaagacattctcatgttttctacgaggccgaacccgatatctggatagtcatggttgccgacaaaagcaatgattcagaacctatatggagagttgatgcattaagaaaagttctcaaggaaattcactcactttttgtcatgtttcatggatctattagagcaatgctggagaaagaacccggcggaggactaacaagacggcatttgtatacctttatcatggattatctgagggattttcttgcggggaaaaagctccttttaccttcattccgtgattgcttaaaggaacgtggaactgttcagatgctgacaataggtcgcgaggctgcaattgaggttcagtcccttgtcagggtgcttgaatcttcttctggaaacactccctgctactctttggttttatttcaagacctgctagtgtccacaagtctatctcctgatgacaccataaatttattcacatatgctgtgctaaggttgactccccatgctctatcttctggaacaagttcctggtcctacttacggaaaggaagttctgcatccaatgttgccactgagtctaacatggcccatccaagctctttgtctgaaagtttttatggctcatctgatatgtcctctggtgaagataaccactatcatgttgtgaggcccttacagagtgacaaatggtctaaaggaaaagatggttatcttgtcactgatttatggggtgcagaagttggtacgtgggtgtttgcctctccaacagtttggcttcaacatacaggagagaaaatgtatctttgtgtttatcagcatagaagccttactttgatgcttctgattcctgtatcatccattcctaacggggagcaaggtgtgtcggcagtgaggcagcaagttgttgaaaatgcatcacttaaaatattgaaagttgaagagaaactatcgaaaggatggggtggagataatgcttatcacgttagtgggtaccgctacttacttgtagatggtgatagaaatgtatccagggcttctccagcaacaaaagttacaactttaacaaaggagtccttacttgctatgaataagcttaggcaagaggtggagttagagaagagtagagcaaaactggatagccgtaattgtgaaaaagacttagaggtgtgcattagagcaaaaaataatgcatgggttatttctcgagtcacaagagggaaggagctttacatggttctagagaaagctaatgaaacccttctatatgcttcagatgctgttgagaagtttagcgacaggtattgcaatggaacattttctctggactaaagaaaaccaagcatgtgcgaccgaggaatagcacgttaggtcttctaactgtttacccagtaaagtcgggaagttttccactgttgatttttctcaccgggaaattcaagaatggaagaaagaatgctactctgtgtatatctctctgtatattaagtgtaatttgtttatacttgttaaagggtgctttatcaaatcttgtcaccggtaactttctttttaatccgaaattgggtcagttccgagagaaattgttttccaaaaagtttcatttatttcac

SEQ ID NO: 8469 - protein, 511 aa, Glycine max
  misc_feature (1)..(511): Ceres Seq. ID no. 15226494
MSVSSNSKESMELCIFDLRRGQHEGQELDKILFFFPAGLPFSKQLSVIGLSEGLITFTRIFSPEAACDVIEAERHSHVFYEAEPDIWIVMVADKSNDSEPIWRVDALRKVLKEIHSLFVMFHGSIRAMLEKEPGGGLTRRHLYTFIMDYLRDFLAGKKLLLPSFRDCLKERGTVQMLTIGREAAIEVQSLVRVLESSSGNTPCYSLVLFQDLLVSTSLSPDDTINLFTYAVLRLTPHALSSGTSSWSYLRKGSSASNVATESNMAHPSSLSESFYGSSDMSSGEDNHYHVVRPLQSDKWSKGKDGYLVTDLWGAEVGTWVFASPTVWLQHTGEKMYLCVYQHRSLTLMLLIPVSSIPNGEQGVSAVRQQVVENASLKILKVEEKLSKGWGGDNAYHVSGYRYLLVDGDRNVSRASPATKVTTLTKESLLAMNKLRQEVELEKSRAKLDSRNCEKDLEVCIRAKNNAWVISRVTRGKELYMVLEKANETLLYASDAVEKFSDRYCNGTFSLD

SEQ ID NO: 8470 - protein, 501 aa, Glycine max
  misc_feature (1)..(501): Ceres Seq. ID no. 15226495
MELCIFDLRRGQHEGQELDKILFFFPAGLPFSKQLSVIGLSEGLITFTRIFSPEAACDVIEAERHSHVFYEAEPDIWIVMVADKSNDSEPIWRVDALRKVLKEIHSLFVMFHGSIRAMLEKEPGGGLTRRHLYTFIMDYLRDFLAGKKLLLPSFRDCLKERGTVQMLTIGREAAIEVQSLVRVLESSSGNTPCYSLVLFQDLLVSTSLSPDDTINLFTYAVLRLTPHALSSGTSSWSYLRKGSSASNVATESNMAHPSSLSESFYGSSDMSSGEDNHYHVVRPLQSDKWSKGKDGYLVTDLWGAEVGTWVFASPTVWLQHTGEKMYLCVYQHRSLTLMLLIPVSSIPNGEQGVSAVRQQVVENASLKILKVEEKLSKGWGGDNAYHVSGYRYLLVDGDRNVSRASPATKVTTLTKESLLAMNKLRQEVELEKSRAKLDSRNCEKDLEVCIRAKNNAWVISRVTRGKELYMVLEKANETLLYASDAVEKFSDRYCNGTFSLD

SEQ ID NO: 8471 - protein, 422 aa, Glycine max
  misc_feature (1)..(422): Ceres Seq. ID no. 15226496
MVADKSNDSEPIWRVDALRKVLKEIHSLFVMFHGSIRAMLEKEPGGGLTRRHLYTFIMDYLRDFLAGKKLLLPSFRDCLKERGTVQMLTIGREAAIEVQSLVRVLESSSGNTPCYSLVLFQDLLVSTSLSPDDTINLFTYAVLRLTPHALSSGTSSWSYLRKGSSASNVATESNMAHPSSLSESFYGSSDMSSGEDNHYHVVRPLQSDKWSKGKDGYLVTDLWGAEVGTWVFASPTVWLQHTGEKMYLCVYQHRSLTLMLLIPVSSIPNGEQGVSAVRQQVVENASLKILKVEEKLSKGWGGDNAYHVSGYRYLLVDGDRNVSRASPATKVTTLTKESLLAMNKLRQEVELEKSRAKLDSRNCEKDLEVCIRAKNNAWVISRVTRGKELYMVLEKANETLLYASDAVEKFSDRYCNGTFSLD

SEQ ID NO: 8472 - DNA, 1386 bp, Glycine max
  misc_feature (1)..(1386): Ceres Seq. ID no. 15226511
aatctttaataaaagatattaaaatcctatggcttccagcaacaagattcacgttgttatcgacaacaagctctatgacttgaccaagtttggcaagacccatccaggtggcagtctcatccttgaaaacttccacgactgtgatgtcactgattatttctatgccatccactctaagcaagcccaaaagatgctcaagaacatgccctcatctgacattgctgaagaggacaaagtcccccaaaccgattatttgaagctcttgttccaactcgaaaagaccgatcttttcaaggcagattatgttgttgagtttgttcaaatcttccacacaatcgttttgttcttcttggcaacttggtatggtcaaacctaccctgtcttttccgctatttgcctcggtttcggtaccctcatcggtggttgggttggccatcaatgcgatcatcagagagataacattatgagagacgtcaacttggtttacgccactgtttgcgacggcctttctccccactggtggtccaccaagcacaaccgtcaccacttgagcaccaacgaaactgaacatgatggtgatattcaactcttccctttcatctacctctggacccccaagaaggaccaagattcctggaacagagccatccaacacatctatttcaccgcattatacactatccttcaaattaaatggcaaattgactctgttcaatgggccatttctcaaagaaactacaaggagatggttggtttggctatccactgggcctggtacatcttcttcttgccttggcaagtctggactttgggagtccttattgctggtaccatttccgcttttgtcgtcacagctagtcaccaagctgagcacaaatacgaaggaaagaaggaattcgaaggagaagcagcaaatgttcgtagatccaaataccaaatccacgactatttcacccatcaagtcgtcaccaccagaaacatcgacctccacaactggttccttaattacatctgcggaggtatgcaataccaaatcgaacaccacgtcttccccagaatccctctttataaacttcctcttgtcaagggtgttgttcaagaatattgccaaaagcatggtgtagaatatagagatgaaggtttcatggatatcatgatgagaaactattatcacattgaaacaatcgctaaggtcaaagcccaagcctaaggttacaaagtataagaagaatttaataaattcatattttcttatatatgcttgcttgttctttctttatataatgcgtgaataaatttgcctatcccatttgttggaagtaagcagaatttgattttttttatcaaacgataattcaaacattattttaaaaaaaaaaaaaaaaa

SEQ ID NO: 8473 - protein, 393 aa, Glycine max
  misc_feature (1)..(393): Ceres Seq. ID no. 15226512
MASSNKIHVVIDNKLYDLTKFGKTHPGGSLILENFHDCDVTDYFYAIHSKQAQKMLKNMPSSDIAEEDKVPQTDYLKLLFQLEKTDLFKADYVVEFVQIFHTIVLFFLATWYGQTYPVFSAICLGFGTLIGGWVGHQCDHQRDNIMRDVNLVYATVCDGLSPHWWSTKHNRHHLSTNETEHDGDIQLFPFIYLWTPKKDQDSWNRAIQHIYFTALYTILQIKWQIDSVQWAISQRNYKEMVGLAIHWAWYIFFLPWQVWTLGVLIAGTISAFVVTASHQAEHKYEGKKEFEGEAANVRRSKYQIHDYFTHQVVTTRNIDLHNWFLNYICGGMQYQIEHHVFPRIPLYKLPLVKGVVQEYCQKHGVEYRDEGFMDIMMRNYYHIETIAKVKAQA

SEQ ID NO: 8474 - protein, 339 aa, Glycine max
  misc_feature (1)..(339): Ceres Seq. ID no. 15226513
MLKNMPSSDIAEEDKVPQTDYLKLLFQLEKTDLFKADYVVEFVQIFHTIVLFFLATWYGQTYPVFSAICLGFGTLIGGWVGHQCDHQRDNIMRDVNLVYATVCDGLSPHWWSTKHNRHHLSTNETEHDGDIQLFPFIYLWTPKKDQDSWNRAIQHIYFTALYTILQIKWQIDSVQWAISQRNYKEMVGLAIHWAWYIFFLPWQVWTLGVLIAGTISAFVVTASHQAEHKYEGKKEFEGEAANVRRSKYQIHDYFTHQVVTTRNIDLHNWFLNYICGGMQYQIEHHVFPRIPLYKLPLVKGVVQEYCQKHGVEYRDEGFMDIMMRNYYHIETIAKVKAQA

SEQ ID NO: 8475 - protein, 335 aa, Glycine max
  misc_feature (1)..(335): Ceres Seq. ID no. 15226514
MPSSDIAEEDKVPQTDYLKLLFQLEKTDLFKADYVVEFVQIFHTIVLFFLATWYGQTYPVFSAICLGFGTLIGGWVGHQCDHQRDNIMRDVNLVYATVCDGLSPHWWSTKHNRHHLSTNETEHDGDIQLFPFIYLWTPKKDQDSWNRAIQHIYFTALYTILQIKWQIDSVQWAISQRNYKEMVGLAIHWAWYIFFLPWQVWTLGVLIAGTISAFVVTASHQAEHKYEGKKEFEGEAANVRRSKYQIHDYFTHQVVTTRNIDLHNWFLNYICGGMQYQIEHHVFPRIPLYKLPLVKGVVQEYCQKHGVEYRDEGFMDIMMRNYYHIETIAKVKAQA

SEQ ID NO: 8476 - DNA, 1336 bp, Glycine max
  misc_feature (1)..(1336): Ceres Seq. ID no. 15226515
atagtatcttcagaatgctttctgtgagggatttttggaggcggcataggaggaaggttttcgtcactgttggtgttttaggaagtgggtatcttttgtataagctctacggtgctcacaggcatggggttcaggaacttgaaagagaactcgcagttcagagggaaactgaggagcttatgaaggctcagatgcaagctcactttgagaatattcagaggatgtctgatgtaacattgccgcatgctatgcacgagttaagttgtcggatcacagaagagttggatctttctcaccttcttgaaaggttaatacaaggaaagggtcaaccaaacaccttaacccaatcagagaaactagatttatggagtagactcaaaattctaagttttacaagaatgacattgtcagtatgggctacaacaatgcttagcttatatacaaaagttcaagtcaatatactaggaaggcatttatacattgatacagcacgaagccttggaatctctgattcagtagaaagtggagatgtggtcgatagggaggaccagaagaaatttctagatagtgttgattttctctctcagcatggtatgcctgccttgatttctgatatggaagcagcaacaaaagaagttctcaaaggaaagcagttgagtactttcttcaacagcacaacgcttcatgaaactatcatgcagatactcaacaccttcatgagcatggggactccaaattcctggataaagtatatgatacctgaagatgttagaccgtattccacaacctctggcagtgatgacccggtaccatttgacgtgactgaatttgaacaacttatgattgaagcacgggcagtattatcaagtgctgaatttggaagcattgtagagatatctctgaaagcagtggtggatacactggtggagcttatgaggactaaatttagtggaggaagtgtagctgagggcatgccgctggccagagtgttgcctcaagttgcacagatgtgtcctttgctcctcggagaacccagcaaaaatcagttcatccaaatcattaaaaatatacaggaggttgaactttttttcactctcctctatgcaaatatgccacatgagtagtgattaattatttatgtttccaaccaaagagattaaatttattgcatgaaaggcatcgggcagtgtacaaaaaattagacgaggttcaaaagagagatataggtgctaaattgttagctttcatcttttcaatatgacatttcccatttgttgtaattagtgattagtgatgcataatgctcccactttggctcaaacgtggcatttggtgg

SEQ ID NO: 8477 - protein, 373 aa, Glycine max
  misc_feature (1)..(373): Ceres Seq. ID no. 15226516
SIFRMLSVRDFWRRHRRKVFVTVGVLGSGYLLYKLYGAHRHGVQELERELAVQRETEELMKAQMQAHFENIQRMSDVTLPHAMHELSCRITEELDLSHLLERLIQGKGQPNTLTQSEKLDLWSRLKILSFTRMTLSVWATTMLSLYTKVQVNILGRHLYIDTARSLGISDSVESGDVVDREDQKKFLDSVDFLSQHGMPALISDMEAATKEVLKGKQLSTFFNSTTLHETIMQILNTFMSMGTPNSWIKYMIPEDVRPYSTTSGSDDPVPFDVTEFEQLMIEARAVLSSAEFGSIVEISLKAVVDTLVELMRTKFSGGSVAEGMPLARVLPQVAQMCPLLLGEPSKNQFIQIIKNIQEVELFFTLLYANMPHE

SEQ ID NO: 8478 - protein, 369 aa, Glycine max
  misc_feature (1)..(369): Ceres Seq. ID no. 15226517
MLSVRDFWRRHRRKVFVTVGVLGSGYLLYKLYGAHRHGVQELERELAVQRETEELMKAQMQAHFENIQRMSDVTLPHAMHELSCRITEELDLSHLLERLIQGKGQPNTLTQSEKLDLWSRLKILSFTRMTLSVWATTMLSLYTKVQVNILGRHLYIDTARSLGISDSVESGDVVDREDQKKFLDSVDFLSQHGMPALISDMEAATKEVLKGKQLSTFFNSTTLHETIMQILNTFMSMGTPNSWIKYMIPEDVRPYSTTSGSDDPVPFDVTEFEQLMIEARAVLSSAEFGSIVEISLKAVVDTLVELMRTKFSGGSVAEGMPLARVLPQVAQMCPLLLGEPSKNQFIQIIKNIQEVELFFTLLYANMPHE

SEQ ID NO: 8479 - protein, 314 aa, Glycine max
  misc_feature (1)..(314): Ceres Seq. ID no. 15226518
MKAQMQAHFENIQRMSDVTLPHAMHELSCRITEELDLSHLLERLIQGKGQPNTLTQSEKLDLWSRLKILSFTRMTLSVWATTMLSLYTKVQVNILGRHLYIDTARSLGISDSVESGDVVDREDQKKFLDSVDFLSQHGMPALISDMEAATKEVLKGKQLSTFFNSTTLHETIMQILNTFMSMGTPNSWIKYMIPEDVRPYSTTSGSDDPVPFDVTEFEQLMIEARAVLSSAEFGSIVEISLKAVVDTLVELMRTKFSGGSVAEGMPLARVLPQVAQMCPLLLGEPSKNQFIQIIKNIQEVELFFTLLYANMPHE

SEQ ID NO: 8480 - DNA, 1390 bp, Glycine max
  misc_feature (1)..(1390): Ceres Seq. ID no. 15226519
cattggcagagttaaaggatttaaatctgcaaacgaatttatttactatgcgtcagatcaaagttgcaacaaacaactttgatatttccaataagattggagaaggaggctttggtcctgtctataaggtatcctacaagatattacatataacatttcataattattgtgattgatatattgtaattgtgtagatgaatcattaaataatttagaaattcataaaaattatataacatttcggaaatgcagggcattttatcaaatggcatgataatagctgtcaagatgctttcatccaagtcaaagcaaggaaatcgtgagtttataaatgagataggcttgatttcagccttgcagcacccttgtcttgttaaactacatggttgttgcgttgaaggagatcaattgttgctagtatatgaatatatggaaaacaatagccttgcacaagctttatttggtaacggagcatctcaattaaaattgaattggccaacaaggcacaagatctgcattggtattgctagaggtttggctttcttacatgaagaatcaacattaaaaattgttcacagggacattaaggccaccaatgtgttactggacaaagacttaaacccaaaaatatctgattttggtctagccaagctcgatgaggaggacaatactcacataagcacaagagtagctgggacttatggatatatggctccagaatatgcaatgcatggttatttgacagacaaagctgatgtctatagttttggagttgttgccttggaaattgtatctggaaagagcaataccatccaccgatccaagcaagaagcattgcatcttctagattgggcacatttattgaaagagaagggtaacctaatggagctagttgatagaaggttaggttcagatttcaatgaaaatgaggtaatgatgatgatcaaagtggcgctcctatgcaccaataccacttcaaaccttaggcccaccatgtcatcggtgcttagtatgctagaaggaaaaactatgattccagaatttgtttcagatccatctgagataatggatgaaatgaagttagaggcaatgcgacaacattactttcaaaaagaaaatgagagaagtgagacacaagagcaaaatcatagtttatcaattgaggggccttggacggcctcatcttcatcggctgcagatctatatcctgtccacgttgattcttcctattgggagaaaagaaattaggaatatgtataaattttacctatatatctaggtggtattctttgttatttcatccccttgttttcctctttaagcaccatttttcatgcataattgttatatattcaagtatcacaaagtcatgtaaaaaaaaaaaaaaaaa

SEQ ID NO: 8481 - protein, 333 aa, Glycine max
  misc_feature (1)..(333): Ceres Seq. ID no. 15226520
MQGILSNGMIIAVKMLSSKSKQGNREFINEIGLISALQHPCLVKLHGCCVEGDQLLLVYEYMENNSLAQALFGNGASQLKLNWPTRHKICIGIARGLAFLHEESTLKIVHRDIKATNVLLDKDLNPKISDFGLAKLDEEDNTHISTRVAGTYGYMAPEYAMHGYLTDKADVYSFGVVALEIVSGKSNTIHRSKQEALHLLDWAHLLKEKGNLMELVDRRLGSDFNENEVMMMIKVALLCTNTTSNLRPTMSSVLSMLEGKTMIPEFVSDPSEIMDEMKLEAMRQHYFQKENERSETQEQNHSLSIEGPWTASSSSAADLYPVHVDSSYWEKRN

SEQ ID NO: 8482 - protein, 325 aa, Glycine max
  misc_feature (1)..(325): Ceres Seq. ID no. 15226521
MIIAVKMLSSKSKQGNREFINEIGLISALQHPCLVKLHGCCVEGDQLLLVYEYMENNSLAQALFGNGASQLKLNWPTRHKICIGIARGLAFLHEESTLKIVHRDIKATNVLLDKDLNPKISDFGLAKLDEEDNTHISTRVAGTYGYMAPEYAMHGYLTDKADVYSFGVVALEIVSGKSNTIHRSKQEALHLLDWAHLLKEKGNLMELVDRRLGSDFNENEVMMMIKVALLCTNTTSNLRPTMSSVLSMLEGKTMIPEFVSDPSEIMDEMKLEAMRQHYFQKENERSETQEQNHSLSIEGPWTASSSSAADLYPVHVDSSYWEKRN

SEQ ID NO: 8483 - protein, 319 aa, Glycine max
  misc_feature (1)..(319): Ceres Seq. ID no. 15226522
MLSSKSKQGNREFINEIGLISALQHPCLVKLHGCCVEGDQLLLVYEYMENNSLAQALFGNGASQLKLNWPTRHKICIGIARGLAFLHEESTLKIVHRDIKATNVLLDKDLNPKISDFGLAKLDEEDNTHISTRVAGTYGYMAPEYAMHGYLTDKADVYSFGVVALEIVSGKSNTIHRSKQEALHLLDWAHLLKEKGNLMELVDRRLGSDFNENEVMMMIKVALLCTNTTSNLRPTMSSVLSMLEGKTMIPEFVSDPSEIMDEMKLEAMRQHYFQKENERSETQEQNHSLSIEGPWTASSSSAADLYPVHVDSSYWEKRN

SEQ ID NO: 8484 - DNA, 1555 bp, Glycine max
  misc_feature (1)..(1555): Ceres Seq. ID no. 15226529
gaaggtaaccccaaatcaaatccgagttgtttcttgtttaagggttcaagggtattatgcttgctggattcattctcttgctgaaatgcagtctttctagaaagtttgttcaactgtcccattattggcgttagctatgctacccactggagcaaaagagacccaattacgtgagagcaacagtcagaaggtccatcctcaaccaatagaagaggccatgaatcagaatccagaagcaatggaaaccctaatatctaaagtttttatgaatatctcttccttgaagtcagcttatattgagcttcaagctgctcatactccctacgaccctgataaaattcacactgctgataaacttgttattagtgagctgaaaaatctgtctgaactcaagcatttctacagggagaacaacccaaaaccagtgtgtgtttctccccaagactcacgtttagctgcagaaattcaagaacaacagagccttctgaaaacttatgaggtcatggtgaagaagttccaatctgaaatccagaataaagattcagagatccatcaattacagcagcagattgagcaggctagccagaagcgagcaaaactagagaaaaatctgaagcttagaggtttgtcaaccaaagaatcggaagatgaaaatggctttttccctgttgatctaactccagatctcttcacctctgctgtggaagtggctgcaaaagccattcatgatttttctaaacctttgatcaacatgatgaaagcagctgggtgggaccttgatgctgctgccaactcaatcgaacctgatgttgtttacgcaaagagagctcataagaaatatgcatttgagtcttacatatgccaaagaatgttcagtggctttgagcaggaaaacttctctgtcaaattagacaatactactgcaactaaagagagcttcttccaccagtttctcgctttaagagagatggatcccttggatatgctggggcaaaatccagattccatttttgggaaattttgcaggagcaaatacctggtggtagttcatcccaagatggaggcatcgttctttggaaatttagatcagcgaaattatgtgatgggtggagggcatccaaggactcctttttaccaggcttttcttaaactgaccaagtcaatttggcttttacacaggttggcttattcttttgagccgaatgttaaggtatttcaggttaaaggagggagtgagttctctgatgtttatatggaaagtgtggtcaagaatctgataatggatgacaatgatgaaaaacccaaaattggtttgatggttatgcctggattttggattgggggaagtttgattcagagtaaagtctatctctctggtatgaaggcggctgaatgattcctgaacacagtcaagactttcagaaaatgcatagttgattgtatgtggtttgtttgaattgtcgtttctttatcttgtaagaaaatgctgttgtctgtaatttttaatatcctttttagtggttgtaagagtaaatgagccctttatcctttgttt

SEQ ID NO: 8485 - protein, 419 aa, Glycine max
  misc_feature (1)..(419): Ceres Seq. ID no. 15226530
MLPTGAKETQLRESNSQKVHPQPIEEAMNQNPEAMETLISKVFMNISSLKSAYIELQAAHTPYDPDKIHTADKLVISELKNLSELKHFYRENNPKPVCVSPQDSRLAAEIQEQQSLLKTYEVMVKKFQSEIQNKDSEIHQLQQQIEQASQKRAKLEKNLKLRGLSTKESEDENGFFPVDLTPDLFTSAVEVAAKAIHDFSKPLINMMKAAGWDLDAAANSIEPDVVYAKRAHKKYAFESYICQRMFSGFEQENFSVKLDNTTATKESFFHQFLALREMDPLDMLGQNPDSIFGKFCRSKYLVVVHPKMEASFFGNLDQRNYVMGGGHPRTPFYQAFLKLTKSIWLLHRLAYSFEPNVKVFQVKGGSEFSDVYMESVVKNLIMDDNDEKPKIGLMVMPGFWIGGSLIQSKVYLSGMKAAE

SEQ ID NO: 8486 - protein, 392 aa, Glycine max
  misc_feature (1)..(392): Ceres Seq. ID no. 15226531
MNQNPEAMETLISKVFMNISSLKSAYIELQAAHTPYDPDKIHTADKLVISELKNLSELKHFYRENNPKPVCVSPQDSRLAAEIQEQQSLLKTYEVMVKKFQSEIQNKDSEIHQLQQQIEQASQKRAKLEKNLKLRGLSTKESEDENGFFPVDLTPDLFTSAVEVAAKAIHDFSKPLINMMKAAGWDLDAAANSIEPDVVYAKRAHKKYAFESYICQRMFSGFEQENFSVKLDNTTATKESFFHQFLALREMDPLDMLGQNPDSIFGKFCRSKYLVVVHPKMEASFFGNLDQRNYVMGGGHPRTPFYQAFLKLTKSIWLLHRLAYSFEPNVKVFQVKGGSEFSDVYMESVVKNLIMDDNDEKPKIGLMVMPGFWIGGSLIQSKVYLSGMKAAE

SEQ ID NO: 8487 - protein, 385 aa, Glycine max
  misc_feature (1)..(385): Ceres Seq. ID no. 15226532
METLISKVFMNISSLKSAYIELQAAHTPYDPDKIHTADKLVISELKNLSELKHFYRENNPKPVCVSPQDSRLAAEIQEQQSLLKTYEVMVKKFQSEIQNKDSEIHQLQQQIEQASQKRAKLEKNLKLRGLSTKESEDENGFFPVDLTPDLFTSAVEVAAKAIHDFSKPLINMMKAAGWDLDAAANSIEPDVVYAKRAHKKYAFESYICQRMFSGFEQENFSVKLDNTTATKESFFHQFLALREMDPLDMLGQNPDSIFGKFCRSKYLVVVHPKMEASFFGNLDQRNYVMGGGHPRTPFYQAFLKLTKSIWLLHRLAYSFEPNVKVFQVKGGSEFSDVYMESVVKNLIMDDNDEKPKIGLMVMPGFWIGGSLIQSKVYLSGMKAAE

SEQ ID NO: 8488 - DNA, 653 bp, Glycine max
  misc_feature (1)..(653): Ceres Seq. ID no. 15226569
gagaccaaacaaaacactgcacctggttaaggatagagtatagcatggcacagtctagttgcaaaactttggtgcagtggttggtagcagcattgctcattgccttgttgggtggtgcacaagctgttgcaatatgtaacatagactcaagtcaattaaacttgtgtcgtgctgcagttactggtcaaaaccctccaccaccggatgagaaatgttgtgcagttgttcgccaagccaatttgcgttgcctctgcagttacaagtctaccctaccttcatttggaataaaccccaaaaatgctttggccttgcctggtaaatgtggtctgcaatggcctcctaattgttgagtgtagtgaagcagtcaatgaaggtcacggactcatggtcattacaagcaccttagtcttcaatattgctttcaggtgtttcattaacactgaagataaattttaagacagcatttgatatctctcgaataacggtgcagtttattttaatcagtatgtaatgtccaaaagtttgctagcagatgtgtacgtgtattagtgtttgatgttgcagaggtatttgaagatatatcattactcttttccctctatatgtctagacctgtaatatgtataataaaatgtctggtttttggactctcc

SEQ ID NO: 8489 - protein, 115 aa, Glycine max
  misc_feature (1)..(115): Ceres Seq. ID no. 15226570
DQTKHCTWLRIEYSMAQSSCKTLVQWLVAALLIALLGGAQAVAICNIDSSQLNLCRAAVTGQNPPPPDEKCCAVVRQANLRCLCSYKSTLPSFGINPKNALALPGKCGLQWPPNC

SEQ ID NO: 8490 - protein, 101 aa, Glycine max
  misc_feature (1)..(101): Ceres Seq. ID no. 15226571
MAQSSCKTLVQWLVAALLIALLGGAQAVAICNIDSSQLNLCRAAVTGQNPPPPDEKCCAVVRQANLRCLCSYKSTLPSFGINPKNALALPGKCGLQWPPNC

SEQ ID NO: 8491 - DNA, 909 bp, Glycine max
  misc_feature (1)..(909): Ceres Seq. ID no. 15226616
ttttttcatttgcgttgagatgcttgttgctgctgttggccacttttatgcatttccatacaaagagtacgctggggctaacataggtggatcccgtgggttgacagctagccttgctcatgctttaaagttaaatgacttttaccatgataccgtccaccagtttgcaccaacataccatgattatgttctctacaaccacggtggtgaaggtgaagagggaactaggaagtatagatcacgaacttttgttccaattggcccagagatggacacagtgagaagaaataaacatttgtttggaagcaaggcagatgacgtacagatctcaagtttttcttcaaatagtagctctccttcaaattctggtcccatctctgatgttccacattctggtgcaatgaaatcttccttacttgtggatgtgtcaaattctttgtctgtgccatacgatatgacacttattgacttggatgcatccaattatcctgaaaaagttccagcagctgataaagccggtactaggtgacaatgaggaacattcagagccaagttagtgggaaaattgtcattgttgaagagaggagagtaataggggcatcctacatctttctcttctaggagagaattatgagtaaagtgtggtttgtttgattccaggaaagcctgtaggcaggtctggctcttacgtctgtgtcaatgttgcttaaaagccctaatctctcccaagtccctactaaaccaatcatcttgataattggtcttcagtcttgatattgtaattgtctccactgattgcgtatcgtgtgcacattgtagatatagaaatggttggctaacttcaaactcaacagctcctgagtgaatttcgattagaactcaattaagtaattgatcggttatcttctt

SEQ ID NO: 8492 - protein, 175 aa, Glycine max
  misc_feature (1)..(175): Ceres Seq. ID no. 15226617
FFICVEMLVAAVGHFYAFPYKEYAGANIGGSRGLTASLAHALKLNDFYHDTVHQFAPTYHDYVLYNHGGEGEEGTRKYRSRTFVPIGPEMDTVRRNKHLFGSKADDVQISSFSSNSSSPSNSGPISDVPHSGAMKSSLLVDVSNSLSVPYDMTLIDLDASNYPEKVPAADKAGTR

SEQ ID NO: 8493 - protein, 169 aa, Glycine max
  misc_feature (1)..(169): Ceres Seq. ID no. 15226618
MLVAAVGHFYAFPYKEYAGANIGGSRGLTASLAHALKLNDFYHDTVHQFAPTYHDYVLYNHGGEGEEGTRKYRSRTFVPIGPEMDTVRRNKHLFGSKADDVQISSFSSNSSSPSNSGPISDVPHSGAMKSSLLVDVSNSLSVPYDMTLIDLDASNYPEKVPAADKAGTR

SEQ ID NO: 8494 - DNA, 1785 bp, Glycine max
  misc_feature (1)..(1785): Ceres Seq. ID no. 15226659
gttacaacagactctgactctctctctcaagattcctctccgcgcaaagaatcttcatttctgtttcgcttccaacactccaaattccatttcattttcatctctctctgtatctgatgctcagaacaaatttcgattccgaaaatggcactagcaagtaccaacactgatcaatccacaatcaccactccttcaaagaaaccctcaaaaaactccgagaatctgaaccctaacgtgcctcatcatcgaagcccttcttcaaagtcccctgctttgcgatcctccaagccaaacaacagcaacccaattgcgcaatcgccgcagaacaggatccggcagaggaagttcgtggtggcaaagaagaaaaatcagaagggtacccaaaacgacgccgtttcgtgcaagtgcaaacacaatggtggcgccaagtgtgtttgtgtagctttccagactctgagggcttctcaggaagagtttttcctcaaagaaaagaaggattgtgattatgattttgaagaagaaagagaagaagaagcaaaagctgtgaatgctattgaaatctatggaacaaaaagtgaaacagtgcaaggagaagaagaaaaagaagaaggaggttccacagtgaaacgaaggagggagagagataggttgttggaagaggcaaggaatagtgttcctgaaaatgggtttgggagggttatgcatttggtgaaagcctttgagaagcttctcactatacctaagagttcaaaggagaaagatcacaaggaggagcatgatcatgagcatgaagagcaaaagaataagagccaggtgatgaaatgggcattgccagggttgcaatttcaacaacatcctaagcctaagacacttgaagctactactgatgatgcttctgtttcgggttcttcttcattttgttgtacttctgatttggttttgacatccaagaaccttggtattggtcaagggatttcagtttcttcatcttgggattgtaaccgtgcaagtgtatctagtaggacttctgggggtagaaggagcaggagaaatagctcggagtcatctgggacttttggagggaggaggtggaagcagaaggagaagctaaaagtcactaggcaaaaaccatttaagttaagaacagagcaaaggggaaagttgaaagaggaagaatttgtgaagaaagtacaagagatgatgactgaagaagagaagatgaggataccaattgctcaggggcttccatggacaacagatgaacctgagtgcttgttaaaacctacagttaaagaaagcacaaggcctattgacctaaagcttcatagtgatattcgggcaattgatcgtgctgaatttgaccaacaggtggcagaaaaaatgaacttcatagaacaactcaagttggaaaaggaaagacaacaaaagttagaagaagaagaagaaatcaggaggttgaggaaggaactcattccaaaagctcaaccaatgccttattttgacagaccatttgtcccaaggaggtcaatgaagcatcccactatacctagagaacccaagttccacatgccccaacataagaagatcaagtgtttggtcatggaatgacatgtcctatctcaacataagaaatcaatgaatgcttcatttctccatcattctctccacaatataattataaaaatgcaaattaatggtagtgtattgagatattataaaaaaatacaaactaatgtgttccaaacaagttcaaattaatgatgactaattatgtttttagttctc

SEQ ID NO: 8495 - protein, 487 aa, Glycine max
  misc_feature (1)..(487): Ceres Seq. ID no. 15226660
MALASTNTDQSTITTPSKKPSKNSENLNPNVPHHRSPSSKSPALRSSKPNNSNPIAQSPQNRIRQRKFVVAKKKNQKGTQNDAVSCKCKHNGGAKCVCVAFQTLRASQEEFFLKEKKDCDYDFEEEREEEAKAVNAIEIYGTKSETVQGEEEKEEGGSTVKRRRERDRLLEEARNSVPENGFGRVMHLVKAFEKLLTIPKSSKEKDHKEEHDHEHEEQKNKSQVMKWALPGLQFQQHPKPKTLEATTDDASVSGSSSFCCTSDLVLTSKNLGIGQGISVSSSWDCNRASVSSRTSGGRRSRRNSSESSGTFGGRRWKQKEKLKVTRQKPFKLRTEQRGKLKEEEFVKKVQEMMTEEEKMRIPIAQGLPWTTDEPECLLKPTVKESTRPIDLKLHSDIRAIDRAEFDQQVAEKMNFIEQLKLEKERQQKLEEEEEIRRLRKELIPKAQPMPYFDRPFVPRRSMKHPTIPREPKFHMPQHKKIKCLVME

SEQ ID NO: 8496 - protein, 302 aa, Glycine max
  misc_feature (1)..(302): Ceres Seq. ID no. 15226661
MHLVKAFEKLLTIPKSSKEKDHKEEHDHEHEEQKNKSQVMKWALPGLQFQQHPKPKTLEATTDDASVSGSSSFCCTSDLVLTSKNLGIGQGISVSSSWDCNRASVSSRTSGGRRSRRNSSESSGTFGGRRWKQKEKLKVTRQKPFKLRTEQRGKLKEEEFVKKVQEMMTEEEKMRIPIAQGLPWTTDEPECLLKPTVKESTRPIDLKLHSDIRAIDRAEFDQQVAEKMNFIEQLKLEKERQQKLEEEEEIRRLRKELIPKAQPMPYFDRPFVPRRSMKHPTIPREPKFHMPQHKKIKCLVME

SEQ ID NO: 8497 - protein, 263 aa, Glycine max
  misc_feature (1)..(263): Ceres Seq. ID no. 15226662
MKWALPGLQFQQHPKPKTLEATTDDASVSGSSSFCCTSDLVLTSKNLGIGQGISVSSSWDCNRASVSSRTSGGRRSRRNSSESSGTFGGRRWKQKEKLKVTRQKPFKLRTEQRGKLKEEEFVKKVQEMMTEEEKMRIPIAQGLPWTTDEPECLLKPTVKESTRPIDLKLHSDIRAIDRAEFDQQVAEKMNFIEQLKLEKERQQKLEEEEEIRRLRKELIPKAQPMPYFDRPFVPRRSMKHPTIPREPKFHMPQHKKIKCLVME

SEQ ID NO: 8498 - DNA, 536 bp, Glycine max
  misc_feature (1)..(536): Ceres Seq. ID no. 15226663
gatcacaacttcatttccaaaataaaaagacttccttttttgcaattgtcatttgtcaccaaacaattgttgttagctctcacaagcaagcttcagcaacgacaatgaagaaagtagtcttacagttggacttacatggtgatagaatcaagcaaaaagctatgaaaacagcatctggcctttcaggggttgaatcagtttctgttgatatgaaagacatgaaaatgatcgtgttgggggacattgatccagtgagtgcagtgtccaagctacgaaagtgttgtcacactgaaatagtttcagttggaccagcaaaagaggagaagaaggagaatgtggagccagcaaaagtacctgttcctctaaagctccatgaagcctatcccctttattatcagatgacaccacattatagtcaaagtcactatgccacaagttacgaagaggatcctagtggctgtgtcatctgctaaatttcagaatgttggaaagtttgataaataaataaaagaccaagtagtcattttgttgctttt

SEQ ID NO: 8499 - protein, 156 aa, Glycine max
  misc_feature (1)..(156): Ceres Seq. ID no. 15226664
SQLHFQNKKTSFFAIVICHQTIVVSSHKQASATTMKKVVLQLDLHGDRIKQKAMKTASGLSGVESVSVDMKDMKMIVLGDIDPVSAVSKLRKCCHTEIVSVGPAKEEKKENVEPAKVPVPLKLHEAYPLYYQMTPHYSQSHYATSYEEDPSGCVIC

SEQ ID NO: 8500 - protein, 122 aa, Glycine max
  misc_feature (1)..(122): Ceres Seq. ID no. 15226665
MKKVVLQLDLHGDRIKQKAMKTASGLSGVESVSVDMKDMKMIVLGDIDPVSAVSKLRKCCHTEIVSVGPAKEEKKENVEPAKVPVPLKLHEAYPLYYQMTPHYSQSHYATSYEEDPSGCVIC

SEQ ID NO: 8501 - protein, 103 aa, Glycine max
  misc_feature (1)..(103): Ceres Seq. ID no. 15226666
MKTASGLSGVESVSVDMKDMKMIVLGDIDPVSAVSKLRKCCHTEIVSVGPAKEEKKENVEPAKVPVPLKLHEAYPLYYQMTPHYSQSHYATSYEEDPSGCVIC

SEQ ID NO: 8502 - DNA, 502 bp, Glycine max
  misc_feature (1)..(502): Ceres Seq. ID no. 15226724
cwcgagaccattwcctagmacwtcctaatcgaaaaaccttttagaacacaacacaataccaattagcctaacactctcaacccaacacaagttttttttttcttcagtttttctcttcccaaagagtttttgttttgtcttttgttcttctcatgggtgggtttgaacagaagatgaaggatagggccaaggagctcaaggtcttgctcaagaaaggggtgaagattgtgggagattcatgcaagaaggggtggaacaaagtcaaacacatcaaacgctgattagtgtgattgtaatcatctgttgcatggcttattatcccaaagtctcttgattgtttttcttttttttttggtattgttatttatttgtactttcataggtttggtttgcatgtaaaatgtagtccttctaatttttctggttcctctatccccttttttggggttgtttttgtctcttctcagggatataattttggtgtgtccgagtttgtttgtgc

SEQ ID NO: 8503 - protein, 42 aa, Glycine max
  misc_feature (1)..(42): Ceres Seq. ID no. 15226725
MGGFEQKMKDRAKELKVLLKKGVKIVGDSCKKGWNKVKHIKR

SEQ ID NO: 8504 - protein, 35 aa, Glycine max
  misc_feature (1)..(35): Ceres Seq. ID no. 15226726
MKDRAKELKVLLKKGVKIVGDSCKKGWNKVKHIKR

SEQ ID NO: 8505 - protein, 31 aa, Glycine max
  misc_feature (1)..(31): Ceres Seq. ID no. 15226727
MQEGVEQSQTHQTLISVIVIICCMAYYPKVS

SEQ ID NO: 8506 - DNA, 1850 bp, Glycine max
  misc_feature (1)..(1850): Ceres Seq. ID no. 15226772
ccgggccccccctcgagtcavctdcgtaggccccccccccccctagttttgttaatactttatagtatagttttagtcacaaaaataaatgattctttgcatttattgcatgttttgacatgcaaattcatttaattgctatttaatatttttaaaatggtatggtatactgtcaatgttttaaaggtgctatctatggtcattattggctttggaaaagagaaaaggggttaggccggtagaggttagattttgtatcataattgtctgcatctatgtatattttatatacattcatccaaacaagtgagatcactagtttattgtgactttgaaggatgaaaggagtgaatccacaattggatcttatgtgaactgttacgattaaagacttgaattgcatgtgtgtgtgcattggaatttatgattttgagttatttcttaaaaatctcttacaagttcattcatttgcattcagcaatcagcttttataaaattttgacatgatccgtacaggtagtaaggctagcaaacgttatggagtaacttgcttagtagggagggagaaagcataatgaaaaagttagggagtaatttttaaggcattgtgaataagaaatttgataatgacaggggaaggtcaaagactaaaaggtttaataaatggtcacgttccacctagtaaacttggcaacccaacccagcctgcttccttaccctccatcttaaacagccaacttatgattttgagtttgattggttttcaatacgttagtaagtgcaccatttaaactttgtttgaccctccttatttttctgaagacagctctcatgtaaaaaaattaaaacatatatctgaaatcctgaaaaattatctctcctactcaacaaatttggtttgggacaaactgttccgaacctttgattgatgggtaaatgtttatttagctgtttatcaaagacggttgtgttctgtttgtgaagtgccaaccttgtaagttgtgactagtaggttccctgttgtaacaattgaacttgttggctcaacctgtggtcgagcatataacaggcagtggcattttcatacaatttccttactgcatttatgtgattcttcatccagagcatgacaattttctgtaccacagtttcatagttcctattaattgttccgttgcgctgttgcagttcattagtgaagctcatttggaagcatgccgaaggcagcgtctttactcaatagcaggctactattatgtgaagaatcacatctgttggggaaagcttagacttaaccccgttgattatccagtctctctgctgatctagaatttttaagatttttcccaacacaatagtgatgtagtttttatgcagaataattggagttcgtactagaattacctacagatttattgagtcgtttatttgggcatatgatctgtagatttatttatttttatgattgttattcatctttaacttttaaaaaaaaaaaaaaaaaaaaaaaaaaaaaaaaaaaaaaaaaaaaaaaaaaaaaaaaaaaaaaaaaagaaaaaaaaaaaaaaaatttttaaaaaaaaaaaaagaaaaaagaaaaaaaaagggttyyckggcgcccgggggryccccwaattttaaagggggccccccccggggggggcccccmtttttkkycccyttaggggggggwaawttccgcgttkgkkktaaamsggggmaaaaggggttccsgggggaaaattgtttycccccccaaattccccaaaaaaaaaaggccggaaagaaaaaggggaaacccggggggggcaaaagggggggcaaaccccatttaagggggggggggcccc

SEQ ID NO: 8507 - protein, 54 aa, Glycine max
  misc_feature (1)..(54): Ceres Seq. ID no. 15226773
MTGEGQRLKGLINGHVPPSKLGNPTQPASLPSILNSQLMILSLIGFQYVSKCTI

SEQ ID NO: 8508 - protein, 46 aa, Glycine max
  misc_feature (1)..(46): Ceres Seq. ID no. 15226774
MICRFIYFYDCYSSLTFKKKKKKKKKKKKKKKKKKKKKKEKKKKNF

SEQ ID NO: 8509 - protein, 44 aa, Glycine max
  misc_feature (1)..(44): Ceres Seq. ID no. 15226775
  misc_feature (7)..(7): Xaa is any aa, unknown or other
  misc_feature (8)..(8): Xaa is any aa, unknown or other
PGPPSSXXRRPPPPLVLLILYSIVLVTKINDSLHLLHVLTCKFI

SEQ ID NO: 8510 - DNA, 1000 bp, Glycine max
  misc_feature (1)..(1000): Ceres Seq. ID no. 15226793
aatcatcaccatcaatggcttccatgggctctctgaagatgatttcgtccctcaaactctcccgttcaagttgttctatctctccccttcaaacccaaaagcaagtaggttcaagtctctttcaatccttcccaaccaaaactttaaaattctcagctacccctcaagtatctacatccagaagaagtaccaacaagaccactaccactgcattcttcttcaataaccaaaagcagcatcaagattcctcacagccagccaaagttcaagaactctttgtctacgagatcaacgaacgcgaccgaggaagtcctgcataccttaggctaagccagaagccagttaactctctaggagacttagtgccattcagcaacaagatatactctggagacttgcaaaagagactagggataactgcaggcttgtgtgtgctcatccagcatgagcctgagaaaaagggtgatagatatgaggccatttacagcttctactttggaaactatggccacatatcagtgcaaggagcctatctcacattccaagacacatatctggcagttacaggaggctctggaatctttgaaggtgcttctggacaagtgaagcttcaccaacttgtgttccctttcaagctgttctacaccttctatttgaagggtgttcctgatttgcctcctgaactgcttgggaaacctgttgaaccttcaccaagtgttgagccttctcctgctgctatggctaccgagcctcatgcctgtttgccaaacttcaccaactgataatgattatgatgatgcaattgagccttttttgtttttcaggaaattttagttttgaacccaaaataaagtctaggtgttgcatattgactgtataccaaaattcgccaactgatgatgatgcaattgagtccttttcttttgcagaaaattttattttggacccaaaataaaatctgggtgttgcagatttactatatcaaaaaaaaaaaaaaaaa

SEQ ID NO: 8511 - protein, 259 aa, Glycine max
  misc_feature (1)..(259): Ceres Seq. ID no. 15226794
SSPSMASMGSLKMISSLKLSRSSCSISPLQTQKQVGSSLFQSFPTKTLKFSATPQVSTSRRSTNKTTTTAFFFNNQKQHQDSSQPAKVQELFVYEINERDRGSPAYLRLSQKPVNSLGDLVPFSNKIYSGDLQKRLGITAGLCVLIQHEPEKKGDRYEAIYSFYFGNYGHISVQGAYLTFQDTYLAVTGGSGIFEGASGQVKLHQLVFPFKLFYTFYLKGVPDLPPELLGKPVEPSPSVEPSPAAMATEPHACLPNFTN

SEQ ID NO: 8512 - protein, 255 aa, Glycine max
  misc_feature (1)..(255): Ceres Seq. ID no. 15226795
MASMGSLKMISSLKLSRSSCSISPLQTQKQVGSSLFQSFPTKTLKFSATPQVSTSRRSTNKTTTTAFFFNNQKQHQDSSQPAKVQELFVYEINERDRGSPAYLRLSQKPVNSLGDLVPFSNKIYSGDLQKRLGITAGLCVLIQHEPEKKGDRYEAIYSFYFGNYGHISVQGAYLTFQDTYLAVTGGSGIFEGASGQVKLHQLVFPFKLFYTFYLKGVPDLPPELLGKPVEPSPSVEPSPAAMATEPHACLPNFTN

SEQ ID NO: 8513 - protein, 252 aa, Glycine max
  misc_feature (1)..(252): Ceres Seq. ID no. 15226796
MGSLKMISSLKLSRSSCSISPLQTQKQVGSSLFQSFPTKTLKFSATPQVSTSRRSTNKTTTTAFFFNNQKQHQDSSQPAKVQELFVYEINERDRGSPAYLRLSQKPVNSLGDLVPFSNKIYSGDLQKRLGITAGLCVLIQHEPEKKGDRYEAIYSFYFGNYGHISVQGAYLTFQDTYLAVTGGSGIFEGASGQVKLHQLVFPFKLFYTFYLKGVPDLPPELLGKPVEPSPSVEPSPAAMATEPHACLPNFTN

SEQ ID NO: 8514 - DNA, 1062 bp, Glycine max
  misc_feature (1)..(1062): Ceres Seq. ID no. 15226854
gcttagtcgttcccaccatttttcctaatcccatttctctttttctcgttctcttgaatttctagggttaccgttggaaccactcgccagccacgtacgtacggaggctctctcttcctccgccatgaactcacggcaatcctctctgtcgccctgtgacatctgcggcgccacccaaaccctatctctgaccatccacaacatccgccaccgcgcccacacctgccgccactgcaccaactgcgtcctcaagcagcaccctggcctcttctgccctctctgcttcgaactccacgacgactcgcccctccctccccaccaccgcctcatgtgcgtccgctgccccgccgtcgcacaccgttcctgtgcgttcccctccaccaacccctccgctgcacccgcgccagcaccaccgttcttctgccctacttgtctcgattctaacttcacctacttcaaactccccgaccgcaagaccggagccgtcgacgtccagtccgccaaggtgctcgtcactgctgcccggatcgctgccgtgtccatgagcaaggcggccgccgtggcacggttcgatgcggaacgtcgcgccagggaggccgccgtggccaggaagagggcgaaggacgcgctggagcatctcgcggagatcctcgccagggagcaggcggagcaggacgaggaggaacagaacggcaccgtttctgctggccggaggcgtggcgcgtaatagttatatcctaagagttgaaggctgctgtactgtttgctatcaattctggaagtgcctcctccactgggtttctcttgggttctttggagatttcttcttgggagcatatgactcggagtttgactatggcaatctacctaaggatttactgaagctgcgtaatcatattttggtgtcattactatgctaaattgtgtatagaaaataaaaaggtttacatgactcacagcagttaataagtgcagctctcggaatttctttgccattgggcctcttataaattgtgattggtatattttatgaataagatttgtgtcattttctagcaaagt

SEQ ID NO: 8515 - protein, 200 aa, Glycine max
  misc_feature (1)..(200): Ceres Seq. ID no. 15226855
MNSRQSSLSPCDICGATQTLSLTIHNIRHRAHTCRHCTNCVLKQHPGLFCPLCFELHDDSPLPPHHRLMCVRCPAVAHRSCAFPSTNPSAAPAPAPPFFCPTCLDSNFTYFKLPDRKTGAVDVQSAKVLVTAARIAAVSMSKAAAVARFDAERRAREAAVARKRAKDALEHLAEILAREQAEQDEEEQNGTVSAGRRRGA

SEQ ID NO: 8516 - protein, 132 aa, Glycine max
  misc_feature (1)..(132): Ceres Seq. ID no. 15226856
MCVRCPAVAHRSCAFPSTNPSAAPAPAPPFFCPTCLDSNFTYFKLPDRKTGAVDVQSAKVLVTAARIAAVSMSKAAAVARFDAERRAREAAVARKRAKDALEHLAEILAREQAEQDEEEQNGTVSAGRRRGA

SEQ ID NO: 8517 - protein, 115 aa, Glycine max
  misc_feature (1)..(115): Ceres Seq. ID no. 15226857
MRNVAPGRPPWPGRGRRTRWSISRRSSPGSRRSRTRRNRTAPFLLAGGVARNSYILRVEGCCTVCYQFWKCLLHWVSLGFFGDFFLGAYDSEFDYGNLPKDLLKLRNHILVSLLC

SEQ ID NO: 8518 - DNA, 1677 bp, Glycine max
  misc_feature (1)..(1677): Ceres Seq. ID no. 15226862
cagctacgtaggccccccccccgctttgttaattttatttgtgctatcacgcctatcatacattattgtattgtaccactttataaagcagagggatttaaagcataagaatgcgtcgctgccttagttcatgttttgtcgcgagaggtaaggacaaggatgctcaggggaagagggcacaaccccagactcacactgtaaaaaaagttcatgtgtccaccgatgataatggccttagtaatagtggctcacactcgccaccaagagagaccaaaccaattgggctttacggatacgtgcaagagagacatggacatagtctctacacgtggaagcaagccttcttgaaactagagagtggttatctcttatgttatagtactggtgtctcgggttccccctgcaagatgctccctctgcatatatgcatggttcgcccgttgaaacgttctggcttccgggtgatctgtgccactcaattctcgctcacctttagggctaaagatgtagcggaaatgagagaatgggtagctgagattcaggctggcattgccgaagccttgaccgctcagtctgccccagctgcctgtactggtagagatacgttgtcagcattgcgaagcaagcatactgccaacagatactgtgctgactgtggagctccagatcctacgtgggtatcgacttccctgggatcattaatttgtatcgaatgctcaggagtacacagaagcttagggtcacatatatcgaaagtgagatcatttgagttggaccattgggatccaaaagacgtgaagactgacgggatcggaaattctgaagttaatacattgtatgaggcttccatacctaaacactgtaccaagccagacattaattccgacagagagacaagagaaaactggatcatggataagtatgtgcacaagcgcttcacaaagaagaccttgcacacaaacaatactcgccgtccatccacacctaatattaccctctctgttgttcctaaatctggaagcacttctaatcttcctgatgtctcttctcttcctctttccaacgccacatctacggccgccggtgccccatcactctctctcactctctctccaaaagagtccctctctccatcgccccatttggctcatgacttcacaagtaaactgccacctagtttacaaggcggtgtagttaggccacgtacgcctgactgtctaccgacttcccatatcggttccaatgtctttaataagaagatgccatacggagccgccaccgcagtggacttatcagcaaggagaggatcagtgggatcattcttatatgcccccaacaacactcgaacttctgcccgccgtagttcgatgtttcaaaatcagcgcgtaatgtagaaagattctctctctttctcattttttctattattctctcatccatccattccgctactattcttgggttctctatcggcttaaatatttttgttttatcttatatatatcttttttatcggaacacccctctggatagtagttttttttttctctcattcatgaatgattgaatatggactattgtaaagattcttctgagctttttgctctactttgtaaaaacttgtaatttttgtatcactacattcaaccccaaattaattattagtaaataatttct

SEQ ID NO: 8519 - protein, 427 aa, Glycine max
  misc_feature (1)..(427): Ceres Seq. ID no. 15226863
MRRCLSSCFVARGKDKDAQGKRAQPQTHTVKKVHVSTDDNGLSNSGSHSPPRETKPIGLYGYVQERHGHSLYTWKQAFLKLESGYLLCYSTGVSGSPCKMLPLHICMVRPLKRSGFRVICATQFSLTFRAKDVAEMREWVAEIQAGIAEALTAQSAPAACTGRDTLSALRSKHTANRYCADCGAPDPTWVSTSLGSLICIECSGVHRSLGSHISKVRSFELDHWDPKDVKTDGIGNSEVNTLYEASIPKHCTKPDINSDRETRENWIMDKYVHKRFTKKTLHTNNTRRPSTPNITLSVVPKSGSTSNLPDVSSLPLSNATSTAAGAPSLSLTLSPKESLSPSPHLAHDFTSKLPPSLQGGVVRPRTPDCLPTSHIGSNVFNKKMPYGAATAVDLSARRGSVGSFLYAPNNTRTSARRSSMFQNQRVM

SEQ ID NO: 8520 - protein, 328 aa, Glycine max
  misc_feature (1)..(328): Ceres Seq. ID no. 15226864
MLPLHICMVRPLKRSGFRVICATQFSLTFRAKDVAEMREWVAEIQAGIAEALTAQSAPAACTGRDTLSALRSKHTANRYCADCGAPDPTWVSTSLGSLICIECSGVHRSLGSHISKVRSFELDHWDPKDVKTDGIGNSEVNTLYEASIPKHCTKPDINSDRETRENWIMDKYVHKRFTKKTLHTNNTRRPSTPNITLSVVPKSGSTSNLPDVSSLPLSNATSTAAGAPSLSLTLSPKESLSPSPHLAHDFTSKLPPSLQGGVVRPRTPDCLPTSHIGSNVFNKKMPYGAATAVDLSARRGSVGSFLYAPNNTRTSARRSSMFQNQRVM

SEQ ID NO: 8521 - protein, 321 aa, Glycine max
  misc_feature (1)..(321): Ceres Seq. ID no. 15226865
MVRPLKRSGFRVICATQFSLTFRAKDVAEMREWVAEIQAGIAEALTAQSAPAACTGRDTLSALRSKHTANRYCADCGAPDPTWVSTSLGSLICIECSGVHRSLGSHISKVRSFELDHWDPKDVKTDGIGNSEVNTLYEASIPKHCTKPDINSDRETRENWIMDKYVHKRFTKKTLHTNNTRRPSTPNITLSVVPKSGSTSNLPDVSSLPLSNATSTAAGAPSLSLTLSPKESLSPSPHLAHDFTSKLPPSLQGGVVRPRTPDCLPTSHIGSNVFNKKMPYGAATAVDLSARRGSVGSFLYAPNNTRTSARRSSMFQNQRVM

SEQ ID NO: 8522 - DNA, 661 bp, Glycine max
  misc_feature (1)..(661): Ceres Seq. ID no. 15226913
ttaagaaatgtattcctcctcctccggaccgagatctcctgtcctgccaccgtcgagcacggcgagtcaccatcacctcgtatcgccgacgtcggtcaccaccgcaaaccagtccctgtgctagatggcatcttctactctaaaaccaggtgtgcctattactttgcaagagctagagccctcctcagagatgttcaagcaaggggcatccatccgggtaacaggaatccttcagtcatatgatgtggactctgcagttgctgtcattcaagatggcagtgctagactgaagattgatactcaaaacctgagagacattagtttctgcagtaattccacgttccagttcatcggtgaactcctgatccagccaaacaacgatgcgattctacaagcacgtgtgggcaggaatgttgatggacttgacctgaacctttaccagcagtctttgatcatccgacggcaacatgaagccaaactactgagctccaggaggccatgatccaaagctgtgaaccaggctcaaggcctcagttcagtttttctgaagtatagagcatgtgagaaaagaatcacgtaactcatgatgatcatgttctccagtttgttatcgaacctacaaagtggtactagtagttgttaactgagtttcctgggcacg

SEQ ID NO: 8523 - protein, 125 aa, Glycine max
  misc_feature (1)..(125): Ceres Seq. ID no. 15226914
MASSTLKPGVPITLQELEPSSEMFKQGASIRVTGILQSYDVDSAVAVIQDGSARLKIDTQNLRDISFCSNSTFQFIGELLIQPNNDAILQARVGRNVDGLDLNLYQQSLIIRRQHEAKLLSSRRP

SEQ ID NO: 8524 - protein, 103 aa, Glycine max
  misc_feature (1)..(103): Ceres Seq. ID no. 15226915
MFKQGASIRVTGILQSYDVDSAVAVIQDGSARLKIDTQNLRDISFCSNSTFQFIGELLIQPNNDAILQARVGRNVDGLDLNLYQQSLIIRRQHEAKLLSSRRP

SEQ ID NO: 8525 - protein, 80 aa, Glycine max
  misc_feature (1)..(80): Ceres Seq. ID no. 15226916
LRNVFLLLRTEISCPATVEHGESPSPRIADVGHHRKPVPVLDGIFYSKTRCAYYFARARALLRDVQARGIHPGNRNPSVI

SEQ ID NO: 8526 - DNA, 1278 bp, Glycine max
  misc_feature (1)..(1278): Ceres Seq. ID no. 15226988
taatgtgcatgatcactggtggtaaggataagcttgaggttgaagatgtggggagggagtatggattggttatagctgagggctctgcccgccctagtgggtgggcattccgcttctcaagcactaatactaccatcctgtactactggtcggcaagcctctgtgatgttgaacctattgatgtaaacaacccaaacacggattatgcaatgcatcttgatcggccaccagcattcttgcgccaatatatccacaagttcaatgtcctggttctcaacacaggtcaccactggaatcggggaaagctcacagctaatagatgggtaatgcatgtcggtggtgtgccaaatactgataagaagatagcagtgatttggggtgccaagaatcttacaattcacagcgttgtaagttgggcgaattcacagcttccaaaatatccaggtttgaaggtattctatcgttccatctctcctaggcattttgttggtggggactggaacacaggaggcagttgtgacaataccaaacccatgtccgttggaaaggaaatattgggagaggagtttattgatgaaggtgctgcaagtgcggtaaagggaacaggggttaagctcttagacataacagctctttctcagcttagggatgagggtcatatatcacggttcagtcttacagcgaagcctggggtgcaggattgcttacactggtgtttgcctggtgttcctgatacatggaatgaaatactatttgctcaaatatagtttactcattatgttggctggagagtatttggttggcgttgaaaaagttacaaccattccttcgcttggaaatggtcattcactttaaaagaaaactatagttttgcagaggacgcagtcatggaggttgcaatgtgtcctagctgagtttgtacttcagagctgatctggtgagatatttgaagtcgtacgatgcagagatttgttatgtacattgtcttaaattaactttgactacgcaaattttgaggtcttctgtagtataacttacttaccatgtaaattaattactccttcatatggccggcacatagcaagttagttgaaaagagtgttgataggcaaatctgcagaataggagcatttgaagattgttaccgagtgagttcttcataatgtattgaattggaggttgaagtccatagaacaggaaaacacccttgctctccttttaaaaacaaatcgggcagggtggaacagaatagtgagttattagtcttggatttttcat

SEQ ID NO: 8527 - protein, 254 aa, Glycine max
  misc_feature (1)..(254): Ceres Seq. ID no. 15226989
MCMITGGKDKLEVEDVGREYGLVIAEGSARPSGWAFRFSSTNTTILYYWSASLCDVEPIDVNNPNTDYAMHLDRPPAFLRQYIHKFNVLVLNTGHHWNRGKLTANRWVMHVGGVPNTDKKIAVIWGAKNLTIHSVVSWANSQLPKYPGLKVFYRSISPRHFVGGDWNTGGSCDNTKPMSVGKEILGEEFIDEGAASAVKGTGVKLLDITALSQLRDEGHISRFSLTAKPGVQDCLHWCLPGVPDTWNEILFAQI

SEQ ID NO: 8528 - protein, 252 aa, Glycine max
  misc_feature (1)..(252): Ceres Seq. ID no. 15226990
MITGGKDKLEVEDVGREYGLVIAEGSARPSGWAFRFSSTNTTILYYWSASLCDVEPIDVNNPNTDYAMHLDRPPAFLRQYIHKFNVLVLNTGHHWNRGKLTANRWVMHVGGVPNTDKKIAVIWGAKNLTIHSVVSWANSQLPKYPGLKVFYRSISPRHFVGGDWNTGGSCDNTKPMSVGKEILGEEFIDEGAASAVKGTGVKLLDITALSQLRDEGHISRFSLTAKPGVQDCLHWCLPGVPDTWNEILFAQI

SEQ ID NO: 8529 - protein, 185 aa, Glycine max
  misc_feature (1)..(185): Ceres Seq. ID no. 15226991
MHLDRPPAFLRQYIHKFNVLVLNTGHHWNRGKLTANRWVMHVGGVPNTDKKIAVIWGAKNLTIHSVVSWANSQLPKYPGLKVFYRSISPRHFVGGDWNTGGSCDNTKPMSVGKEILGEEFIDEGAASAVKGTGVKLLDITALSQLRDEGHISRFSLTAKPGVQDCLHWCLPGVPDTWNEILFAQI

SEQ ID NO: 8530 - DNA, 539 bp, Glycine max
  misc_feature (1)..(539): Ceres Seq. ID no. 15226994
tcagctacgtaggccccccccccatgcttcatgttgcgtaaatgggtatcctctgaacatgaaagttctcagttagaagatgagaatgtgcagtcacaagatggtagtagtgtcaaatcttctggacttgtagaaaatgctgaagttcaaaatgagcgatccaagtccttgtcaatttttggagttttaatttccccaaagcttcgagcctcccagctgtcatttgagaaagcactagagacactcatagaaatagccaatatgcaatcgtcattgttatattcttttcaccaacttcgaagggtggaagataccaaagaataaaaaagtaccagctctttcaggtgtttgtgtcaaataataaattactgcggttgacaggctgacaatatcacaaggggttacattattttcctaaataaaattctcttatctttccctccacctaaagaggagagagacaagaaaattactagcaaagtctttggaatatgttattgattttatgaggaactaatgaagatgagtttttttttccc

SEQ ID NO: 8531 - protein, 97 aa, Glycine max
  misc_feature (1)..(97): Ceres Seq. ID no. 15226995
MLRKWVSSEHESSQLEDENVQSQDGSSVKSSGLVENAEVQNERSKSLSIFGVLISPKLRASQLSFEKALETLIEIANMQSSLLYSFHQLRRVEDTKE

SEQ ID NO: 8532 - DNA, 1654 bp, Glycine max
  misc_feature (1)..(1654): Ceres Seq. ID no. 15227091
aatccattatcaaaatcaatcatacccaacaacatcctccgacaccatgttgcacatggaaaaccccctcctgcagtcaacaaactcaattaccttcacattctttgggctgttgttatttctctttgttctttcatccatattcagaaaccgcggtgctgcaacaagaaaagcaccaccagaagcaagaggcgcgtggcctttaattggtcacatccacctcttaggtggctcaaaaccaccccatgtcacgttgggccacatggcggacaaatatggtcccgtcttcaccttgcgtctgggtgctcacaaaacgttggttgtgagcaattgggaaatggccaaacagtgctttaccgtcaacgacaaagcgtttgctagccgtcctaaatcagtgtcctttgaattgttgggatacaactattccatgattgggttcatcccttacggttcttattggcgtcacgtgcgcaaaattatcacgctggagcttctctctactcactgcatagacatgctcaagcacgtgatggtggccgaggttaaggcggcagtgaaagagacttacaagaacctaaagggttccgaaaaggcaacaactgaaatgaagaggtggttcggggacataacgttaaacgttatgttcagaacggtggtaggaaaacgttttgttggtgagaatgaagagaacgaacggatccgaaaggcgctgagagaattttttgacctgacgggggcgttcaatgtgtctgatgctcttccttatttgagatggttggatttggatggcgcagagaagaaaatgaaaaagacggcgaaagagttagatgggtttgttcaagtttggctggaagaacacaaaagtaaaaggaatagtgaagctgaacccaaaagtaaccaggacttgatggacgtgcttcttagccttgttgaggagggtcaagagtttgacggccaggatgctgacaccacaatcaaagctacttgcctgggcttaattttagctggctctgatacgacaacaacaacattgtcttgggctctctcattacttctcaataatcgtgaagtcctaaataaggcaatccacgaattagacacacaaattgggagtgaaaaaattgtagagatatcagacttaaaaaagctagaatatctccaatctatcatcaaggaaacattacgtttgtacccagctgcaccacttaatgtgccacacgagtccttagaagattgcaccgtgggtggatatcatgtaccaactggcacgcgtctgttgactaatatttcaaaacttcaacgagacccttcattataccctaatccattagaattttggccagagagattcttgacaacccacaaggatgtagacatcaaaggtcaacattttgaattaattccatttggtgcaggtagaagaatgtgccctggactttctttcggtcttcaagtaatgcaactaacgcttgctactctattgcatgggtttgacattgtaactagtgatggggaacatgtcgatatgcttgaacaaattggactaaccaacattaaggcctctccactccaagtcattcttacaccacgtctttctggtcatatttatgatgaaatttaaatactaaaaaaataaagaaaaaaaaaaaaaaaa

SEQ ID NO: 8533 - protein, 539 aa, Glycine max
  misc_feature (1)..(539): Ceres Seq. ID no. 15227092
IHYQNQSYPTTSSDTMLHMENPLLQSTNSITFTFFGLLLFLFVLSSIFRNRGAATRKAPPEARGAWPLIGHIHLLGGSKPPHVTLGHMADKYGPVFTLRLGAHKTLVVSNWEMAKQCFTVNDKAFASRPKSVSFELLGYNYSMIGFIPYGSYWRHVRKIITLELLSTHCIDMLKHVMVAEVKAAVKETYKNLKGSEKATTEMKRWFGDITLNVMFRTVVGKRFVGENEENERIRKALREFFDLTGAFNVSDALPYLRWLDLDGAEKKMKKTAKELDGFVQVWLEEHKSKRNSEAEPKSNQDLMDVLLSLVEEGQEFDGQDADTTIKATCLGLILAGSDTTTTTLSWALSLLLNNREVLNKAIHELDTQIGSEKIVEISDLKKLEYLQSIIKETLRLYPAAPLNVPHESLEDCTVGGYHVPTGTRLLTNISKLQRDPSLYPNPLEFWPERFLTTHKDVDIKGQHFELIPFGAGRRMCPGLSFGLQVMQLTLATLLHGFDIVTSDGEHVDMLEQIGLTNIKASPLQVILTPRLSGHIYDEI

SEQ ID NO: 8534 - protein, 524 aa, Glycine max
  misc_feature (1)..(524): Ceres Seq. ID no. 15227093
MLHMENPLLQSTNSITFTFFGLLLFLFVLSSIFRNRGAATRKAPPEARGAWPLIGHIHLLGGSKPPHVTLGHMADKYGPVFTLRLGAHKTLVVSNWEMAKQCFTVNDKAFASRPKSVSFELLGYNYSMIGFIPYGSYWRHVRKIITLELLSTHCIDMLKHVMVAEVKAAVKETYKNLKGSEKATTEMKRWFGDITLNVMFRTVVGKRFVGENEENERIRKALREFFDLTGAFNVSDALPYLRWLDLDGAEKKMKKTAKELDGFVQVWLEEHKSKRNSEAEPKSNQDLMDVLLSLVEEGQEFDGQDADTTIKATCLGLILAGSDTTTTTLSWALSLLLNNREVLNKAIHELDTQIGSEKIVEISDLKKLEYLQSIIKETLRLYPAAPLNVPHESLEDCTVGGYHVPTGTRLLTNISKLQRDPSLYPNPLEFWPERFLTTHKDVDIKGQHFELIPFGAGRRMCPGLSFGLQVMQLTLATLLHGFDIVTSDGEHVDMLEQIGLTNIKASPLQVILTPRLSGHIYDEI

SEQ ID NO: 8535 - protein, 521 aa, Glycine max
  misc_feature (1)..(521): Ceres Seq. ID no. 15227094
MENPLLQSTNSITFTFFGLLLFLFVLSSIFRNRGAATRKAPPEARGAWPLIGHIHLLGGSKPPHVTLGHMADKYGPVFTLRLGAHKTLVVSNWEMAKQCFTVNDKAFASRPKSVSFELLGYNYSMIGFIPYGSYWRHVRKIITLELLSTHCIDMLKHVMVAEVKAAVKETYKNLKGSEKATTEMKRWFGDITLNVMFRTVVGKRFVGENEENERIRKALREFFDLTGAFNVSDALPYLRWLDLDGAEKKMKKTAKELDGFVQVWLEEHKSKRNSEAEPKSNQDLMDVLLSLVEEGQEFDGQDADTTIKATCLGLILAGSDTTTTTLSWALSLLLNNREVLNKAIHELDTQIGSEKIVEISDLKKLEYLQSIIKETLRLYPAAPLNVPHESLEDCTVGGYHVPTGTRLLTNISKLQRDPSLYPNPLEFWPERFLTTHKDVDIKGQHFELIPFGAGRRMCPGLSFGLQVMQLTLATLLHGFDIVTSDGEHVDMLEQIGLTNIKASPLQVILTPRLSGHIYDEI

SEQ ID NO: 8536 - DNA, 1051 bp, Glycine max
  misc_feature (1)..(1051): Ceres Seq. ID no. 15227118
aactgggcccatagaattgttaatttctctgatcccattgtgaatttgtggggatctgaattgcggaggaagatgattcagcttctgttcacggtgatattttcggaggcttcgatgatagcgttgctgctgttcaagacccctttgaggaagctcgtgataatgggcttggatcggttgaagcgaggtcgtggacccttgatggtgaagaccgttgcagggaccgttctcgtggtgttgttgtcgagtgtgtatagcatgttgaagattcagaagcgtgggatccaagagggtgctgttgttaaccccaccgatcaggttcttatggccaagcacctcctcgaagcaacgctcatggttgctgtccttttccttgcacttatgatagacagactacatcattacataagagaactgcggattcgaagaaaaggcatggaagctgtgaagaaacaaaccagagggactgaagatgggaaagttgcaaattcagaagaaattaagtctgtggaggaagaaagagccagattgagagctgaacttagccgccttgaatctgaactacagtcaaaaacaaaagacgtagatggtgctgaagccaatatagctgctctgagaaaacaatctgaggggttccttcttgagtatgatcgcttacttgaggaaaaccagaacctccgcaaccaactacaatccttggacaggaaattgtcacattcaggttccaagaagaatatgtaagaaaattgcaggtaagaatggcttcttttgtatactcttaaggaattccatggcagtttgttgataacagcttgtcaatccctgtaagcttgctcctaaaggaatacgattttcacttttgagttgaatttggttcaattttgttctgacaaattgtgaatttttttttagtgataacagaaaatatagtgctgatttgtttttttctgcacataatgtaacttctgcaacttctgttccactatttaagattcgacaactgaagggatgtgcccacgattattgtttgatgtcaaaaaaaaaaaaaaaa

SEQ ID NO: 8537 - protein, 246 aa, Glycine max
  misc_feature (1)..(246): Ceres Seq. ID no. 15227119
NWAHRIVNFSDPIVNLWGSELRRKMIQLLFTVIFSEASMIALLLFKTPLRKLVIMGLDRLKRGRGPLMVKTVAGTVLVVLLSSVYSMLKIQKRGIQEGAVVNPTDQVLMAKHLLEATLMVAVLFLALMIDRLHHYIRELRIRRKGMEAVKKQTRGTEDGKVANSEEIKSVEEERARLRAELSRLESELQSKTKDVDGAEANIAALRKQSEGFLLEYDRLLEENQNLRNQLQSLDRKLSHSGSKKNM

SEQ ID NO: 8538 - protein, 222 aa, Glycine max
  misc_feature (1)..(222): Ceres Seq. ID no. 15227120
MIQLLFTVIFSEASMIALLLFKTPLRKLVIMGLDRLKRGRGPLMVKTVAGTVLVVLLSSVYSMLKIQKRGIQEGAVVNPTDQVLMAKHLLEATLMVAVLFLALMIDRLHHYIRELRIRRKGMEAVKKQTRGTEDGKVANSEEIKSVEEERARLRAELSRLESELQSKTKDVDGAEANIAALRKQSEGFLLEYDRLLEENQNLRNQLQSLDRKLSHSGSKKNM

SEQ ID NO: 8539 - protein, 208 aa, Glycine max
  misc_feature (1)..(208): Ceres Seq. ID no. 15227121
MIALLLFKTPLRKLVIMGLDRLKRGRGPLMVKTVAGTVLVVLLSSVYSMLKIQKRGIQEGAVVNPTDQVLMAKHLLEATLMVAVLFLALMIDRLHHYIRELRIRRKGMEAVKKQTRGTEDGKVANSEEIKSVEEERARLRAELSRLESELQSKTKDVDGAEANIAALRKQSEGFLLEYDRLLEENQNLRNQLQSLDRKLSHSGSKKNM

SEQ ID NO: 8540 - protein, 192 aa, Glycine max
  misc_feature (1)..(192): Ceres Seq. ID no. 15227122
MGLDRLKRGRGPLMVKTVAGTVLVVLLSSVYSMLKIQKRGIQEGAVVNPTDQVLMAKHLLEATLMVAVLFLALMIDRLHHYIRELRIRRKGMEAVKKQTRGTEDGKVANSEEIKSVEEERARLRAELSRLESELQSKTKDVDGAEANIAALRKQSEGFLLEYDRLLEENQNLRNQLQSLDRKLSHSGSKKNM

SEQ ID NO: 8541 - DNA, 1181 bp, Glycine max
  misc_feature (1)..(1181): Ceres Seq. ID no. 15227214
gttatgttcttacaagttctatatatatatatatatatacatacatacgcatacttacttgagtcacttgtttaaatatttttctgtttcaaaaaattggaacctttcactgttgaattttgatgactacacccttggaacatgattacataggcttatcagaggctccatccatggagaaaagctgtgataagatatcctcttcagtttcctccaatctttcttctgaggatgagaacactacttcatctctgaacttcaaggagacagagctgaggcttggcctgccaggttgtgattctcctgagaacaacaacaaatcaggggtctctctttttggcaaggatttgcagaagaagaataatggctattcttctgcttcttcaactccttccaacaagaacctcaagaggggcttccctgatgccattagctcttcttcttcctcttctgggaaatggattttctcggcgagtgatgcagcaactgaagctgatttggaaagtggttctaatatctctggaggatgcaacaaagaggttggaatggttcctcactatgagaaaccagctcaagttgctgcaacaaatgaacatgctcctgctcctgctccaaaagcacaagttgtgggatggccaccaattcgatcttttcgaaagaacacgatgatggcttataatttggcaaaatgtgacaacgaagctgaggagaaatcaggagtaggttgtctttacgttaaggtcagcatggatggtgctccatatctcagaaaggttgatctgaaaacctacagcaactatattgaactttcttcagctcttgagaaaatgttcagctgctttaccattggtcaatgcaattctcgtgcacttcctgggaaagatggattaagtgagagtgcattcagggatcttgttgatggctctgaatatgttcttacatatgaagataaggaaggagactggatgcttgtgggtgatgtcccttggaaaatgttcactgagtcatgtaagaaactaaggataatgaaaggctctgaggcaatcgggctagctccaaggggtatggaaaaatttaggagccaatactagtacagaagattctgctccaccactgggtcattcactgaagcatataaagaaggtttagaggagaatttgagcttaataaaaaaataaaat

SEQ ID NO: 8542 - protein, 322 aa, Glycine max
  misc_feature (1)..(322): Ceres Seq. ID no. 15227215
MTTPLEHDYIGLSEAPSMEKSCDKISSSVSSNLSSEDENTTSSLNFKETELRLGLPGCDSPENNNKSGVSLFGKDLQKKNNGYSSASSTPSNKNLKRGFPDAISSSSSSSGKWIFSASDAATEADLESGSNISGGCNKEVGMVPHYEKPAQVAATNEHAPAPAPKAQVVGWPPIRSFRKNTMMAYNLAKCDNEAEEKSGVGCLYVKVSMDGAPYLRKVDLKTYSNYIELSSALEKMFSCFTIGQCNSRALPGKDGLSESAFRDLVDGSEYVLTYEDKEGDWMLVGDVPWKMFTESCKKLRIMKGSEAIGLAPRGMEKFRSQY

SEQ ID NO: 8543 - protein, 305 aa, Glycine max
  misc_feature (1)..(305): Ceres Seq. ID no. 15227216
MEKSCDKISSSVSSNLSSEDENTTSSLNFKETELRLGLPGCDSPENNNKSGVSLFGKDLQKKNNGYSSASSTPSNKNLKRGFPDAISSSSSSSGKWIFSASDAATEADLESGSNISGGCNKEVGMVPHYEKPAQVAATNEHAPAPAPKAQVVGWPPIRSFRKNTMMAYNLAKCDNEAEEKSGVGCLYVKVSMDGAPYLRKVDLKTYSNYIELSSALEKMFSCFTIGQCNSRALPGKDGLSESAFRDLVDGSEYVLTYEDKEGDWMLVGDVPWKMFTESCKKLRIMKGSEAIGLAPRGMEKFRSQY

SEQ ID NO: 8544 - protein, 181 aa, Glycine max
  misc_feature (1)..(181): Ceres Seq. ID no. 15227217
MVPHYEKPAQVAATNEHAPAPAPKAQVVGWPPIRSFRKNTMMAYNLAKCDNEAEEKSGVGCLYVKVSMDGAPYLRKVDLKTYSNYIELSSALEKMFSCFTIGQCNSRALPGKDGLSESAFRDLVDGSEYVLTYEDKEGDWMLVGDVPWKMFTESCKKLRIMKGSEAIGLAPRGMEKFRSQY

SEQ ID NO: 8545 - DNA, 690 bp, Glycine max
  misc_feature (1)..(690): Ceres Seq. ID no. 15227245
ccgggccccccctcgagtcagctwcgtaggccccccccccccaccgcagagaggatcaagggccacaacttctaatttatcagtttctcgttgatgatcttgacagtatggtgagtgatgctatgtggacagatgctaatggcatcgtgggttgtgaggattctaaacagagaaaggagctaaaggggtttcttcttgattgtgttatagaatatctagaatcaaattgctgccaatattttaactctggattcaagaaatggacgaagctgcccttgtgcatggaagctgagatgttggctcaagaggtgaagagggagatcaacaagtggttatctatggttgggatggtgcctgatgaaataatagaatgggaaatgagccactccttggggaaatggactgactttgacattgaagcatttgaggctggtgttgatatagatggggatatacttcaaattttggttgatgaagttgttcaagacctgcaggttgcaagcaggggcaccatttacttctaaaattcctttcagctgatcataggatatacttctaaaattcctttctctggtgagatatgtgatctaacaaggtgtattttttgtacaaataggattatgttatttctaatggaggcttttttttggggctctttgaattagtggacaaaataaagtccattgacct

SEQ ID NO: 8546 - protein, 138 aa, Glycine max
  misc_feature (1)..(138): Ceres Seq. ID no. 15227246
MVSDAMWTDANGIVGCEDSKQRKELKGFLLDCVIEYLESNCCQYFNSGFKKWTKLPLCMEAEMLAQEVKREINKWLSMVGMVPDEIIEWEMSHSLGKWTDFDIEAFEAGVDIDGDILQILVDEVVQDLQVASRGTIYF

SEQ ID NO: 8547 - protein, 133 aa, Glycine max
  misc_feature (1)..(133): Ceres Seq. ID no. 15227247
MWTDANGIVGCEDSKQRKELKGFLLDCVIEYLESNCCQYFNSGFKKWTKLPLCMEAEMLAQEVKREINKWLSMVGMVPDEIIEWEMSHSLGKWTDFDIEAFEAGVDIDGDILQILVDEVVQDLQVASRGTIYF

SEQ ID NO: 8548 - protein, 80 aa, Glycine max
  misc_feature (1)..(80): Ceres Seq. ID no. 15227248
MEAEMLAQEVKREINKWLSMVGMVPDEIIEWEMSHSLGKWTDFDIEAFEAGVDIDGDILQILVDEVVQDLQVASRGTIYF

SEQ ID NO: 8549 - DNA, 1217 bp, Glycine max
  misc_feature (1)..(1217): Ceres Seq. ID no. 15227285
cccgggccccccctcgagtcagctgcaggcccccccccccccaacagcactgagtaacggcaaagtccttgctggttgcttccattcgcgatggcgttgcaggagaggctagacaagttcaagaaacagcaagagaagtgccaaacgacactttcgaccattgcagctaccaaggccgccgcggcaacccaaaagtccgccacacatgcctcggcaaatggaagaaacgctgcccctgcggttaagttttccaacgacaccgagaggcttcagcatattaatagcattcgcaaggcccctgtgggtgctcagatgaagcgtgttattgatcttcttctagagacacgacaagcttttacaccggagcagataaatgaggcatgctatgtcgacatgaaggctaacaaagatgtctttgagaatctgaggaaaaacccaaaagtgaactatgatgggcaacgattatcttacaagtcaaagtatggtattaaggacaaaacagagcttcttcaactggtacgaaagtatcccgagggccttgctgttattgatctcaaggatgcttaccccactgtgatggaagatttgcaggctatgaaagctgcagggcagatttggcttctgtccaacttcgattcacaggaagacattgcctaccctaacgaccccaaagtacacattaaggtggatgatgacctaaaacatcttttccgcagtattgaattgcctcgtgatatgattgatatagagaaggatcttcaaaagaatggaatgaagcccgctaccaacactgcacagaggaggagtgcagctcaaattcaaggcatttcttccaagccaaagcctaagaagaagaagagtgaaatcagcaagagaacgaagcttaccaatgctcatcttccagagctctttcagaatttaaacagttcctgattaactctcatcaagtggttgtgtagttcaaatagatactttatcagccagtctaaactagattagcattgtgaaatattcaggaggttcttgctgctgtgccctacttttatttgtttttttattttatttttttttatttctgtacatcgaggctgcagctaatggactattgtactcgtcctaatttgtgaatccttgtatattatcatcatgttgcatttaaatttttagtcttgcaagtttataaaaaaaaaaaaaaaaaagaattcctgcwgcccttt

SEQ ID NO: 8550 - protein, 280 aa, Glycine max
  misc_feature (1)..(280): Ceres Seq. ID no. 15227286
MALQERLDKFKKQQEKCQTTLSTIAATKAAAATQKSATHASANGRNAAPAVKFSNDTERLQHINSIRKAPVGAQMKRVIDLLLETRQAFTPEQINEACYVDMKANKDVFENLRKNPKVNYDGQRLSYKSKYGIKDKTELLQLVRKYPEGLAVIDLKDAYPTVMEDLQAMKAAGQIWLLSNFDSQEDIAYPNDPKVHIKVDDDLKHLFRSIELPRDMIDIEKDLQKNGMKPATNTAQRRSAAQIQGISSKPKPKKKKSEISKRTKLTNAHLPELFQNLNSS

SEQ ID NO: 8551 - protein, 206 aa, Glycine max
  misc_feature (1)..(206): Ceres Seq. ID no. 15227287
MKRVIDLLLETRQAFTPEQINEACYVDMKANKDVFENLRKNPKVNYDGQRLSYKSKYGIKDKTELLQLVRKYPEGLAVIDLKDAYPTVMEDLQAMKAAGQIWLLSNFDSQEDIAYPNDPKVHIKVDDDLKHLFRSIELPRDMIDIEKDLQKNGMKPATNTAQRRSAAQIQGISSKPKPKKKKSEISKRTKLTNAHLPELFQNLNSS

SEQ ID NO: 8552 - protein, 179 aa, Glycine max
  misc_feature (1)..(179): Ceres Seq. ID no. 15227288
MKANKDVFENLRKNPKVNYDGQRLSYKSKYGIKDKTELLQLVRKYPEGLAVIDLKDAYPTVMEDLQAMKAAGQIWLLSNFDSQEDIAYPNDPKVHIKVDDDLKHLFRSIELPRDMIDIEKDLQKNGMKPATNTAQRRSAAQIQGISSKPKPKKKKSEISKRTKLTNAHLPELFQNLNSS

SEQ ID NO: 8553 - DNA, 1430 bp, Glycine max
  misc_feature (1)..(1430): Ceres Seq. ID no. 15227289
ccgggccccccctcgagtcagctacgtaggcccccccccccaattttcataattatttttttctttgaaaccagccaagagggttatttttgatccctcaaagctaatttctctctctctttttttatttccgggactgaagaggttgtctatttgaaatctccttcatcctttcctttcttgtagaaaactttttaaatttttttgtcagtgggtgttttaattaaccacctgttcttcaagttttagaaagacgcaggttgaattaattagtatcatggcagctttgatggatttttacagcagcagcccagagtttcaacttcactcagatccattcaggggagaactaatggaagttcttgaaccttttatgaaaagtccttctcccaactatttcccttcctccccctccctccctaatctttactcaaacgggttatccagcaacacccaaagcttaattggcttcgggcaagcgcaacccacatctcttgtgggcctgaaccacctaaccccatctcagatctctcagatccaagcccaaatccagatccaggcccagcagcatcagaatcgcagcaacaccctgagcttccttgggccgaagcccatccccatgaagcacgcgggcatgcctccgaagcccacgaagctttacagaggggtgagacagaggcactggggaaagtgggtggctgagatcagacttcccaagaaccggaccaggctgtggctgggaaccttcgacaccgccgaggaagccgctctggcatacgacaaggccgcgtacaagctccgaggtgacttcgccaggctcaacttcccaaacctgcgacaccagggttcctccgtcggtggtgatttcggggagtacaagcctcttcattccgctgttgacgccaagcttcaggccatttgcgaaggcctggctgagctgcagaaacaggggaagaccgagaagcctccgaggaagtcgcgttccaaactcgcggagaaggttgtttccgacaaggagaacaacaactcttgtaaggtggaagctgcgtcctggtcgtcggaaggttcttcgccgctttcggatctgacgtttgctgacgtgagcgaggctcagtgggaaggtgattcggataattataatctccagaagtacccctcttatgagatcgattgggattctctgtgaagtgtcctattatgtatggtctagtctaggtcttagtgtctcttaggtggctgctactgcaatggagtttttggcaattgcagggctagtactattctgtgtataatctctctaccttgctcacagctggtttttttcttgcttgaccagggagaattagtccgcttaatatgtttttcaagtgcatcgctgtaatctacttcaatttcatcatcttataaaatatattattctactannnnaa

SEQ ID NO: 8554 - protein, 302 aa, Glycine max
  misc_feature (1)..(302): Ceres Seq. ID no. 15227290
MAALMDFYSSSPEFQLHSDPFRGELMEVLEPFMKSPSPNYFPSSPSLPNLYSNGLSSNTQSLIGFGQAQPTSLVGLNHLTPSQISQIQAQIQIQAQQHQNRSNTLSFLGPKPIPMKHAGMPPKPTKLYRGVRQRHWGKWVAEIRLPKNRTRLWLGTFDTAEEAALAYDKAAYKLRGDFARLNFPNLRHQGSSVGGDFGEYKPLHSAVDAKLQAICEGLAELQKQGKTEKPPRKSRSKLAEKVVSDKENNNSCKVEAASWSSEGSSPLSDLTFADVSEAQWEGDSDNYNLQKYPSYEIDWDSL

SEQ ID NO: 8555 - protein, 298 aa, Glycine max
  misc_feature (1)..(298): Ceres Seq. ID no. 15227291
MDFYSSSPEFQLHSDPFRGELMEVLEPFMKSPSPNYFPSSPSLPNLYSNGLSSNTQSLIGFGQAQPTSLVGLNHLTPSQISQIQAQIQIQAQQHQNRSNTLSFLGPKPIPMKHAGMPPKPTKLYRGVRQRHWGKWVAEIRLPKNRTRLWLGTFDTAEEAALAYDKAAYKLRGDFARLNFPNLRHQGSSVGGDFGEYKPLHSAVDAKLQAICEGLAELQKQGKTEKPPRKSRSKLAEKVVSDKENNNSCKVEAASWSSEGSSPLSDLTFADVSEAQWEGDSDNYNLQKYPSYEIDWDSL

SEQ ID NO: 8556 - protein, 277 aa, Glycine max
  misc_feature (1)..(277): Ceres Seq. ID no. 15227292
MEVLEPFMKSPSPNYFPSSPSLPNLYSNGLSSNTQSLIGFGQAQPTSLVGLNHLTPSQISQIQAQIQIQAQQHQNRSNTLSFLGPKPIPMKHAGMPPKPTKLYRGVRQRHWGKWVAEIRLPKNRTRLWLGTFDTAEEAALAYDKAAYKLRGDFARLNFPNLRHQGSSVGGDFGEYKPLHSAVDAKLQAICEGLAELQKQGKTEKPPRKSRSKLAEKVVSDKENNNSCKVEAASWSSEGSSPLSDLTFADVSEAQWEGDSDNYNLQKYPSYEIDWDSL

SEQ ID NO: 8557 - DNA, 453 bp, Glycine max
  misc_feature (1)..(453): Ceres Seq. ID no. 15227293
aattaactcagttagactttgttccaagagaaagaccaatcaaagcatcatgactaaagttgtgtgtgcacttcttcttatttttgtcatggcttttgtgactcaagttgcttatggtggcggcgaaggatcacttacgccccaagaatgtccgggggcttgcgattatcgttgttcaaaggctgatcggactaagaaggcgtgcctgaacttctgtaacatgtgctgtgcgaaatgtctgtgcgttccatcaggaacctatggtcacaaggaagaatgtccatgttataacaattggaaaacaaagagaggaacacccaagtgcccctaattcaacttcattattgatattcatcaataaaatgtgtattcttgtggcgtgctatggtatatgcatgccctccgtaaataaatgtgtctgcgcttatcttatttgcaaaaaaaaaaaaaaaa

SEQ ID NO: 8558 - protein, 109 aa, Glycine max
  misc_feature (1)..(109): Ceres Seq. ID no. 15227294
INSVRLCSKRKTNQSIMTKVVCALLLIFVMAFVTQVAYGGGEGSLTPQECPGACDYRCSKADRTKKACLNFCNMCCAKCLCVPSGTYGHKEECPCYNNWKTKRGTPKCP

SEQ ID NO: 8559 - protein, 93 aa, Glycine max
  misc_feature (1)..(93): Ceres Seq. ID no. 15227295
MTKVVCALLLIFVMAFVTQVAYGGGEGSLTPQECPGACDYRCSKADRTKKACLNFCNMCCAKCLCVPSGTYGHKEECPCYNNWKTKRGTPKCP

SEQ ID NO: 8560 - protein, 80 aa, Glycine max
  misc_feature (1)..(80): Ceres Seq. ID no. 15227296
MAFVTQVAYGGGEGSLTPQECPGACDYRCSKADRTKKACLNFCNMCCAKCLCVPSGTYGHKEECPCYNNWKTKRGTPKCP

SEQ ID NO: 8561 - DNA, 671 bp, Glycine max
  misc_feature (1)..(671): Ceres Seq. ID no. 12611880
actctgacacaaagaagcttcctttcctcgtccccagccatgccgcccgcccgccccttccaccccccactgcacctcgccgtcgccgccctcctcctctccaccctcctccatgccgcctccgccgcgacgtcccccgaggtggacgccctcatggccttcaaggcgatggcgctgctggacgggtcggcggcgcgggaggagtgggagaaggaggaggccgtgcgggtgctgcgcgttgcggtgctgtgcacgagccgcacgccggcggtgcggccgtcgatgcggtccgtggtgcagatgctggaggacgcggccgtcgggcgcgagtgctccggcaacggcaagcccgccctggaggtcaaggtcgtcgtcgcctagccgttcaaagttatttcagtgtctgaactgaacattttggatcagcgctagccgtccgatcggagcaacggacggccgagatctgagcaggcgcgttcaagcgtgtgtagagcatgtagcatgtggtgtgttagtagtaaagataaagattgttcgttggtgaagaattacccaaccaatcttgtgtgtgtactcgtaggaaattaccagtggcatcatccattctgcttggtagatcaatcattggcaggtcaaactacccagtgaaaaaaaatacagtactcttggcc

SEQ ID NO: 8562 - protein, 134 aa, Glycine max
  misc_feature (1)..(134): Ceres Seq. ID no. 12611881
SDTKKLPFLVPSHAARPPLPPPTAPRRRRPPPLHPPPCRLRRDVPRGGRPHGLQGDGAAGRVGGAGGVGEGGGRAGAARCGAVHEPHAGGAAVDAVRGADAGGRGRRARVLRQRQARPGGQGRRRLAVQSYFSV

SEQ ID NO: 8563 - protein, 126 aa, Glycine max
  misc_feature (1)..(126): Ceres Seq. ID no. 12611882
TLTQRSFLSSSPAMPPARPFHPPLHLAVAALLLSTLLHAASAATSPEVDALMAFKAMALLDGSAAREEWEKEEAVRVLRVAVLCTSRTPAVRPSMRSVVQMLEDAAVGRECSGNGKPALEVKVVVA

SEQ ID NO: 8564 - protein, 113 aa, Glycine max
  misc_feature (1)..(113): Ceres Seq. ID no. 12611883
MPPARPFHPPLHLAVAALLLSTLLHAASAATSPEVDALMAFKAMALLDGSAAREEWEKEEAVRVLRVAVLCTSRTPAVRPSMRSVVQMLEDAAVGRECSGNGKPALEVKVVVA

SEQ ID NO: 8565 - DNA, 744 bp, Glycine max
  misc_feature (1)..(744): Ceres Seq. ID no. 13582293
aacatcctaatcgaaaaatctttttcaacaaccttatcaacaatgcaagagcttcatgaagcggcaattgcttattacaacaacggctccacggatcaacagactttggcatggcagtttttctgttcaatggacggtgacggtaatggccgtgtcagctttcgagagtataccgacttcttgtgtagaaccaccggtttcgcttgggtccatagcgagatgtttcaggagctcgaccggaatagagacggccagcttgacttctgggaggtcttgacgctttactatgtggctcggacgcggaccattggctgccgcacgtgcctccagcctctcattggtttgtactttacgtgtgtaacgtgctttgaatcgcaatgtgttggcgacacgtttgatctctgcgtcaagtgttatatgcggcggaattataatcatccgcatcgtgtcttcctggatagttttgttttattacgatctaagcgtagccaccctcctatgttgcaggagccgcctggcgaccaaaacatgcccgaacaacatcctgggatgatgggatggtgcaccgcgttgtcagcaatggaagctgcatttgctgtgggatcttttgctggcttttgcactattatgtaaaaatcatgttctatctcattgttgtttttgttcttaaatatttagccaataaacgcactataagtttaaatggcagactacaagataagagagtaatactacaaccttgat

SEQ ID NO: 8566 - protein, 210 aa, Glycine max
  misc_feature (1)..(210): Ceres Seq. ID no. 13582294
NILIEKSFSTTLSTMQELHEAAIAYYNNGSTDQQTLAWQFFCSMDGDGNGRVSFREYTDFLCRTTGFAWVHSEMFQELDRNRDGQLDFWEVLTLYYVARTRTIGCRTCLQPLIGLYFTCVTCFESQCVGDTFDLCVKCYMRRNYNHPHRVFLDSFVLLRSKRSHPPMLQEPPGDQNMPEQHPGMMGWCTALSAMEAAFAVGSFAGFCTIM

SEQ ID NO: 8567 - protein, 196 aa, Glycine max
  misc_feature (1)..(196): Ceres Seq. ID no. 13582295
MQELHEAAIAYYNNGSTDQQTLAWQFFCSMDGDGNGRVSFREYTDFLCRTTGFAWVHSEMFQELDRNRDGQLDFWEVLTLYYVARTRTIGCRTCLQPLIGLYFTCVTCFESQCVGDTFDLCVKCYMRRNYNHPHRVFLDSFVLLRSKRSHPPMLQEPPGDQNMPEQHPGMMGWCTALSAMEAAFAVGSFAGFCTIM

SEQ ID NO: 8568 - protein, 167 aa, Glycine max
  misc_feature (1)..(167): Ceres Seq. ID no. 13582296
MDGDGNGRVSFREYTDFLCRTTGFAWVHSEMFQELDRNRDGQLDFWEVLTLYYVARTRTIGCRTCLQPLIGLYFTCVTCFESQCVGDTFDLCVKCYMRRNYNHPHRVFLDSFVLLRSKRSHPPMLQEPPGDQNMPEQHPGMMGWCTALSAMEAAFAVGSFAGFCTIM

SEQ ID NO: 8569 - DNA, 881 bp, Glycine max
  misc_feature (1)..(881): Ceres Seq. ID no. 13594342
attttaaaaaagattcatgatgcttacactctcactctctgtgcctctgcagaagcaatacccattttccatctctcagcttccttcctctgcttacattactctctgcaaatggggtcttttcattctcagcctactcctcaccgctctcatcttccgcttccgccaaaacgcaactccctttcctcttatcatcgctcattgtgattatagccacaccgacgatgacgacgaaatctactccacatcggagtttgaagatgacgatgacgaagaagaagaagaagaggaagaagaagaagaagaagaaagaagggatgagtatttcagagtcagaggttctaccaacgacgaacgatgtcgaagcattggcgatttcttatctctttcagaaatcgccaacaccaaaagcgtcgttaagttatgggacaccatagggtttgggctagggtttggttttgagcattttgaccgttcatctgaaggaagcagcgtcgtctccgtttacgacggggagcttcctgatccggcggtggtggtttccgccggccaaaacgcgtcggggaatttagcggtgaggatttgggacacgcggctccggcggcggataccggcgatgatggcggagtggggaccgagccttgggaagaccgttggagttgaatccagcgaagtacacaaggttttcgtcaaagatgacggccgttacgagtttacggttggtaacatgagaaatgccatgtcgccgttacaatatgtaacggattcacacctcgatttgtggtggcctaattccttaattgtgaaaatttaaatacaaaaaacaatatatttgcttgtacagcatttttatttttattttatgtaaaatagtggcaatt

SEQ ID NO: 8570 - protein, 265 aa, Glycine max
  misc_feature (1)..(265): Ceres Seq. ID no. 13594343
MMLTLSLSVPLQKQYPFSISQLPSSAYITLCKWGLFILSLLLTALIFRFRQNATPFPLIIAHCDYSHTDDDDEIYSTSEFEDDDDEEEEEEEEEEEEERRDEYFRVRGSTNDERCRSIGDFLSLSEIANTKSVVKLWDTIGFGLGFGFEHFDRSSEGSSVVSVYDGELPDPAVVVSAGQNASGNLAVRIWDTRLRRRIPAMMAEWGPSLGKTVGVESSEVHKVFVKDDGRYEFTVGNMRNAMSPLQYVTDSHLDLWWPNSLIVKI

SEQ ID NO: 8571 - protein, 264 aa, Glycine max
  misc_feature (1)..(264): Ceres Seq. ID no. 13594344
MLTLSLSVPLQKQYPFSISQLPSSAYITLCKWGLFILSLLLTALIFRFRQNATPFPLIIAHCDYSHTDDDDEIYSTSEFEDDDDEEEEEEEEEEEEERRDEYFRVRGSTNDERCRSIGDFLSLSEIANTKSVVKLWDTIGFGLGFGFEHFDRSSEGSSVVSVYDGELPDPAVVVSAGQNASGNLAVRIWDTRLRRRIPAMMAEWGPSLGKTVGVESSEVHKVFVKDDGRYEFTVGNMRNAMSPLQYVTDSHLDLWWPNSLIVKI

SEQ ID NO: 8572 - DNA, 479 bp, Glycine max
  misc_feature (1)..(479): Ceres Seq. ID no. 13595195
gtttgtctatgggcgaatctctccggcaacggcgacctctcttcccctgcgcgtccctcttccggcgttgccaccccgtcgtccatcgctaccagatcgacgaccgccccttcatcctctctggtctctgcagatctacgccggcggcccgccttaccgacggttcttcctagccacgctgaagtctccatcctagagggtagaggcattccatttccttcagttcagtgattgagaatggaaaatggatttcctggcgaagttctgaaggctgtttttcctctactggatggtaaagacttagtcttttgcatgcttgtatgccgccaatggtgcgaaattgcaaaggatgattacttctggaaatgcatctgctcacggaaatggccttccatctgcaagcagcctccttctgacacaaacttccaaaagctctatttaacgttctccaagccacggaagacggtgcaccttcctgt

SEQ ID NO: 8573 - protein, 80 aa, Glycine max
  misc_feature (1)..(80): Ceres Seq. ID no. 13595196
MENGFPGEVLKAVFPLLDGKDLVFCMLVCRQWCEIAKDDYFWKCICSRKWPSICKQPPSDTNFQKLYLTFSKPRKTVHLP

SEQ ID NO: 8574 - protein, 76 aa, Glycine max
  misc_feature (1)..(76): Ceres Seq. ID no. 13595197
VCLWANLSGNGDLSSPARPSSGVATPSSIATRSTTAPSSSLVSADLRRRPALPTVLPSHAEVSILEGRGIPFPSVQ

SEQ ID NO: 8575 - protein, 64 aa, Glycine max
  misc_feature (1)..(64): Ceres Seq. ID no. 13595198
FVYGRISPATATSLPLRVPLPALPPRRPSLPDRRPPLHPLWSLQIYAGGPPYRRFFLATLKSPS

SEQ ID NO: 8576 - DNA, 1081 bp, Glycine max
  misc_feature (1)..(1081): Ceres Seq. ID no. 13595866
attaagtgcttcccatttcagaaaagtttttcagtgttcctgtggaaaactggaaacatcactgggatataattacatagagatctccatccagggagagtccttcatgttacatcagataagaaaaatggttgggacagctgtggcagtaaaacgcaaggcactgccaaaagatattataaagctgtcactgacaaggttctcgcggattattctaccccttgcaccttcagaagctctgatattaaggggaaacagattctcaataagaacacgaccaggaaacataacaaggcctgagatgcagacaatagttaaatcagaagaaattaagaaggcagttgatgatttttacacatcagttatgctacctcaagtttcaaaattattggacccatcaagatctccttgggatgaatggattgagaagctggatgctcacacaagcataccaaatgatcagttggatgaggtcaggaaggcttggaatttgtttaaagaaaaatttgaaactacaactagcactcatccatgataaagtgaaggaaaaaagaaggaatgcattcatacctttgttctgattgtcctgcactgtgcaagtttgaagggtaaacagaatttggaatttattcagcctacctagtctacaatggacaatcatgcttgctcaatacttggtagttatggaagaatttggcttgaaagatgtgttttaattattaattaattggcttgaatggccagcaaacatgattcctcaagaattcaacaaattcaacatccaagcaggatagtacaacttcagaggctgacaaaatttcactagtcaacaatacctcagcttcagcttccacaagcagctacaatattgaataatatttccaaattgggttagaatgttagagatgggggtaggcttctgagttgctacatgcaatcatttaccctctgaaactgaaacggatgtatactttccatatcacactgtcattcttacattatgcttaaaatataccatagatatgtcatattgtcattcttaaaatattttattcttaaaatgtatgcatcttgttagtcc

SEQ ID NO: 8577 - protein, 177 aa, Glycine max
  misc_feature (1)..(177): Ceres Seq. ID no. 13595867
LSASHFRKVFQCSCGKLETSLGYNYIEISIQGESFMLHQIRKMVGTAVAVKRKALPKDIIKLSLTRFSRIILPLAPSEALILRGNRFSIRTRPGNITRPEMQTIVKSEEIKKAVDDFYTSVMLPQVSKLLDPSRSPWDEWIEKLDAHTSIPNDQLDEVRKAWNLFKEKFETTTSTHP

SEQ ID NO: 8578 - protein, 142 aa, Glycine max
  misc_feature (1)..(142): Ceres Seq. ID no. 13595868
MLHQIRKMVGTAVAVKRKALPKDIIKLSLTRFSRIILPLAPSEALILRGNRFSIRTRPGNITRPEMQTIVKSEEIKKAVDDFYTSVMLPQVSKLLDPSRSPWDEWIEKLDAHTSIPNDQLDEVRKAWNLFKEKFETTTSTHP

SEQ ID NO: 8579 - protein, 135 aa, Glycine max
  misc_feature (1)..(135): Ceres Seq. ID no. 13595869
MVGTAVAVKRKALPKDIIKLSLTRFSRIILPLAPSEALILRGNRFSIRTRPGNITRPEMQTIVKSEEIKKAVDDFYTSVMLPQVSKLLDPSRSPWDEWIEKLDAHTSIPNDQLDEVRKAWNLFKEKFETTTSTHP

SEQ ID NO: 8580 - DNA, 1015 bp, Glycine max
  misc_feature (1)..(1015): Ceres Seq. ID no. 13638838
ttttagatcacaccgtgggttttcttggtcggtaggaataggattcaggcccgggcggccgcgtcaaaatcgtctctttgctcctcctcctgtccgtccgtctccgtccgtccgcccgcccgccccgaagcgtctcgccgccccctccaccggagaaccccctcgaaggcgagcacccgccctccccttcctcccggattcttgtctgccatgggtgactacacaatccggataagcaccagcttgatcgagcagctcgcgcgcgatgacgagaagcagatgaagaggaggaccaggaaacccaagccgaggaaggtcgtggagcaaccagaggagcctcaggacaatggcagggaacttccaactgaacccaagagcagccctgctcctgttttgccttttccgccacccatgtacctgccagtgacccccgctcctccaccgcccccgcccgtgatccaggaggtggaagccatacgcgccgtggttgtggagagcgagaaggtgctggagaagctgcagaagaaggaggcgacgatgcgcgaggagctcaccaagagggccaaggagctgcacgacaaggagttcaagctgccctaccagaacccctcgccgtgcaccgacgagagggcaggctgcgctgagtgctacaggagcaacgtgcaggacccgctcaagtgcgccgaggcggtcaagaggttcgaggcgtgcgttcgcatggcgattcggggcggtaccaccatgggagctgctcagtaggcagtggcgctgggagtcggggctgagtgagcgaggtgtcgagcacacgattttgcttctgtcgggatgattgattgaataacctgcctggatttttgtttggtgagacctgaaacaccatcagttgtagattaattctggtaacgggttgctactggtgttggcaacaagaggccatgagtgtccttgaatttaggggagtggctccatgctacttgcatacatattacaaaatgagacatgaaatttgcagggt

SEQ ID NO: 8581 - protein, 182 aa, Glycine max
  misc_feature (1)..(182): Ceres Seq. ID no. 13638839
MGDYTIRISTSLIEQLARDDEKQMKRRTRKPKPRKVVEQPEEPQDNGRELPTEPKSSPAPVLPFPPPMYLPVTPAPPPPPPVIQEVEAIRAVVVESEKVLEKLQKKEATMREELTKRAKELHDKEFKLPYQNPSPCTDERAGCAECYRSNVQDPLKCAEAVKRFEACVRMAIRGGTTMGAAQ

SEQ ID NO: 8582 - protein, 159 aa, Glycine max
  misc_feature (1)..(159): Ceres Seq. ID no. 13638840
MKRRTRKPKPRKVVEQPEEPQDNGRELPTEPKSSPAPVLPFPPPMYLPVTPAPPPPPPVIQEVEAIRAVVVESEKVLEKLQKKEATMREELTKRAKELHDKEFKLPYQNPSPCTDERAGCAECYRSNVQDPLKCAEAVKRFEACVRMAIRGGTTMGAAQ

SEQ ID NO: 8583 - protein, 115 aa, Glycine max
  misc_feature (1)..(115): Ceres Seq. ID no. 13638841
MYLPVTPAPPPPPPVIQEVEAIRAVVVESEKVLEKLQKKEATMREELTKRAKELHDKEFKLPYQNPSPCTDERAGCAECYRSNVQDPLKCAEAVKRFEACVRMAIRGGTTMGAAQ

SEQ ID NO: 8584 - DNA, 1205 bp, Glycine max
  misc_feature (1)..(1205): Ceres Seq. ID no. 13639619
gaacatcctaatcgaaaacttcgggttctcgtcaaaacgcaaagatgcaagttccattgatcgacatcgacagaatcaacgatctccaagtgggtctgaactctctgcagaacccatccttcccaatcccttctcagatcacaacctccctcgcttacaatttctgcaaatggggcgcagtcattctcgcccttgtcgccaccttcggcagcatcatcaacagagtcactatcttcatcatccgcttccgcgccaaagccccttctctcccatccctaaccctaaacgacgacaatttttacacctcctcctcctctgacgacgacgacgacgacgataacgacgacgacctaacctactcctcttccgagcccgaagacgagccctccgcgtcttccagtttcatccgtttggacgactatttccgactcagaggaaccgataataataataataataacctagacgacgagtttcagactcaaaacggcacgcacaaacgatgtcgtagcatcggggatattttctccctctcggaactagccaacagcaagagcgtggtgaagctctgggacaccataggcttcggcctgggcttggacttcgatgattacgatggttactacgttggtaacgcggcggttccgacgagctccaccgcgtctccctcggtggttgtctcggcgggggaaggcgcgtgcgggaatctggcgctggagatctgggacacgcggctgcggcggcggaagcccacggtggtggcggagtggggtcccaccgtgggaaagaccctgcgcgtggaatctggtggcgtccagaaggtctacgtcatagatgacgggcgttacggcgtgacggtcggggatatgagaaaggtcagcacgccgttagagagcgtaacggaatctgacgcggatacttggtgggatgcggacgctattgttgtttcggacgagtcttttggcgaacagcaatcaatgttgcaacaaccaacttgaataataattgcagttcctttttcggtgctggaaatataattataataatcgaaaaaaaaataaggcgccaccatccgagattttctcaagagaaattgtttatttgtattattattcaatttaaaatttatacattgtatattcatcaaaaaaaaaaaaaaaaaagcttatcgataccgtcgacctcgagggggggcccggtaccca

SEQ ID NO: 8585 - protein, 317 aa, Glycine max
  misc_feature (1)..(317): Ceres Seq. ID no. 13639620
MQVPLIDIDRINDLQVGLNSLQNPSFPIPSQITTSLAYNFCKWGAVILALVATFGSIINRVTIFIIRFRAKAPSLPSLTLNDDNFYTSSSSDDDDDDDNDDDLTYSSSEPEDEPSASSSFIRLDDYFRLRGTDNNNNNNLDDEFQTQNGTHKRCRSIGDIFSLSELANSKSVVKLWDTIGFGLGLDFDDYDGYYVGNAAVPTSSTASPSVVVSAGEGACGNLALEIWDTRLRRRKPTVVAEWGPTVGKTLRVESGGVQKVYVIDDGRYGVTVGDMRKVSTPLESVTESDADTWWDADAIVVSDESFGEQQSMLQQPT

SEQ ID NO: 8586 - DNA, 1313 bp, Glycine max
  misc_feature (1)..(1313): Ceres Seq. ID no. 14303811
ggtcaatccacaatctttagttgttgccaacctcctctagggttcctctgtttcttaactttcttcacatcaatggcaaagaagagaaccgcacctcagaagaagacccagatgatgaatcccatgccaaaacattctcaacagccaagaagctcacctcctaaacgccgcactgatttctctttcttcacgcgctctccctcctccttctccaaccctacttctggttcctcaccagattcatcttctggtgaagtgaggttgtccaatgttgcttcaagctgtttgcaggggaggagaatggcaatgaaacaattttctgaagatatgctggttcgatgcagcttttaccaagagggtagaccggtatgttcatctgagtcttttgatactccagttgtggaagttgattcagctgttcaagatgaaagtctcaaccttggtggacatagggatgcttgcaatgaaaaaattaatatttccaagatgtcagaatctacccctcttgaatcatctgtcagtgatagcagttctcttgctgtaactcctggaagtgttgtatgggcgaggacagattctcaagtgtggtggcctgctgagatcatggaagaaacatctgtgctatccaaccctggcaatgatggacatgttttagtgcagttttatggaaatcttcccagtgcctggattgatccaatgacagatatttcaacttttgaggattcttttgaagacaggagcaacaacccttcagaagattttcaaaaggctttaaagcaggccttacagaggaaggcacaacttagttcttgccaaaagttgactcctgataggtctgctcactatgatctgcaagaacgttcatctgataaatgcacttcaactagcacaagcaaaacaattgatgatgttcaagagagacggagagggaaaagggaacgtaaaccgaaagttcactttgatgaggtaacatatccaatgaaatcagaaacaaaggttcgtcggttgaagataatgcggtacctcggccttgcacctccagttggttctcccttttgagttttgaccatgatcacaagtaatgcatatttcaaatgtttgcagcctaacagctgtagttgaccctcccttttttaaccataataatcatgaaatatggatattttaaaaaaatgcttctatttcttgccattagctatgtaaaattttctaggattatatagtctcatagtattacattactatctgtaaaaaccatataagaatttcacggaatatcagattagttctctaataaaagttcaatttagcac

SEQ ID NO: 8587 - protein, 352 aa, Glycine max
  misc_feature (1)..(352): Ceres Seq. ID no. 14303812
GQSTIFSCCQPPLGFLCFLTFFTSMAKKRTAPQKKTQMMNPMPKHSQQPRSSPPKRRTDFSFFTRSPSSFSNPTSGSSPDSSSGEVRLSNVASSCLQGRRMAMKQFSEDMLVRCSFYQEGRPVCSSESFDTPVVEVDSAVQDESLNLGGHRDACNEKINISKMSESTPLESSVSDSSSLAVTPGSVVWARTDSQVWWPAEIMEETSVLSNPGNDGHVLVQFYGNLPSAWIDPMTDISTFEDSFEDRSNNPSEDFQKALKQALQRKAQLSSCQKLTPDRSAHYDLQERSSDKCTSTSTSKTIDDVQERRRGKRERKPKVHFDEVTYPMKSETKVRRLKIMRYLGLAPPVGSPF

SEQ ID NO: 8588 - protein, 328 aa, Glycine max
  misc_feature (1)..(328): Ceres Seq. ID no. 14303813
MAKKRTAPQKKTQMMNPMPKHSQQPRSSPPKRRTDFSFFTRSPSSFSNPTSGSSPDSSSGEVRLSNVASSCLQGRRMAMKQFSEDMLVRCSFYQEGRPVCSSESFDTPVVEVDSAVQDESLNLGGHRDACNEKINISKMSESTPLESSVSDSSSLAVTPGSVVWARTDSQVWWPAEIMEETSVLSNPGNDGHVLVQFYGNLPSAWIDPMTDISTFEDSFEDRSNNPSEDFQKALKQALQRKAQLSSCQKLTPDRSAHYDLQERSSDKCTSTSTSKTIDDVQERRRGKRERKPKVHFDEVTYPMKSETKVRRLKIMRYLGLAPPVGSPF

SEQ ID NO: 8589 - protein, 315 aa, Glycine max
  misc_feature (1)..(315): Ceres Seq. ID no. 14303814
MMNPMPKHSQQPRSSPPKRRTDFSFFTRSPSSFSNPTSGSSPDSSSGEVRLSNVASSCLQGRRMAMKQFSEDMLVRCSFYQEGRPVCSSESFDTPVVEVDSAVQDESLNLGGHRDACNEKINISKMSESTPLESSVSDSSSLAVTPGSVVWARTDSQVWWPAEIMEETSVLSNPGNDGHVLVQFYGNLPSAWIDPMTDISTFEDSFEDRSNNPSEDFQKALKQALQRKAQLSSCQKLTPDRSAHYDLQERSSDKCTSTSTSKTIDDVQERRRGKRERKPKVHFDEVTYPMKSETKVRRLKIMRYLGLAPPVGSPF

SEQ ID NO: 8590 - DNA, 1221 bp, Glycine max
  misc_feature (1)..(1221): Ceres Seq. ID no. 14304068
gtcatgatccatggtttttgtaagaagaagggaaagctagaggaggcatgtaagtattttgaaatgatgattgatgaaggaataccaccatatgttactactgttgagatgctgaggaatcggcttttgggtttagggtttatagatcacattgaaatactggctgctaagatgaggcaaagcacttcctatgcaattcaagaattggcaaatattatgattggcaatagaacagctcataatactttgggacgtgatgagatggacatagaaagtgactgaggaagtgattattgtttctcgtaatactttctcattaagctattttgacaaatatgtggaggcaaccatttcattacggcagagcacataataaagatgctatatctgtgggctatggttaattgattcattttaaggtgctgggtattattataattctttgatgtagcctgtatgacatatttcagatggaaggtaatctaaagtttaaacatctgaaaaattttcatggaacaccttagtttctgtatcatgaagaaatgacggacatgctggttcaggaaggcagagaaattgcaagttttatagctcggggagtcatttcttacatgatatctcttgtcctataggctgcagtattgtttgagtggcatgcctccgccaaatttcatttcgtagacacctatcattgccacagatgggttgtgattgtaatcaggatagaagtgactgctttgtttcattgatttaaacatcagacaggtaaagttgtctcaaccatggtagttgaattgggattcaaatcctggatcgaattgtatcgtattgtgaagactgcacaccaagttggcaacctgtttctgttcatattggagaatttaagttattcctgatgaaatcgtaaacccaaaaaaggtttgggaaactttgcaagtggatctgcacaccaacgaaagaactagtgacatgatacaaagattactctggcctcaatagcaggcatttgtacggtttcattccttacactggggatcataaggcagtcagacatcacaggtttggggttaaaagagaagaaaccaaaaatgatatgttcttattttttatgttgatcataagtgtacaattaacattattaacttttagttttttcatcgctgttggattttggatgaattggagccaacttgttggcattattgataaaaatttgagttc

SEQ ID NO: 8591 - protein, 93 aa, Glycine max
  misc_feature (1)..(93): Ceres Seq. ID no. 14304069
VMIHGFCKKKGKLEEACKYFEMMIDEGIPPYVTTVEMLRNRLLGLGFIDHIEILAAKMRQSTSYAIQELANIMIGNRTAHNTLGRDEMDIESD

SEQ ID NO: 8592 - protein, 92 aa, Glycine max
  misc_feature (1)..(92): Ceres Seq. ID no. 14304070
MIHGFCKKKGKLEEACKYFEMMIDEGIPPYVTTVEMLRNRLLGLGFIDHIEILAAKMRQSTSYAIQELANIMIGNRTAHNTLGRDEMDIESD

SEQ ID NO: 8593 - protein, 72 aa, Glycine max
  misc_feature (1)..(72): Ceres Seq. ID no. 14304071
MMIDEGIPPYVTTVEMLRNRLLGLGFIDHIEILAAKMRQSTSYAIQELANIMIGNRTAHNTLGRDEMDIESD

SEQ ID NO: 8594 - DNA, 843 bp, Glycine max
  misc_feature (1)..(843): Ceres Seq. ID no. 14305863
aattggatttgaaattgaagttgaccaagccacttgaggatagctttgcatacttttggtgtttgaagagctcttccatctgccaaaatgaagggacgtgtaagatggaatgaagataatattggagaaattgaagcaaacaagcccatgaggcaaaaaatcactgaacctaagactccatatcatcctatgcttgatgatgacagttctccatcccccgtgctaggagattttgacggatataatggtgataaaaatctctcaccaaatgctgaacaaactggttataataatggggcatattgtagcagcaaaggaactagacaatctgacggctggacatcatctgaggatgaggcagaagaaactgaagaggatgaggaagatagaagtttgagtttcagagagcacagaaaggcccactataatgaattccgcaaagtcaaagagctgcaacaaaaggcttctctggaggatggaagtgatgaggataatcatgctgaggttgccaacggggagaagaaaaatgactcatcttctccaacgaatggtacgtgaaggagaccaacactgagaagaaaaaatgtctcttccaatcaatgcttcctacacgatcaacaaataaaacccactccagtttcatcaacctttgtgtatggcggggatagaaacaacagaaggatttactgtatttattgtgtcttttgtgtgtaaaatatcttttctttttccacctggtatgtacatctgaacttgcatgattcgtgaagtctcttgtaatatgccaaattagattttttttggcaagcaacaaacattccggttataagagtgatgatttcg

SEQ ID NO: 8595 - protein, 156 aa, Glycine max
  misc_feature (1)..(156): Ceres Seq. ID no. 14305864
MKGRVRWNEDNIGEIEANKPMRQKITEPKTPYHPMLDDDSSPSPVLGDFDGYNGDKNLSPNAEQTGYNNGAYCSSKGTRQSDGWTSSEDEAEETEEDEEDRSLSFREHRKAHYNEFRKVKELQQKASLEDGSDEDNHAEVANGEKKNDSSSPTNGT

SEQ ID NO: 8596 - protein, 136 aa, Glycine max
  misc_feature (1)..(136): Ceres Seq. ID no. 14305865
MRQKITEPKTPYHPMLDDDSSPSPVLGDFDGYNGDKNLSPNAEQTGYNNGAYCSSKGTRQSDGWTSSEDEAEETEEDEEDRSLSFREHRKAHYNEFRKVKELQQKASLEDGSDEDNHAEVANGEKKNDSSSPTNGT

SEQ ID NO: 8597 - protein, 122 aa, Glycine max
  misc_feature (1)..(122): Ceres Seq. ID no. 14305866
MLDDDSSPSPVLGDFDGYNGDKNLSPNAEQTGYNNGAYCSSKGTRQSDGWTSSEDEAEETEEDEEDRSLSFREHRKAHYNEFRKVKELQQKASLEDGSDEDNHAEVANGEKKNDSSSPTNGT

SEQ ID NO: 8598 - DNA, 1132 bp, Glycine max
  misc_feature (1)..(1132): Ceres Seq. ID no. 14307388
aaagtgatctagagtcaatggattatgctggaatgtttacaaatacccaatggacttccaatgtgtcttcacatcacaagagacaagcttttgtgatgtatttgcagacgaatccaggaggaatcactatatttggatggacagttgaccggtctctggtcaacaccatatttttccttgaattaagtctggttacctttgttctcggtcagaccctaatctaaggataaaatttgcaaaatgacataaaaaaaaaaaccctttggctttaggtcttcctggttaccaccatcaatttgattgaaagtcctccgcatgccgagccagaatgtcgcatgcacacagtagccatgcagagaagtagagaaacagtgtgtattgtccacccagggactggaccaggcacactactgttaaatgcgaggcctcttcctcaatccccagcaacacagatgtctccaaaattctattcgtcattctcattcctcagtcagcatacttatctccgtggatcttgtgacttctaatttgcacaatatgcaatcaaacaacataccttaaactaataccaccttaaaagatacttgggagttttctgcctactagggctcctcgaagcagtcgttctcaaattgtttcaattcataacctaaggtttgcatcatctcatttgtaatcgaaggatcatagctatagtcatgtctccccctgcgttgaagattccagcctctggacatttgtgacctttataagagcgttcgcatgttgaactcgtatgtgttttgctttggagtagttggaagcaagaaagggtgttgggcactaggaaggacataaaggtttaaattttcaactaggaatatggagagaacctaaggaccaatcgtgttgggtgtgcaagtgccggtggatagtcatattaccgagtaatgttgcttgcaaattctgatctagttagattacagtgattgtttttattattattatttgagatatgcctaaggctgatttcaattgtataatagacaataatagagttgcgtatttcgaatgacaagtttataattattggttggtcgtgcaccaaccctcttttattttcttcacgaaatttataaatttctttttaaac

SEQ ID NO: 8599 - protein, 73 aa, Glycine max
  misc_feature (1)..(73): Ceres Seq. ID no. 14307389
SDLESMDYAGMFTNTQWTSNVSSHHKRQAFVMYLQTNPGGITIFGWTVDRSLVNTIFFLELSLVTFVLGQTLI

SEQ ID NO: 8600 - protein, 68 aa, Glycine max
  misc_feature (1)..(68): Ceres Seq. ID no. 14307390
MDYAGMFTNTQWTSNVSSHHKRQAFVMYLQTNPGGITIFGWTVDRSLVNTIFFLELSLVTFVLGQTLI

SEQ ID NO: 8601 - protein, 63 aa, Glycine max
  misc_feature (1)..(63): Ceres Seq. ID no. 14307391
MFTNTQWTSNVSSHHKRQAFVMYLQTNPGGITIFGWTVDRSLVNTIFFLELSLVTFVLGQTLI

SEQ ID NO: 8602 - DNA, 767 bp, Glycine max
  misc_feature (1)..(767): Ceres Seq. ID no. 14311321
atctttatgttagggtccaaagataagattaatgaggtgatgagattttgggttgatcagttaggttgggaccctttggccctcgccaaaatgccgaagatttttggatatagtttgaagggaaggatcattccgaggggtttggttgtccgatatttgatcgggaaaggtttgagaaagaagagtgccagcttgttaaccccattttctgcttctgaaaggttgtttcttgaaaattatgtgatgcgttttaaggaggaaacacatcaactatcaaaggtttatgtggaaaaatgagtttccaagaaaacagggaggatggtgtagcatctggcagttagcaaaacggaagagtacaattttcttagatgtaaaggagagatagatgaagatacaaatcaaagttccttaatcattgtggaatttagaaaaaatcaaggtccatgtttcatttattcattgctgctggaggttcaattgaagacaaagtttgagtgattgaacagttgtttctcagatgtttagctgggaatatattaagtgatagcttctggttacagcattatacattaggtagaactattcacttttgtagtttgacgaggaacacaaatgaatatttaagtgttgcattatgatagatgcatcaaacgataagaatttacttttaactttatatggttgagatgttgagttgagttataatttaagcttttagatgtaggagctcataaactgagttatatgccagggttaattctagcttt

SEQ ID NO: 8603 - protein, 98 aa, Glycine max
  misc_feature (1)..(98): Ceres Seq. ID no. 14311322
IFMLGSKDKINEVMRFWVDQLGWDPLALAKMPKIFGYSLKGRIIPRGLVVRYLIGKGLRKKSASLLTPFSASERLFLENYVMRFKEETHQLSKVYVEK

SEQ ID NO: 8604 - protein, 96 aa, Glycine max
  misc_feature (1)..(96): Ceres Seq. ID no. 14311323
MLGSKDKINEVMRFWVDQLGWDPLALAKMPKIFGYSLKGRIIPRGLVVRYLIGKGLRKKSASLLTPFSASERLFLENYVMRFKEETHQLSKVYVEK

SEQ ID NO: 8605 - protein, 85 aa, Glycine max
  misc_feature (1)..(85): Ceres Seq. ID no. 14311324
MRFWVDQLGWDPLALAKMPKIFGYSLKGRIIPRGLVVRYLIGKGLRKKSASLLTPFSASERLFLENYVMRFKEETHQLSKVYVEK

SEQ ID NO: 8606 - DNA, 1142 bp, Glycine max
  misc_feature (1)..(1142): Ceres Seq. ID no. 14311946
actacaaaatccaccaactcaaagaaagaaacagttcaagaaatgggtgaagcaaacgctcagtctcagagcgaacccttcatcgtaaactctccacaaccaacatttcagaaacacaaataccccgtcaccgcaaactcaccaccaccaccacactcaccaatgtgcgatcatcaccacattcttcaacaaaaccaagaagcggtggagcccacagacttgttctccatgatgcacctcaccaacggcaatggctgcagcaaccgtcagccaccctgctccgccgccaccaacaacaaccctatgaagcgccgatcgacgccatcttcctcctcctccggcgagccctgcgccaagaagctcttctgcgaccaagaggatctcaccctctacggcttctccgccgtctccattcccctcaacatcaaccccctcgtcaacaagcgcggctctttacccgtcctccgccgctgcgtctccgacccctgcacccctccggcgccgtcgccggaaccggagcaatccattcctccggagagaggctccgggctgccacccctgccgccgagattccaacggagcgtgtcggatctctctgttccttccccggacaaggctatgtcctgtttgagctctgaagaaaccgtcgcgcctgattccgtgaggctgagaaggatgaaggagcgtttgaaagagatgaggcagtggtgggatgaagttatgaaagatgagaaggaagatggtgtagaagaagagtgtgcagttgctgaagatgtcaaggtcctagctcaggatgatttgggaggtggagattctgaagaagctgttagtgttgattgggctgaacggtgcataaaccttgcgtttaggtgcccgtgtgggaaaggctatgaggttctcctctctgaaaataactgttactacaagttgatgtagaggaataagtaatgtgtttgactcctttcagtttgggatcacttctgtttttattctcttttagtttggcaaagtctttttctattctcatgtgtggcatttggttgtaactagaaccaaccaatgttatatcacttgctttcaataatgtaaataaaaatgttgtgtactatctccaagaaatagaggaaagtatattttgttcc

SEQ ID NO: 8607 - protein, 311 aa, Glycine max
  misc_feature (1)..(311): Ceres Seq. ID no. 14311947
TTKSTNSKKETVQEMGEANAQSQSEPFIVNSPQPTFQKHKYPVTANSPPPPHSPMCDHHHILQQNQEAVEPTDLFSMMHLTNGNGCSNRQPPCSAATNNNPMKRRSTPSSSSSGEPCAKKLFCDQEDLTLYGFSAVSIPLNINPLVNKRGSLPVLRRCVSDPCTPPAPSPEPEQSIPPERGSGLPPLPPRFQRSVSDLSVPSPDKAMSCLSSEETVAPDSVRLRRMKERLKEMRQWWDEVMKDEKEDGVEEECAVAEDVKVLAQDDLGGGDSEEAVSVDWAERCINLAFRCPCGKGYEVLLSENNCYYKLM

SEQ ID NO: 8608 - protein, 297 aa, Glycine max
  misc_feature (1)..(297): Ceres Seq. ID no. 14311948
MGEANAQSQSEPFIVNSPQPTFQKHKYPVTANSPPPPHSPMCDHHHILQQNQEAVEPTDLFSMMHLTNGNGCSNRQPPCSAATNNNPMKRRSTPSSSSSGEPCAKKLFCDQEDLTLYGFSAVSIPLNINPLVNKRGSLPVLRRCVSDPCTPPAPSPEPEQSIPPERGSGLPPLPPRFQRSVSDLSVPSPDKAMSCLSSEETVAPDSVRLRRMKERLKEMRQWWDEVMKDEKEDGVEEECAVAEDVKVLAQDDLGGGDSEEAVSVDWAERCINLAFRCPCGKGYEVLLSENNCYYKLM

SEQ ID NO: 8609 - protein, 257 aa, Glycine max
  misc_feature (1)..(257): Ceres Seq. ID no. 14311949
MCDHHHILQQNQEAVEPTDLFSMMHLTNGNGCSNRQPPCSAATNNNPMKRRSTPSSSSSGEPCAKKLFCDQEDLTLYGFSAVSIPLNINPLVNKRGSLPVLRRCVSDPCTPPAPSPEPEQSIPPERGSGLPPLPPRFQRSVSDLSVPSPDKAMSCLSSEETVAPDSVRLRRMKERLKEMRQWWDEVMKDEKEDGVEEECAVAEDVKVLAQDDLGGGDSEEAVSVDWAERCINLAFRCPCGKGYEVLLSENNCYYKLM

SEQ ID NO: 8610 - DNA, 1366 bp, Glycine max
  misc_feature (1)..(1366): Ceres Seq. ID no. 14315911
gttggaacttggaggaacttgtgtctgtgtccctttttacagagtcatgactatggctggagctttgagtctctcccaattcccagttcgtgggtctgtttctttgcccaaaagaagaatacccagaagaagcttttgcattaggggcatgtcagaaatctcttccactttttctgtgagcacccaacaagaagaaccaacttctaatgcttcgtcagtgacaattgcacctccccccaacttcaagccccctgagcctaaacgctttgcaatcagacctgacaagaccagtgaagtatttggagctttgcttcctttgctctttcgctttgctaccggagttttcgtttctgggtattctttttcaattgtttctaaggatgaaattcctccagatgaatatgctttggaacttaatggcgttaccataaaagaaacagcaaaattaggccctcgcccagagaagcctattgagatatatgaatttgagagctgtccattttgccgaaaggttagagaaattgttgccattttggaccttgatgttcttttctatccttgtccaagaaatggcccaaatttccgtcaaaaggttctagagatgggtggcaaactgcagttcccctacatggttgacccaaacacaggcgcttcaatgtatgaatcagatgacataattcggtatttggttgacaaatatggtgatggaaacgttcctctatctttatcacttggatttttaacgaccctaactgctggtcttggtatgcttagtcgtatttcaaaggggactacttatactccagcgaagttccctccaaagccacttaaattatgggcatatgaggggtctcctttctgcaaacttgtacgtgaagtacttgtggaattggagctgccacacttgcttgtctgttgtgctaggggtagcccaaagagaaatatactatatcagaaaactggaactttccaggcaccttttttggaagatccaaacactgggatagaaatgtttgaaagtgcagaaatcatagagtatctaagagcaacatacgctcttcagtaagtgatgcctatgataggaagaggcttgtgagggtttttaagtaaatgtaattgctaatggttctaacagggttacatcaaattttctctatatagaaatttcaaatagtggaatcaagtgcctcaatattcagcaatggtttgaggtggataaaaatttcggttgcaaaatgggaatctgtttcattcttcttttcttctttattattgttattattatttgggactcttttcattcattattactgcacctacaactctgcaataataactacataatacattaatgcccttgaaaatg

SEQ ID NO: 8611 - protein, 354 aa, Glycine max
  misc_feature (1)..(354): Ceres Seq. ID no. 14315912
LELGGTCVCVPFYRVMTMAGALSLSQFPVRGSVSLPKRRIPRRSFCIRGMSEISSTFSVSTQQEEPTSNASSVTIAPPPNFKPPEPKRFAIRPDKTSEVFGALLPLLFRFATGVFVSGYSFSIVSKDEIPPDEYALELNGVTIKETAKLGPRPEKPIEIYEFESCPFCRKVREIVAILDLDVLFYPCPRNGPNFRQKVLEMGGKLQFPYMVDPNTGASMYESDDIIRYLVDKYGDGNVPLSLSLGFLTTLTAGLGMLSRISKGTTYTPAKFPPKPLKLWAYEGSPFCKLVREVLVELELPHLLVCCARGSPKRNILYQKTGTFQAPFLEDPNTGIEMFESAEIIEYLRATYALQ

SEQ ID NO: 8612 - protein, 339 aa, Glycine max
  misc_feature (1)..(339): Ceres Seq. ID no. 14315913
MTMAGALSLSQFPVRGSVSLPKRRIPRRSFCIRGMSEISSTFSVSTQQEEPTSNASSVTIAPPPNFKPPEPKRFAIRPDKTSEVFGALLPLLFRFATGVFVSGYSFSIVSKDEIPPDEYALELNGVTIKETAKLGPRPEKPIEIYEFESCPFCRKVREIVAILDLDVLFYPCPRNGPNFRQKVLEMGGKLQFPYMVDPNTGASMYESDDIIRYLVDKYGDGNVPLSLSLGFLTTLTAGLGMLSRISKGTTYTPAKFPPKPLKLWAYEGSPFCKLVREVLVELELPHLLVCCARGSPKRNILYQKTGTFQAPFLEDPNTGIEMFESAEIIEYLRATYALQ

SEQ ID NO: 8613 - protein, 337 aa, Glycine max
  misc_feature (1)..(337): Ceres Seq. ID no. 14315914
MAGALSLSQFPVRGSVSLPKRRIPRRSFCIRGMSEISSTFSVSTQQEEPTSNASSVTIAPPPNFKPPEPKRFAIRPDKTSEVFGALLPLLFRFATGVFVSGYSFSIVSKDEIPPDEYALELNGVTIKETAKLGPRPEKPIEIYEFESCPFCRKVREIVAILDLDVLFYPCPRNGPNFRQKVLEMGGKLQFPYMVDPNTGASMYESDDIIRYLVDKYGDGNVPLSLSLGFLTTLTAGLGMLSRISKGTTYTPAKFPPKPLKLWAYEGSPFCKLVREVLVELELPHLLVCCARGSPKRNILYQKTGTFQAPFLEDPNTGIEMFESAEIIEYLRATYALQ

SEQ ID NO: 8614 - DNA, 466 bp, Glycine max
  misc_feature (1)..(466): Ceres Seq. ID no. 15168880
acgaatagttgatcaaaacatcataattctgaaaaagagttgtttactaattcaagaatgggggagaagaaaattttgtctcttgtcatgtttgtcatcatggcttatggtttggcagtaacaccattcactgcatgtgatcaatttcatattcctaaaacttgctatgggtatgaagcattactttctatctgtgggacttatttcgctgttatcaagtacaatccaagttccttttgttgtgatgcagcaactattgcgtttcctaaagccagtcgtagcagtgaaagtagaaggggtttttgtaattgtttgcgggttattggaccccaattagattttgtgaaatcaaagcttacaagccttcctggtgcttgtgggattaaaccttctttttttatgcagtcatgtatatatggagcctaatatccctctcccagaccaaaaataaatttgatttttgaat

SEQ ID NO: 8615 - protein, 122 aa, Glycine max
  misc_feature (1)..(122): Ceres Seq. ID no. 15168881
MGEKKILSLVMFVIMAYGLAVTPFTACDQFHIPKTCYGYEALLSICGTYFAVIKYNPSSFCCDAATIAFPKASRSSESRRGFCNCLRVIGPQLDFVKSKLTSLPGACGIKPSFFMQSCIYGA

SEQ ID NO: 8616 - protein, 112 aa, Glycine max
  misc_feature (1)..(112): Ceres Seq. ID no. 15168882
MFVIMAYGLAVTPFTACDQFHIPKTCYGYEALLSICGTYFAVIKYNPSSFCCDAATIAFPKASRSSESRRGFCNCLRVIGPQLDFVKSKLTSLPGACGIKPSFFMQSCIYGA

SEQ ID NO: 8617 - protein, 108 aa, Glycine max
  misc_feature (1)..(108): Ceres Seq. ID no. 15168883
MAYGLAVTPFTACDQFHIPKTCYGYEALLSICGTYFAVIKYNPSSFCCDAATIAFPKASRSSESRRGFCNCLRVIGPQLDFVKSKLTSLPGACGIKPSFFMQSCIYGA

SEQ ID NO: 8618 - DNA, 1358 bp, Glycine max
  misc_feature (1)..(1358): Ceres Seq. ID no. 15169114
agagttcagtagcaatggccgtggttgagtttgaacctcaacaactacgcctcttcatccccaacttcctctccctcgatgaatgcaaagaattggaattcatccataagagtagcagcacggtgggttacagacccaatgtcttctccaccactctctcccatctcattgctaccaactcttcccacttcatcattccttttatacccatcagagaaaggttgaaagacaagttagaggagtttttcaagtgtgagtatgagctcttcattgaattcactggtttaatcagttggagtagaggagcaagcattggatggcatagtgatgataacaggccctacctcaaacaacgccacttctcagcagtatgctatttgaatacttatggcaaggatttcagtggtggactctttcacttccaggatggtgagcccaagtcaattgtgccaaaagccggagatgttgtgatgtacacagctgatgaccgtaacattcattctgttgatgagataactgagggagaaaggctcacacttgctttatggttcagtcgtgatggctcccatgatgaggatatgaagctcatttctcttctttcacaacacctgctacatgagaacgtggctgattcatacctacctttgccagcatccagtaatatgtactggttttctaaggaccaagcttccaattatcaattcggttttaatatatcctgggctagactgcatgttcttggatacgacatatatatttctcaagacagtagctgtgagtctgatgtctttgaattactggtaaagccagtgcgtttagtgagggataatgagttgttagaccaggaattcgtcaatattatgcatgcacttcaggttgtccatttctattgttggaaaggatcagctttactgaacaacatgtcaaatatagactccagggtactaaaagtgacagaggtacagagagagaaaatcagtggtctgaattctgtacttttgaatgataatgattttgcatccaaagttttctgtaatatgccttcggaagaaaagggatgcatttgctttgactggtcagaagttctagctgcagttgctgcttgggaagattatgcgtcaaacttaagcaaacaaattcatttacagttgccttactggagaatgcatgagtctatatataatgtgcaattagagtagtatttgtgatcaacaattccaagaaaaagtaaccacctacaattgtgcttgggttaaaaatttggagaaaagcactgttgaaacaactaaaaagtagtttgtgaaggtttgctttgatagcattattcaatttaatgtgctttgggaaagttttaaggt

SEQ ID NO: 8619 - protein, 398 aa, Glycine max
  misc_feature (1)..(398): Ceres Seq. ID no. 15169115
SSVAMAVVEFEPQQLRLFIPNFLSLDECKELEFIHKSSSTVGYRPNVFSTTLSHLIATNSSHFIIPFIPIRERLKDKLEEFFKCEYELFIEFTGLISWSRGASIGWHSDDNRPYLKQRHFSAVCYLNTYGKDFSGGLFHFQDGEPKSIVPKAGDVVMYTADDRNIHSVDEITEGERLTLALWFSRDGSHDEDMKLISLLSQHLLHENVADSYLPLPASSNMYWFSKDQASNYQFGFNISWARLHVLGYDIYISQDSSCESDVFELLVKPVRLVRDNELLDQEFVNIMHALQVVHFYCWKGSALLNNMSNIDSRVLKVTEVQREKISGLNSVLLNDNDFASKVFCNMPSEEKGCICFDWSEVLAAVAAWEDYASNLSKQIHLQLPYWRMHESIYNVQLE

SEQ ID NO: 8620 - protein, 394 aa, Glycine max
  misc_feature (1)..(394): Ceres Seq. ID no. 15169116
MAVVEFEPQQLRLFIPNFLSLDECKELEFIHKSSSTVGYRPNVFSTTLSHLIATNSSHFIIPFIPIRERLKDKLEEFFKCEYELFIEFTGLISWSRGASIGWHSDDNRPYLKQRHFSAVCYLNTYGKDFSGGLFHFQDGEPKSIVPKAGDVVMYTADDRNIHSVDEITEGERLTLALWFSRDGSHDEDMKLISLLSQHLLHENVADSYLPLPASSNMYWFSKDQASNYQFGFNISWARLHVLGYDIYISQDSSCESDVFELLVKPVRLVRDNELLDQEFVNIMHALQVVHFYCWKGSALLNNMSNIDSRVLKVTEVQREKISGLNSVLLNDNDFASKVFCNMPSEEKGCICFDWSEVLAAVAAWEDYASNLSKQIHLQLPYWRMHESIYNVQLE

SEQ ID NO: 8621 - protein, 242 aa, Glycine max
  misc_feature (1)..(242): Ceres Seq. ID no. 15169117
MYTADDRNIHSVDEITEGERLTLALWFSRDGSHDEDMKLISLLSQHLLHENVADSYLPLPASSNMYWFSKDQASNYQFGFNISWARLHVLGYDIYISQDSSCESDVFELLVKPVRLVRDNELLDQEFVNIMHALQVVHFYCWKGSALLNNMSNIDSRVLKVTEVQREKISGLNSVLLNDNDFASKVFCNMPSEEKGCICFDWSEVLAAVAAWEDYASNLSKQIHLQLPYWRMHESIYNVQLE

SEQ ID NO: 8622 - DNA, 1596 bp, Glycine max
  misc_feature (1)..(1596): Ceres Seq. ID no. 15169334
tttttgtgatgacagtgtttcaaaagtaactgaaacgatggatcctcctaaagaacaagaacaccaggaatccatagtttcaccttccacagatgaagttttgacatcttcgaaacgtggaaggccacgaaaaacaaagcctaccaagttcgtaatcaacgagaaatccaatcccacatcaacaccccgaagatctaaaagaataaagcatgtagcagataaaactgccaacaatgttcccgaagtatcttcatccgaggaattattgaagggacgtactgcagaaaattcacaagcagatggcaaagaagtctcttcagatattgacgccttagtaatctacaaaagaaaaagactacctcgaaagaggtcttctggtcaaataagcaagtctccaaagaaaactgctccttcagagcctccatctgctgcaatttcaagctctactactgcatcaccccctcatcaagatcctcctgcagctacttcacccagcgctgatgctcctcatattgaaaatacaaatactgctgagccagtattgagtaaaagccttgtcgaagaggtcgagaaggtgaaccctgctccagccaatgctcaagaacaggttgcttctagtaagggtcaagaatctccagatcaagttgacccaaaggttgatgaagtctctactgggaacacctcactcgatctagaagccattaacaaaatgatcgaagatgaccctttgagtgctattgaaaatatcctgacagggaaggtttccatttgttctaagactccacaatctatcactcagtcagaacaaccaaaagttcaaggctcccctgcagatgttctgtcaaaagagctaaaagacttaatgcagatctttagcttaggtgattttgttactgaccatgaacaaatgtcaaaggtcctacttattcttgaagagttgcagaagaatgagaagtttctttctcttgaacagcaagcattcataaaggccttcagactcttcttcaacaatgctgttactcaccgcaaacagtgtgatacggctggaataaagaaagtcgagttgaaccgagctaaagaagatatccttctgaaactgcaagaagttaaacatacacaggagcaaatcacatcgaccatttcaaatgccaacaacagggtcaatgaaatatcttcttatattgaacaacttgaagaacggttatccaaactgaaggaagagagggagacctttcagttggctattaaggaaggcgagaaacaaagggagacattgaagaatgatagcatcttatgggctcatcagactaaggacctggtttttgatcttgcagagattgaggccaaagaaaaaatccttggacagcaacttgaaacagacaatgatgcatatgaccaatttaaagcatcctttcctttttaatttctgtttgaaaattggtagttgtaattactctgttatgttcaattcatgtatggtttagttcatgcatgtttagtttatgttcctttaagcaatttaaggatttagacccagttaagtgtagaattataacctttgattacaaaattaatggatgaaattttaacaatttc

SEQ ID NO: 8623 - protein, 473 aa, Glycine max
  misc_feature (1)..(473): Ceres Seq. ID no. 15169335
FCDDSVSKVTETMDPPKEQEHQESIVSPSTDEVLTSSKRGRPRKTKPTKFVINEKSNPTSTPRRSKRIKHVADKTANNVPEVSSSEELLKGRTAENSQADGKEVSSDIDALVIYKRKRLPRKRSSGQISKSPKKTAPSEPPSAAISSSTTASPPHQDPPAATSPSADAPHIENTNTAEPVLSKSLVEEVEKVNPAPANAQEQVASSKGQESPDQVDPKVDEVSTGNTSLDLEAINKMIEDDPLSAIENILTGKVSICSKTPQSITQSEQPKVQGSPADVLSKELKDLMQIFSLGDFVTDHEQMSKVLLILEELQKNEKFLSLEQQAFIKAFRLFFNNAVTHRKQCDTAGIKKVELNRAKEDILLKLQEVKHTQEQITSTISNANNRVNEISSYIEQLEERLSKLKEERETFQLAIKEGEKQRETLKNDSILWAHQTKDLVFDLAEIEAKEKILGQQLETDNDAYDQFKASFPF

SEQ ID NO: 8624 - protein, 461 aa, Glycine max
  misc_feature (1)..(461): Ceres Seq. ID no. 15169336
MDPPKEQEHQESIVSPSTDEVLTSSKRGRPRKTKPTKFVINEKSNPTSTPRRSKRIKHVADKTANNVPEVSSSEELLKGRTAENSQADGKEVSSDIDALVIYKRKRLPRKRSSGQISKSPKKTAPSEPPSAAISSSTTASPPHQDPPAATSPSADAPHIENTNTAEPVLSKSLVEEVEKVNPAPANAQEQVASSKGQESPDQVDPKVDEVSTGNTSLDLEAINKMIEDDPLSAIENILTGKVSICSKTPQSITQSEQPKVQGSPADVLSKELKDLMQIFSLGDFVTDHEQMSKVLLILEELQKNEKFLSLEQQAFIKAFRLFFNNAVTHRKQCDTAGIKKVELNRAKEDILLKLQEVKHTQEQITSTISNANNRVNEISSYIEQLEERLSKLKEERETFQLAIKEGEKQRETLKNDSILWAHQTKDLVFDLAEIEAKEKILGQQLETDNDAYDQFKASFPF

SEQ ID NO: 8625 - protein, 237 aa, Glycine max
  misc_feature (1)..(237): Ceres Seq. ID no. 15169337
MIEDDPLSAIENILTGKVSICSKTPQSITQSEQPKVQGSPADVLSKELKDLMQIFSLGDFVTDHEQMSKVLLILEELQKNEKFLSLEQQAFIKAFRLFFNNAVTHRKQCDTAGIKKVELNRAKEDILLKLQEVKHTQEQITSTISNANNRVNEISSYIEQLEERLSKLKEERETFQLAIKEGEKQRETLKNDSILWAHQTKDLVFDLAEIEAKEKILGQQLETDNDAYDQFKASFPF

SEQ ID NO: 8626 - DNA, 1655 bp, Glycine max
  misc_feature (1)..(1655): Ceres Seq. ID no. 15171520
gactagcatttgctgcattaccattcactactagttttcccacatgctttaactagcgcttttttttctttctattttcattatccaatggcttcttctattcctctttatcaaccaaccaacaccttattctccaacacccagttcaaaggttcgcgccgtggcttcttgtggcgacccagttactcgtttggctctcgtgctgaaaacagagcacgacccatcaaagcttcggttggtgcaccaccatttcccctgtttaagcctccccaagttgaagaaacatcttccgagttggagcctgcagatcctgatttctacaagattggttatgtccgaagcatgcgagcttatggagttcattttaaagaagggccagatggttttggtgtgtatgcttccaaagatgtagagcctcttcgccgagcaagggttgtaatggaaattcctcttgaattgatgttaaccataagcaagaagctcccatggatgtttttccctgatataattcccttggatcatccaatatttgatattatcaactcaacaaatccagagacagattgggacctaaggttagcatgccttctcttatacgcatttgattgcgaaggcaacttttggcaattgtatggcgacttcttaccgagtgcagatgagtgcactagcttacttctggcttcagaggaggaacttttggagctgcaggattccgatcttgcttccactattagaaaacagcaacaacgagccttagaattctgggagagtaactggcacagtgctgcaccccttaaaataaagcgtcttgcacatgatcctcaaaggttcgcttgggcagtaggtattgcacagtcacgatgtattaacatgcaaacgagaattggtgctctaaatcaagaagcaaatatgctgattccttatgctgatatgctgaaccattcatttgagccaaattgttttttccattggcgttttaaggacaggatgcttgaggttcttataaatgctggacagcgcattagaaagggagatgagatgacagttaattacatgagtacgcagaagaacgacatgttcatgcaaagatatggattttcatcacctgtgaatccttgggacgagatcaaattctcaggcaatgcacgtattcatttggattccttcgtgtcaatcttccatatatctggccttcctgaagagtattaccataataattgtctgtcaaatgctggggatagttttgttgatggagcagtcatagctgcagcacgaacactgccaagttggtcagatggggatgtgcctccaatccctagcgtggaaagaaaggctgccaaggagttgcaagatgaatgtcaaaagatgctcgcagcatttgctacaacctctaagcaagaccagaaattgctaggttccatgacagatgctacgaggacacttgaagctgcaataaagtatagattgcacaggaaattgttcatggagaaagttatccaagcattggagatgtatcaagagcaaatactgttctgatcccaatctactaacaggagaatagtcagtaagattttgtagcactgtagtgtcgtgtatacctgtaatcctgtgtcacttaaaacaatgctctttatccattaattgtaggttcttcg

SEQ ID NO: 8627 - protein, 482 aa, Glycine max
  misc_feature (1)..(482): Ceres Seq. ID no. 15171521
MASSIPLYQPTNTLFSNTQFKGSRRGFLWRPSYSFGSRAENRARPIKASVGAPPFPLFKPPQVEETSSELEPADPDFYKIGYVRSMRAYGVHFKEGPDGFGVYASKDVEPLRRARVVMEIPLELMLTISKKLPWMFFPDIIPLDHPIFDIINSTNPETDWDLRLACLLLYAFDCEGNFWQLYGDFLPSADECTSLLLASEEELLELQDSDLASTIRKQQQRALEFWESNWHSAAPLKIKRLAHDPQRFAWAVGIAQSRCINMQTRIGALNQEANMLIPYADMLNHSFEPNCFFHWRFKDRMLEVLINAGQRIRKGDEMTVNYMSTQKNDMFMQRYGFSSPVNPWDEIKFSGNARIHLDSFVSIFHISGLPEEYYHNNCLSNAGDSFVDGAVIAAARTLPSWSDGDVPPIPSVERKAAKELQDECQKMLAAFATTSKQDQKLLGSMTDATRTLEAAIKYRLHRKLFMEKVIQALEMYQEQILF

SEQ ID NO: 8628 - protein, 397 aa, Glycine max
  misc_feature (1)..(397): Ceres Seq. ID no. 15171522
MRAYGVHFKEGPDGFGVYASKDVEPLRRARVVMEIPLELMLTISKKLPWMFFPDIIPLDHPIFDIINSTNPETDWDLRLACLLLYAFDCEGNFWQLYGDFLPSADECTSLLLASEEELLELQDSDLASTIRKQQQRALEFWESNWHSAAPLKIKRLAHDPQRFAWAVGIAQSRCINMQTRIGALNQEANMLIPYADMLNHSFEPNCFFHWRFKDRMLEVLINAGQRIRKGDEMTVNYMSTQKNDMFMQRYGFSSPVNPWDEIKFSGNARIHLDSFVSIFHISGLPEEYYHNNCLSNAGDSFVDGAVIAAARTLPSWSDGDVPPIPSVERKAAKELQDECQKMLAAFATTSKQDQKLLGSMTDATRTLEAAIKYRLHRKLFMEKVIQALEMYQEQILF

SEQ ID NO: 8629 - protein, 365 aa, Glycine max
  misc_feature (1)..(365): Ceres Seq. ID no. 15171523
MEIPLELMLTISKKLPWMFFPDIIPLDHPIFDIINSTNPETDWDLRLACLLLYAFDCEGNFWQLYGDFLPSADECTSLLLASEEELLELQDSDLASTIRKQQQRALEFWESNWHSAAPLKIKRLAHDPQRFAWAVGIAQSRCINMQTRIGALNQEANMLIPYADMLNHSFEPNCFFHWRFKDRMLEVLINAGQRIRKGDEMTVNYMSTQKNDMFMQRYGFSSPVNPWDEIKFSGNARIHLDSFVSIFHISGLPEEYYHNNCLSNAGDSFVDGAVIAAARTLPSWSDGDVPPIPSVERKAAKELQDECQKMLAAFATTSKQDQKLLGSMTDATRTLEAAIKYRLHRKLFMEKVIQALEMYQEQILF

SEQ ID NO: 8630 - DNA, 2640 bp, Glycine max
  misc_feature (1)..(2640): Ceres Seq. ID no. 15176110
gagtgaacaaattccgcggcatacaatccagccgcaagggcatctgggtattgcaggaagtgaattgcccttctgtattgatagaagcagggttcatgtccaacccatctgatatgtccaatctgaagagcactgcttaccagcagaaaatggccggcgctatattgaccggtatccagcaatatttatcggctcatgaaaatcaaaccaccttcattccggtagatactaccatagaagtgaaagtaaaagatacggctgctcatcctttgtttgtagttgacggagaaaaaatgggtcggaagggtttgaaagaattaaaactggatccaaatgatattgacaatattagtgttttaaaagatgaggccgcctttaaaaagtatggcgaggaaggcaaaaacggagttgtagagatcaccactaaaaagcaagtagctgactctacaacgacaaagcagcatagtaaagctgatctgatgatgaaaaaattgaatgagctgaaaaaagataatgagaaatcttatttcgagattgatggtaaatccgtcatcactaccaaaagcgggcagacggtttggatagaagttgtcacagacctggtattggtagacggaaagcgggtgagtgttgacgaacttaacacatcatacaagcgaaatgattttgttgaggccgctggaaacgattattcaaaaaaataccacaaaggaatattgttactatccacacgcacacattcaattaaagaaatacaaaaaatgctggcagtaaactaaactgctgatcattcgattattttttcttctttcgcttctttgaaggatggtatatttcaatagcttgtttgataagttgcaatagttcctcttgctgaatattagcaggatcaacaacaggttcagcgaatgccagcactttctctaaagtgaggtcttttgtataaggagaacctttcaatacagcgccgaacatgcttactgccgcagcgaattggtaagcatgttcggctttttcaattgctatgggttgattagatgctgtaaatgcatgatgcataaaagatgcgctgtcgggaagctggtagcgcaaatcaatggaggccaggttttccgttgatgaatgagtagttgccggttctatttcaaacaaagccatcagggcatgcccactgccgatttctccaccttccaattcacgggtactgtcgttcaaagcggttctcttgttgtcaaagccaatcaggcggtaggttttgacaaggttgggattgaagcgaacgataaccgttgcattgttggcaacagcatataatgtttgtgtgaattcagttaccaatactttttgtgcttcgcctaaatgatccagataagcaaaattgccattgccttttttagccagcacttccagcttgctgtctttataattgcccatgcctactcccaggcaagtaaggtaaataccgcttttgcgatattgaacaatcaggtcttccagctctttttccgatgattgtcccacattgaaatccccatcggtagccagtatcaccctattgttgccattgcgcatataagtgtgcgaagccaatgcataagcctgctggatggctccggcgcccggtgtatcacccgcagcactcagcgaatcgatgactgctttgatctttttcttttcagcgcctcctgttggcgccaatgcaatgcgcacattgccgccgtaagtcatgatactgatggtatcctgcggacgtaaattatctgccagtaacttgaatgccgactgcagcaaggggagccggttgggcttatccatcgagccagacacatcgatcaaaaaaacaagattggaaggaggcacactgtcaagttgcaattgcggtgcatgaatatgaaggtacagcagttgatgttcctgctgccaggggcaggatgtaacggttgtctggcaggtaaaggcacgggaattttcagcagcagggtaactgaaataattgagcatttcttcaatgcggatcgcatgcacaggcacccgcatattattgtgaatgaaacgacggatattactataagaagctttgtcgatgttcagtgcaaaacctgtttccggatattgcgatgcctgaataaaacggttttccataatgtcgctgtagctctcgcccattacagaagcaggtacaactggttctgtttggagatggttggtgagagagctgagcctggccctgtaaaaatttgccaactcaggctgcattttcaaaacaaagaactggggcttcctggtatcgatggcagtacgcagggtatcataaccttcgtaagacaatgtgatggtatcaatgagcctggaagaagggatgccaaagctgcccaggttgccggtataatatggataagtgccggtgcttgccaattgtatgcgtacgccctgtaataaacgcccctgctcatccttcacttctccacgcaggtaattctgccccatgagcaggcagggaagtaaacaagcaagtaataaccaggcgacagctttcatctgtatgcatggatttactacaatttactgaaaaaagcgcgtatttacacgctaggcatctgttttgagctggtataattcgcggatattcctgcccaggcc

SEQ ID NO: 8631 - protein, 258 aa, Glycine max
  misc_feature (1)..(258): Ceres Seq. ID no. 15176111
VNKFRGIQSSRKGIWVLQEVNCPSVLIEAGFMSNPSDMSNLKSTAYQQKMAGAILTGIQQYLSAHENQTTFIPVDTTIEVKVKDTAAHPLFVVDGEKMGRKGLKELKLDPNDIDNISVLKDEAAFKKYGEEGKNGVVEITTKKQVADSTTTKQHSKADLMMKKLNELKKDNEKSYFEIDGKSVITTKSGQTVWIEVVTDLVLVDGKRVSVDELNTSYKRNDFVEAAGNDYSKKYHKGILLLSTRTHSIKEIQKMLAVN

SEQ ID NO: 8632 - protein, 227 aa, Glycine max
  misc_feature (1)..(227): Ceres Seq. ID no. 15176112
MSNPSDMSNLKSTAYQQKMAGAILTGIQQYLSAHENQTTFIPVDTTIEVKVKDTAAHPLFVVDGEKMGRKGLKELKLDPNDIDNISVLKDEAAFKKYGEEGKNGVVEITTKKQVADSTTTKQHSKADLMMKKLNELKKDNEKSYFEIDGKSVITTKSGQTVWIEVVTDLVLVDGKRVSVDELNTSYKRNDFVEAAGNDYSKKYHKGILLLSTRTHSIKEIQKMLAVN

SEQ ID NO: 8633 - protein, 221 aa, Glycine max
  misc_feature (1)..(221): Ceres Seq. ID no. 15176113
MSNLKSTAYQQKMAGAILTGIQQYLSAHENQTTFIPVDTTIEVKVKDTAAHPLFVVDGEKMGRKGLKELKLDPNDIDNISVLKDEAAFKKYGEEGKNGVVEITTKKQVADSTTTKQHSKADLMMKKLNELKKDNEKSYFEIDGKSVITTKSGQTVWIEVVTDLVLVDGKRVSVDELNTSYKRNDFVEAAGNDYSKKYHKGILLLSTRTHSIKEIQKMLAVN

SEQ ID NO: 8634 - DNA, 1448 bp, Glycine max
  misc_feature (1)..(1448): Ceres Seq. ID no. 15176246
gagaaaaaaaaggttaccccttttccatattttacctttcaaactctctctctctgtatgtatatataaagtctctttctcatgtttccttacttgggtgtagctttatttggtcatcaatttaattgcctgaccaaagtaaccatctcgttcccttttctgctttgttgaaatgccatgacagttcagatttgtaggaagcttattggaagaaaaatagctttgatatttggaaatgtctgaagtgagaaacaaagtggatttcatccagttgcttggacctgacatgtcaatcaagattctcacccatttggatgacccttgtgatcttattcgggtttcttctgtttccagttcttggcaccgatttgttattgaacatggcctctgcaagcaactttgcttgaaaatgtttcctgaaatatctggtgttgctcatataattgagcttgacaacattattgaaccactaagcaacactcttggcagttatgtaagttgggagtctcataagagaaatcatagagtctatgcatttttggcttctggtcttactcctatgaggaaaaattgcatctcaaaagccattagtgcatccagcactgataactaccctgaagaaagcattctacatacgttggagcctggggatagaactgaatatagagcatcatactggtcaagcaaaggggaaagcgatccttctgttcctgagactttagtttatgagctagcttcaaaattatgtcttgttacggagatttatgtccatccattccaagcatattttcagcatggcttccctatatattctgctaaggctgtccgattcagaatgggccattcgaaacacccaatggaattagagagtcctgtggacaacatggctgctaatcacgtcttgggcaataatcaattcatatggacatatacatcacctgaatttccaatgcttcaagaaaaccgcttgcaaaaattcaagctacctgaacctgttctgtgcattggaggtgtactgctagttgagctgttgggtagagttcaaaagcaagaaatggatgaattattctatatatgatggtgcagcatctctcatgttcaagttatgggacgactgctttttccggaatttgatgtcaaaattcatcattggtcaggaaagtgtaccttgaaatactgccctcaaacagattgttatatgtcttctccaacatcatcaccgagaagcaactcgagtaatccgtcacgcctgcggaccataacctcaagcataatgcagaggggtgtgagacgttgggagcaatttctcttgggtgcattgcttggtactggtcctgttgtagttgataatgaagatcaatgaaaaaaaaaaatgtaagtaataaagtacttccattctcaaatggaagatattggtcccaatatctgtatagcatggaatatgttga

SEQ ID NO: 8635 - protein, 280 aa, Glycine max
  misc_feature (1)..(280): Ceres Seq. ID no. 15176247
MSEVRNKVDFIQLLGPDMSIKILTHLDDPCDLIRVSSVSSSWHRFVIEHGLCKQLCLKMFPEISGVAHIIELDNIIEPLSNTLGSYVSWESHKRNHRVYAFLASGLTPMRKNCISKAISASSTDNYPEESILHTLEPGDRTEYRASYWSSKGESDPSVPETLVYELASKLCLVTEIYVHPFQAYFQHGFPIYSAKAVRFRMGHSKHPMELESPVDNMAANHVLGNNQFIWTYTSPEFPMLQENRLQKFKLPEPVLCIGGVLLVELLGRVQKQEMDELFYI

SEQ ID NO: 8636 - protein, 263 aa, Glycine max
  misc_feature (1)..(263): Ceres Seq. ID no. 15176248
MSIKILTHLDDPCDLIRVSSVSSSWHRFVIEHGLCKQLCLKMFPEISGVAHIIELDNIIEPLSNTLGSYVSWESHKRNHRVYAFLASGLTPMRKNCISKAISASSTDNYPEESILHTLEPGDRTEYRASYWSSKGESDPSVPETLVYELASKLCLVTEIYVHPFQAYFQHGFPIYSAKAVRFRMGHSKHPMELESPVDNMAANHVLGNNQFIWTYTSPEFPMLQENRLQKFKLPEPVLCIGGVLLVELLGRVQKQEMDELFYI

SEQ ID NO: 8637 - protein, 222 aa, Glycine max
  misc_feature (1)..(222): Ceres Seq. ID no. 15176249
MFPEISGVAHIIELDNIIEPLSNTLGSYVSWESHKRNHRVYAFLASGLTPMRKNCISKAISASSTDNYPEESILHTLEPGDRTEYRASYWSSKGESDPSVPETLVYELASKLCLVTEIYVHPFQAYFQHGFPIYSAKAVRFRMGHSKHPMELESPVDNMAANHVLGNNQFIWTYTSPEFPMLQENRLQKFKLPEPVLCIGGVLLVELLGRVQKQEMDELFYI

SEQ ID NO: 8638 - DNA, 1342 bp, Glycine max
  misc_feature (1)..(1342): Ceres Seq. ID no. 15178019
accaccaagacaggttttacagtattcacatatgactcagacaagtcctttgggtcacattgggcccccaagaaaccctgtacagaatttgttaactccaacaaatgcttcactttcatttcctgttactttaagccaaccaacgccaataggacaacatcagacatctgtgtcttcaatgcatctacctatgtctggtatatcgtcatcaatacctaaccagtcattgacccatctaggggtctcttctggccagaacgaagcccctgtcactgttaaaatgtctgttggtcccagcaatatggtgccaatggcttcaccagtggttccacctgcaagacctgtttctctacatcaacagccagatgttgcatttaagccaccacagtcaaatatgtcaatgatgccacgatctgccacctttcctccacatcaagtaggaatatcccctggacaaccatcttctttgagaccaatgcctgtaccaatatctgcaaaccatttattgggacctgtttcatttccttcacctggaatatccccttcacttccattgcctcagcaagcaggaatacctaatcttgcttttggagttgctccttatcacacccatgtaaaaccaccagtcttggggacatcaaaatctggaaattttacttttcaatcacatctgcccaatgcagactatggtcaagtctattctggaccaaacagtcaatcaggtgctacacaagaaccaccttctggtccacgacctccaccatttggttttgctgtgcctgatcagcctcgtcaaatctttccaaggacacaattccctggtcaagtggatcaagccgttgcctttgggggaagatcaggttccatctcgaactcaattccaccacccagacatggtgtgtttccatatgctggtcaacctgcacctagatcatcagccgcacaaatgggtatgaagaacttcatttctgccccacaaattccaaatttgaccagtgctggttcccaaagaggcatgcctattcgaaaaagctatgctactcagatggcatgggcagatatctcaatgcctctgaatcaaaagtttgtcagcaatccccccatggcttctggtaagattgcatatgctacagaccaaatttatgatcccttttcacccacttctgcacctccacaacacaaaggtaatcctggaaaatgagggaattggatgtggctacagatacgtaactgatagtgaaaaactggagtcatgactacagttttaggcaaacaggcgcgatactatttgtatagattaacaatggccatgttacaaaataatatatgatttcttaccgct

SEQ ID NO: 8639 - protein, 399 aa, Glycine max
  misc_feature (1)..(399): Ceres Seq. ID no. 15178020
PPRQVLQYSHMTQTSPLGHIGPPRNPVQNLLTPTNASLSFPVTLSQPTPIGQHQTSVSSMHLPMSGISSSIPNQSLTHLGVSSGQNEAPVTVKMSVGPSNMVPMASPVVPPARPVSLHQQPDVAFKPPQSNMSMMPRSATFPPHQVGISPGQPSSLRPMPVPISANHLLGPVSFPSPGISPSLPLPQQAGIPNLAFGVAPYHTHVKPPVLGTSKSGNFTFQSHLPNADYGQVYSGPNSQSGATQEPPSGPRPPPFGFAVPDQPRQIFPRTQFPGQVDQAVAFGGRSGSISNSIPPPRHGVFPYAGQPAPRSSAAQMGMKNFISAPQIPNLTSAGSQRGMPIRKSYATQMAWADISMPLNQKFVSNPPMASGKIAYATDQIYDPFSPTSAPPQHKGNPGK

SEQ ID NO: 8640 - protein, 389 aa, Glycine max
  misc_feature (1)..(389): Ceres Seq. ID no. 15178021
MTQTSPLGHIGPPRNPVQNLLTPTNASLSFPVTLSQPTPIGQHQTSVSSMHLPMSGISSSIPNQSLTHLGVSSGQNEAPVTVKMSVGPSNMVPMASPVVPPARPVSLHQQPDVAFKPPQSNMSMMPRSATFPPHQVGISPGQPSSLRPMPVPISANHLLGPVSFPSPGISPSLPLPQQAGIPNLAFGVAPYHTHVKPPVLGTSKSGNFTFQSHLPNADYGQVYSGPNSQSGATQEPPSGPRPPPFGFAVPDQPRQIFPRTQFPGQVDQAVAFGGRSGSISNSIPPPRHGVFPYAGQPAPRSSAAQMGMKNFISAPQIPNLTSAGSQRGMPIRKSYATQMAWADISMPLNQKFVSNPPMASGKIAYATDQIYDPFSPTSAPPQHKGNPGK

SEQ ID NO: 8641 - protein, 340 aa, Glycine max
  misc_feature (1)..(340): Ceres Seq. ID no. 15178022
MHLPMSGISSSIPNQSLTHLGVSSGQNEAPVTVKMSVGPSNMVPMASPVVPPARPVSLHQQPDVAFKPPQSNMSMMPRSATFPPHQVGISPGQPSSLRPMPVPISANHLLGPVSFPSPGISPSLPLPQQAGIPNLAFGVAPYHTHVKPPVLGTSKSGNFTFQSHLPNADYGQVYSGPNSQSGATQEPPSGPRPPPFGFAVPDQPRQIFPRTQFPGQVDQAVAFGGRSGSISNSIPPPRHGVFPYAGQPAPRSSAAQMGMKNFISAPQIPNLTSAGSQRGMPIRKSYATQMAWADISMPLNQKFVSNPPMASGKIAYATDQIYDPFSPTSAPPQHKGNPGK

SEQ ID NO: 8642 - DNA, 1302 bp, Triticum aestivum
  misc_feature (1)..(1302): Ceres Seq. ID no. 12586751
agtagttgctgcagcttgtcatcagcttcggattctgcaggttgaagcacacttgcatggcgaattactacaatccattcataattaactaagcgcaggcgtcgatgcatgtcctgttgtcttctcggtcatcttcttgatccaccaactccagctcgtcgtcgtcggcggcggggttggcgaaccggagcctgagccggccccctcgcgggacgcctgcagcagctccttcccggggatcaccacctgcgtcagcacgaaccgcccatccgcgcggaacgtccggaagcacacgcacggcttcccgccgcgcccgatcgatcgtatcggcggcgggaacgacggcggggactccctcagccctggttccgccgcagcagctgcgtccctcagcgttgcttcctgcctctccctccctcggagggcggcggccgcgtcggcgccgtcatccctgaccatgtcgtccgagtccaccgtgctctcggacccgagcccctctgtgcacagcagcagcgaagccgagctcttcttcaggcagaagctcgcgctcctcctgacgccgccgggggcggccgcggcgccagcgggcttcggcctgaggagcgcgtccagcgacgagtcgtccttgctcttctcggcctgactagcgatgtcgagccacgacgccgccgtagcgcgtgcatcagggagtggcacccgtggcaggacgtgtcgggcggcggcgccgtcgggcttctcgtggaagtggagctcaccgaagatctccgtgaaggacgacgggtccacggccggcagcagcttcttgtggtgggtgtggttgttgcaagccgacagcacctccagcagcgtggggttctccggcaacggcttctcgaacagccgccgcagcgcgccgtcccccatccaacaagcagcgcccctcagtcagtcagacgtaataaaaaggctgcagtattttttgtgaccgtcgaattttgctcaagtaatctccgaggaagagaggtatatatagcgagagaaaaggagaggccaggaaaggcggatgcttttatgtggctgtcgaatcgggattcggaaatttgtttcttgttttttaggcttttcatttcacaagtggagccggtatatactcctactgcaacttgggaggaactggaaacgtgcatcttgcacagttgtctctgttcttcagcactggcctgcacaacatgtcagggagatggaaatatgcaggtagagctgatgcagcattgcatttgcatttgcagctcgcacaaatttgatggtgatctttgccctggc

SEQ ID NO: 8643 - protein, 104 aa, Triticum aestivum
  misc_feature (1)..(104): Ceres Seq. ID no. 12586752
MSSHDAAVARASGSGTRGRTCRAAAPSGFSWKWSSPKISVKDDGSTAGSSFLWWVWLLQADSTSSSVGFSGNGFSNSRRSAPSPIQQAAPLSQSDVIKRLQYFL

SEQ ID NO: 8644 - protein, 84 aa, Triticum aestivum
  misc_feature (1)..(84): Ceres Seq. ID no. 12586753
MWLSNRDSEICFLFFRLFISQVEPVYTPTATWEELETCILHSCLCSSALACTTCQGDGNMQVELMQHCICICSSHKFDGDLCPG

SEQ ID NO: 8645 - protein, 64 aa, Triticum aestivum
  misc_feature (1)..(64): Ceres Seq. ID no. 12586754
MLLCGCRIGIRKFVSCFLGFSFHKWSRYILLLQLGRNWKRASCTVVSVLQHWPAQHVREMEICR

SEQ ID NO: 8646 - DNA, 1715 bp, Triticum aestivum
  misc_feature (1)..(1715): Ceres Seq. ID no. 12614112
ggatacgaacggcattggatctttcccaggtagcaggtacaatatcgaatcgaattatttacgacagcgacgcggtacggatcgagtcctctcgtctcgtctgtcgatttggattgcagcaccatgcagtgcatgcaagccggcctgccggctggctagttgccggcgagggcgacctgcccggcgacgaacgccctgaggttcctctcggacgagccgcccacggcagccgccgcccgcgccttctccctccacagcgccgccttggcgcgcaccacatccgacgtggcgaagccgacgcatctctgcagctcgtcggcctccagcacgccgtccttctcgctcacggcggccctgaccccggtgccgagctgccgctccaccagccacgcgttggtgccctggtccgtccactgcggcactcccaccaccggcacgccgcacgccacgctctccagcgtcgagttccacccgcagtgcgtcacgaagcaacccaccgccgggtgcgacagcaccttcccctggtcgcaccactccaccaccatgcccccgccggtgcacaagtcgtcgccgtcgacctcgccgcggttatccttcctcagcacccacaggaacgggcggccgatctccgccatgccgcgcgacacctccgtgatctgccgcttgctcatcgtcgacaggctcccgaaggagatgtagacgaccgaccccgcttcctgcgcgtccagccactccaggtaccccttgccgtcctgcttgaacaggtcgttgctgtcgttggccgccgccgctgccgaggcgtccaggaaggagaggacggggcctatggggacgacgttgatgccgtgctggtgcagcgtcgccaccgcgtcgggctccatggcatcgaacgtgttggcgagcacggtgggcgagtcctcgcggtccagcacgtcgagcagctcacggaacgcggcgagcacaaaggagtaggggtggtcgtcggacgcgatggtgaggaacgacggcaggtcgcgcaggcgcatcggcgggagcccccggacgcggacgtccgcccacgggtcgctcgctgcggcggtgacggcctggtcgaggccgtcagtgccgcggaagaagtggaagtaggcggcgagcacggaggccggctggatccagtagagcgcggcggggacgccgtgcgcgtgcgcgacgtcggcgacccaggagaggagcaccgtgtacaccacctgagtgacgggggtgccggcgtcgcggaggcgcgcgagcacgccgtccagcgtgcgggcccccacgaccttgaggttggacatgtagtgcatgctgtcgtgcgcggacctgtcgaagccgccgtcgtagccgtcggagtagggcacgtagcggacgccggcgccgtcgacgtggtccactgccgccgcgtccgcgtcgtccgggaacatcttgcggcaggcggagacggcggtggagacggtgacgcgggcgcccagcgcggcgcggagcaggcgcagcgcgaggtggcgcgccgggttgatgtggccctgtgccgggtacgtgaccacgaggaagtgcggcgcctcctcccccgcgcgctccatggccggcattgccgcgtgcgtgcgtgcgatgcgagtgcaagaagccaagagccaagaagccaagagcgtactaggtaagcaagagtgtccttgctggggtgggttgcggcgcgtggtggatgt

SEQ ID NO: 8647 - protein, 555 aa, Triticum aestivum
  misc_feature (1)..(555): Ceres Seq. ID no. 12614113
IRTALDLSQVAGTISNRIIYDSDAVRIESSRLVCRFGLQHHAVHASRPAGWLVAGEGDLPGDERPEVPLGRAAHGSRRPRLLPPQRRLGAHHIRRGEADASLQLVGLQHAVLLAHGGPDPGAELPLHQPRVGALVRPLRHSHHRHAARHALQRRVPPAVRHEATHRRVRQHLPLVAPLHHHAPAGAQVVAVDLAAVILPQHPQERAADLRHAARHLRDLPLAHRRQAPEGDVDDRPRFLRVQPLQVPLAVLLEQVVAVVGRRRCRGVQEGEDGAYGDDVDAVLVQRRHRVGLHGIERVGEHGGRVLAVQHVEQLTERGEHKGVGVVVGRDGEERRQVAQAHRREPPDADVRPRVARCGGDGLVEAVSAAEEVEVGGEHGGRLDPVERGGDAVRVRDVGDPGEEHRVHHLSDGGAGVAEAREHAVQRAGPHDLEVGHVVHAVVRGPVEAAVVAVGVGHVADAGAVDVVHCRRVRVVREHLAAGGDGGGDGDAGAQRGAEQAQREVARRVDVALCRVRDHEEVRRLLPRALHGRHCRVRACDASARSQEPRSQERTR

SEQ ID NO: 8648 - DNA, 531 bp, Triticum aestivum
  misc_feature (1)..(531): Ceres Seq. ID no. 12624458
  misc_feature (500)..(500): n is a, c, t, g, unknown, or other
  misc_feature (501)..(501): n is a, c, t, g, unknown, or other
  misc_feature (502)..(502): n is a, c, t, g, unknown, or other
tatactttctgggacgtttctgcttcacaagacaaaagacatggtggatggtctccaatcgaatttgcctatccgaattcctaaacacgcggatgaggatgcatatgaatctgaaggaattcctctcaggtctgctgctgatggcatccctctcaggtcacccaggggcaccgagggaattcctctcaggtctgccgccgatggcattccactcaggtcatcatcgaggggcacagaatcgttccgctcgacatcatgaccatgagacgcttgaaggcaacgttggtcaaatcatggtgcctcaatgcattatacctgggaagggaagaatctccattctttccccggatagaactccttaggttttgactgtaggactgggaaggtaaaacggctcggcgccccttgtaattgttgagactttggcacagaagtttggggcttacatcagttatactatatatacgtctctgggcaagataattagaatggccaaggannnaagttttgaacatgccttttcttttttcc

SEQ ID NO: 8649 - protein, 119 aa, Triticum aestivum
  misc_feature (1)..(119): Ceres Seq. ID no. 12624459
YFLGRFCFTRQKTWWMVSNRICLSEFLNTRMRMHMNLKEFLSGLLLMASLSGHPGAPREFLSGLPPMAFHSGHHRGAQNRSARHHDHETLEGNVGQIMVPQCIIPGKGRISILSPDRTP

SEQ ID NO: 8650 - protein, 104 aa, Triticum aestivum
  misc_feature (1)..(104): Ceres Seq. ID no. 12624460
MVSNRICLSEFLNTRMRMHMNLKEFLSGLLLMASLSGHPGAPREFLSGLPPMAFHSGHHRGAQNRSARHHDHETLEGNVGQIMVPQCIIPGKGRISILSPDRTP

SEQ ID NO: 8651 - protein, 89 aa, Triticum aestivum
  misc_feature (1)..(89): Ceres Seq. ID no. 12624461
MRMHMNLKEFLSGLLLMASLSGHPGAPREFLSGLPPMAFHSGHHRGAQNRSARHHDHETLEGNVGQIMVPQCIIPGKGRISILSPDRTP

SEQ ID NO: 8652 - DNA, 1447 bp, Triticum aestivum
  misc_feature (1)..(1447): Ceres Seq. ID no. 13495628
ggccaaacataattaccatttaacacttgatacatcaggtaactgggatgatccatccatcccaaacacggcaacacacactctctggcgcatctccagacggcacacacacagcacgcacacatctctatcgtttcgtacacagagctcaaggaccgcgcgtgtcaggcattaccaccagcgcggtgctccactccactagtttgctaagccccaaagcaccgtccttcgtagttcgtacacataaccacgtacgtacgcacgcgcacgagaacgccaacacaccactcatataacgtacgcctgccggcggcgagcgagctcacgagctcagagctggtggcagctgctctccagcggcgccccacggtggcacatgttgtgctcgtagggcttgcagccgtgccgcatgacgccgtgcagcttggggagcggcccgcagaggttgttgtagctgaggtccagcgtctgcagcgtggacagcgcctccagcgacctgggcacggtgccgctgatgcggttgtggctcaggtccaggtacgtgagctccttggggaacttgagcttgctcaggtcgaactcgaggttgttgtaggacaggtccaccttgccgatgggccgcccctcggagaagaggaaggacgcgtcgccgctcagctggttgtgcgacagatccacggtgttgatctcgtcctgcgcgtcgtcgcgcgggatcgggcccgtcagctggttgtaggacagcaccagcgaccggaactgcccctgcacgaggctggccgggatgtggccggtgagctggttccggcggaggtccagcgaccggaggttgggcatgtcggcgaaggagttggggatggagcccgtgagcttgttgttggagaggtccacggagtcgaggctgtggaggcgcgccagggactccgggatggagccggagacgttggtgtgggagacggtgaggaactcgagcttggagagggaggtgaggcaggccgggatggagccctggaggcccgggaggcggaagagcgagagcgacatgagcgccgtcagccccgccagcgcggacgggatctggccgcgcacgtcgtcggcgccgtcgatgaagacgttgttcacgcggccggcctcgttgcacgtgaggtggtcccacgcgcagcagtccgccgacgccggcgaccacgtcttcagcgtcgccgggctgcccagcgcctgcttcacccggagcagcgcctgccggtccgcctgcgggcaccgctggggcagcggcgagcaatgcgccgtcgccaccagcaggagcgccagcagcgggaggaaggaggcggtcgacgccatcgtggccctgtggctgtgggtggctgctaccttctactagctcagctttgctagctagctatggaggaggaggccaaggtggcggaagtgttgagtgcgggagtgatgagct

SEQ ID NO: 8653 - protein, 197 aa, Triticum aestivum
  misc_feature (1)..(197): Ceres Seq. ID no. 13495629
MWPVSWFRRRSSDRRLGMSAKELGMEPVSLLLERSTESRLWRRARDSGMEPETLVWETVRNSSLEREVRQAGMEPWRPGRRKSESDMSAVSPASADGIWPRTSSAPSMKTLFTRPASLHVRWSHAQQSADAGDHVFSVAGLPSACFTRSSACRSACGHRWGSGEQCAVATSRSASSGRKEAVDAIVALWLWVAATFY

SEQ ID NO: 8654 - protein, 180 aa, Triticum aestivum
  misc_feature (1)..(180): Ceres Seq. ID no. 13495630
MSAKELGMEPVSLLLERSTESRLWRRARDSGMEPETLVWETVRNSSLEREVRQAGMEPWRPGRRKSESDMSAVSPASADGIWPRTSSAPSMKTLFTRPASLHVRWSHAQQSADAGDHVFSVAGLPSACFTRSSACRSACGHRWGSGEQCAVATSRSASSGRKEAVDAIVALWLWVAATFY

SEQ ID NO: 8655 - protein, 173 aa, Triticum aestivum
  misc_feature (1)..(173): Ceres Seq. ID no. 13495631
MEPVSLLLERSTESRLWRRARDSGMEPETLVWETVRNSSLEREVRQAGMEPWRPGRRKSESDMSAVSPASADGIWPRTSSAPSMKTLFTRPASLHVRWSHAQQSADAGDHVFSVAGLPSACFTRSSACRSACGHRWGSGEQCAVATSRSASSGRKEAVDAIVALWLWVAATFY

SEQ ID NO: 8656 - DNA, 491 bp, Triticum aestivum
  misc_feature (1)..(491): Ceres Seq. ID no. 13584184
ctttctccttttatgtctgtcgcaagacatgcaaggaatgcgggccgacgctatcgacatgccccttgtgccgcgcgccaatcactgtccgtgtaaggctcttttcataaagatgatgcagacttctggaagtgaagaatcagccattcatgcaatatgttatcggcagtaatcaaggagcaagaagttgggcgggcaaggagatatgtacatgttcataaagctttactgtataacatgtccagcgccaactgtttcggctgtctgagtctgatgaataatttccatcacctcttgtgcagtttattcctgtcatcttgtaaaaaaagtagcagcagtagtcgtagttgaaaatcgtgttttcctgtaaaacctaaatgaatcaatacttcctccgtttttatttagttcgcgtattagctttagtcaaagtcaagctttgtaaactttgaccaattttataaacaaaaatattaacatatacgaaaact

SEQ ID NO: 8657 - protein, 64 aa, Triticum aestivum
  misc_feature (1)..(64): Ceres Seq. ID no. 13584185
MLSAVIKEQEVGRARRYVHVHKALLYNMSSANCFGCLSLMNNFHHLLCSLFLSSCKKSSSSSRS

SEQ ID NO: 8658 - protein, 56 aa, Triticum aestivum
  misc_feature (1)..(56): Ceres Seq. ID no. 13584186
FLLLCLSQDMQGMRADAIDMPLVPRANHCPCKALFIKMMQTSGSEESAIHAICYRQ

SEQ ID NO: 8659 - protein, 47 aa, Triticum aestivum
  misc_feature (1)..(47): Ceres Seq. ID no. 13584187
MQGMRADAIDMPLVPRANHCPCKALFIKMMQTSGSEESAIHAICYRQ

SEQ ID NO: 8660 - DNA, 1278 bp, Triticum aestivum
  misc_feature (1)..(1278): Ceres Seq. ID no. 13584646
agatcaaattgcagtttctccttgattcatccatgatgatgagtaattaagcgcactggcaaacaatcaaagctaactagtaattaaacagtataggagcacctaaaacaaaacaaggagaccacaaacaacactgatttgtgaagctggaaagaaagaaagaaaggaacaagaatcaaaagagggggatcgagagtggagacaccttgctcgctggctagagctagagctagagctagaaggccggcggtggcggccggaaggagccaaacacatcgtgcgccatctgaccgccgccattaggcatctgcaggtttggcggcaagttgtagaatggcatcgacgacgggtctggcagtccgggcacgcccacggccgcacccatcccgccgtttcctcccggagccggcccgtccggcagctgcatgccgtcggatccggtggctgccgcggccgcctcgccaggctcttcatctgcgagcgggaggcgctcgtaggtggcgttggagaaggtagcagcgacgaccatgacgggcccagacgcgacgagctccccgatgacggtgccccccacgacctggccctgcccgccggcgaggtagacggcgaggccggtcgcccccggcgggcagggcgacgggaggaaggcgccggagagggagaggatctcgaagcggccgtggagcgtgacgacggagccgggcggcgcggcgggctggcgcagggtgacgttgccgacgacgccgctgccggagagcacggagaccccgcgctggcggcggcgcgcgaaggtggacaccgcctccatgatgtcggcgccgctggcgatctccagcacgtgggagcgcagcgtgttggggctctcccgcgtgatgatgatgggcggcttgggcttgttcttggaccccgcgggcctccctcgcggccgccggcccgacgacgagcccccgccgccgctgcctccgcctcctccggacgggcctgagcctgagatggcggcgttggggttaggggagttgtcgcccgcgccggcggtgggggagtcctgcgctgcgccggaggagtcgtcgtggttgttgctcccgctgctgtttggggtcgtcggggcctgctcggcgccgcccatggcagcgccgccggcagctgggccgccgaactgcgccaggtggttgcggagatccaggccgcccatgctccctgcccaccacgccatcgatcctctctctctctcaccgttagaggggggagagcactgctctgagtggagttgatgttttt

SEQ ID NO: 8661 - protein, 154 aa, Triticum aestivum
  misc_feature (1)..(154): Ceres Seq. ID no. 13584647
MMSAPLAISSTWERSVLGLSRVMMMGGLGLFLDPAGLPRGRRPDDEPPPPLPPPPPDGPEPEMAALGLGELSPAPAVGESCAAPEESSWLLLPLLFGVVGACSAPPMAAPPAAGPPNCARWLRRSRPPMLPAHHAIDPLSLSPLEGGEHCSEWS

SEQ ID NO: 8662 - protein, 153 aa, Triticum aestivum
  misc_feature (1)..(153): Ceres Seq. ID no. 13584648
MSAPLAISSTWERSVLGLSRVMMMGGLGLFLDPAGLPRGRRPDDEPPPPLPPPPPDGPEPEMAALGLGELSPAPAVGESCAAPEESSWLLLPLLFGVVGACSAPPMAAPPAAGPPNCARWLRRSRPPMLPAHHAIDPLSLSPLEGGEHCSEWS

SEQ ID NO: 8663 - protein, 132 aa, Triticum aestivum
  misc_feature (1)..(132): Ceres Seq. ID no. 13584649
MMMGGLGLFLDPAGLPRGRRPDDEPPPPLPPPPPDGPEPEMAALGLGELSPAPAVGESCAAPEESSWLLLPLLFGVVGACSAPPMAAPPAAGPPNCARWLRRSRPPMLPAHHAIDPLSLSPLEGGEHCSEWS

SEQ ID NO: 8664 - DNA, 1475 bp, Triticum aestivum
  misc_feature (1)..(1475): Ceres Seq. ID no. 13584853
aaccatcaccgcacccagcccatactttctatatggcgcgagagctgccttcttttgtttcctctcccgatttagtcttcctctcggatgatgagggagaaaaagaggtgatcaagattgaggattcagactgcggtggcgacacgcatgtctacctcagctctgacgaggaggacgacgcggtctacgccgatgatggctcctcctacgccaactgcaaagccgcatctgcggctgccacgtctttggccacggtgagctgcaccgactatggcgacgacaaccccaatggcggcgactctaatggggacggcaaccccaacaacagctacttcgatgacaacgacaacgactctgaagatggcggtgacgacgccagcgatttttcgtcggccgccacaagtaagtcgccaaaagccccatacaattattggcatcccaccgacctctgcaccctcgtggaaatagatgggcagctcctcaaggattttgaaggcgcgacagtaccatcgtctgtgctctatgaggcgtttatggaggatccacggccgatccgccgtggcgggctgacctcaagaaaaatctcatacaaaaggtatcagttgaaaaaaaaaattcgtgccttctgcaagttggatccgaggcgtgccttccgtacgtgtcgcacggctcaagaacgcaagttttacacctgctgcaaggaggcgtggcctcatattgtagaagagggccgtgtctgacttgctaataagaagtaaaccacagtcatgttcaatccggtcttttttggtttcaccaataaacaatagtagctttctttcccattttttccatgatcagtattactctggatttgatctgtttttcctttgcttgtattagtttatttttcttttgctttgtatgagattgttcagtacaagaatcatcagtacttttatttagcagtccacaattttattttattttattaaaaaaaaaaaaaaaaaaaaaaaaaaaaaaaaaaaaaaaaaaaaaaaaaaaaaaaaaaccaaaaaaaaaaaaaaaaaggtttttcattcccgccaacctcagggggggccccggaaccaatttcccccaaaagggagtcaaataacccgcccccctgggccgccttttaaaaacgccgggatgggaaaaccccgggggttcccaaattaaatccctttgaaaaaaatccccttttccccagttggggaaaaacaaaaaaggcccgccccaatcccctttccaaaaatttgcccacccgaaagggaaaaggaaatttgaaaccgtaaattttttgtaaaaatccccgtaaaatttttgtaaaaccacctcattttttaaacaaaaaggccaaattcggaaaaaccctttataattcaaaaaaaaaaaccaaaaaagggttaagggttttcccatttggaaaaaaaagcccactataaaaaaacgggaaccccaacgcaaaaggg

SEQ ID NO: 8665 - protein, 245 aa, Triticum aestivum
  misc_feature (1)..(245): Ceres Seq. ID no. 13584854
PSPHPAHTFYMARELPSFVSSPDLVFLSDDEGEKEVIKIEDSDCGGDTHVYLSSDEEDDAVYADDGSSYANCKAASAAATSLATVSCTDYGDDNPNGGDSNGDGNPNNSYFDDNDNDSEDGGDDASDFSSAATSKSPKAPYNYWHPTDLCTLVEIDGQLLKDFEGATVPSSVLYEAFMEDPRPIRRGGLTSRKISYKRYQLKKKIRAFCKLDPRRAFRTCRTAQERKFYTCCKEAWPHIVEEGRV

SEQ ID NO: 8666 - protein, 235 aa, Triticum aestivum
  misc_feature (1)..(235): Ceres Seq. ID no. 13584855
MARELPSFVSSPDLVFLSDDEGEKEVIKIEDSDCGGDTHVYLSSDEEDDAVYADDGSSYANCKAASAAATSLATVSCTDYGDDNPNGGDSNGDGNPNNSYFDDNDNDSEDGGDDASDFSSAATSKSPKAPYNYWHPTDLCTLVEIDGQLLKDFEGATVPSSVLYEAFMEDPRPIRRGGLTSRKISYKRYQLKKKIRAFCKLDPRRAFRTCRTAQERKFYTCCKEAWPHIVEEGRV

SEQ ID NO: 8667 - DNA, 1274 bp, Triticum aestivum
  misc_feature (1)..(1274): Ceres Seq. ID no. 13585458
gtagtaacaatatactttcgattaatatcaccgccttgaatgatatataaattataaaaggcaagagtgggcgggagagcgtatcttgtacgcctgcctcctccatttcccacacagccttttcccatttgccaatacacgactcatcacagccctagagacccagacccacacccagccaaacttttctcacctagaaagacgcaccgacaccacacacacccccaccacccgatacagtttacaacgactcaaggcaaacgaccgtacactcccaatgactgaccgactcacttgaccgtagcagctagccgcgtagtagcattaccagtactccgattggcaacggaatcatggtgggttcagctgtactgcacgaaggagcggtagaaggtgttgggcctccagttggccgggatgaccttgttggcgacgagcgtcttgccggactcgttgcggatgcggatggagaagggcgcctggaggcggtggttggagtcgaggcgccacacggagccccacgactccctcatcctcgtccacttgccgccgcccggcccccgcgactccatgaggtccacctgcaccacgtcgccgtcgccgtcctcgtactccaccagcaccgcgaagtagacggggttcgagtactcctccacgtggaacccgatcttcagccccgggaactcacacggcacccgtgtgaactcgatgtcgatgatgccggagtggcggagcctgtcgttgaggccgggcttggcgagcctgccgaacgccgtgccgctgaggtcgaagtggaagggcgccaccgggtagtagttcatgtcggtgatgatcaccgtctccgtcctgccggagcaggacatgtccttcctgcatctgatcttgtagcatgagccgcaccccttgccgtccttgaacaatggctggttgccgcaggaggtcatggacgcgaacgggtactggttggtgtgcttgaagccgcaggcaccgccgttgtcgtcggggccggcgccgttgggctggccgtaccaagtcgccctggccggggtccaggggccccagtacttggtggcgtcggtggcgttcaggtcgacgtcgaagggggaggggtcggtggtgttgaggtccacggcgccgccgacggcgaggaagcagagaagcgccgcgagcacggcgagggaggggagggggagggagcccatgccgcgcgctgtggcgtgtggatctgacgagtggcggtggggagtgagtgatggtgtgctcggttcctgtgt

SEQ ID NO: 8668 - protein, 179 aa, Triticum aestivum
  misc_feature (1)..(179): Ceres Seq. ID no. 13585459
MVGSAVLHEGAVEGVGPPVGRDDLVGDERLAGLVADADGEGRLEAVVGVEAPHGAPRLPHPRPLAAARPPRLHEVHLHHVAVAVLVLHQHREVDGVRVLLHVEPDLQPRELTRHPCELDVDDAGVAEPVVEAGLGEPAERRAAEVEVEGRHRVVVHVGDDHRLRPAGAGHVLPASDLVA

SEQ ID NO: 8669 - protein, 110 aa, Triticum aestivum
  misc_feature (1)..(110): Ceres Seq. ID no. 13585460
MDANGYWLVCLKPQAPPLSSGPAPLGWPYQVALAGVQGPQYLVASVAFRSTSKGEGSVVLRSTAPPTARKQRSAASTAREGRGREPMPRAVACGSDEWRWGVSDGVLGSC

SEQ ID NO: 8670 - DNA, 478 bp, Triticum aestivum
  misc_feature (1)..(478): Ceres Seq. ID no. 13589012
ctgaatctaggttttctttcctcttccccaccctggggaaagtagggttcgacgggaacaatcgaacttggcgagagctggtgagatggagacggagacgatggaggctggaagaaagagagagcgtctgatggagacggcgaaatcggggagaaagcgggcggggaaaaagaaggcgtcgaatgcggtgtcgttttttatgcaattgacggttgattcagcgaagatggtcgaagagggaaggctgaagcgagcggtggcgaggcggaacgaggagaactccggcgtggcgccgatcgtgccggaggcgctcacggagcaggagcgggcggcgctgctgcaggaagagatggcgagggagaagatattgtcgcgcgagcgctccctgcagatgcacgcggagagactaagggaaaaagaggagaggccccgggcgccgccgggtccgaaccaagaagacgagtctgaacaggattac

SEQ ID NO: 8671 - protein, 131 aa, Triticum aestivum
  misc_feature (1)..(131): Ceres Seq. ID no. 13589013
METETMEAGRKRERLMETAKSGRKRAGKKKASNAVSFFMQLTVDSAKMVEEGRLKRAVARRNEENSGVAPIVPEALTEQERAALLQEEMAREKILSRERSLQMHAERLREKEERPRAPPGPNQEDESEQDY

SEQ ID NO: 8672 - protein, 126 aa, Triticum aestivum
  misc_feature (1)..(126): Ceres Seq. ID no. 13589014
MEAGRKRERLMETAKSGRKRAGKKKASNAVSFFMQLTVDSAKMVEEGRLKRAVARRNEENSGVAPIVPEALTEQERAALLQEEMAREKILSRERSLQMHAERLREKEERPRAPPGPNQEDESEQDY

SEQ ID NO: 8673 - protein, 116 aa, Triticum aestivum
  misc_feature (1)..(116): Ceres Seq. ID no. 13589015
METAKSGRKRAGKKKASNAVSFFMQLTVDSAKMVEEGRLKRAVARRNEENSGVAPIVPEALTEQERAALLQEEMAREKILSRERSLQMHAERLREKEERPRAPPGPNQEDESEQDY

SEQ ID NO: 8674 - DNA, 766 bp, Triticum aestivum
  misc_feature (1)..(766): Ceres Seq. ID no. 13596075
cccccctccagtttgcaagaaagctaccaccattctctggcatcgacaccaacttttttgatctgaaccatggatgacatcgtaactcttagttttgcaactatgatgttgcctgttgtctgtgaagtacagttgtaattatttacggcagcagtttgatatcgtgctcttataactttcatcaggttgctaaagatggacttcccttgccaactgacaggacgctgtgccctctgtgctgccaaaagcgcaacaacccgtctgttctttctgtttctggttttgtgttctgctacagttgcatattcaagtctgtctctcagcataaaagatgtcccgtgacattgatgcctgccactgttgagcaaatcaggcgcctcttccatgatttatagcttgaataggcgcagttcaactaaaggaagtactccctctgtaaactaatataagagtatttagatcactaaagtagtgatctaaacgctcttatattagtttacggagggagtagcttatatgggctcaaggctgctagggactctggggcgagaagaagcttttcccgcattcctgttgatgcagagatcacacgagatacagtttctgcttcacgtaatatccatacagctcttgtgccatttttgttgtttgttgaaacttcaacagagatttagaccgtgtaataattactgctaggtgattattgagttgatttattaaagggggggttgaaaaaaaaaaaaaaaaaagcttatcgataccgtcg

SEQ ID NO: 8675 - protein, 59 aa, Triticum aestivum
  misc_feature (1)..(59): Ceres Seq. ID no. 15221760
MGSRLLGTLGREEAFPAFLLMQRSHEIQFLLHVISIQLLCHFCCLLKLQQRFRPCNNYC

SEQ ID NO: 8676 - protein, 48 aa, Triticum aestivum
  misc_feature (1)..(48): Ceres Seq. ID no. 15221761
MDFPCQLTGRCALCAAKSATTRLFFLFLVLCSATVAYSSLSLSIKDVP

SEQ ID NO: 8677 - protein, 39 aa, Triticum aestivum
  misc_feature (1)..(39): Ceres Seq. ID no. 15221762
MQRSHEIQFLLHVISIQLLCHFCCLLKLQQRFRPCNNYC

SEQ ID NO: 8678 - DNA, 922 bp, Triticum aestivum
  misc_feature (1)..(922): Ceres Seq. ID no. 13596572
aacatctatgaaacgttttctataatactccagcaaaatcgttgggtttaattcttacaaatcacggtgtattcctgtgctcaaaatctgcctcatcattacgatagacggcattatttttacagaaccacgcagagaaagccaaacaggcttgattaatcagtactcgttgaaatgtatggcgccgagcttccacacgaggtacgtggtcccgaacatgacggtggtgatgatcccgaaggacgcggcgacgatgagcacgtccgtgcccacgggcagcgccgccagccagtcgaacgtccacccgtccttgggcatgccgcgcttggtgtcgtccagcaggttgctcggcgcctccggcagccccgaccgcttccgcccgcccttcttcccgccgtccgtctcccgcagcgcgtccagcacccggctcccgaactccggcttggacgatgaagagcccttcttgtccgccggcgacgccccgccccctggctccgcgtacttgcccagcacgcgcgccgcgcgcagccgctcccgcgccgtcagcggcacccgcttcggcggttcgcccggctgcggctgctggccgttgccggacgccaccgggttcacgccagcgctgatggttgtactttcctgcgcctccgccggcgccgcccggtcgttgtccgtggtcgcgcagggtcttgcgtgcttgagctcattctgaggcctttgcggggcggcagcggttcctatcttgtggaaagcatgcctggagcagaaggcgagctgggtgtaggacggggaagatctggagatgcctcctagtttggcagtggcagtcttggagggagaggaaccgaggctggtggcagccatcttcttctcacctgctcggccactgcattttgtgctctaggccagaagagatagaatttgt

SEQ ID NO: 8679 - protein, 176 aa, Triticum aestivum
  misc_feature (1)..(176): Ceres Seq. ID no. 13596573
MAPSFHTRYVVPNMTVVMIPKDAATMSTSVPTGSAASQSNVHPSLGMPRLVSSSRLLGASGSPDRFRPPFFPPSVSRSASSTRLPNSGLDDEEPFLSAGDAPPPGSAYLPSTRAARSRSRAVSGTRFGGSPGCGCWPLPDATGFTPALMVVLSCASAGAARSLSVVAQGLACLSSF

SEQ ID NO: 8680 - protein, 163 aa, Triticum aestivum
  misc_feature (1)..(163): Ceres Seq. ID no. 13596574
MTVVMIPKDAATMSTSVPTGSAASQSNVHPSLGMPRLVSSSRLLGASGSPDRFRPPFFPPSVSRSASSTRLPNSGLDDEEPFLSAGDAPPPGSAYLPSTRAARSRSRAVSGTRFGGSPGCGCWPLPDATGFTPALMVVLSCASAGAARSLSVVAQGLACLSSF

SEQ ID NO: 8681 - protein, 159 aa, Triticum aestivum
  misc_feature (1)..(159): Ceres Seq. ID no. 13596575
MIPKDAATMSTSVPTGSAASQSNVHPSLGMPRLVSSSRLLGASGSPDRFRPPFFPPSVSRSASSTRLPNSGLDDEEPFLSAGDAPPPGSAYLPSTRAARSRSRAVSGTRFGGSPGCGCWPLPDATGFTPALMVVLSCASAGAARSLSVVAQGLACLSSF

SEQ ID NO: 8682 - DNA, 780 bp, Triticum aestivum
  misc_feature (1)..(780): Ceres Seq. ID no. 13596994
gatttctctcccacttccaccaccaccgccatggccgccgccccccatatccgccgtgcggccgccactcctctccggcgagccgccgcctccgtctgcaccaggcctcttgcccaactctgccaccgcgcctcgtcccacaccactcgccgccccctctgtgacggggcgcctgcacagatcccacccaagatccggcgtgagatcaccagggtcgagttggccggcatttccttccaccgtgagctcgccaaggagcttaggcagctcagcatgagggttacccgaggccaaggtgcggcgagggtgaacacggcggacgccgccatgcaggtcggggtggtttcgtggcgtgtctgcgcagccgtggttgccgtgacggtggcagcggggctcgggctagcgcaggtcgccaaggaccgctgggaggccgattgccaattggccgcctgtaaccttgtcaccgcaaagctggacaaattgggcaaagatctggaggattgcttggtccggtgcatccagcagaagaaggcaacggcggacgcaaatgcgtttcttgaggagcagaggcacaaggaggtctttgcaagggaggcggagctcgccctttgggagtctgagataatcaagagagagtccaagtaaatgtgttcggttgcaggaaatattgtagtatgatagtagtgtgctgaatgtactagtaagtaagtattgtgacatctacagccgattgatttcgattctgctagcttgggcttcaagtttgtgcggagaccatcc

SEQ ID NO: 8683 - protein, 214 aa, Triticum aestivum
  misc_feature (1)..(214): Ceres Seq. ID no. 13596995
DFSPTSTTTAMAAAPHIRRAAATPLRRAAASVCTRPLAQLCHRASSHTTRRPLCDGAPAQIPPKIRREITRVELAGISFHRELAKELRQLSMRVTRGQGAARVNTADAAMQVGVVSWRVCAAVVAVTVAAGLGLAQVAKDRWEADCQLAACNLVTAKLDKLGKDLEDCLVRCIQQKKATADANAFLEEQRHKEVFAREAELALWESEIIKRESK

SEQ ID NO: 8684 - protein, 204 aa, Triticum aestivum
  misc_feature (1)..(204): Ceres Seq. ID no. 13596996
MAAAPHIRRAAATPLRRAAASVCTRPLAQLCHRASSHTTRRPLCDGAPAQIPPKIRREITRVELAGISFHRELAKELRQLSMRVTRGQGAARVNTADAAMQVGVVSWRVCAAVVAVTVAAGLGLAQVAKDRWEADCQLAACNLVTAKLDKLGKDLEDCLVRCIQQKKATADANAFLEEQRHKEVFAREAELALWESEIIKRESK

SEQ ID NO: 8685 - protein, 123 aa, Triticum aestivum
  misc_feature (1)..(123): Ceres Seq. ID no. 13596997
MRVTRGQGAARVNTADAAMQVGVVSWRVCAAVVAVTVAAGLGLAQVAKDRWEADCQLAACNLVTAKLDKLGKDLEDCLVRCIQQKKATADANAFLEEQRHKEVFAREAELALWESEIIKRESK

SEQ ID NO: 8686 - DNA, 687 bp, Triticum aestivum
  misc_feature (1)..(687): Ceres Seq. ID no. 13597974
ctcgaccgatccccctcctcgacctgcctcgccgccgcctaggtaagctccacacgcttcgccatcgacctgctcgccatgtaccgaccaagcttcagctcgagctcgggatagccgtcgatgtcgcttccccggtcacctccagccgccttcttcaagtcggtctgcctccccgtcgtccccttcgtccgctgcttccactacatcgccgacgcagacgccaagttccgcgcctggctcttcctctgcttcctctacttcgcggacagcagcctcgccaggttcagagctcgtctgcgtcgctgcaggctcgactccgtcgccgtatacttgtgcttggagccaggagacgagtacgtgcatgaggaacctgttgagtacgcttacgaggatccatccttcgacaactctgagaaccttgcaggtgccgaggatactggcgcagatggcgcaactgagctgaagtgggaattcgatgaggcccttggtcgttactatgtatcgtttccagatgatcaatagtggggcccaggggacgatcggggatctaacatttggggttgtcttcttttcatttgaacttggccgtagccggtctatgagtgtatttgaatgatgtatgatcttaatttatgtattgtgtgaagtggcgattgtaagccaaccctctttatcccattcttgttc

SEQ ID NO: 8687 - protein, 133 aa, Triticum aestivum
  misc_feature (1)..(133): Ceres Seq. ID no. 13597975
MSLPRSPPAAFFKSVCLPVVPFVRCFHYIADADAKFRAWLFLCFLYFADSSLARFRARLRRCRLDSVAVYLCLEPGDEYVHEEPVEYAYEDPSFDNSENLAGAEDTGADGATELKWEFDEALGRYYVSFPDDQ

SEQ ID NO: 8688 - protein, 120 aa, Triticum aestivum
  misc_feature (1)..(120): Ceres Seq. ID no. 13597976
RPIPLLDLPRRRLGKLHTLRHRPARHVPTKLQLELGIAVDVASPVTSSRLLQVGLPPRRPLRPLLPLHRRRRRQVPRLALPLLPLLRGQQPRQVQSSSASLQARLRRRILVLGARRRVRA

SEQ ID NO: 8689 - DNA, 788 bp, Triticum aestivum
  misc_feature (1)..(788): Ceres Seq. ID no. 13598139
aattcgcacgagatccwttmccccctccagtwmcawcytwatygtgtttaaamaccattgtcgcgcgcagcagctcgatcgtagacaagtgcagtgtatacttgtgtggcaggcggcgagcgacagaagagaggcggagcttggaggtggatcataggctgatagcgcgcacggtgctcccctctcctcctcatcgttttcgttgtggccttgtgtggtagagggcgatggagtgcaggaagatgaagcccgtccttgctctcgtgctgctgctgtcgtgccatcttcttcttccgctggtctcctctgtgcccgtgtcgagaagcgtgtccttggcaaatcatcaagcctcagcttctagtctgactccggaggcggtgcctgttcagggcgtcgtgacgacgggcgccgaggagcaaagcgtcgtcggcgaagtggtggcgcggatggacatcgagatcaacgactaccctggatccagcgccaacggccgccatgagccgcctaggagccctgggagggggtgaagtcgatccgcagaacctccgtgtatagggagattagtaatgggttagtctagtctagatagcacttgttggtgatgactcatgagttcaacgggttaaacatgtccgagcaaggaaagaagcattctaactactttctaatagtgtcaaaattggtcttacaaaaaaaaaaaaaaaaaaaaaaaaaaaaaaaaaaaaaaaaaaaaaaaaaaaaaaaaaaaaaaawtaaaaaaaaaaaaaaaaargyttatcgatmccgyc

SEQ ID NO: 8690 - protein, 99 aa, Triticum aestivum
  misc_feature (1)..(99): Ceres Seq. ID no. 15222258
MECRKMKPVLALVLLLSCHLLLPLVSSVPVSRSVSLANHQASASSLTPEAVPVQGVVTTGAEEQSVVGEVVARMDIEINDYPGSSANGRHEPPRSPGRG

SEQ ID NO: 8691 - protein, 94 aa, Triticum aestivum
  misc_feature (1)..(94): Ceres Seq. ID no. 15222259
MKPVLALVLLLSCHLLLPLVSSVPVSRSVSLANHQASASSLTPEAVPVQGVVTTGAEEQSVVGEVVARMDIEINDYPGSSANGRHEPPRSPGRG

SEQ ID NO: 8692 - protein, 72 aa, Triticum aestivum
  misc_feature (1)..(72): Ceres Seq. ID no. 15222260
  misc_feature (5)..(5): Xaa is any aa, unknown or other
  misc_feature (6)..(6): Xaa is any aa, unknown or other
  misc_feature (10)..(10): Xaa is any aa, unknown or other
  misc_feature (11)..(11): Xaa is any aa, unknown or other
  misc_feature (12)..(12): Xaa is any aa, unknown or other
  misc_feature (13)..(13): Xaa is any aa, unknown or other
  misc_feature (14)..(14): Xaa is any aa, unknown or other
  misc_feature (17)..(17): Xaa is any aa, unknown or other
FARDXXPPPXXXXXCLXTIVARSSSIVDKCSVYLCGRRRATEERRSLEVDHRLIARTVLPSPPHRFRCGLVW

SEQ ID NO: 8693 - DNA, 1421 bp, Triticum aestivum
  misc_feature (1)..(1421): Ceres Seq. ID no. 13598722
gagagttgtactgtagttatattataggcgtcgaatttaccagagccgggcgaacacataccataggttcaacataagatggatcacagtatcaacataataaacatggacaggtgaataaggcagatgggcacaacgagctaataagaaaccaaccaactttgctgcatacaagcttgaatagatgggacagatatgatgttgaacggctaggctcagcagcatcatataaaatccccaagttcttcggaataacggaggatcccgtcctcgctgctggcgaagcggaagcggctgaagtcaatcttgttccactcttccctcagctcctcccaaaatttgccactgttgtcatagtagtcttcgtcaacctcggcgtaccccttctcgatcagatccttgcggaccttggcctgcaactctccaaacctgtcatcggcctccttgtcgttccccggcggcagctccttgtccagctcctcgcttctcttgatcatatcagcgggggatattgtggacggaaggatgtggatgttggggggctcccacttgtcggccaagatcagccttatgtcgtttttcagcagacgaaccttgcctggggcggccacgtccctgtactcgggcttggactgctcgaggaccctctccaccgcggcatccagctcttgaggttccagattggcggcctcgggaaagtttaacaacgtctccctgaccactggccggtgcttcgcaaattcagactcccagtcataatcatgatcatcctcgtattcagattcataatcatcatcgtcatattcagactcatagtcatcctcatcctcatcataataaccatcatagtcagcatcatcttgataataaagatcggcatcctcatcagcataaacatcctgttccccagcctcagcctgaggctcagaaacaggctcctgaatctccgcctcagcctgaagctcagaaacaggctcctcgatctctgcgtcagcctgaggcccagaaaacgttgccttagcgatgccctgctccaggaaggggtcgaccaccataggctcggcggcggccacagacacaacatcagcgcgtctggggagttttgccgtggccagaatctcattgatctccttttcctgctcctgctcttcatcatgatcctgatctgcctccttggccttccttttcagaagagcatactcgcggtttaacgccgtaggctcggtggcgcatcgctccggcgtgccgaacccgtcgatggctgacttctgctgcgcgggattggaggaaatctcttcggccgtgcaccgccccagcacgcgcttggtggcgaaaccctcgttgccggccatcggcggatgtgatcctgatgccgaatccactcgcttcgccaagtttagtgagattgggatttgttgtag

SEQ ID NO: 8694 - protein, 149 aa, Triticum aestivum
  misc_feature (1)..(149): Ceres Seq. ID no. 13598723
MIILVFRFIIIIVIFRLIVILILIIITIIVSIILIIKIGILISINILFPSLSLRLRNRLLNLRLSLKLRNRLLDLCVSLRPRKRCLSDALLQEGVDHHRLGGGHRHNISASGEFCRGQNLIDLLFLLLLFIMILICLLGLPFQKSILAV

SEQ ID NO: 8695 - DNA, 1292 bp, Triticum aestivum
  misc_feature (1)..(1292): Ceres Seq. ID no. 13654213
attgggtaccgggccccccctcgaggtcgacggtatcgataagcttttttttttttttttttcttttttttttttttttttttttttttttttttttttttttttttttttacaacaggttaacagctaccatatgtagaataacattattctcatttcaattctcaggaagcgaaacagcaaggactggtccatgatctacatgagtctgatacaaactcagaagtgcaaagcagagtggaaagaccactcagttacaagggggtttggcatcaagcaagacttggtctctcctctttcatctggctgctcggtgctttgctattaccctcagttttctttctgcccctctggtgcctcatggaacaccacctcgttctcaggcaccgtccttagctcatcccccacagactcggcaccgcccgacgctccggcgtcatcagggtatctgacaaccaccacggggcagacgcagtggtgcacgcagtagtcgctgacactccctagcctgccattacctgccctgcgggaggcgccgaagccgcggctgcccatgatcatggcggagaggccgaggcgctcggcctcgaggcagaggcgctccttcatgtcgtggtccttgacgatgtggatcttgaagggaatctgcgcggcgacgagcggctgcgccaggtcctgcgacttggtggaggtgaaggcgtcgaagtcctcctcccgcttcttgcgcgcgtcctcctccgggtccccggacgccggcgccgcgcctcctccccccttctcgtcgccgtcgtcgacggtgacggggatggagccccagtcggcgccgtagagcacggaggtggggcgcacgtggaggagcacgacggcgtcgcccgggcgcaggtagttctgcacggcccacttgacggcgaaggcggactcgtcggacaggtcgacggcgatggcgatgcggcggtgcggcgaggaggaggcggcgagggaggagaagaagtagcgcggcgagctgggctggatcgccgccaccgccgccgcctgcgacgccgccaggcgcacggccggcggcggcgagggcgaggaggagggggacttgccgccggcgccggcgccggtcggggaggccgggtggtgcgtcgccatgatggttgttggtcctccggctgctcgatccgaatgcggaacactactgtgcagctctcgatctgatgaggggaatctcaggagagaatggggggagaggagacgagggttttgccaaagattgagatttggggctgtgcaacttgcggtggact

SEQ ID NO: 8696 - protein, 98 aa, Triticum aestivum
  misc_feature (1)..(98): Ceres Seq. ID no. 13654214
MIYMSLIQTQKCKAEWKDHSVTRGFGIKQDLVSPLSSGCSVLCYYPQFSFCPSGASWNTTSFSGTVLSSSPTDSAPPDAPASSGYLTTTTGQTQWCTQ

SEQ ID NO: 8697 - protein, 95 aa, Triticum aestivum
  misc_feature (1)..(95): Ceres Seq. ID no. 13654215
MSLIQTQKCKAEWKDHSVTRGFGIKQDLVSPLSSGCSVLCYYPQFSFCPSGASWNTTSFSGTVLSSSPTDSAPPDAPASSGYLTTTTGQTQWCTQ

SEQ ID NO: 8698 - protein, 91 aa, Triticum aestivum
  misc_feature (1)..(91): Ceres Seq. ID no. 13654216
MIMAERPRRSASRQRRSFMSWSLTMWILKGICAATSGCARSCDLVEVKASKSSSRFLRASSSGSPDAGAAPPPPFSSPSSTVTGMEPQSAP

SEQ ID NO: 8699 - DNA, 1528 bp, Triticum aestivum
  misc_feature (1)..(1528): Ceres Seq. ID no. 13658028
ccgggccccccctcgaggtcgacggtatcgataagcttttttttttttttttttgaacaatcacatctttttgttcattcattatcgcactcatacgcatcaaattacattagttctagtactcacacgtgcacgtgccacgcatttggaagtctcaaatgcatacaccgatacacactggatacacagagtttggcacttaaaatatgtatacttcttttttgcgggcacttaaaatacgtatacgccaagtgcttttatcttgccatgatttattaataccaggagtatatatattactcataacgaacaacgaatgaacaaatgaaatactgtgtacactacagggttccttccagaaaaacatatatgagatcaaaagcagcagccgctatggtcgggttaatattatcaaccagctgccccgtcactgtctgaccactgggaacaggcacccgtagaccttcgacaggaaggatttcttgggcttccttcgcgggtggccccacgtgggcaccacccggtccggcgagagctgccgcttcgcgaccggcggcacgtccggcgcggcggccttggcgacctcccggtgccgcttcaccttctcgaactgcaccgtgaagccctgcgccgccgcgttcgcgttctgctcgtcccacacgccgaacttgggcacggccgacggggccttggcggcacgggcctgcggtggcacgccctggcccgggcgccgctcgttagccggcggggacgcggtgaccctcggcgctggcgccgcttgctggtggtgcctcggcaccggggcggcgtacgcgccggcgacctgctgctgctgctggggctggtggtagctgccgccgctgttgccgtagcgcggctggtacggcctgggcggcgagaacttgctggcgcggctgctgacctcggacgcggcgctgctgccattgctcccgttccgccggtggtagcccccgtggccgtgctgcgcggggtagtgctgcgccggcgaggggtgtccgtggccgtgcgagctcggcggcctcgagggcacgttaccgccgaggtggtcatagtgctgcgccggggccgcgtggccgtggccgtgcgagctgggcgggcgcgagggcacgttccggctgaggttctcgtagtactcgtaggggtcgaactcttggtcgtcgtgccccctgggcgctggcgccgccgtgcccggcacgggcgcggccttgttctcgcgcaccttctcgaagaagacggtgtagccgatgttctcggcgtcccacgacccgaacttgggaaccaccggccctttcccggccattaagaaatgatgatgacgcctggcgatgaactgatgagagggaacctcttggtcgatccttgtttctcctctccactcttctctctctctctcgctccccactcgatcacaattgacgataggaaacgaggaggagagagggtgtgggaagggaggcgatggatgtgctcgcagggcagggtggttcttatgattggagtttcagaa

SEQ ID NO: 8700 - protein, 92 aa, Triticum aestivum
  misc_feature (1)..(92): Ceres Seq. ID no. 13658029
PGPPSRSTVSISFFFFFFEQSHLFVHSLSHSYASNYISSSTHTCTCHAFGSLKCIHRYTLDTQSLALKICILLFCGHLKYVYAKCFYLAMIY

SEQ ID NO: 8701 - protein, 67 aa, Triticum aestivum
  misc_feature (1)..(67): Ceres Seq. ID no. 13658030
MMMTPGDELMRGNLLVDPCFSSPLFSLSLAPHSITIDDRKRGGERVWEGRRWMCSQGRVVLMIGVSE

SEQ ID NO: 8702 - protein, 66 aa, Triticum aestivum
  misc_feature (1)..(66): Ceres Seq. ID no. 13658031
MMTPGDELMRGNLLVDPCFSSPLFSLSLAPHSITIDDRKRGGERVWEGRRWMCSQGRVVLMIGVSE

SEQ ID NO: 8703 - DNA, 792 bp, Triticum aestivum
  misc_feature (1)..(792): Ceres Seq. ID no. 13658372
aaaccatgtaaaacaagcctatagctctagcattactcgtaccctgctcataaaattttgggccttgccttacatgtttagagggtgggaggagataatatattttttttgagaaaaaaaaaacacaatacaaattgggacacaaaaactagaacacatgtgtgcagagcaaaacggaacaacacatgtttcaccgtagaatcttaaactgaatcggcagcccaaatttccatcagccaaaccataggctacacaaacctaggcggacgtaccaacacaggacgccggccggccggccggccgggcggtagctaagccacgaaggcgtactgctcgtaccgcacgctgcagtccacgagcacggccctcgcgccgacggcgtggctgcaggtggcgttcatctggctgacggcggagccgaggcagctcgcgcagtccgcgcccgacagaccggcgcggcacacggcgtggccgtaggcgaacgcgttcgggtacggggagatgctgtaggcgtcgcgggagcgggactgcggcgtggcggccagcaggacggccagcacgtaggcgaggctctccgcgaaggggtccccggcgccgtacaccgcgccgttgcagatcacggagagcggtgccgtgttgggcgcgccgctggcggtgtgcgggcaggaggagaggaggtgcagcagcgcgagggggaggaagaggagccggtccgctctgcgtgagggcgccatggcgcctccgatcttgggctacgggtgtagtagggtggtgtgtggttgttggtggcgc

SEQ ID NO: 8704 - protein, 36 aa, Triticum aestivum
  misc_feature (1)..(36): Ceres Seq. ID no. 13658373
NHVKQAYSSSITRTLLIKFWALPYMFRGWEEIIYFF

SEQ ID NO: 8705 - DNA, 621 bp, Triticum aestivum
  misc_feature (1)..(621): Ceres Seq. ID no. 13659837
atccattcccccctctttcccccatcggccccctcctcttcttcccaaatctaagctcgaacagctcacggtgacagctgcatcaccatcgtttccgcggccaccgtcgtcgccgtcgctcgggagtacgcccaggagatgcgtcgtcatcgtctgcatcgactacggggatccattcggccggagcttcgctccatcctcgccatcgtcacctcctccctcctctgtcgccatcgccatggccttcgattcacaccacttcgtccaccccggccccgtacgagctcaccatcgaccatcccccgaccccgagactgccggcgacccccagttcgacaacggtgttgacgatccctccttcatgccagagcaaccagatgctggagcccaggagccagacgccaccgtcggcgacaaatcctactacaccggaggagcctactactacgtgcagcccgctgacgacgaccaggagtagttaggaggtcccaggcaggaggccttgccttttcgatcgttgctacttttgtgctagccttcttaaggcaaacttgtttaacttatgtctgtactcagatattgttgcttccgctgactcgtctatgatcgagcacttttatt

SEQ ID NO: 8706 - protein, 158 aa, Triticum aestivum
  misc_feature (1)..(158): Ceres Seq. ID no. 13659838
SIPPSFPHRPPPLLPKSKLEQLTVTAASPSFPRPPSSPSLGSTPRRCVVIVCIDYGDPFGRSFAPSSPSSPPPSSVAIAMAFDSHHFVHPGPVRAHHRPSPDPETAGDPQFDNGVDDPSFMPEQPDAGAQEPDATVGDKSYYTGGAYYYVQPADDDQE

SEQ ID NO: 8707 - protein, 79 aa, Triticum aestivum
  misc_feature (1)..(79): Ceres Seq. ID no. 13659839
MAFDSHHFVHPGPVRAHHRPSPDPETAGDPQFDNGVDDPSFMPEQPDAGAQEPDATVGDKSYYTGGAYYYVQPADDDQE

SEQ ID NO: 8708 - DNA, 2123 bp, Triticum aestivum
  misc_feature (1)..(2123): Ceres Seq. ID no. 13660967
gccgatttctctagagcagacccgaccccgagctctcctgctagcgcgcgctggcgacggccactccggcctcgtcggccaccccaccgctggctcgcagcccagccgccatgctgccgccgcctccaccctcgttgcctgtgggtttcaaaccggttgtcgtcccgccgccatctctatcgttttcccggtcagatctggatcgggacctcctgcttccgccgccgccgacgacgacgatggacctgcccacccagcttcgtgccgtgcccatggcggtgttggtgatgcctccatgcgagctcgaagcgctcacgtcaccgaagcccgcggcagctggtggctgccccgctccgtcgacgacggctgctgctgtcgacatcctgatccccgtggcggccccgtccctcctcctgccggccgtgcccgggagctcgcgtccatcaccatagagctcgctcccctctgagccaacgcccgtggtccctcccgcaccgtcgttcgccgccgccgcactagccgcggctgcacttgcttgccgcagatcggacccggccatcggagggcagaagcctcgttcccaggagggcctggatacctttgcttcgccgcctgctggacgcccttgcctgcccgacggccaacctcctgcactcgctgctcttggttggggggattggcgtggatgcttccatcgtgatgaagtgactgatgttctcgagtgtgagcaagggggatggcagactgtctcgaaggggcgccgctcgccgcctcctgtagcttttcatcgcccttccatcaatgtgcggcgttcccttccggcgtggctgagagacaggtgtttccggtgtctttgtcgaggtcaacgcgcacactcctacagggatccaatccgatgcactgactgccttcgatctggacacatgactcgcttctgtcatgctaagaagcctgtccatcaagctttgccgctccaatgtcatgctccatcgcctgcttccaccggtgatgtctccatgatagatgtgcagttccggtctatctcggctaagcatgtcgggttggtggaggagaccaagatgcttcgcactgagcttcacgactgccttgcgcgtgctggtagtgttttggggagggcggaggccgctcatgccaaactagaggtggtgccggatgtgtcttcgctgcctgagcttcagattggggttgtgcctgatgtgtccctactgcccgagatccaggttgactctgtcgatggggaaggtggcatgtatggagatctctcccctcgtgctacagcctgtcagttgtcgctgcctgtcatgccgattccttccgggagcgaagtcattgttgaggtcgtgactccggtgctgcggattatgcctgagcttcagaagctttgtggggagcccactttgcctatttcgatggtgcttcctgaggagatagggtctcttggaggggacttggtgatgccaactgcgacctcatcgttttcattggagccgagtcagccgcttgcctttgtgaaccttggaggtttggcggctgctgctgctctctcacctgaggttgttggcccggtggcgtctgttggtgctgagtttgatgaggtaggtgctttgacacctgtttctaaggcgccgaagcccgtccagtctctcatctttgaccgtgacactatgttggcacgtattgacgaggtggtcttcgcgaaaaagcttggccgcttgctcactggcttggatgcagcttgtcctgggtctgccaagacgattgcttgcctcctagcggaggaggtttctacgggcaaaattaagaagatgaagaagcctatcaggagtataggcaagaagactgatgtcattaggaaggcgtgcgcggctgcttaatggagtggcgtttggtggtttcgttgcgatgtcattttgtgagggtttgtggttgttgcatgttatgtatgtttgttgggttgaccgtggtgtcatggagtttctttcttagcgagtagtccgcatgtggtctatatgtatcggtttttgcccagttttccgttaattaactgggcaattctctttttcttaattaatcgatgaggcaaatcttttgccttcgtttcg

SEQ ID NO: 8709 - protein, 323 aa, Triticum aestivum
  misc_feature (1)..(323): Ceres Seq. ID no. 13660968
MTRFCHAKKPVHQALPLQCHAPSPASTGDVSMIDVQFRSISAKHVGLVEETKMLRTELHDCLARAGSVLGRAEAAHAKLEVVPDVSSLPELQIGVVPDVSLLPEIQVDSVDGEGGMYGDLSPRATACQLSLPVMPIPSGSEVIVEVVTPVLRIMPELQKLCGEPTLPISMVLPEEIGSLGGDLVMPTATSSFSLEPSQPLAFVNLGGLAAAAALSPEVVGPVASVGAEFDEVGALTPVSKAPKPVQSLIFDRDTMLARIDEVVFAKKLGRLLTGLDAACPGSAKTIACLLAEEVSTGKIKKMKKPIRSIGKKTDVIRKACAAA

SEQ ID NO: 8710 - protein, 292 aa, Triticum aestivum
  misc_feature (1)..(292): Ceres Seq. ID no. 13660969
MIDVQFRSISAKHVGLVEETKMLRTELHDCLARAGSVLGRAEAAHAKLEVVPDVSSLPELQIGVVPDVSLLPEIQVDSVDGEGGMYGDLSPRATACQLSLPVMPIPSGSEVIVEVVTPVLRIMPELQKLCGEPTLPISMVLPEEIGSLGGDLVMPTATSSFSLEPSQPLAFVNLGGLAAAAALSPEVVGPVASVGAEFDEVGALTPVSKAPKPVQSLIFDRDTMLARIDEVVFAKKLGRLLTGLDAACPGSAKTIACLLAEEVSTGKIKKMKKPIRSIGKKTDVIRKACAAA

SEQ ID NO: 8711 - protein, 271 aa, Triticum aestivum
  misc_feature (1)..(271): Ceres Seq. ID no. 13660970
MLRTELHDCLARAGSVLGRAEAAHAKLEVVPDVSSLPELQIGVVPDVSLLPEIQVDSVDGEGGMYGDLSPRATACQLSLPVMPIPSGSEVIVEVVTPVLRIMPELQKLCGEPTLPISMVLPEEIGSLGGDLVMPTATSSFSLEPSQPLAFVNLGGLAAAAALSPEVVGPVASVGAEFDEVGALTPVSKAPKPVQSLIFDRDTMLARIDEVVFAKKLGRLLTGLDAACPGSAKTIACLLAEEVSTGKIKKMKKPIRSIGKKTDVIRKACAAA

SEQ ID NO: 8712 - DNA, 804 bp, Triticum aestivum
  misc_feature (1)..(804): Ceres Seq. ID no. 13661547
aagagccacctcccacgaacccagaacgctgaacgctgaacctgagggttggacgggagctagggttttagccgccggccatggccctctcctcgtctgcctccacactgctccgccgcctcctcggatccacccccatctcatcctcccgctcctctgtacttcgcgccgccttctgctcctcctcctcctcgggcccctcccccaccttgccaccctccgtcgaccatctccggcgatgacaccgaggtcgccaacgtaccgccgctcaccacccccaagctcttcgtcagcggcctttcaaggctaacgacagatgagaagctcaagagcgcgtttgctcccttcggacagcttcttgaagtgaaagtcataacagatagagtttctgggagatcaaagggctttggttttgtaaggtacgcgagtttacaagaagctgagaccgcatggcaggaaatgaatgccaagtttctggatggatgggtcatttttgtcgaccctgcaaaacaaagggagcagaagcctgctcctcagccggatactgcttcctcccacaccggcttcacgataaataaaactgtaggatggtgtggttagttgcttaggctcttgagtcctacagatcacctagcaagggcatggatatgctgttctcgtgtgtttagggttattaatctgctgtaagatgcttctgattgttgttctagccatagaaagttaatggcattactacctgtattaatacataaaatgataacgctgttccttttttgagataataatgttgcaacgggagggggg

SEQ ID NO: 8713 - protein, 102 aa, Triticum aestivum
  misc_feature (1)..(102): Ceres Seq. ID no. 15220113
RATSHEPRTLNAEPEGWTGARVLAAGHGPLLVCLHTAPPPPRIHPHLILPLLCTSRRLLLLLLLGPLPHLATLRRPSPAMTPRSPTYRRSPPPSSSSAAFQG

SEQ ID NO: 8714 - protein, 53 aa, Triticum aestivum
  misc_feature (1)..(53): Ceres Seq. ID no. 15220114
MALSSSASTLLRRLLGSTPISSSRSSVLRAAFCSSSSSGPSPTLPPSVDHLRR

SEQ ID NO: 8715 - DNA, 493 bp, Triticum aestivum
  misc_feature (1)..(493): Ceres Seq. ID no. 13663035
cctagaacatcctaatcgaaaaaagggatgagaagtatcttctcgacttgcaaagggtcagtggaccacagctcctgtttctggacctgtgttctgcctttctaacccagctgagagtcctctgatcctgatgaagatggtgacttcccaactgcaaagccccacagcttcctgcgacgtgcgaagttacagtcaaggtgtacataactatcataatcctccagtagaatctactcctggggtatgtagacgctagagaaccacgtggttttattttgatggttcaggacttatttactataaaaccagaggtggcgggctagaggcatccctattccttcgtccgccagccaccaatggtgctatatgacgcttgtagccctatatttagtccttggactttttctggcttggcaatgttctttactagtagtaacataatgccatcctgagaataacctcttgttacaatggaagttgtgctgttgacatg

SEQ ID NO: 8716 - protein, 41 aa, Triticum aestivum
  misc_feature (1)..(41): Ceres Seq. ID no. 13663036
MKMVTSQLQSPTASCDVRSYSQGVHNYHNPPVESTPGVCRR

SEQ ID NO: 8717 - protein, 39 aa, Triticum aestivum
  misc_feature (1)..(39): Ceres Seq. ID no. 13663037
MVTSQLQSPTASCDVRSYSQGVHNYHNPPVESTPGVCRR

SEQ ID NO: 8718 - protein, 31 aa, Triticum aestivum
  misc_feature (1)..(31): Ceres Seq. ID no. 13663038
MVLYDACSPIFSPWTFSGLAMFFTSSNIMPS

SEQ ID NO: 8719 - DNA, 2007 bp, Triticum aestivum
  misc_feature (1)..(2007): Ceres Seq. ID no. 13663290
ctgtttttcggcagtccttgtggtaggaaagttatccattcttcgaaaactcatctactactactcaccttgtagaattttttattctgctgcatatttggttttatcataaaatgaatggattattctgaaatacagtgtaacccctcccccctctcaacgattattattttagcatttatttattattattcttttgcctcttgctattgcttgctaaaggcacatgcatacacaaatctttcctcgtgccattgtttcttctgcaagcacctagcagtgtaatttcatgaatcaaagtaagattctgctatttggcccaaagaattatctgatgataccttttcccctttccttgctatagctactggatgtttattctttttgagacaagaacacttacttttggcctacttatactatcatgtcgattcctaatttaggagtgaatatgggccgtggactgcttttcttgcgtttgcggtgtgtttgttcttaccctttccaggtagagtaacatgaaagatcaataagtcctgcttaaaagtttgatgcactgtttgagcagtgattttgttttttatggtgagagttcctcggatgttatttttcgctcaaattttgcaagaagctcaagcatttgataattattttgtctcaaaatttcagattttttggattttgttttatcatgttttttcagtgtttttcgaaattcggtgtactacactcgagagttgtcacacctttctatatatctcatggttttgtggcttatgccttggaagctttttgccaatgcacaagtgcaaagtcctttcattttcctcctgtatcctcagttgcgtactataacatttgactatgtgtcgtgttggtctcaatgggctggcacagtactacagactatggctaaaggctatgtttacaaacataaaataatgattcaaagaagaggagcagacggtgctacgatatttacctcaaggtgatgaatcaatgaaccgagggacttattattcggtgaggccagcggggtattccatttcctgcatttcctcttcagtatgctgactccaatctccagagtcctcgatgattctttcttagtccatttaaatgggtattatttttaccagttggtacacgtttttctttcaatatgcactctcacaataatttttttttctgttcttcaaattgatttgttgatggtacaagggaatcattgaaaaaatgtcttctcatcaaggattggattgtgttctcattatagaacataatttattatgtgaggcatttgccattgcaacatcttgtctaggtaggtcatgcttggcagaatcgcctcctcccggtcttcaacactcctgcaggaattgagcgccagggtggtcgggacacatagaacaccaacaagggaaaaaaatgcaccactcctaggtcatgcttggcagaatcgcctcctcccggtcttcagcactcctgcaggaattgagcaccagtgtggtcgggacacatagaacaccaacaagcgacaaaaatgcactactccgaatattgatccttttatacagaatatgcagccagagtttgggcaatgatcaaaacgtggcttggtttacatgatgttcatcctacggactggggaggcatggtttccgtcaaggagtggtggcgcagcaacacttaagggaggtcgcaatctcgaaggccgcttgtttcccttattcctatctcttgggaaatctggaatgagcgaaatgctcgggtgttccgcaacaatgcgactccggtcgttgtgcttgtgacacatcaaagcggaggcatcatcggggtgccttgccggacgaaatatttgtgtaatataatgccgcgagagtgattcttaaaatcttcgtcttattcaatgaaaatgacaagcctttggacttgtttcaatataatatggacccgaatggagtgaaatgtttaatwaaaaaaaaaaaaaaaaaaaaaaaaaaacct

SEQ ID NO: 8720 - protein, 90 aa, Triticum aestivum
  misc_feature (1)..(90): Ceres Seq. ID no. 15220210
MVRVPRMLFFAQILQEAQAFDNYFVSKFQIFWILFYHVFSVFFEIRCTTLESCHTFLYISWFCGLCLGSFLPMHKCKVLSFSSCILSCVL

SEQ ID NO: 8721 - protein, 84 aa, Triticum aestivum
  misc_feature (1)..(84): Ceres Seq. ID no. 15220211
MLFFAQILQEAQAFDNYFVSKFQIFWILFYHVFSVFFEIRCTTLESCHTFLYISWFCGLCLGSFLPMHKCKVLSFSSCILSCVL

SEQ ID NO: 8722 - protein, 76 aa, Triticum aestivum
  misc_feature (1)..(76): Ceres Seq. ID no. 15220212
MVLWLMPWKLFANAQVQSPFIFLLYPQLRTITFDYVSCWSQWAGTVLQTMAKGYVYKHKIMIQRRGADGATIFTSR

SEQ ID NO: 8723 - DNA, 1043 bp, Triticum aestivum
  misc_feature (1)..(1043): Ceres Seq. ID no. 13663535
actcccaaccctagccgccagtgcatcgtagggggcgcggcagcggccgacaggacgaagcacgcggccacgccgcccttaaccagatgccccggtagcgccgccttcttcccccttgatgtcccgcacgagcgccaccgcgacgaggacctgctctccatctccctctgctgccccatttgagcgccgccgtgatctcgacatgctccagcgacgccgctctgatcgagctcctctgcaaccagcaagacctccgcctccatctccctctgccgctgccagcaatcgaaaagcgtgatgaaggatttttctttctcttcaattcattcagtcatatgaaaggggaactaccgatagataaatcatatgtccatacaccatgtactttcctctgtctatctttaagggaaatcatttttgttcagattgaagatatgcactttaccttcataatgtgtattcttatattccatcaactcgagtgtgtcattacaccttgcaggcgtgcattatgtatcttcaactattatatttcttgaatacacctaggcctagctgaccagtgattttgtagttctctactaccagatccatcttttgactggcttttggatattatctgcaagtgattgtttaaagtttttattactatagaacaatggaacgwatggragtvtaaaaaaaaaaaaaaaaaaaaaaaaaaaaaaaaaaaaaaaaaaaaaaaaaddaaaaaaaaaaakaaaaaaaaaaaaaaaaaggtttwtcrataccgccaacctcragggggggcccggaacccaattcccccwaaagggaakcgaaataacgcagsgytmmckgsccgymwtttwacaacgkcggaatgggaaaaacccgggggtaaccmaattaaaycgsyttgcamkaacwtccccttttcamccagttgggkaawaagcaaaaaarscccgaaccaatckccyttccmaaaakttgccaaccctaaaggkgaaaggaaaattaraaaccgyaaaaattttgtaaaaatccgcgtaaaattttgg

SEQ ID NO: 8724 - protein, 67 aa, Triticum aestivum
  misc_feature (1)..(67): Ceres Seq. ID no. 15220228
MKGELPIDKSYVHTPCTFLCLSLREIIFVQIEDMHFTFIMCILIFHQLECVITPCRRALCIFNYYIS

SEQ ID NO: 8725 - protein, 60 aa, Triticum aestivum
  misc_feature (1)..(60): Ceres Seq. ID no. 15220229
TPNPSRQCIVGGAAAADRTKHAATPPLTRCPGSAAFFPLDVPHERHRDEDLLSISLCCPI

SEQ ID NO: 8726 - protein, 59 aa, Triticum aestivum
  misc_feature (1)..(59): Ceres Seq. ID no. 15220230
MSRTSATATRTCSPSPSAAPFERRRDLDMLQRRRSDRAPLQPARPPPPSPSAAASNRKA

SEQ ID NO: 8727 - DNA, 1225 bp, Triticum aestivum
  misc_feature (1)..(1225): Ceres Seq. ID no. 13664309
gtcgacggtatcgataagcttttttttttttttttttgtgtagtgctaacaaagtacactattcgcaatagattatagttttgtttctcgagctgtaaactgaagttggtctagaatatcagttcatgggtagcatgaaagaggtggaatggaagcaccggccaccgggtgattcctcgagctgcagcgacatctatgcgagctggacaaatcctctggcgatggtgccgttggcgccctggggcaggaacccgccggggacctgctcgttgcgagagccgtagaggatgcgcagcgcctccgccggggtgcgctggtacccaagcgagtccacgccggcgccgaggatgttgctgatggtgcgccgctcggcgccctggtgccggtccagcaccttgactccctcgtccttggcgccgcagccggacaggtcgttgcgccagtcggagatccggcgcgtgaactcggccaccgtgcggcccttgtagggcgccaccgtctcgtcggcgcgctggtacagcagcatcctgatcaccgcgtcctgcccggcctccaccgccaggacgctggcgtggaggcgcttggaggcgtagcccatgaggttggggctgatgccgacggcggcggcggcggtgacgtgaggcaggatgtaggaggcgaggaggaagttgacggtgccgttgtaggcgtcgaagggcgggtcgaggcgcgcgcccatggcgtcgtccatgatggcggcgaagcggtcggcgctgaggtcgatgggcgggcgcgggaacccgccgttggcctgcgtgatggccctgatgtggcccacctcctggtacccgagctcggcggcgatctcggtggtgcgaaagtcgaggttggccttgcgcgcgccgacgggcgccgggccgcccgccgagaggttgcggtcgaggtagtcgatgccccgccccagcgcggcgtggaggaaccactcagcctccacgaacttggggttgagcaggaactgcagctgctccatgtcgctcgggtacaccgcgatggcgccccgccgcggcaggctcggccggcaccgcgggtcgtccgtctgtgtgactgtgacggtcgccgcgagcgcgacgacctgcaggcccgcggccagcagctgtagcaggaaggcgccgtgcgcgcgagccatggccagggaggacggagcgcctgtcgtgccgtgctagtgagagctcgcgtgcttggctct

SEQ ID NO: 8728 - protein, 90 aa, Triticum aestivum
  misc_feature (1)..(90): Ceres Seq. ID no. 13664310
MPRPSAAWRNHSASTNLGLSRNCSCSMSLGYTAMAPRRGRLGRHRGSSVCVTVTVAASATTCRPAASSCSRKAPCARAMAREDGAPVVPC

SEQ ID NO: 8729 - protein, 69 aa, Triticum aestivum
  misc_feature (1)..(69): Ceres Seq. ID no. 13664311
MASSMMAAKRSALRSMGGRGNPPLACVMALMWPTSWYPSSAAISVVRKSRLALRAPTGAGPPAERLRSR

SEQ ID NO: 8730 - protein, 66 aa, Triticum aestivum
  misc_feature (1)..(66): Ceres Seq. ID no. 13664312
MRSASAGVRWYPSESTPAPRMLLMVRRSAPWCRSSTLTPSSLAPQPDRSLRQSEIRRVNSATVRPL

SEQ ID NO: 8731 - protein, 64 aa, Triticum aestivum
  misc_feature (1)..(64): Ceres Seq. ID no. 13664313
MSLGYTAMAPRRGRLGRHRGSSVCVTVTVAASATTCRPAASSCSRKAPCARAMAREDGAPVVPC

SEQ ID NO: 8732 - DNA, 645 bp, Triticum aestivum
  misc_feature (1)..(645): Ceres Seq. ID no. 14301670
aaagaagaggatacaaggaggttggtttcctgagagaagtcgacgaagttgttagaacaggtgacgctttcagaacacttttattcacttgatcaagataaatactagctttgcggtggtcggctgtgaactgcgccttctccagatgataattctcaatctactcttttgcaggagtgacacctgccgagaagcttctgaatctatacgagacgaagtggcagcgcagcgtggaccctgtgttcgaggagttgttatattgatatatactgatatcatatataacttcggtggacgctggacaaggtggacagggtcttcagattgtatccccatacaaaatcccgtccccaattctacaagccacctgaccagggaaacctactctccggtctcgtggctgcgaataattttgagctcggaacactctgtttgtggcttgccgcctttcttttttcggctgtgtggaccttttacagcttctgatttttctcgcatctccagggagccggaacaaacacctgtttgtaccgatccccttttcatcttttcctgatgaactgcttgtattcggaataaatccatctcgtgtgatgatggaaggaacctgttctccagaaataataattcagagtgtttgggacg

SEQ ID NO: 8733 - protein, 136 aa, Triticum aestivum
  misc_feature (1)..(136): Ceres Seq. ID no. 14301671
MIILNLLFCRSDTCREASESIRDEVAAQRGPCVRGVVILIYTDIIYNFGGRWTRWTGSSDCIPIQNPVPNSTSHLTRETYSPVSWLRIILSSEHSVCGLPPFFFRLCGPFTASDFSRISREPEQTPVCTDPLFIFS

SEQ ID NO: 8734 - DNA, 1396 bp, Triticum aestivum
  misc_feature (1)..(1396): Ceres Seq. ID no. 14302507
tttaattgatgctacctatattgacagtttgtacctgggcccttcgcggtggggtttggaccctgtgtctgggttatttttattgaactttggcctgctcatgggtaggccttcatttttttggtggttctgaatttgtgtacctacagttctacaaaattgatacgattgattgttttgttacttggacaatagcttgctatttatgtacctacagttctagtttgttgctgctcaatgctcacatttgtttctcatccttgctatttatgttggctgacataacttgcatgttgctcttgtgcgaccagcatcctcgtgacagggtttgtcggaaccgccatcgctttagggtgcttctccggcgccgccatcatcaccaagcgcaggtagtacctgtacctcggtggcctgacctcttctggcatgtcggtccttcgacatgaaactgtatgcttggtttcttctcttccttttggtgcgcatgccattactgcatggtgaccacgtaggtaaagcttgcaagtcgatcgcagttagaattggcgactggaaagaagcgcacacctaggtcgatctatctgctggtcgctgcgagcattgttcttctagtgtgatccaggccaatggcagcatgcctacatttatatttactagagatgcatgcatttctttacatgcttgacaaacaaaagtcgttgctgctgctaggataggtcatagcagtagcttgctggctagctagtgtatgttgaattgctggtcaactcagcctttgggcctggctgctagtacatctatgtatagctacctaggtaggagtagctatgtggcgcatgcagtggattattgaaatattacaatatcttgatcagcaatgaaaagcatcgagatgcagatttatactggcatgcgcacgtatgcatgcagcatgctgtgtatgtgcacacttgtgtacatcggtagcaacaatatgcagtgatggtgccaaccatatggatgaagcttataaaccaagcatgcatgcacagtagtgatggttttgctagcgaaaatatagcagcacttacatagtatacactaggtgccaacatttgtgattcgtgtcaatatggtctgaccaactgtgcttaacggtgttgtgtcctcttgcagctcaagaacgcaggtgacaagaagaggaagaggaggtcctgaacgtttctcctgcacatcgtagatgccaccaccgtggccttgtaggaattaagctggcgttgtgccacccttgtgtatctgtttttgattgtatgtagaagttggacgcgcatacgtgtatttgctcttgtgagtatttgactggatgttctctggatttaatcagttaattgacagatttattgatattttgttgtgc

SEQ ID NO: 8735 - protein, 58 aa, Triticum aestivum
  misc_feature (1)..(58): Ceres Seq. ID no. 14302508
MLADITCMLLLCDQHPRDRVCRNRHRFRVLLRRRHHHQAQVVPVPRWPDLFWHVGPST

SEQ ID NO: 8736 - protein, 51 aa, Triticum aestivum
  misc_feature (1)..(51): Ceres Seq. ID no. 14302509
MLLLCDQHPRDRVCRNRHRFRVLLRRRHHHQAQVVPVPRWPDLFWHVGPST

SEQ ID NO: 8737 - protein, 43 aa, Triticum aestivum
  misc_feature (1)..(43): Ceres Seq. ID no. 14302510
LIDATYIDSLYLGPSRWGLDPVSGLFLLNFGLLMGRPSFFWWF

SEQ ID NO: 8738 - DNA, 1589 bp, Triticum aestivum
  misc_feature (1)..(1589): Ceres Seq. ID no. 14303647
ctagccccctttcctaccatcccgcggtcgctgcccctgctccatccgacctccatcctctccctccatcctctcccatgtcgccgcccctcttctcccgctcaccttggccacctcctctcctccgccgtgtcatcggccccctccctcctctcagttccgtgccagccgtcgcccaaaccctagccccattccccttgatccccacagttactgcatccacaaccacccgctcagcgaggccgaagaccgggcaacggacgcctgacggggtggaggagaggccagcgatagggaaaagcagcatcttcatggatgagatcctgacggctgaagatggtgcgcatgggaggagcttggaagatgtcaagtggtggcgccgctggggatgaggggagcagcagccgcagcaggcggtgatgctagtgaagcggtggtccatggtgccttcgtcgttgtcgtcctcggcagaagatcgaacgaagaagagaagaggaaggatcttgaggaagaggaaaaaaaacaaggcaatgggactattgactgggtacaagagcttcttcaaaacccacgctgcttttctaaatcgcaatttttttcaagtgctatttctgaagcttcgctgtgcttgctttcccccaacaagcagtaatccaatcacgggtgcatcagcaccgacgaccacaatgggatggatcaagcagccaagactcagagtgtggtcgggcaacgccatggggcagatctgtgcggcgcaaggggcagcagatgcgaaactgaagcttcccagctaacttcggagcagtcaattgagcagatggacacgacgagtgaggattggtgctgccgtccctggtaggagcccaatgacctaatcgaactactgtcatggagagggcaatacgtggatttacttcagatattggagacaacgccattgtgccgaagctctgaagcatacgatttttacaatctgtatttatgggagaaaggatttggcattcgatatgctaaaagccgtctgaatgtcgagaggacgtggaaatctattatggataatactggtcttgccagcgttagtgccctactctgataaggctgctgcagtctgaaccattcattgtctggcacgcgtgcgcagacgatacactgacgatcgcacaagcacatcagcgtgtacaacaggtatttgatgaagaatttgaggcagaacaatgtgaaccttgctaaagtgcacaacattaggcagtttctttgggtcgacggagaatgtgcctttcacaaaaagagcttcaaggagcttgtgtggcaaaataagccgcgagcaagcggctgatgatgttagttaaacgatggaggtgattgtggagcttggttcaaaggatcctcacttcacatatcatgtgcaggcagataaggaggggaggataaacgcactcatgtgggtaaatggggacagtagtctggtgcaaaaaagactagcttattcttaaattttctgtctctatactgaatttggtgtgtaccgataaatcatgtagcgtgtgagatccatcatgcagtttaactgctaaaattatgttatgcat

SEQ ID NO: 8739 - protein, 129 aa, Triticum aestivum
  misc_feature (1)..(129): Ceres Seq. ID no. 14303648
SPLSYHPAVAAPAPSDLHPLPPSSPMSPPLFSRSPWPPPLLRRVIGPLPPLSSVPAVAQTLAPFPLIPTVTASTTTRSARPKTGQRTPDGVEERPAIGKSSIFMDEILTAEDGAHGRSLEDVKWWRRWG

SEQ ID NO: 8740 - protein, 124 aa, Triticum aestivum
  misc_feature (1)..(124): Ceres Seq. ID no. 14303649
MLVKRWSMVPSSLSSSAEDRTKKRRGRILRKRKKNKAMGLLTGYKSFFKTHAAFLNRNFFQVLFLKLRCACFPPTSSNPITGASAPTTTMGWIKQPRLRVWSGNAMGQICAAQGAADAKLKLPS

SEQ ID NO: 8741 - protein, 117 aa, Triticum aestivum
  misc_feature (1)..(117): Ceres Seq. ID no. 14303650
MVPSSLSSSAEDRTKKRRGRILRKRKKNKAMGLLTGYKSFFKTHAAFLNRNFFQVLFLKLRCACFPPTSSNPITGASAPTTTMGWIKQPRLRVWSGNAMGQICAAQGAADAKLKLPS

SEQ ID NO: 8742 - protein, 104 aa, Triticum aestivum
  misc_feature (1)..(104): Ceres Seq. ID no. 14303651
MSPPLFSRSPWPPPLLRRVIGPLPPLSSVPAVAQTLAPFPLIPTVTASTTTRSARPKTGQRTPDGVEERPAIGKSSIFMDEILTAEDGAHGRSLEDVKWWRRWG

SEQ ID NO: 8743 - DNA, 626 bp, Triticum aestivum
  misc_feature (1)..(626): Ceres Seq. ID no. 15173565
actgatcatccacgcatcgatcccgtagcttcttcccaagttgcgagatcatggtgcgcgcgctctcaccttcttctcccgtcgccccctcctccttctacgctctgctgctgctcgtagtggccgcgttcatcgggccgctgcgggtggcgacggcgcagagcgtgccggcgccggtgccggtccgcgtcggggtgatcctggactgggcgaacaaggggtcgtcggcggtgtcgctgcggcggcggaccggcattcagatggcggtggaggactactacgcggcgcacccggggtcggccaccagggtggagctccatttcggggactccaaaggggacgtcgtcggcgccgcttccgccggacttccgcaccaagagcgagatcgtcaggtgcaatagttccggcgaactctaccctttctggtggccgtcttccactccgcaagctctctccgccaccacgtcatcctcaacattgtggcatcgtcgcctaggccatctcagtagtcaagctttgtcacacctagcacgtgctttttcttttccttgtaacaaaaacaataacgatgaccatttatgtcatgcttgtcaattaggaaaacatgttcgcctaccttttgatac

SEQ ID NO: 8744 - protein, 116 aa, Triticum aestivum
  misc_feature (1)..(116): Ceres Seq. ID no. 15173566
MVRALSPSSPVAPSSFYALLLLVVAAFIGPLRVATAQSVPAPVPVRVGVILDWANKGSSAVSLRRRTGIQMAVEDYYAAHPGSATRVELHFGDSKGDVVGAASAGLPHQERDRQVQ

SEQ ID NO: 8745 - DNA, 439 bp, Triticum aestivum
  misc_feature (1)..(439): Ceres Seq. ID no. 15175301
ctcccacctctcacagatctcctcctcctcgcctgaacccgccacttcggccccgaaccctaaccctgcgcgctcccgtaggatccaaccggccatcaagcggtggcgctatcgtagatgcggagctctatagcgacctatcgggagagcctctcccggctcgctggcgaggtcgacgacgccacggcagacgagatccccgcgccgtagccatctcggcgcggagacaacgcccctacgcctccgtcgtccgggcggcggaggcggtacacccgcccggaccccgctgagccggacgagatttctaaactcaaggaagatattgaaaaaattcaagcttctgaggctgaaataaaggcattgtccttcaattatgctgccatgttgaaggaaaaggaggtatgcatgattggaaggtcccccccccccacacacacgc

SEQ ID NO: 8746 - protein, 95 aa, Triticum aestivum
  misc_feature (1)..(95): Ceres Seq. ID no. 15175302
PTSHRSPPPRLNPPLRPRTLTLRAPVGSNRPSSGGAIVDAELYSDLSGEPLPARWRGRRRHGRRDPRAVAISARRQRPYASVVRAAEAVHPPGPR

SEQ ID NO: 8747 - DNA, 1487 bp, Triticum aestivum
  misc_feature (1)..(1487): Ceres Seq. ID no. 15175739
cctgtaaaatcttcaaggcgccatttatgcgtgcccccttctatttaatctttagtggacccacaaccggtatataatctttttggcagcatcgtccattcaggtttctcccaagattctggtcattactatgcatatgttaaggatgctactggtcgctggtactgttgtaatgattctcaggtctccctctcaagatctcaggacgttttgactgagaagttaaatcttccaacaccaatgggaatggcatatcaagtgccgcatgtagtgagcccctgaagataccattagtgaagcagaacggctcatgctctactaaaggtattgtgccactacccctaaagaatggcaagattgcaccaggtctacagttcaagccgatccacttgaagaatacaggaacagagaaggttgcatcaaatggcaaaccgcaccccgttttgagaaagccagaagttaatgaagccacagcactagtggaatcgaacggatgcggacccgcaaaatctgcagaacccagtgaagggtatgctaatggtagtatttcctgcgataagttggacgctgattcacaaagaatgttgcaaggcacagatggaaatggacatccagttcattttgttggcctccaagagaccagtggtgccaaggccacgtgtgctgaaaacccccctgaacagccatctagtgttgttacctcaacattggacaagagcatttgtagttcagaaaagggtcctaaaagctcagttttacaccctgaagtatctgctgactcagtcaaagcagtggtggcttcagccaaggacagtgcatgcttgaagcatcatcttgaagaaggaaagtttaaggaaatgcttgctgaatcagcatcttctgagcttcggtcgtctggttgggcggatgatgtatgtaattttatgcgttctgcaaagaggcagtgtatacagaacacaggcatgtctcaagatagtgaggcaatcaggaagcagctaataagtgattctggaagagtatttaggtccaaaattccagagttactgcgggaagatctgattcaatccctgagatcatacttcgaggataaattttgactggatgcttaagcttgtgtgggccttgtttaaaaggtgccagtggtctactaggaagctcatgcacggctggcttatttttgaggcgtttttgttccctgagatgagatgaggttgagaagtagagcgacgtgtaaagcttgcctcctttttgctgttgttccccatgctatactgtaggcttgaaaccccacaatcagcaccccctttcttctgtttctagcatgtagcagcatactgtttcttgttttcccccctttgtacaattataagtggtagacccctttgtacgattataactggtagattagctcatgaatttcttgggttttgacctgatctcaaaataaacctgttgatggttttaattatatatgatcggttacttac

SEQ ID NO: 8748 - protein, 171 aa, Triticum aestivum
  misc_feature (1)..(171): Ceres Seq. ID no. 15175740
MLQGTDGNGHPVHFVGLQETSGAKATCAENPPEQPSSVVTSTLDKSICSSEKGPKSSVLHPEVSADSVKAVVASAKDSACLKHHLEEGKFKEMLAESASSELRSSGWADDVCNFMRSAKRQCIQNTGMSQDSEAIRKQLISDSGRVFRSKIPELLREDLIQSLRSYFEDKF

SEQ ID NO: 8749 - protein, 97 aa, Triticum aestivum
  misc_feature (1)..(97): Ceres Seq. ID no. 15175741
MLMVVFPAISWTLIHKECCKAQMEMDIQFILLASKRPVVPRPRVLKTPLNSHLVLLPQHWTRAFVVQKRVLKAQFYTLKYLLTQSKQWWLQPRTVHA

SEQ ID NO: 8750 - protein, 95 aa, Triticum aestivum
  misc_feature (1)..(95): Ceres Seq. ID no. 15175742
MVVFPAISWTLIHKECCKAQMEMDIQFILLASKRPVVPRPRVLKTPLNSHLVLLPQHWTRAFVVQKRVLKAQFYTLKYLLTQSKQWWLQPRTVHA

SEQ ID NO: 8751 - DNA, 694 bp, Triticum aestivum
  misc_feature (1)..(694): Ceres Seq. ID no. 12624438
atattccgaacaaagatgatatgccgagacggagctaaagttgaggaaacatttgcaatggtttctcagaatagtaaaacccttcaatttgacatacactaaggatggcgcatagaatttaacctcccaagtagactatctccagcagaggaaaaacttcagccgaatcgacacgaagctccgcacccaggtggtcgctccggcggcagcaacacagtcgtcgtcatcggtgttgatgaggagcgtaggcacaaagatgacgccaagattgacagctaggagcagtcgaggagcggcactctagccggtgccgccacgccatccctcagccagtgcatgccaatcaaatgaaggcggaggcgtagaacaacatgaccaagaagtaggcgagatcgaggcgagaaaggacggccgggtagcccgatcggcgcgataggtggagcgcatccggaagatcgaccgcatgtcgtcccggttccagtgttgcgactgattcctgagctgaaaaataaacaaaattcagattgcatcagatatgcaacctgactgaagaagccacaaggtcacagtgcacgcttctgggacaaaatgtatatgaaattatttgaatcaatgtactgtaggtgttactttgctctgtagtctgtacaatctgaatggttttgacttgagctacaatagcatgttacaattg

SEQ ID NO: 8752 - protein, 33 aa, Triticum aestivum
  misc_feature (1)..(33): Ceres Seq. ID no. 12624439
IFRTKMICRDGAKVEETFAMVSQNSKTLQFDIH

SEQ ID NO: 8753 - DNA, 487 bp, Triticum aestivum
  misc_feature (1)..(487): Ceres Seq. ID no. 13589065
aagaaagatctggaatgacccgcggctgcggtccgtcccccccaccccccaccccccggagcgaaaagaaaaataacaatccgagcgtagcgaaaccctaggcagcgcagcagaggaaccgatccccggcgatggcggcggcgatggaggagctgacccgcagcgggttggcggggatggatttctccatcttccgcggggagtccgagggcgagcggggtgccggggggaaccatgagtgtatcaacatcaggcctccatccccatccccatgcgccaacgaggagcagccgccgccggagaagatggagcaggaggaggaggagggggagggggagaaggaggagtgggtctacagggaggaggatcggatcaccaggtaccgcgggctgtgggagagccgcttcgccggcaaatacggctccttcgacgaccagacaactcttggtcccatgcgctttacattcggacccatcccgagctacgc

SEQ ID NO: 8754 - protein, 118 aa, Triticum aestivum
  misc_feature (1)..(118): Ceres Seq. ID no. 13589066
MAAAMEELTRSGLAGMDFSIFRGESEGERGAGGNHECINIRPPSPSPCANEEQPPPEKMEQEEEEGEGEKEEWVYREEDRITRYRGLWESRFAGKYGSFDDQTTLGPMRFTFGPIPSY

SEQ ID NO: 8755 - protein, 114 aa, Triticum aestivum
  misc_feature (1)..(114): Ceres Seq. ID no. 13589067
MEELTRSGLAGMDFSIFRGESEGERGAGGNHECINIRPPSPSPCANEEQPPPEKMEQEEEEGEGEKEEWVYREEDRITRYRGLWESRFAGKYGSFDDQTTLGPMRFTFGPIPSY

SEQ ID NO: 8756 - protein, 103 aa, Triticum aestivum
  misc_feature (1)..(103): Ceres Seq. ID no. 13589068
MDFSIFRGESEGERGAGGNHECINIRPPSPSPCANEEQPPPEKMEQEEEEGEGEKEEWVYREEDRITRYRGLWESRFAGKYGSFDDQTTLGPMRFTFGPIPSY

SEQ ID NO: 8757 - DNA, 1141 bp, Triticum aestivum
  misc_feature (1)..(1141): Ceres Seq. ID no. 13596294
acctagaacatcctaatcgaaaaaacatcctaatcattccatttcaagtatttgagcttcactacagcctttgagcgtctttcctcctcgtgtgtgtgtgtgtcttgcgctgcactagtgagtgcgtgtgtaggtgagttgagtgcaagtattaccactagatagccaccaccctctggtttcagtagttctgagctaacagttggcatcagagccccaagttatgccgaagtatatgccgaaagaaggcgtcgccgacgacggctccaagaccgccgggcagagctcgactgaggaggcgcgtgcggcggacgcgcttgcgctgcgaggcaggctaggagggaggttgggtgcgccacgctccatgcgagacgtgggcatgtccagcacctccttccttctcctcacgcggaccaactaccccagttgatcggtcatgatgaaagtcatcatggaggcgcggcatatcactactagggaaaaccttatacacagaatcttagcagcatcgcggtttaaaaacagacgctactgctaattagcagcaacgagctttagaaaagagcgctgctaatgactgagtagcagtagcgctctaggtaaaaagagcgctactactataattgccacggtgttgcctccaggctagatatagtagtagcgcccttcccgtggacgcgctactgctaaagaacttagtagcagcggttttgctcaaaactcgctgctggtaagtatgaccgcaactaattaagtttagtcccatactgctaagcgaacaaggtgtttaccaccttaaatatgttgcttctcaacctatctcgagcacttggtcttcattgaactatatgtgtatgatttgtggttgcaatatgaatcctcgcatgtacctatacaggtacagtgaggattcatgttgactatttagattatacacaaaaaaatcaatgatgaccaatgtatatttttgatgtttttactaaacaaaagaaataaatgyttmcattagamwgcttccattagcagtaaaaaaaaaaaaaaaaaaaaaaaaaaaaaaaaaaaaaaaaaaaaaaaaaaaaaattaaaaaaaaaaaaaaaaaggtttatcrataccgccaacctcaagggggggcccggwacc

SEQ ID NO: 8758 - protein, 68 aa, Triticum aestivum
  misc_feature (1)..(68): Ceres Seq. ID no. 15221830
MPKYMPKEGVADDGSKTAGQSSTEEARAADALALRGRLGGRLGAPRSMRDVGMSSTSFLLLTRTNYPS

SEQ ID NO: 8759 - protein, 64 aa, Triticum aestivum
  misc_feature (1)..(64): Ceres Seq. ID no. 15221831
MPKEGVADDGSKTAGQSSTEEARAADALALRGRLGGRLGAPRSMRDVGMSSTSFLLLTRTNYPS

SEQ ID NO: 8760 - DNA, 1142 bp, Triticum aestivum
  misc_feature (1)..(1142): Ceres Seq. ID no. 13596346
atcctttcccccctccagttcccactttattgtgtttaaacactataacattcatcagtctacaaccacattgccataacagatgcgtaaggtgaacatcagcaggtctcggaggagaacactctaatgtcgaggaggagacaaacaagcccccagtccataaaacaaggtgcttcaacacagttcacggaatttcatatgacatcaatcaggttgacgcagaaggggcctcggccatctcttgctcgacaggagccgcctggactgggtagtagtggtagtgcagctctccaacatcatctccagacaacttcttccagccgtcagggccaacatagtagacactaacacagccaccactagctccgtcacggaatgttgcgtggtaaatagcccgccgagctaactcagcagcttcctcaactgacatgttgaatttgtaaccctcgtccaagataccataagcatatagagagccagaaccaacagagaatcggcttcccttgagccttgcaccctcgctatcaacatagtacaagcccggaccagtttcatcaaatccagcaatcatggtaccgattgaaagtcccatcccgcggtatgaataaaggatattagccaacgtctttgaagaaccagcaatggagatcctccgcttgttcgcgagctcatggagccggcacttgacccccaagtttctatgccaaaattggcaatcagcagcacctccagccatggttcccagcatgtagggattaatctcgatgattttcctcacagtttgcgaagatatgtagccgcccatgctggcccgggagtcggcggcgacgatgacgcccttgtcgaagatgaaggagagcgtggtggtccccttcttgttgttcaccatctccttggtcgccttctggaacccatcgaagtcgttgcaggtggggaactcgagggcgagctggtcggcggcgtcggcggagaagaggccggcgaagtcgtcgctgccggcggcggcggcgccgaagtggttctcgagggcggagaggttgggaatcatggcgtcgtcggcgggtgtgggggtgcggcgaggcggaggcggaggcgatgaagtgagcttttcctctctttcgacccacggacttttcctcttc

SEQ ID NO: 8761 - protein, 142 aa, Triticum aestivum
  misc_feature (1)..(142): Ceres Seq. ID no. 13596347
MEPALDPQVSMPKLAISSTSSHGSQHVGINLDDFPHSLRRYVAAHAGPGVGGDDDALVEDEGERGGPLLVVHHLLGRLLEPIEVVAGGELEGELVGGVGGEEAGEVVAAGGGGAEVVLEGGEVGNHGVVGGCGGAARRRRRR

SEQ ID NO: 8762 - protein, 132 aa, Triticum aestivum
  misc_feature (1)..(132): Ceres Seq. ID no. 13596348
MPKLAISSTSSHGSQHVGINLDDFPHSLRRYVAAHAGPGVGGDDDALVEDEGERGGPLLVVHHLLGRLLEPIEVVAGGELEGELVGGVGGEEAGEVVAAGGGGAEVVLEGGEVGNHGVVGGCGGAARRRRRR

SEQ ID NO: 8763 - protein, 113 aa, Triticum aestivum
  misc_feature (1)..(113): Ceres Seq. ID no. 13596349
MLARESAATMTPLSKMKESVVVPFLLFTISLVAFWNPSKSLQVGNSRASWSAASAEKRPAKSSLPAAAAPKWFSRAERLGIMASSAGVGVRRGGGGGDEVSFSSLSTHGLFLF

SEQ ID NO: 8764 - DNA, 948 bp, Triticum aestivum
  misc_feature (1)..(948): Ceres Seq. ID no. 13656423
actctccgctcgccgccgccgtgctgctgcacgttctcaccctgccgccgccgccctgccctggcgcacagcacgcgtgcttgatcgcaccgatgttggccgctccgctcgccactgcgttgtagcccttgcttactgcacgcaccaccaagcagccatcacggctgggatctgatggctggcaggcgaggcaccggaggcggacagcctaggcctcaggagtgcggaggcgaggtcgggtggtggctcggcgaactacagcaaggggcgtcaaggtgcaggcttggccggaggaggtgggcccagatattcggggggacaaggaggatgagagggaacctcctgcagtggacgacgaagaaggggagtagtacccctcctcagcggaccaagatgacctaccatgccggaggcgaagtgttcagcggcagcggatttgaaggtggcggcagtagcagatcggcttaggaagaggaggaggagtacggtgggctcgacctgctggtggtggacgtcgggattgacgagatgcacagttcctatggtggctgccgggctaataggatttgtaggaggaggaggacgggtgggagagacctgctgctagaggacgagggtcgatgagatgcatgattcctatgcttctcttgagacagccatgatgggaacacgattcatatgctttagttatctatttcaactgatccatggttatagttgtacactgtatgggctaacttcttcaaattcggcttttttttcctgaagtgacgagagatcttagttatataggagtaaatgcgccttttggcgagtacaatttaaagctttattctttgctgatcaaaaaaaaaaaaaaaaaaaaaaaaaaaaaaaaaaaaaaaaaaaaaaaycaaaaaaaaaaaaaaaaaagtttatcgataccgccaacctcaagggggggcccgg

SEQ ID NO: 8765 - protein, 97 aa, Triticum aestivum
  misc_feature (1)..(97): Ceres Seq. ID no. 15219825
MAGRRGTGGGQPRPQECGGEVGWWLGELQQGASRCRLGRRRWAQIFGGTRRMRGNLLQWTTKKGSSTPPQRTKMTYHAGGEVFSGSGFEGGGSSRSA

SEQ ID NO: 8766 - protein, 67 aa, Triticum aestivum
  misc_feature (1)..(67): Ceres Seq. ID no. 15219826
MPEAKCSAAADLKVAAVADRLRKRRRSTVGSTCWWWTSGLTRCTVPMVAAGLIGFVGGGGRVGETCC

SEQ ID NO: 8767 - protein, 57 aa, Triticum aestivum
  misc_feature (1)..(57): Ceres Seq. ID no. 15219827
LSARRRRAAARSHPAAAALPWRTARVLDRTDVGRSARHCVVALAYCTHHQAAITAGI

SEQ ID NO: 8768 - DNA, 1336 bp, Triticum aestivum
  misc_feature (1)..(1336): Ceres Seq. ID no. 13656613
atattttagcccgtatgtcccatccatcccatcatgcgccgccacccactcaaatctctcgggatccattccccaacccaagaagcctctgaccccctcctggttttcagcgcagccgcacctgatcccctctcctccctccatggagtcgtcatagccggcgaacccagccaccaggatcggcctcctccctgtccttcctcctccttcccgaggtttcttctcctctaacctctctctccctcccgttcctctcgcaggagctcgccgccgctgccgtggatttggaggagcgccgccatcgagcttagtccgcggccaccgttgcccggatccagcaatggccgacctgtttcacacgtttctctgcccgccggacctccctgcgtgctgctcccgtcccaggccgccaagccacgccatggatgccaccaccaggaccttcgcctgtgctgccgccatggattggatttggccggagcggctcatccgcctcacctcccgtcctctgctaccttcctcgctcggatccgagccgtcccggagtcccctcgccggagtccttctccatgacgctaggctgcactgcctccgccttggtgcacctttcccctgccgcttcctgctcatggccgcctccaacctctccaacggcgcctcgacctcgccaccacgtcgttgctccggccaactccggcaagccgccggcgatctggccacccaggacgcccctgcctccttcctcgttgtcgctgagttcccctgcttcgtgcctctgctcgcaccgctgccagatcgagcgagcgaggagagcgctcacgttgacccttccccgattggaccaatgcagaccgacccagcgcgcctcctcccgtgccagatcgcagcccaaccggtccacctcaccatcgactgggccttggccttggttggatccggtaacgtcgcgtttgtgaggacccgttctactatgtccgtttgtcttcttcatgaactcgttcttcttccttgcgggatttcagcttgcaggtgccgacgataccatgcaggtgacgcaaccaagctcaaggaggagctctttgaagatcttgtcctttgtgttgtttcgttctagtcgatcagtaatggagcccagttggggtcgatcggggatctgtgtagcatttggggtagtcttcttttattttggctccgtagtcgggccttgattgtaactggttgatgtaatgctttattcatgtattgtgtgaagtggcgattgtaagccaactatgtatctctttcccttatgtattacatgggttgtgtgaagcacaataaagtgggaacgggaggg

SEQ ID NO: 8769 - protein, 257 aa, Triticum aestivum
  misc_feature (1)..(257): Ceres Seq. ID no. 15219836
MADLFHTFLCPPDLPACCSRPRPPSHAMDATTRTFACAAAMDWIWPERLIRLTSRPLLPSSLGSEPSRSPLAGVLLHDARLHCLRLGAPFPCRFLLMAASNLSNGASTSPPRRCSGQLRQAAGDLATQDAPASFLVVAEFPCFVPLLAPLPDRASEESAHVDPSPIGPMQTDPARLLPCQIAAQPVHLTIDWALALVGSGNVAFVRTRSTMSVCLLHELVLLPCGISACRCRRYHAGDATKLKEELFEDLVLCVVSF

SEQ ID NO: 8770 - protein, 230 aa, Triticum aestivum
  misc_feature (1)..(230): Ceres Seq. ID no. 15219837
MDATTRTFACAAAMDWIWPERLIRLTSRPLLPSSLGSEPSRSPLAGVLLHDARLHCLRLGAPFPCRFLLMAASNLSNGASTSPPRRCSGQLRQAAGDLATQDAPASFLVVAEFPCFVPLLAPLPDRASEESAHVDPSPIGPMQTDPARLLPCQIAAQPVHLTIDWALALVGSGNVAFVRTRSTMSVCLLHELVLLPCGISACRCRRYHAGDATKLKEELFEDLVLCVVSF

SEQ ID NO: 8771 - protein, 217 aa, Triticum aestivum
  misc_feature (1)..(217): Ceres Seq. ID no. 15219838
MDWIWPERLIRLTSRPLLPSSLGSEPSRSPLAGVLLHDARLHCLRLGAPFPCRFLLMAASNLSNGASTSPPRRCSGQLRQAAGDLATQDAPASFLVVAEFPCFVPLLAPLPDRASEESAHVDPSPIGPMQTDPARLLPCQIAAQPVHLTIDWALALVGSGNVAFVRTRSTMSVCLLHELVLLPCGISACRCRRYHAGDATKLKEELFEDLVLCVVSF

SEQ ID NO: 8772 - DNA, 1005 bp, Triticum aestivum
  misc_feature (1)..(1005): Ceres Seq. ID no. 13661236
aaccctagaccaactcccttcttttcctcaccccgccgccaaaccagctccaccttgggatcgtccccgcaatcacctgcacactcacttctctcctcgttttcagtcaccacccagttcaccccagactccagatccattcatctgaacggctggatcgtaatccaacgtccaagaggtgccccatgcagctcccgcagccatagcctcctcgatccgatctggatcgggagaggagcacctgtcctgctcctcgtcgcctcgttgcccctctccatggcctcctctgccgcccttgttgcgagtcgcccggattcgtcagaccccgcgtcgtccccgtcgtcatgtcgccggcataatccggtgatccaggccagcgccgccgcttggagctcctacgccctgccgtactccgccatgattggcctcgtcaccacgctgctcccgcgacaaccagccccaccagcggcgcgctgccttgtcgccgccggcaagcccctcgggaagctgctcctcgctggccttccctgcacgtccgccgccgcaagttccgtcaccgctccgcgccttgtcgccccttcgcccgtcgtcggagctctattccagcgccgcgcagctcctctgttctgttcgagcaggcaacgagcagatccattcgcgttgaccaagcgaagcaagcgccaggcccagtctgcttctttttgccacggcccagcgcacccctcctcacccagccggccttcttccactgaactgggccttagcccaatgtgagccaccccagtgccccacctttttctttctcttgttgggccaggaagtttcggcctagtgtagtatttttttcagatctgcgatttttgcctattattccagagacaacaggttgcagaaaacaccctagactccatgcatttaataactcacaatctatgcaacagatgtaaaaacttcaaatatgaaatatgcttagtttttcatctagtttcataatatgtcattttc

SEQ ID NO: 8773 - protein, 257 aa, Triticum aestivum
  misc_feature (1)..(257): Ceres Seq. ID no. 13661237
NPRPTPFFSSPRRQTSSTLGSSPQSPAHSLLSSFSVTTQFTPDSRSIHLNGWIVIQRPRGAPCSSRSHSLLDPIWIGRGAPVLLLVASLPLSMASSAALVASRPDSSDPASSPSSCRRHNPVIQASAAAWSSYALPYSAMIGLVTTLLPRQPAPPAARCLVAAGKPLGKLLLAGLPCTSAAASSVTAPRLVAPSPVVGALFQRRAAPLFCSSRQRADPFALTKRSKRQAQSASFCHGPAHPSSPSRPSSTELGLSPM

SEQ ID NO: 8774 - protein, 165 aa, Triticum aestivum
  misc_feature (1)..(165): Ceres Seq. ID no. 13661238
MASSAALVASRPDSSDPASSPSSCRRHNPVIQASAAAWSSYALPYSAMIGLVTTLLPRQPAPPAARCLVAAGKPLGKLLLAGLPCTSAAASSVTAPRLVAPSPVVGALFQRRAAPLFCSSRQRADPFALTKRSKRQAQSASFCHGPAHPSSPSRPSSTELGLSPM

SEQ ID NO: 8775 - DNA, 854 bp, Triticum aestivum
  misc_feature (1)..(854): Ceres Seq. ID no. 13661675
atgtttgtgttcaccaatttcccaaaagtattatgtgctgcacatattcttatttcttttgattaatttagagcaaggtaggtgtggaagttgccgattcaaggctcaactcgagcaaaacttgatttcttgattgttttgtcgatgcatctgagactgacttacttctctacccagttctgctctgtaattttagaatatatgttgtcatgtgcttgcttcagctttcggtgttggcttttctatctaatgttttcttcttgcttttggaatagctgcatatgtttccaaatactaaatgttctcttcttggtttttgaagaagccttttgaccttcttattatgcatgcatgttatgatactgaggttatcagcgttctcctgcaaactgaattaattcctctgtgcttgcgtaccatggagatgggcagtgagctataaaaaatgtatgtagctaaccatctcaatcaattattttatccttgactttcctctacaggatgatgactatctaatggtgattccctattcccacattttctgctgcaagctctaaagctgcccctgcaatttaccatcacaagacatgtctgggcagcaagtctcctgtgacgcttacttttaattcgtcgttacgattgtttgatggtttgcttgttccaacctcgatatcatggtttgcttgttccaacctcgatatctgcctttagattcctgttgttgtctttgtagtggaaggtaccacctggtggtatgttgttattttcactttgttctgaacaaggcatgtatagatttcagattttagttcctatcactctgtcataaaaactaatgtatggtcctgtgtttt

SEQ ID NO: 8776 - protein, 62 aa, Triticum aestivum
  misc_feature (1)..(62): Ceres Seq. ID no. 13661676
MHLRLTYFSTQFCSVILEYMLSCACFSFRCWLFYLMFSSCFWNSCICFQILNVLFLVFEEAF

SEQ ID NO: 8777 - protein, 47 aa, Triticum aestivum
  misc_feature (1)..(47): Ceres Seq. ID no. 13661677
MFSSWFLKKPFDLLIMHACYDTEVISVLLQTELIPLCLRTMEMGSEL

SEQ ID NO: 8778 - protein, 44 aa, Triticum aestivum
  misc_feature (1)..(44): Ceres Seq. ID no. 13661678
MVCLFQPRYLPLDSCCCLCSGRYHLVVCCYFHFVLNKACIDFRF

SEQ ID NO: 8779 - DNA, 1663 bp, Triticum aestivum
  misc_feature (1)..(1663): Ceres Seq. ID no. 14303317
tgaaacccagtccactcacgatgccagatctcggcgagtcacccattccaccccctccgctctcgcccccacagccggcgacctcgtctcgcaccgccgcctcctctcatcccctccccagctcccctccactcatccgacggcggctagatgtgcacacaaccggcgaccaacatcacacaaaggtcgccaccgccggcggtggaaggacagtcttctcccgctgctagccgcagcgtccgcctcgccctgatcctcgccctcctcgaccgccgctcgctctcctcggaagcacctcgccgcctccctgcccatgccgtgttcactggctgccctgctcgcgccgacctcgccaatctcgcggacgcgcttggcagtgctcgacttgtcctcgccgccgccagcggcgacgggtccttcccgtgcctctaccgcctcgtggccgagtcctcctctccccaaatcgacacccgcccctttgtcgagcctgccgtgcatgccatatgagcaggatggtgtacaccggcttcacagacatgtggtcgtcgaggcttcggatgaggtcaacgcggatgagaacagtccatagagccgtaccaggtagaacaagctgttccacgcatggggtctgattacaatattttcggagatgcataatatgccaaacacttctaaaggtgcctcgtccatgggtgcatgatagtggaaaaacatctgtaaattgtgcaggatcctatagagcaaatgggcatcatcgacgtgcagtacacgctctcttaggcagataagtaacctcagacaagttattttgtgaagatcggtggttcatggtctgaaagttttgtttttctctcgaaattttgtacttagataataccttaaatgctttttactgcttgatcacataatacatgtccgtgcaagaaaggagttgttaactgaaacaataatgttaatttttgttgttaacttaaacaataatgttaatttatgttaactacaaactgtcttggacattggttttttcaaattaactctgtgttgaactggttcttcttattgtgtgctgcagcccagcaatctgttcatgccaaatgattgagtcctggtgaggttcattgctagacatgcacggtctccgcaggcaaggaacacataaaagtaaatcagcgtgttatcagaaactcatgagcatgaaagagaaatttggatcatgtgcgaacatgggtagagagcagatcgaggagaacttgaagattaaaggcaatgaaaggtttcgtaaaatggcagcgggtagagttcttgtcctgcacaaaggaagccgcgccggcacccgtggatcgctggaagcctcaccgacacccatggcttgctggtagccgtggcggcaccaggggcaaagtttgaagaaacaggcctcgcacacctgatcggacggcaaactttgaagaaacagttcaaatccacatgatccgaacacaaacctggaagcgtggagaatcaggccttgactaccccgctcgaaagataggatttgaaaattatttgttgtatataggaagagcaaaaatattagattaaactgttgtttatggaagcttcttgtgacggaattttctgatatgattccatatgatttgatttgattggtgtcgtaaattgc

SEQ ID NO: 8780 - protein, 118 aa, Triticum aestivum
  misc_feature (1)..(118): Ceres Seq. ID no. 14303318
MCTQPATNITQRSPPPAVEGQSSPAASRSVRLALILALLDRRSLSSEAPRRLPAHAVFTGCPARADLANLADALGSARLVLAAASGDGSFPCLYRLVAESSSPQIDTRPFVEPAVHAI

SEQ ID NO: 8781 - protein, 91 aa, Triticum aestivum
  misc_feature (1)..(91): Ceres Seq. ID no. 14303319
MPCSLAALLAPTSPISRTRLAVLDLSSPPPAATGPSRASTASWPSPPLPKSTPAPLSSLPCMPYEQDGVHRLHRHVVVEASDEVNADENSP

SEQ ID NO: 8782 - protein, 83 aa, Triticum aestivum
  misc_feature (1)..(83): Ceres Seq. ID no. 14303320
MHGLRRQGTHKSKSACYQKLMSMKEKFGSCANMGREQIEENLKIKGNERFRKMAAGRVLVLHKGSRAGTRGSLEASPTPMACW

SEQ ID NO: 8783 - DNA, 1196 bp, Triticum aestivum
  misc_feature (1)..(1196): Ceres Seq. ID no. 15225407
atacttcgattcatttgtctctctgatggttgtctctctcgttcctttacaatcaacttgtaacacgttatcagcactgctcgcgagagcgattccgatgagaagaagcggaagaacaggcaaaaggtgagaagaaaaatgcctggtttcctgtcttttttcttcttcgcctggctcgcgacgccagccgtcgccgccgcttcatcgcacgcaactgtcgccacggtgtgggcggacgtcgccgcttccaccgtcgtgtgcgcgaccttcgccgtttccggcgtggaggtcgaaaccagcgccaccaggatcttcgtcgccaccaccgaaacggcgtggggccgtcgaaccagcctgtgcagccacctgcgcatctgcagcccgatgtgcccgcctggcttctcgccggtccggcagcaccaaggctcgaggatgacccggcgctggccgcgccgccgccgccgttttagtgctcggtacacggctgggtcgtatgccccctgcatcagtacaacttggacgtcaggaccgagccggtcgtggaggaagccgcgccaccgctgctgccatctccgaccccgcggtcgtcgaggtcgccgcccgcgacgcgctggcctctggctcctccaaccacggggttattgatgccgaagcaccgcgtctaccgtccctgacgccggccaccctctccagcccgccgtcggcttcgccttcaagcggccgcggccgaggccgccgtgccggcgcgtggagcccggccgcgcttgggctcgcgaaaggcgtctccaacagcgtcgcgccgggcactccacttcccggaggatcctccgacgaggacaggcgcggtgggagctcctcccgtcgcatgtgatgcggctatggtgatgtctgtctcggtgctatcgggagtttgaggatgaatcgctgggatttttttgtccttcggttggctctccttatccactcttttgactagcaccggactgccctacgtggcctggagcccatgtgttgtcgctgggcacccatgtgctgccgacagtaggcatcaacaggatttctttatttgctacttgcttgatcgatgcattagtactagttcagtatgtgagcaaataacactaattcaagcagtagttttattcctgtttagattgttaaattcagtacaactattttagtattgttttctgtcg

SEQ ID NO: 8784 - protein, 168 aa, Triticum aestivum
  misc_feature (1)..(168): Ceres Seq. ID no. 15225408
MPGFLSFFFFAWLATPAVAAASSHATVATVWADVAASTVVCATFAVSGVEVETSATRIFVATTETAWGRRTSLCSHLRICSPMCPPGFSPVRQHQGSRMTRRWPRRRRRFSARYTAGSYAPCISTTWTSGPSRSWRKPRHRCCHLRPRGRRGRRPRRAGLWLLQPRGY

SEQ ID NO: 8785 - protein, 125 aa, Triticum aestivum
  misc_feature (1)..(125): Ceres Seq. ID no. 15225409
MPPASVQLGRQDRAGRGGSRATAAAISDPAVVEVAARDALASGSSNHGVIDAEAPRLPSLTPATLSSPPSASPSSGRGRGRRAGAWSPAALGLAKGVSNSVAPGTPLPGGSSDEDRRGGSSSRRM

SEQ ID NO: 8786 - protein, 86 aa, Triticum aestivum
  misc_feature (1)..(86): Ceres Seq. ID no. 15225410
MCPPGFSPVRQHQGSRMTRRWPRRRRRFSARYTAGSYAPCISTTWTSGPSRSWRKPRHRCCHLRPRGRRGRRPRRAGLWLLQPRGY

SEQ ID NO: 8787 - DNA, 504 bp, Triticum aestivum
  misc_feature (1)..(504): Ceres Seq. ID no. 11421033
acacgcaaaatcctcctcgcgtcacgcgtgaacccagccggatccccaaacctccttccggcccgacgccggcgccgacgggggaccccctccgcctctcacgcgcgccgccgcctccgccgtcccgtcctccctccctcgccggggcatcgcgttccaccccgccggcgaccaggaacacggcactctgaagctcctgagctagcgtaggaggggcaaaaccatccagctgaagaatgaaaacacatgagcgtgctgccaacttggctcttgctggtttgagcttggcaccgctcgtgatcaatgttaacccaaatttgaatgtgatactgacagcatgtcttactgtctatgtgggctgttaccgttccgtcaagtcaactccacccgctgagacaatgtccaaagagcatgctatgcgtttccctttggttgggagtgctatgcttttgtcgctattccttctgttcaagtttctctccaaggacctggtcaatactgttc

SEQ ID NO: 8788 - protein, 89 aa, Triticum aestivum
  misc_feature (1)..(89): Ceres Seq. ID no. 11421034
MKTHERAANLALAGLSLAPLVINVNPNLNVILTACLTVYVGCYRSVKSTPPAETMSKEHAMRFPLVGSAMLLSLFLLFKFLSKDLVNTV

SEQ ID NO: 8789 - protein, 69 aa, Triticum aestivum
  misc_feature (1)..(69): Ceres Seq. ID no. 11421035
TRKILLASRVNPAGSPNLLPARRRRRRGTPSASHARRRLRRPVLPPSPGHRVPPRRRPGTRHSEAPELA

SEQ ID NO: 8790 - protein, 62 aa, Triticum aestivum
  misc_feature (1)..(62): Ceres Seq. ID no. 11421036
TQNPPRVTREPSRIPKPPSGPTPAPTGDPLRLSRAPPPPPSRPPSLAGASRSTPPATRNTAL

SEQ ID NO: 8791 - DNA, 1515 bp, Triticum aestivum
  misc_feature (1)..(1515): Ceres Seq. ID no. 12465151
accgatcattttggcgggagagcagcagttggccgcctccactctccactttcccgcgcagagtaaatcagcaatggacggcggctccggctcctccttccaggccgtagcggcggctgccgccatggagatggaggagtacctcaactggaagaagaacgcgccggtgctctacgacctcgtcatgtcccacccgctcgagtggccctcgctcaccgtccagtggctcccctcggggtcgccggcctccgcccgctcccaccgcctcgtcctcggcacccacgcctccgacgactccgccaaccacctcatgctcgtcgacgccgtgctcccgctcccgccgcgcctggccgccgcggccgccgccgaggaccgcgccgtcccggccccgtccgtgtccatcggccgctcggcgccgcatcagggcgaggtcaaccgcgcccggtgcatgccgcagcggccgtacaccgtggccaccaagacctgcgtcgatgaggtgcacgtgtaccacctcggggaggacggtgagaagggcggcgcggatgtcgtgctcaggggccatggcgcggaggggtatgggctggcgtggagcgccacgaaggaggggttcctgctgagcggctcgtatgataagaagatttgcctgtgggatctcaaggccgggaatggagccccggttctggacgcgcagcaggtgtttgaggctcatgaggatgttgttgaagatgttgcttggcaccttaaggatgaaaacctatttggatctgttggcgatgactgcaagttcatgatgtgggacctgcgtacgaacaaaccagaacaatctatagttgcgcaccaaaaggaagttaactctctgtccttcaatccatttaatgaatggatcttggctacagcatctggtgatggaactattaagctgtttgaccagcgaaaactatctagaagcttgcatgctttcgacaaccatgagggcgaggttttccaggttgagtggaatccaaacatggagactgtattagcatcccatgctgcagacaaaagggtgatgatatgggacgttaacaggatcggcgaggagcaggcggacgaggacgcgggcgacgggccaccggagctgcttttcgtccacggcgggcacacggccaagatctcggagctgtcgtggaaccccagcgagaagtgggtggtggccagcgtggcggaggacaacgtgctgcagatctgggagatggccgagagcatatacagcgacgacaacagcaacaacgccaacagcgcctcgtgcctgtccacataagaagacgccgccaaccaacttcttccctgatgtgtggacgatggccgatggggacatggctcgttcgtagtctttgggtggacgcgtcgcgtgcggtttacttgtagtgcctcgtgcggtttcgtcgcttaattagcagctgctgctatcgtttggcgcctagatcctgtagacatggatggatggagaagtgactctggaatatttgtgcgtcc

SEQ ID NO: 8792 - protein, 432 aa, Triticum aestivum
  misc_feature (1)..(432): Ceres Seq. ID no. 12465152
PIILAGEQQLAASTLHFPAQSKSAMDGGSGSSFQAVAAAAAMEMEEYLNWKKNAPVLYDLVMSHPLEWPSLTVQWLPSGSPASARSHRLVLGTHASDDSANHLMLVDAVLPLPPRLAAAAAAEDRAVPAPSVSIGRSAPHQGEVNRARCMPQRPYTVATKTCVDEVHVYHLGEDGEKGGADVVLRGHGAEGYGLAWSATKEGFLLSGSYDKKICLWDLKAGNGAPVLDAQQVFEAHEDVVEDVAWHLKDENLFGSVGDDCKFMMWDLRTNKPEQSIVAHQKEVNSLSFNPFNEWILATASGDGTIKLFDQRKLSRSLHAFDNHEGEVFQVEWNPNMETVLASHAADKRVMIWDVNRIGEEQADEDAGDGPPELLFVHGGHTAKISELSWNPSEKWVVASVAEDNVLQIWEMAESIYSDDNSNNANSASCLST

SEQ ID NO: 8793 - protein, 408 aa, Triticum aestivum
  misc_feature (1)..(408): Ceres Seq. ID no. 12465153
MDGGSGSSFQAVAAAAAMEMEEYLNWKKNAPVLYDLVMSHPLEWPSLTVQWLPSGSPASARSHRLVLGTHASDDSANHLMLVDAVLPLPPRLAAAAAAEDRAVPAPSVSIGRSAPHQGEVNRARCMPQRPYTVATKTCVDEVHVYHLGEDGEKGGADVVLRGHGAEGYGLAWSATKEGFLLSGSYDKKICLWDLKAGNGAPVLDAQQVFEAHEDVVEDVAWHLKDENLFGSVGDDCKFMMWDLRTNKPEQSIVAHQKEVNSLSFNPFNEWILATASGDGTIKLFDQRKLSRSLHAFDNHEGEVFQVEWNPNMETVLASHAADKRVMIWDVNRIGEEQADEDAGDGPPELLFVHGGHTAKISELSWNPSEKWVVASVAEDNVLQIWEMAESIYSDDNSNNANSASCLST

SEQ ID NO: 8794 - protein, 391 aa, Triticum aestivum
  misc_feature (1)..(391): Ceres Seq. ID no. 12465154
MEMEEYLNWKKNAPVLYDLVMSHPLEWPSLTVQWLPSGSPASARSHRLVLGTHASDDSANHLMLVDAVLPLPPRLAAAAAAEDRAVPAPSVSIGRSAPHQGEVNRARCMPQRPYTVATKTCVDEVHVYHLGEDGEKGGADVVLRGHGAEGYGLAWSATKEGFLLSGSYDKKICLWDLKAGNGAPVLDAQQVFEAHEDVVEDVAWHLKDENLFGSVGDDCKFMMWDLRTNKPEQSIVAHQKEVNSLSFNPFNEWILATASGDGTIKLFDQRKLSRSLHAFDNHEGEVFQVEWNPNMETVLASHAADKRVMIWDVNRIGEEQADEDAGDGPPELLFVHGGHTAKISELSWNPSEKWVVASVAEDNVLQIWEMAESIYSDDNSNNANSASCLST

SEQ ID NO: 8795 - protein, 371 aa, Triticum aestivum
  misc_feature (1)..(371): Ceres Seq. ID no. 16625332
MSHPLEWPSLTVQWLPSGSPASARSHRLVLGTHASDDSANHLMLVDAVLPLPPRLAAAAAAEDRAVPAPSVSIGRSAPHQGEVNRARCMPQRPYTVATKTCVDEVHVYHLGEDGEKGGADVVLRGHGAEGYGLAWSATKEGFLLSGSYDKKICLWDLKAGNGAPVLDAQQVFEAHEDVVEDVAWHLKDENLFGSVGDDCKFMMWDLRTNKPEQSIVAHQKEVNSLSFNPFNEWILATASGDGTIKLFDQRKLSRSLHAFDNHEGEVFQVEWNPNMETVLASHAADKRVMIWDVNRIGEEQADEDAGDGPPELLFVHGGHTAKISELSWNPSEKWVVASVAEDNVLQIWEMAESIYSDDNSNNANSASCLST

SEQ ID NO: 8796 - DNA, 1027 bp, Triticum aestivum
  misc_feature (1)..(1027): Ceres Seq. ID no. 12564952
gtacaggtaacatcaaattccctcttcgtagtctggaggcgggagattcggaagccatggcggaggagcagttcctggccgcagctgtgggcgccgccaagagcgccggcgagattatccgcaagagcttttacctaaccaagaatgtggagcacaagggccaggtggatttggtgacggagacggacaaggcctgcgaggatctcatcttcaaccacctccggatgctctacccggaccacaagttcatcggcgaggagacgtctgcagccctcggttccaccgatgacctcacctacgaccccacctggatagtcgaccccctcgatggcaccaccaatttcgttcatggctttccttttgtgtgcgtctcgattggcctcaccattgggaagattcccaccgttgcagttgtgtacaaccccatcatgaatgagcttttcacagctgttcgtggaaaaggtgcttttctcaatggttctccaattaaaacatcgcctcaaaatgagttggtgaaggctcttatggtgacagaggtagggaccaaaagagacaagtccactttggatgatacaaccaacagaattaataagttactattcaagattagatctatacgtatgtgtggctctttggctctaaacatgtgtggagttgcttgtggtaggctagatttgtgttatgagatcggttttggtggcccctgggatgtggctgctggagctttgattctaaaggaagctgggggttttgtttttgatccgagcggtgatgagtttgatctgatggcgcaaagaatggcaggatcaaatggccacctcaaggatcagttcatcaaagcattgggagatgcaagctgaataacttatttctcttttcaagtagaatgaaagaatgtaagatggccccaccaataagtaattaagggctaatttttgtgtagttttaagtggacactatatgcatattttgcaaacatggcggatgtaatgacatgtggatatattgctcgttttattgaccatgc

SEQ ID NO: 8797 - protein, 285 aa, Triticum aestivum
  misc_feature (1)..(285): Ceres Seq. ID no. 12564953
TGNIKFPLRSLEAGDSEAMAEEQFLAAAVGAAKSAGEIIRKSFYLTKNVEHKGQVDLVTETDKACEDLIFNHLRMLYPDHKFIGEETSAALGSTDDLTYDPTWIVDPLDGTTNFVHGFPFVCVSIGLTIGKIPTVAVVYNPIMNELFTAVRGKGAFLNGSPIKTSPQNELVKALMVTEVGTKRDKSTLDDTTNRINKLLFKIRSIRMCGSLALNMCGVACGRLDLCYEIGFGGPWDVAAGALILKEAGGFVFDPSGDEFDLMAQRMAGSNGHLKDQFIKALGDAS

SEQ ID NO: 8798 - protein, 267 aa, Triticum aestivum
  misc_feature (1)..(267): Ceres Seq. ID no. 12564954
MAEEQFLAAAVGAAKSAGEIIRKSFYLTKNVEHKGQVDLVTETDKACEDLIFNHLRMLYPDHKFIGEETSAALGSTDDLTYDPTWIVDPLDGTTNFVHGFPFVCVSIGLTIGKIPTVAVVYNPIMNELFTAVRGKGAFLNGSPIKTSPQNELVKALMVTEVGTKRDKSTLDDTTNRINKLLFKIRSIRMCGSLALNMCGVACGRLDLCYEIGFGGPWDVAAGALILKEAGGFVFDPSGDEFDLMAQRMAGSNGHLKDQFIKALGDAS

SEQ ID NO: 8799 - protein, 211 aa, Triticum aestivum
  misc_feature (1)..(211): Ceres Seq. ID no. 12564955
MLYPDHKFIGEETSAALGSTDDLTYDPTWIVDPLDGTTNFVHGFPFVCVSIGLTIGKIPTVAVVYNPIMNELFTAVRGKGAFLNGSPIKTSPQNELVKALMVTEVGTKRDKSTLDDTTNRINKLLFKIRSIRMCGSLALNMCGVACGRLDLCYEIGFGGPWDVAAGALILKEAGGFVFDPSGDEFDLMAQRMAGSNGHLKDQFIKALGDAS

SEQ ID NO: 8800 - protein, 267 aa, Triticum aestivum; identical to SEQ ID NO: 8798
  misc_feature (1)..(267): Ceres Seq. ID no. 16625339

SEQ ID NO: 8801 - DNA, 628 bp, Triticum aestivum
  misc_feature (1)..(628): Ceres Seq. ID no. 12584270
aaaaacattcccagacacccaagcacccacacaaagaacacaacagcacatacacacagcaagcagaagaagcttttttttttcaaggagcggcgaggatgcagacggccaaggtgaaggtgaaggacgcggtgagctcggccaaggagaaggcgaaggagggcacggccaaggcgcagggcaagacgggcaaggccacggccaccacgcacggcgagaaggagatggccaaggaggagacgcgcgccaacaaggcccaggccaaggccgagatgcaccaggagaaggccgagcaccgcgccgaggccgcggccgggcgccacggcgccacgcacgtgcccctcaccgggccgcatggccaccaccgtcccgtcggcgcggctcctgccgccgccgaccctgcgtacccgggcaccggcgcgtacccgaccacggacaagtacgtgtagacgtgagatgatcgagggacaggagctggcagctagtgttttttatgtgtggctagttatcctgcccgtgtgttgtaggtggcgcgcgcgtgtatgctgtgcccacatgcgtgtgcccgaataaaatgtatcggtcagttgtaaaatgcacctttgatgtactagtaatttgtgactgg

SEQ ID NO: 8802 - protein, 152 aa, Triticum aestivum
  misc_feature (1)..(152): Ceres Seq. ID no. 12584271
KTFPDTQAPTQRTQQHIHTASRRSFFFSRSGEDADGQGEGEGRGELGQGEGEGGHGQGAGQDGQGHGHHARREGDGQGGDARQQGPGQGRDAPGEGRAPRRGRGRAPRRHARAPHRAAWPPPSRRRGSCRRRPCVPGHRRVPDHGQVRVDVR

SEQ ID NO: 8803 - protein, 148 aa, Triticum aestivum
  misc_feature (1)..(148): Ceres Seq. ID no. 12584272
KHSQTPKHPHKEHNSTYTQQAEEAFFFQGAARMQTAKVKVKDAVSSAKEKAKEGTAKAQGKTGKATATTHGEKEMAKEETRANKAQAKAEMHQEKAEHRAEAAAGRHGATHVPLTGPHGHHRPVGAAPAAADPAYPGTGAYPTTDKYV

SEQ ID NO: 8804 - protein, 116 aa, Triticum aestivum
  misc_feature (1)..(116): Ceres Seq. ID no. 12584273
MQTAKVKVKDAVSSAKEKAKEGTAKAQGKTGKATATTHGEKEMAKEETRANKAQAKAEMHQEKAEHRAEAAAGRHGATHVPLTGPHGHHRPVGAAPAAADPAYPGTGAYPTTDKYV

SEQ ID NO: 8805 - DNA, 692 bp, Triticum aestivum
  misc_feature (1)..(692): Ceres Seq. ID no. 12584771
gcactcacactagttcactctcgcatcaactaacctcgctctcgtgcgcaggatgcggagcggtgtcagcgcgcgccttctgccgcaggcggtggccatcgccatcgccgtggccgtcgcctgctgcatggccgccgcaccgtcgtcggcgcaggggacgacgacgcccgcggacgccagcggcgcggtgccgtcgtgcgcgtcgaagctcgtgacgtgcgcgggctacctgaacaccaccgacacgccgccggagtcgtgctgcgacccgctcaaggaggcggcgaccacgcaggcggcgtgcatgtgcgccatcctcatgaacaaggccgcgctgcaggcgttcggcgtggcgccggagcagggggtgctcctcgccaagcgctgcggcgtcaccaccgacgcgtccacctgcgccaagtacaccgccggcgccggttccgatgctgcaactgcaggtagcacagccgcttcttcagcatccacgggaactgctgcttctacagttgccaagccaacggcaagcggaggaaccacgcatcccctgagcttgatcgccgcatcttcatttgtaggcttcagtttcatctggtggacgatcatggcgtagtaagagatgccaatgagtatgaactgttatgtaaaaaaaaactgtatcgtctcaataaacataactatctggttgtcacttc
